(19) United States
(12) Patent Application Publication
(10) Pub. No.: US 2008/0256663 A1
(43) Pub. Date: Oct. 16, 2008

(54) Nucleic acid molecules and other molecules associated with plants

(76) Inventors: Scott E. Andersen, St. Louis, MO (US); Dane K. Fisher, O'Fallon, MO (US)

Correspondence Address: ARNOLD & PORTER, LLP, 555 TWELFTH STREET, N.W., ATTN: IP DOCKETING, WASHINGTON, DC, 20004, US

(21) Appl. No.: 11/329,388

(22) Filed: Jan. 11, 2006

Related U.S. Application Data
(63) Continuation of application No. 09/553,094, filed on Apr. 18, 2000, now abandoned.
Application No. 09/553,094 is a continuation-in-part of application No. 09/237,183, filed on Jan. 26, 1999.
Application No. 09/237,183 is a continuation-in-part of application No. 09/198,779, filed on Nov. 24, 1998, now abandoned.
Application No. 09/237,183 is a continuation-in-part of application No. 09/227,586, filed on Jan. 8, 1999, now abandoned.
Application No. 09/237,183 is a continuation-in-part of application No. 09/229,413, filed on Jan. 12, 1999, now abandoned.
Application No. 09/237,183 is a continuation-in-part of application No. 09/233,218, filed on Jan. 20, 1999, now abandoned.
Application No. 09/233,218 is a continuation-in-part of application No. 09/198,779, filed on Nov. 24, 1998, now abandoned.
Application No. 09/233,218 is a continuation-in-part of application No. 09/227,586, filed on Jan. 8, 1999, now abandoned.
Application No. 09/233,218 is a continuation-in-part of application No. 09/229,413, filed on Jan. 12, 1999, now abandoned.
Application No. 09/553,094 is a continuation-in-part of application No. 09/371,146, filed on Aug. 9, 1999, now abandoned.
Application No. 09/371,146 is a continuation-in-part of application No. 09/198,779, filed on Nov. 24, 1998, now abandoned.
Application No. 09/371,146 is a continuation-in-part of application No. 09/227,586, filed on Jan. 8, 1999, now abandoned.
Application No. 09/371,146 is a continuation-in-part of application No. 09/229,413, filed on Jan. 12, 1999, now abandoned.
Application No. 09/371,146 is a continuation-in-part of application No. 09/244,000, filed on Feb. 8, 1999, now abandoned.
Application No. 09/244,000 is a continuation-in-part of application No. 09/198,779, filed on Nov. 24, 1998, now abandoned.
Application No. 09/371,146 is a continuation-in-part of application No. 09/252,974, filed on Feb. 19, 1999, now abandoned.
(60) Provisional application No. 60/067,000, filed on Nov. 24, 1997.
(60) Provisional application No. 60/066,873, filed on Nov. 25, 1997.
(60) Provisional application No. 60/069,472, filed on Dec. 9, 1997.
(60) Provisional application No. 60/074,201, filed on Feb. 10, 1998.
(60) Provisional application No. 60/074,280, filed on Feb. 10, 1998.
(60) Provisional application No. 60/074,281, filed on Feb. 10, 1998.
(60) Provisional application No. 60/074,282, filed on Feb. 10, 1998.
(60) Provisional application No. 60/074,565, filed on Feb. 12, 1998.
(60) Provisional application No. 60/074,566, filed on Feb. 12, 1998.
(60) Provisional application No. 60/074,567, filed on Feb. 12, 1998.
(60) Provisional application No. 60/074,789, filed on Feb. 19, 1998.
(60) Provisional application No. 60/075,459, filed on Feb. 19, 1998.
(60) Provisional application No. 60/075,460, filed on Feb. 19, 1998.
(60) Provisional application No. 60/075,461, filed on Feb. 19, 1998.
(60) Provisional application No. 60/075,462, filed on Feb. 19, 1998.
(60) Provisional application No. 60/075,463, filed on Feb. 19, 1998.
(60) Provisional application No. 60/075,464, filed on Feb. 19, 1998.
(60) Provisional application No. 60/077,229, filed on Mar. 9, 1998.
(60) Provisional application No. 60/077,230, filed on Mar. 9, 1998.
(60) Provisional application No. 60/078,031, filed on Mar. 16, 1998.
(60) Provisional application No. 60/078,368, filed on Mar. 18, 1998.
(60) Provisional application No. 60/080,844, filed on Apr. 7, 1998.
(60) Provisional application No. 60/083,067, filed on Apr. 27, 1998.
(60) Provisional application No. 60/083,386, filed on Apr. 29, 1998.
(60) Provisional application No. 60/083,387, filed on Apr. 29, 1998.
(60) Provisional application No. 60/083,388, filed on Apr. 29, 1998.
(60) Provisional application No. 60/083,389, filed on Apr. 29, 1998.
(60) Provisional application No. 60/084,684, filed on May 8, 1998.
(60) Provisional application No. 60/085,222, filed on May 13, 1998.
(60) Provisional application No. 60/085,223, filed on May 13, 1998.
(60) Provisional application No. 60/085,224, filed on May 13, 1998.
(60) Provisional application No. 60/085,245, filed on May 13, 1998.
(60) Provisional application No. 60/086,183, filed on May 21, 1998.
(60) Provisional application No. 60/086,184, filed on May 21, 1998.
(60) Provisional application No. 60/086,185, filed on May 21, 1998.
(60) Provisional application No. 60/086,186, filed on May 21, 1998.
(60) Provisional application No. 60/086,187, filed on May 21, 1998.
(60) Provisional application No. 60/086,188, filed on May 21, 1998.
(60) Provisional application No. 60/086,339, filed on May 21, 1998.
(60) Provisional application No. 60/089,524, filed on Jun. 16, 1998.
(60) Provisional application No. 60/089,810, filed on Jun. 18, 1998.
(60) Provisional application No. 60/089,814, filed on Jun. 18, 1998.
(60) Provisional application No. 60/091,247, filed on Jun. 30, 1998.
(60) Provisional application No. 60/092,036, filed on Jul. 8, 1998.
(60) Provisional application No. 60/099,667, filed on Sep. 9, 1998.
(60) Provisional application No. 60/099,668, filed on Sep. 9, 1998.
(60) Provisional application No. 60/099,670, filed on Sep. 9, 1998.
(60) Provisional application No. 60/099,697, filed on Sep. 9, 1998.
(60) Provisional application No. 60/100,672, filed on Sep. 16, 1998.
(60) Provisional application No. 60/100,673, filed on Sep. 16, 1998.
(60) Provisional application No. 60/100,674, filed on Sep. 16, 1998.
(60) Provisional application No. 60/101,130, filed on Sep. 21, 1998.
(60) Provisional application No. 60/101,132, filed on Sep. 21, 1998.
(60) Provisional application No. 60/108,996, filed on Nov. 18, 1998.
(60) Provisional application No. 60/109,018, filed on Nov. 19, 1998.
(60) Provisional application No. 60/071,064, filed on Jan. 9, 1998.
(60) Provisional application No. 60/090,170, filed on Jun. 22, 1998.
(60) Provisional application No. 60/092,036, filed on Jul. 8, 1998.
(60) Provisional application No. 60/071,479, filed on Jan. 13, 1998.
(60) Provisional application No. 60/085,533, filed on May 15, 1998.
(60) Provisional application No. 60/089,806, filed on Jun. 18, 1998.
(60) Provisional application No. 60/089,807, filed on Jun. 18, 1998.
(60) Provisional application No. 60/089,808, filed on Jun. 18, 1998.
(60) Provisional application No. 60/089,811, filed on Jun. 18, 1998.
(60) Provisional application No. 60/089,812, filed on Jun. 18, 1998.
(60) Provisional application No. 60/089,813, filed on Jun. 18, 1998.
(60) Provisional application No. 60/091,247, filed on Jun. 30, 1998.
(60) Provisional application No. 60/091,405, filed on Jun. 30, 1998.
(60) Provisional application No. 60/099,697, filed on Sep. 9, 1998.
(60) Provisional application No. 60/100,963, filed on Sep. 17, 1998.
(60) Provisional application No. 60/101,343, filed on Sep. 22, 1998.
(60) Provisional application No. 60/101,344, filed on Sep. 22, 1998.
(60) Provisional application No. 60/101,347, filed on Sep. 22, 1998.
(60) Provisional application No. 60/101,508, filed on Sep. 22, 1998.
(60) Provisional application No. 60/101,707, filed on Sep. 25, 1998.
(60) Provisional application No. 60/104,124, filed on Oct. 13, 1998.
(60) Provisional application No. 60/101,126, filed on Sep. 21, 1998.
(60) Provisional application No. 60/104,127, filed on Oct. 13, 1998.
(60) Provisional application No. 60/104,128, filed on Oct. 13, 1998.
(60) Provisional application No. 60/111,981, filed on Dec. 11, 1998.
(60) Provisional application No. 60/067,000, filed on Nov. 24, 1997.
(60) Provisional application No. 60/066,873, filed on Nov. 25, 1997.
(60) Provisional application No. 60/069,472, filed on Dec. 9, 1997.
(60) Provisional application No. 60/074,201, filed on Feb. 10, 1998.
(60) Provisional application No. 60/074,280, filed on Feb. 10, 1998.
(60) Provisional application No. 60/074,281, filed on Feb. 10, 1998.
(60) Provisional application No. 60/074,282, filed on Feb. 10, 1998.
(60) Provisional application No. 60/074,565, filed on Feb. 12, 1998.
(60) Provisional application No. 60/074,566, filed on Feb. 12, 1998.
(60) Provisional application No. 60/074,567, filed on Feb. 12, 1998.
(60) Provisional application No. 60/074,789, filed on Feb. 19, 1998.
(60) Provisional application No. 60/074,459, filed on Feb. 12, 1998.
(60) Provisional application No. 60/075,460, filed on Feb. 19, 1998.
(60) Provisional application No. 60/075,461, filed on Feb. 19, 1998.
(60) Provisional application No. 60/075,462, filed on Feb. 19, 1998.
(60) Provisional application No. 60/075,463, filed on Feb. 19, 1998.
(60) Provisional application No. 60/075,464, filed on Feb. 19, 1998.
(60) Provisional application No. 60/077,229, filed on Mar. 9, 1998.
(60) Provisional application No. 60/077,230, filed on Mar. 9, 1998.
(60) Provisional application No. 60/077,231, filed on Mar. 9, 1998.
(60) Provisional application No. 60/078,031, filed on Mar. 16, 1998.
(60) Provisional application No. 60/078,368, filed on Mar. 18, 1998.
(60) Provisional application No. 60/080,844, filed on Apr. 7, 1998.
(60) Provisional application No. 60/083,067, filed on Apr. 27, 1998.
(60) Provisional application No. 60/083,386, filed on Apr. 29, 1998.
(60) Provisional application No. 60/083,387, filed on Apr. 29, 1998.
(60) Provisional application No. 60/083,388, filed on Apr. 29, 1998.
(60) Provisional application No. 60/083,389, filed on Apr. 29, 1998.
(60) Provisional application No. 60/084,684, filed on May 8, 1998.
(60) Provisional application No. 60/085,222, filed on May 13, 1998.
(60) Provisional application No. 60/085,223, filed on May 13, 1998.
(60) Provisional application No. 60/085,224, filed on May 13, 1998.
(60) Provisional application No. 60/085,245, filed on May 13, 1998.
(60) Provisional application No. 60/086,183, filed on May 21, 1998.
(60) Provisional application No. 60/086,184, filed on May 21, 1998.
(60) Provisional application No. 60/086,185, filed on May 21, 1998.
(60) Provisional application No. 60/086,186, filed on May 21, 1998.
(60) Provisional application No. 60/086,187, filed on May 21, 1998.
(60) Provisional application No. 60/086,188, filed on May 21, 1998.
(60) Provisional application No. 60/086,339, filed on May 21, 1998.
(60) Provisional application No. 60/089,524, filed on Jun. 16, 1998.
(60) Provisional application No. 60/089,810, filed on Jun. 18, 1998.
(60) Provisional application No. 60/089,814, filed on Jun. 18, 1998.
(60) Provisional application No. 60/091,247, filed on Jun. 30, 1998.
(60) Provisional application No. 60/092,036, filed on Jul. 8, 1998.
(60) Provisional application No. 60/099,667, filed on Sep. 9, 1998.
(60) Provisional application No. 60/099,668, filed on Sep. 9, 1998.
(60) Provisional application No. 60/099,670, filed on Sep. 9, 1998.
(60) Provisional application No. 60/099,697, filed on Sep. 9, 1998.
(60) Provisional application No. 60/100,672, filed on Sep. 16, 1998.
(60) Provisional application No. 60/100,673, filed on Sep. 16, 1998.
(60) Provisional application No. 60/100,674, filed on Sep. 16, 1998.
(60) Provisional application No. 60/101,130, filed on Sep. 21, 1998.
(60) Provisional application No. 60/101,132, filed on Sep. 21, 1998.
(60) Provisional application No. 60/108,996, filed on Nov. 18, 1998.
(60) Provisional application No. 60/109,018, filed on Nov. 19, 1998.
(60) Provisional application No. 60/071,064, filed on Jan. 9, 1998.
(60) Provisional application No. 60/090,170, filed on Jun. 22, 1998.
(60) Provisional application No. 60/092,036, filed on Jul. 8, 1998.
(60) Provisional application No. 60/071,479, filed on Jan. 13, 1998.
(60) Provisional application No. 60/085,533, filed on May 15, 1998.
(60) Provisional application No. 60/089,806, filed on Jun. 18, 1998.
(60) Provisional application No. 60/089,807, filed on Jun. 18, 1998.
(60) Provisional application No. 60/089,808, filed on Jun. 18, 1998.
(60) Provisional application No. 60/089,811, filed on Jun. 18, 1998.
(60) Provisional application No. 60/089,812, filed on Jun. 18, 1998.
(60) Provisional application No. 60/089,813, filed on Jun. 18, 1998.
(60) Provisional application No. 60/091,247, filed on Jun. 30, 1998.
(60) Provisional application No. 60/091,405, filed on Jun. 30, 1998.
(60) Provisional application No. 60/099,697, filed on Sep. 9, 1998.
(60) Provisional application No. 60/100,963, filed on Sep. 17, 1998.
(60) Provisional application No. 60/101,343, filed on Sep. 22, 1998.
(60) Provisional application No. 60/101,344, filed on Sep. 22, 1998.
(60) Provisional application No. 60/101,347, filed on Sep. 22, 1998.
(60) Provisional application No. 60/101,508, filed on Sep. 22, 1998.
(60) Provisional application No. 60/101,707, filed on Sep. 25, 1998.
(60) Provisional application No. 60/104,124, filed on Oct. 13, 1998.
(60) Provisional application No. 60/104,126, filed on Oct. 13, 1998.
(60) Provisional application No. 60/104,127, filed on Oct. 13, 1998.
(60) Provisional application No. 60/104,128, filed on Oct. 13, 1998.
(60) Provisional application No. 60/111,981, filed on Dec. 11, 1998.
(60) Provisional application No. 60/072,027, filed on Jan. 21, 1998.
(60) Provisional application No. 60/072,888, filed on Jan. 27, 1998.
(60) Provisional application No. 60/076,709, filed on Jun. 9, 1998.
(60) Provisional application No. 60/076,912, filed on Mar. 6, 1998.
(60) Provisional application No. 60/078,031, filed on Mar. 16, 1998.
(60) Provisional application No. 60/083,390, filed on Apr. 29, 1998.
(60) Provisional application No. 60/084,684, filed on May 8, 1998.
(60) Provisional application No. 60/085,057, filed on May 12, 1998.
(60) Provisional application No. 60/085,429, filed on May 14, 1998.
(60) Provisional application No. 60/085,245, filed on May 13, 1998.
(60) Provisional application No. 60/085,533, filed on May 15, 1998.
(60) Provisional application No. 60/085,940, filed on May 19, 1998.
(60) Provisional application No. 60/086,339, filed on May 21, 1998.
(60) Provisional application No. 60/086,594, filed on May 22, 1998.
(60) Provisional application No. 60/086,608, filed on May 22, 1998.
(60) Provisional application No. 60/087,422, filed on Jun. 1, 1998.
(60) Provisional application No. 60/087,631, filed on Jun. 2, 1998.
(60) Provisional application No. 60/087,762, filed on Jun. 2, 1998.
(60) Provisional application No. 60/087,972, filed on Jun. 4, 1998.
(60) Provisional application No. 60/087,973, filed on Jun. 4, 1998.
(60) Provisional application No. 60/088,441, filed on Jun. 8, 1998.
(60) Provisional application No. 60/089,627, filed on Jun. 16, 1998.
(60) Provisional application No. 60/089,789, filed on Jun. 18, 1998.
(60) Provisional application No. 60/090,170, filed on Jun. 22, 1998.
(60) Provisional application No. 60/090,856, filed on Jun. 26, 1998.
(60) Provisional application No. 60/090,928, filed on Jun. 26, 1998.
(60) Provisional application No. 60/091,035, filed on Jun. 29, 1998.
(60) Provisional application No. 60/091,247, filed on Jun. 30, 1998.
(60) Provisional application No. 60/091,405, filed on Jun. 30, 1998.
(60) Provisional application No. 60/092,036, filed on Jul. 8, 1998.
(60) Provisional application No. 60/100,963, filed on Sep. 17, 1998.
(60) Provisional application No. 60/110,108, filed on Nov. 25, 1998.
(60) Provisional application No. 60/110,109, filed on Nov. 25, 1998.
(60) Provisional application No. 60/111,033, filed on Dec. 4, 1998.
(60) Provisional application No. 60/111,742, filed on Dec. 10, 1998.
(60) Provisional application No. 60/072,888, filed on Jan. 27, 1998.
(60) Provisional application No. 60/076,709, filed on Jun. 9, 1998.
(60) Provisional application No. 60/076,912, filed on Mar. 6, 1998.
(60) Provisional application No. 60/078,031, filed on Mar. 16, 1998.
(60) Provisional application No. 60/083,390, filed on Apr. 29, 1998.
(60) Provisional application No. 60/084,684, filed on May 8, 1998.
(60) Provisional application No. 60/085,057, filed on May 12, 1998.
(60) Provisional application No. 60/085,429, filed on May 14, 1998.
(60) Provisional application No. 60/085,245, filed on May 13, 1998.
(60) Provisional application No. 60/085,533, filed on May 15, 1998.
(60) Provisional application No. 60/085,940, filed on May 19, 1998.
(60) Provisional application No. 60/086,339, filed on May 21, 1998.
(60) Provisional application No. 60/086,594, filed on May 22, 1998.
(60) Provisional application No. 60/086,608, filed on May 22, 1998.
(60) Provisional application No. 60/087,422, filed on Jun. 1, 1998.
(60) Provisional application No. 60/087,631, filed on Jun. 2, 1998.
(60) Provisional application No. 60/087,762, filed on Jun. 2, 1998.
(60) Provisional application No. 60/087,972, filed on Jun. 4, 1998.
(60) Provisional application No. 60/087,973, filed on Jun. 4, 1998.
(60) Provisional application No. 60/087,441, filed on Jun. 1, 1998.
(60) Provisional application No. 60/089,627, filed on Jun. 16, 1998.
(60) Provisional application No. 60/089,789, filed on Jun. 18, 1998.
(60) Provisional application No. 60/090,170, filed on Jun. 22, 1998.
(60) Provisional application No. 60/090,856, filed on Jun. 26, 1998.
(60) Provisional application No. 60/090,928, filed on Jun. 26, 1998.
(60) Provisional application No. 60/091,035, filed on Jun. 29, 1998.
(60) Provisional application No. 60/091,247, filed on Jun. 30, 1998.
(60) Provisional application No. 60/091,405, filed on Jun. 30, 1998.
(60) Provisional application No. 60/092,036, filed on Jul. 8, 1998.
(60) Provisional application No. 60/100,963, filed on Sep. 17, 1998.
(60) Provisional application No. 60/110,108, filed on Nov. 25, 1998.
(60) Provisional application No. 60/110,109, filed on Nov. 25, 1998.
(60) Provisional application No. 60/111,033, filed on Dec. 4, 1998.
(60) Provisional application No. 60/111,742, filed on Dec. 10, 1998.
(60) Provisional application No. 60/067,000, filed on Nov. 24, 1997.
(60) Provisional application No. 60/066,873, filed on Nov. 25, 1997.
(60) Provisional application No. 60/069,472, filed on Dec. 9, 1997.
(60) Provisional application No. 60/074,201, filed on Feb. 10, 1998.
(60) Provisional application No. 60/074,280, filed on Feb. 10, 1998.
(60) Provisional application No. 60/074,281, filed on Feb. 10, 1998.
(60) Provisional application No. 60/074,282, filed on Feb. 10, 1998.
(60) Provisional application No. 60/074,565, filed on Feb. 12, 1998.
(60) Provisional application No. 60/074,566, filed on Feb. 12, 1998.
(60) Provisional application No. 60/074,567, filed on Feb. 12, 1998.
(60) Provisional application No. 60/074,789, filed on Feb. 19, 1998.
(60) Provisional application No. 60/075,459, filed on Feb. 19, 1998.
(60) Provisional application No. 60/075,460, filed on Feb. 19, 1998.
(60) Provisional application No. 60/075,461, filed on Feb. 19, 1998.
(60) Provisional application No. 60/075,462, filed on Feb. 19, 1998.
(60) Provisional application No. 60/075,463, filed on Feb. 19, 1998.
(60) Provisional application No. 60/075,464, filed on Feb. 19, 1998.
(60) Provisional application No. 60/077,229, filed on Mar. 9, 1998.
(60) Provisional application No. 60/077,230, filed on Mar. 9, 1998.
(60) Provisional application No. 60/077,231, filed on Mar. 9, 1998.
(60) Provisional application No. 60/078,031, filed on Mar. 16, 1998.
(60) Provisional application No. 60/078,368, filed on Mar. 18, 1998.
(60) Provisional application No. 60/080,844, filed on Apr. 7, 1998.
(60) Provisional application No. 60/083,067, filed on Apr. 27, 1998.
(60) Provisional application No. 60/083,386, filed on Apr. 29, 1998.
(60) Provisional application No. 60/083,387, filed on Apr. 29, 1998.
(60) Provisional application No. 60/083,388, filed on Apr. 29, 1998.
(60) Provisional application No. 60/083,389, filed on Apr. 29, 1998.
(60) Provisional application No. 60/084,684, filed on May 8, 1998.
(60) Provisional application No. 60/085,222, filed on May 13, 1998.
(60) Provisional application No. 60/085,223, filed on May 13, 1998.
(60) Provisional application No. 60/085,224, filed on May 13, 1998.
(60) Provisional application No. 60/085,245, filed on May 13, 1998.
(60) Provisional application No. 60/086,183, filed on May 21, 1998.
(60) Provisional application No. 60/086,184, filed on May 21, 1998.
(60) Provisional application No. 60/086,185, filed on May 21, 1998.
(60) Provisional application No. 60/086,186, filed on May 21, 1998.
(60) Provisional application No. 60/086,187, filed on May 21, 1998.
(60) Provisional application No. 60/086,188, filed on May 21, 1998.
(60) Provisional application No. 60/086,339, filed on May 21, 1998.
(60) Provisional application No. 60/089,524, filed on Jun. 16, 1998.
(60) Provisional application No. 60/089,810, filed on Jun. 18, 1998.
(60) Provisional application No. 60/089,814, filed on Jun. 18, 1998.
(60) Provisional application No. 60/091,247, filed on Jun. 30, 1998.
(60) Provisional application No. 60/092,036, filed on Jul. 8, 1998.
(60) Provisional application No. 60/099,667, filed on Sep. 9, 1998.
(60) Provisional application No. 60/099,668, filed on Sep. 9, 1998.
(60) Provisional application No. 60/099,670, filed on Sep. 9, 1998.
(60) Provisional application No. 60/099,697, filed on Sep. 9, 1998.
(60) Provisional application No. 60/100,672, filed on Sep. 16, 1998.
(60) Provisional application No. 60/100,673, filed on Sep. 16, 1998.
(60) Provisional application No. 60/100,674, filed on Sep. 16, 1998.
(60) Provisional application No. 60/101,130, filed on Sep. 21, 1998.
(60) Provisional application No. 60/101,132, filed on Sep. 21, 1998.
(60) Provisional application No. 60/108,996, filed on Nov. 18, 1998.
(60) Provisional application No. 60/109,018, filed on Nov. 19, 1998.
(60) Provisional application No. 60/090,170, filed on Jun. 22, 1998.
(60) Provisional application No. 60/071,064, filed on Jan. 9, 1998.
(60) Provisional application No. 60/092,036, filed on Jul. 8, 1998.
(60) Provisional application No. 60/071,479, filed on Jan. 13, 1998.
(60) Provisional application No. 60/085,533, filed on May 15, 1998.
(60) Provisional application No. 60/089,806, filed on Jun. 18, 1998.
(60) Provisional application No. 60/089,807, filed on Jun. 18, 1998.
(60) Provisional application No. 60/089,808, filed on Jun. 18, 1998.
(60) Provisional application No. 60/089,811, filed on Jun. 18, 1998.
(60) Provisional application No. 60/089,812, filed on Jun. 18, 1998.
(60) Provisional application No. 60/089,813, filed on Jun. 18, 1998.
(60) Provisional application No. 60/091,247, filed on Jun. 30, 1998.
(60) Provisional application No. 60/091,405, filed on Jun. 30, 1998.
(60) Provisional application No. 60/099,697, filed on Sep. 9, 1998.
(60) Provisional application No. 60/100,963, filed on Sep. 17, 1998.
(60) Provisional application No. 60/101,343, filed on Sep. 22, 1998.
(60) Provisional application No. 60/101,344, filed on Sep. 22, 1998.
(60) Provisional application No. 60/101,347, filed on Sep. 22, 1998.
(60) Provisional application No. 60/101,508, filed on Sep. 22, 1998.
(60) Provisional application No. 60/101,707, filed on Sep. 25, 1998.
(60) Provisional application No. 60/104,124, filed on Oct. 13, 1998.
(60) Provisional application No. 60/104,126, filed on Oct. 13, 1998.
(60) Provisional application No. 60/104,127, filed on Oct. 13, 1998.
(60) Provisional application No. 60/104,128, filed on Oct. 13, 1998.
(60) Provisional application No. 60/111,981, filed on Dec. 11, 1998.
(60) Provisional application No. 60/067,000, filed on Nov. 24, 1997.
(60) Provisional application No. 60/086,188, filed on May 21, 1998.
(60) Provisional application No. 60/086,183, filed on May 21, 1998.
(60) Provisional application No. 60/075,464, filed on Feb. 19, 1998.
(60) Provisional application No. 60/075,463, filed on Feb. 19, 1998.
(60) Provisional application No. 60/075,461, filed on Feb. 19, 1998.
(60) Provisional application No. 60/075,460, filed on Feb. 19, 1998.
(60) Provisional application No. 60/075,459, filed on Feb. 19, 1998.
(60) Provisional application No. 60/074,789, filed on Feb. 19, 1998.
(60) Provisional application No. 60/074,567, filed on Feb. 12, 1998.
(60) Provisional application No. 60/074,566, filed on Feb. 12, 1998.
(60) Provisional application No. 60/074,565, filed on Feb. 12, 1998.
(60) Provisional application No. 60/074,281, filed on Feb. 10, 1998.
(60) Provisional application No. 60/074,280, filed on Feb. 10, 1998.
(60) Provisional application No. 60/074,201, filed on Feb. 10, 1998.
(60) Provisional application No. 60/066,873, filed on Nov. 25, 1997.
(60) Provisional application No. 60/069,472, filed on Dec. 9, 1997.
(60) Provisional application No. 60/074,201, filed on Feb. 10, 1998.
(60) Provisional application No. 60/074,280, filed on Feb. 10, 1998.
(60) Provisional application No. 60/074,281, filed on Feb. 10, 1998.
(60) Provisional application No. 60/074,282, filed on Feb. 10, 1998.
(60) Provisional application No. 60/074,565, filed on Feb. 12, 1998.
(60) Provisional application No. 60/074,566, filed on Feb. 12, 1998.
(60) Provisional application No. 60/074,567, filed on Feb. 12, 1998.
(60) Provisional application No. 60/074,789, filed on Feb. 19, 1998.
(60) Provisional application No. 60/075,459, filed on Feb. 19, 1998.
(60) Provisional application No. 60/075,460, filed on Feb. 19, 1998.
(60) Provisional application No. 60/075,461, filed on Feb. 19, 1998.
(60) Provisional application No. 60/075,462, filed on Feb. 19, 1998.
(60) Provisional application No. 60/075,463, filed on Feb. 19, 1998.
(60) Provisional application No. 60/075,464, filed on Feb. 19, 1998.
(60) Provisional application No. 60/077,229, filed on Mar. 9, 1998.
(60) Provisional application No. 60/077,230, filed on Mar. 9, 1998.
(60) Provisional application No. 60/077,231, filed on Mar. 9, 1998.
(60) Provisional application No. 60/078,031, filed on Mar. 16, 1998.
(60) Provisional application No. 60/078,368, filed on Mar. 18, 1998.
(60) Provisional application No. 60/080,844, filed on Apr. 7, 1998.
(60) Provisional application No. 60/083,067, filed on Apr. 27, 1998.
(60) Provisional application No. 60/083,386, filed on Apr. 29, 1998.
(60) Provisional application No. 60/083,387, filed on Apr. 29, 1998.
(60) Provisional application No. 60/083,388, filed on Apr. 29, 1998.
(60) Provisional application No. 60/083,389, filed on Apr. 29, 1998.
(60) Provisional application No. 60/084,684, filed on May 8, 1998.
(60) Provisional application No. 60/085,222, filed on May 13, 1998.
(60) Provisional application No. 60/085,223, filed on May 13, 1998.
(60) Provisional application No. 60/085,224, filed on May 13, 1998.
(60) Provisional application No. 60/085,245, filed on May 13, 1998.
(60) Provisional application No. 60/086,183, filed on May 21, 1998.
(60) Provisional application No. 60/086,184, filed on May 21, 1998.
(60) Provisional application No. 60/086,185, filed on May 21, 1998.
(60) Provisional application No. 60/086,186, filed on May 21, 1998.
(60) Provisional application No. 60/086,187, filed on May 21, 1998.
(60) Provisional application No. 60/086,188, filed on May 21, 1998.
(60) Provisional application No. 60/086,339, filed on May 21, 1998.
(60) Provisional application No. 60/089,524, filed on Jun. 16, 1998.
(60) Provisional application No. 60/089,810, filed on Jun. 18, 1998.
(60) Provisional application No. 60/089,814, filed on Jun. 18, 1998.
(60) Provisional application No. 60/091,247, filed on Jun. 30, 1998.
(60) Provisional application No. 60/092,036, filed on Jul. 8, 1998.
(60) Provisional application No. 60/099,667, filed on Sep. 9, 1998.
(60) Provisional application No. 60/099,668, filed on Sep. 9, 1998.
(60) Provisional application No. 60/099,670, filed on Sep. 9, 1998.
(60) Provisional application No. 60/099,697, filed on Sep. 9, 1998.
(60) Provisional application No. 60/100,672, filed on Sep. 16, 1998.
(60) Provisional application No. 60/100,673, filed on Sep. 16, 1998.
(60) Provisional application No. 60/100,674, filed on Sep. 16, 1998.
(60) Provisional application No. 60/101,130, filed on Sep. 21, 1998.
(60) Provisional application No. 60/101,132, filed on Sep. 21, 1998.
(60) Provisional application No. 60/108,996, filed on Nov. 18, 1998.
(60) Provisional application No. 60/108,018, filed on Nov. 12, 1998.

(51) Int. Cl. A01H 5/00; C07H 21/04; C12N 15/82; C07K 14/415

(52) U.S. Cl. 800/278; 800/320.1; 800/312; 536/23.6; 530/370

(57) ABSTRACT

Expressed Sequence Tags (ESTs) isolated from maize are disclosed. The ESTs provide a unique molecular tool for the targeting and isolation of novel genes for plant protection and improvement. The disclosed ESTs have utility in the development of new strategies for understanding critical plant developmental and metabolic pathways. The disclosed ESTs have particular utility in isolating genes and promoters, identifying and mapping the genes involved in developmental and metabolic pathways, and determining gene function. Sequence homology analyses using the ESTs provided in the present invention, will result in more efficient gene screening for desirable agronomic traits. An expanding database of these select pieces of the plant genomics puzzle will quickly expand the knowledge necessary for subsequent functional validation, a key limitation in current plant biotechnology efforts.

### CROSS REFERENCE TO RELATED APPLICATION

[0001] This application is a continuation under 35 U.S.C. § 120 of U.S. Appln Ser. No. 09/553,094 filed Apr. 18, 2000, herein incorporated by reference in its entirety. Appln Ser. No. 09/553,094 is a continuation-in-part of U.S. application Ser. No. 09/237,183, filed Jan. 26, 1999, which is a continuation-in-part of U.S. application Ser. No. 09/198,779, filed Nov. 24, 1998 (abandoned), which claims the benefit of U.S. Provisional Appln. Ser. No. 60/067,000, filed Nov. 24, 1997; and to U.S. Provisional Appln. Ser. No. 60/066,873, filed Nov. 25, 1997; and to U.S. Provisional Appln. Ser. No. 60/069,472, filed Dec. 9, 1997; and to U.S. Provisional Appln. Ser. No. 60/074,201, filed Feb. 10, 1998; and to U.S. Provisional Appln. Ser. No. 60/074,280, filed Feb. 10, 1998; and to U.S. Provisional Appln. Ser. No. 60/074,281, filed Feb. 10, 1998; and to U.S. Provisional Appln. Ser. No. 60/074,282, filed Feb. 10, 1998; and to U.S. Provisional Appln. Ser. No. 60/074,565, filed Feb. 12, 1998; and to U.S. Provisional Appln. Ser. No. 60/074,566, filed Feb. 12, 1998; and to U.S. Provisional Appln. Ser. No. 60/074,567, filed Feb. 12, 1998; and to U.S. Provisional Appln. Ser. No. 60/074,789, filed Feb. 19, 1998; and to U.S. Provisional Appln. Ser. No. 60/075,459, filed Feb. 19, 1998; and to U.S. Provisional Appln. Ser. No. 60/075,460, filed Feb. 19, 1998; and to U.S. Provisional Appln. Ser. No. 60/075,461, filed Feb. 19, 1998; and to U.S. Provisional Appln. Ser. No. 60/075,462, filed Feb. 19, 1998; and to U.S. Provisional Appln. Ser. No. 60/075,463, filed Feb. 19, 1998; and to U.S. Provisional Appln. Ser. No. 60/075,464, filed Feb. 19, 1998; and to U.S. Provisional Appln. Ser. No. 60/077,229, filed Mar. 9, 1998; and to U.S. Provisional Appln. Ser. No. 60/077,230, filed Mar. 9, 1998; and to U.S. Provisional Appln. Ser. No. 60/077,231, filed Mar. 9, 1998; and to U.S. Provisional Appln. Ser. No. 60/078,031, filed Mar. 16, 1998; and to U.S. Provisional Appln. Ser. No. 60/078,368, filed Mar. 18, 1998; and to U.S. Provisional Appln. Ser. No. 60/080,844, filed Apr. 7, 1998; and to U.S. Provisional Appln. Ser. No. 60/083,067, filed Apr. 27, 1998; and to U.S. Provisional Appln. Ser. No. 60/083,386, filed Apr. 29, 1998; and to U.S. Provisional Appln. Ser. No. 60/083,387, filed Apr. 29, 1998; and to U.S. Provisional Appln. Ser. No. 60/083,388, filed Apr. 29, 1998; and to U.S. Provisional Appln. Ser. No. 60/083,389, filed Apr. 29, 1998; and to U.S. Provisional Appln. Ser. No. 60/084,684, filed May 8, 1998; and to U.S. Provisional Appln. Ser. No. 60/085,222, filed May 13, 1998; and to U.S. Provisional Appln. Ser. No. 60/085,223, filed May 13, 1998; and to U.S. Provisional Appln. Ser. No. 60/085,224, filed May 13, 1998; and to U.S. Provisional Appln. Ser. No. 60/085,245, filed May 13, 1998; and to U.S. Provisional Appln. Ser. No. 60/086,183, filed May 21, 1998; and to U.S. Provisional Appln. Ser. No. 60/086,184, filed May 21, 1998; and to U.S. Provisional Appln. Ser. No. 60/086,185, filed May 21, 1998; and to U.S. Provisional Appln. Ser. No. 60/086,186, filed May 21, 1998; and to U.S. Provisional Appln. Ser. No. 60/086,187, filed May 21, 1998; and to U.S. Provisional Appln. Ser. No. 60/086,188, filed May 21, 1998; and to U.S. Provisional Appln. Ser. No. 60/086,339, filed May 21, 1998; and to U.S. Provisional Appln. Ser. No. 60/089,524, filed Jun. 16, 1998; and to U.S. Provisional Appln. Ser. No. 60/089,810, filed Jun. 18, 1998; and to U.S. Provisional Appln. Ser. No. 60/089,814, filed Jun. 18, 1998; and to U.S. Provisional Appln. Ser. No. 60/091,247, filed Jun. 30, 1998; and to U.S. Provisional Appln. Ser. No. 60/092,036, filed Jul. 8, 1998; and to U.S. Provisional Appln. Ser. No. 60/099,667, filed Sep. 9, 1998; and to U.S. Provisional Appln. Ser. No. 60/099,668, filed Sep. 9, 1998; and to U.S. Provisional Appln. Ser. No. 60/099,670, filed Sep. 9, 1998; and to U.S. Provisional Appln. Ser. No. 60/099,697, filed Sep. 9, 1998; and to U.S. Provisional Appln. Ser. No. 60/100,672, filed Sep. 16, 1998; and to U.S. Provisional Appln. Ser. No. 60/100,673, filed Sep. 16, 1998; and to U.S. Provisional Appln. Ser. No. 60/100,674, filed Sep. 16, 1998; and to U.S. Provisional Appln. Ser. No. 60/101,130, filed Sep. 21, 1998; and to U.S. Provisional Appln. Ser. No. 60/101,132, filed Sep. 21, 1998; and to U.S. Provisional Appln. Ser. No. 60/108,996, filed Nov. 18, 1998; and to U.S. Provisional Appln. Ser. No. 60/109,018, filed Nov. 18, 1998. U.S. application Ser. No. 09/237,183 is also a continuation-in-part of U.S. application Ser. No. 09/227,586, filed Jan. 8, 1999 (abandoned), which claims the benefit of U.S. Provisional Appln. Ser. No. 60/071,064, filed Jan. 9, 1998; and to U.S. Provisional Appln. Ser. No. 60/090,170, filed Jun. 22, 1998; and to U.S. Provisional Appln. Ser. No. 60/092,036, filed Jul. 8, 1998. U.S. application Ser. No. 09/237,183 is also a continuation-in-part of U.S. application Ser. No. 09/229,413, filed Jan. 12, 1999 (abandoned), which claims the benefit of U.S. Appln. Ser. No. 60/071,479, filed Jan. 13, 1998; and to U.S. Provisional Appln. Ser. No. 60/085,533, filed May 15, 1998; and to U.S. Provisional Appln. Ser. No. 60/089,806, filed Jun. 18, 1998; and to U.S. Provisional Appln. Ser. No. 60/089,807, filed Jun. 18, 1998; and to U.S. Provisional Appln. Ser. No. 60/089,808, filed Jun. 18, 1998; and to U.S. Provisional Appln. Ser. No. 60/089,811, filed Jun. 18, 1998; and to U.S. Provisional Appln. Ser. No. 60/089,812, filed Jun. 18, 1998; and to U.S. Provisional Appln. Ser. No. 60/089,813, filed Jun. 18, 1998; and to U.S. Provisional Appln. Ser. No. 60/091,247, filed Jun. 30, 1998; and to U.S. Provisional Appln. Ser. No. 60/091,405, filed Jun. 30, 1998; and to U.S. Provisional Appln. Ser. No. 60/099,697, filed Sep. 9, 1998; and to U.S. Provisional Appln. Ser. No. 60/100,963, filed Sep. 17, 1998; and to U.S. Provisional Appln. Ser. No. 60/101,343, filed Sep. 22, 1998; and to U.S. Provisional Appln. Ser. No. 60/101,344, filed Sep. 22, 1998; and to U.S. Provisional Appln. Ser. No. 60/101,347, filed Sep. 22, 1998; and to U.S. Provisional Appln. Ser. No. 60/101,508, filed Sep. 22, 1998; and to U.S. Provisional Appln. Ser. No. 60/101,707, filed Sep. 25, 1998; and to U.S. Provisional Appln. Ser. No. 60/104,124, filed Oct. 13, 1998; and to U.S. Provisional Appln. Ser. No. 60/104,126, filed Oct. 13, 1998; and to U.S. Provisional Appln. Ser. No. 60/104,127, filed Oct. 13, 1998; and to U.S. Provisional Appln. Ser. No. 60/104,128, filed Oct. 13, 1998; and to U.S. Provisional Appln. Ser. No. 60/111,981, filed Dec. 11, 1998. U.S. application Ser. No. 09/237,183 is also a continuation-in-part of U.S. application Ser. No. 09/233,218, filed Jan. 20, 1999, which is a continuation-in-part of U.S. application Ser. No. 09/198,779, filed Nov. 24, 1998 (abandoned), which claims the benefit of U.S. Provisional Appln. Ser. No. 60/067,000, filed Nov. 24, 1997; and to U.S. Provisional Appln. Ser. No. 60/066,873, filed Nov. 25, 1997; and to U.S. Provisional Appln. Ser. No. 60/069,472, filed Dec. 9, 1997; and to U.S. Provisional Appln. Ser. No. 60/074,201, filed Feb. 10, 1998; and to U.S. Provisional Appln. Ser. No. 60/074,280, filed Feb. 10, 1998; and to U.S. Provisional Appln. Ser. No. 60/074,281, filed Feb. 10, 1998; and to U.S. Provisional Appln. Ser. No. 60/074,282, filed Feb. 10, 1998; and to U.S. Provisional Appln. Ser. No. 60/074,565, filed Feb. 12, 1998; and to U.S. Provisional Appln. Ser. No. 60/074,566, filed Feb. 12, 1998; and to U.S. Provisional Appln. Ser. No. 60/074,567, filed Feb. 12, 1998; and to U.S. Provisional Appln. Ser. No. 60/074,789, filed Feb. 19, 1998; and to U.S. Provisional Appln. Ser. No. 60/075,459, filed Feb. 19, 1998; and to U.S. Provisional Appln. Ser. No. 60/075,460, filed Feb. 19, 1998; and to U.S. Provisional Appln. Ser. No. 60/075,461, filed Feb. 19, 1998; and to U.S. Provisional Appln. Ser. No. 60/075,462, filed Feb. 19, 1998; and to U.S. Provisional Appln. Ser. No. 60/075,463, filed Feb. 19, 1998; and to U.S. Provisional Appln. Ser. No. 60/075,464, filed Feb. 19, 1998; and to U.S. Provisional Appln. Ser. No. 60/077,229, filed Mar. 9, 1998; and to U.S. Provisional Appln. Ser. No. 60/077,230, filed Mar. 9, 1998; and to U.S. Provisional Appln. Ser. No. 60/077,231, filed Mar. 9, 1998; and to U.S. Provisional Appln. Ser. No. 60/078,031, filed Mar. 16, 1998; and to U.S. Provisional Appln. Ser. No. 60/078,368, filed Mar. 18, 1998; and to U.S. Provisional Appln. Ser. No. 60/080,844, filed Apr. 7, 1998; and to U.S. Provisional Appln. Ser. No. 60/083,067, filed Apr. 27, 1998; and to U.S. Provisional Appln. Ser. No. 60/083,386, filed Apr. 29, 1998; and to U.S. Provisional Appln. Ser. No. 60/083,387, filed Apr. 29, 1998; and to U.S. Provisional Appln. Ser. No. 60/083,388, filed Apr. 29, 1998; and to U.S. Provisional Appln. Ser. No. 60/083,389, filed Apr. 29, 1998; and to U.S. Provisional Appln. Ser. No. 60/084,684, filed May 8, 1998; and to U.S. Provisional Appln. Ser. No. 60/085,222, filed May 13, 1998; and to U.S. Provisional Appln. Ser. No. 60/085,223, filed May 13, 1998; and to U.S. Provisional Appln. Ser. No. 60/085,224, filed May 13, 1998; and to U.S. Provisional Appln. Ser. No. 60/085,245, filed May 13, 1998; and to U.S. Provisional Appln. Ser. No. 60/086,183, filed May 21, 1998; and to U.S. Provisional Appln. Ser. No. 60/086,184, filed May 21, 1998; and to U.S. Provisional Appln. Ser. No. 60/086,185, filed May 21, 1998; and to U.S. Provisional Appln. Ser. No. 60/086,186, filed May 21, 1998; and to U.S. Provisional Appln. Ser. No. 60/086,187, filed May 21, 1998; and to U.S. Provisional Appln. Ser. No. 60/086,188, filed May 21, 1998; and to U.S. Provisional Appln. Ser. No. 60/086,339, filed May 21, 1998; and to U.S. Provisional Appln. Ser. No. 60/089,524, filed Jun. 16, 1998; and to U.S. Provisional Appln. Ser. No. 60/089,810, filed Jun. 18, 1998; and to U.S. Provisional Appln. Ser. No. 60/089,814, filed Jun. 18, 1998; and to U.S. Provisional Appln. Ser. No. 60/091,247, filed Jun. 30, 1998; and to U.S. Provisional Appln. Ser. No. 60/092,036, filed Jul. 8, 1998; and to U.S. Provisional Appln. Ser. No. 60/099,667, filed Sep. 9, 1998; and to U.S. Provisional Appln. Ser. No. 60/099,668, filed Sep. 9, 1998; and to U.S. Provisional Appln. Ser. No. 60/099,670, filed Sep. 9, 1998; and to U.S. Provisional Appln. Ser. No. 60/099,697, filed Sep. 9, 1998; and to U.S. Provisional Appln. Ser. No. 60/100,672, filed Sep. 16, 1998; and to U.S. Provisional Appln. Ser. No. 60/100,673, filed Sep. 16, 1998; and to U.S. Provisional Appln. Ser. No. 60/100,674, filed Sep. 16, 1998; and to U.S. Provisional Appln. Ser. No. 60/101,130, filed Sep. 21, 1998; and to U.S. Provisional Appln. Ser. No. 60/101,132, filed Sep. 21, 1998; and to U.S. Provisional Appln. Ser. No. 60/108,996, filed Nov. 18, 1998; and to U.S. Provisional Appln. Ser. No. 60/109,018, filed Nov. 18, 1998. U.S. application Ser. No. 09/233,218 is also a continuation-in-part of U.S. application Ser. No. 09/227,586, filed Jan. 8, 1999 (abandoned), which claims the benefit of U.S. Provisional Appln. Ser. No. 60/071,064, filed Jan. 9, 1998; and to U.S. Provisional Appln. Ser. No. 60/090,170, filed Jun. 22, 1998; and to U.S. Provisional Appln. Ser. No. 60/092,036, filed Jul. 8, 1998. U.S. application Ser. No. 09/233,218 is also a continuation-in-part of U.S. application Ser. No. 09/229,413, filed Jan. 12, 1999 (abandoned), which claims the benefit of U.S. Appln. Ser. No. 60/071,479, filed Jan. 13, 1998; and to U.S. Provisional Appln. Ser. No. 60/085,533, filed May 15, 1998; and to U.S. Provisional Appln. Ser. No. 60/089,806, filed Jun. 18, 1998; and to U.S. Provisional Appln. Ser. No. 60/089,807, filed Jun. 18, 1998; and to U.S. Provisional Appln. Ser. No. 60/089,808, filed Jun. 18, 1998; and to U.S. Provisional Appln. Ser. No. 60/089,811, filed Jun. 18, 1998; and to U.S. Provisional Appln. Ser. No. 60/089,812, filed Jun. 18, 1998; and to U.S. Provisional Appln. Ser. No. 60/089,813, filed Jun. 18, 1998; and to U.S. Provisional Appln. Ser. No. 60/091,247, filed Jun. 30, 1998; and to U.S. Provisional Appln. Ser. No. 60/091,405, filed Jun. 30, 1998; and to U.S. Provisional Appln. Ser. No. 60/099,697, filed Sep. 9, 1998; and to U.S. Provisional Appln. Ser. No. 60/100,963, filed Sep. 17, 1998; and to U.S. Provisional Appln. Ser. No. 60/101,343, filed Sep. 22, 1998; and to U.S. Provisional Appln. Ser. No. 60/101,344, filed Sep. 22, 1998; and to U.S. Provisional Appln. Ser. No. 60/101,347, filed Sep. 22, 1998; and to U.S. Provisional Appln. Ser. No. 60/101,508, filed Sep. 22, 1998; and to U.S. Provisional Appln. Ser. No. 60/101,707, filed Sep. 25, 1998; and to U.S. Provisional Appln. Ser. No. 60/104,124, filed Oct. 13, 1998; and to U.S. Provisional Appln. Ser. No. 60/104,126, filed Oct. 13, 1998; and to U.S. Provisional Appln. Ser. No. 60/104,127, filed Oct. 13, 1998; and to U.S. Provisional Appln. Ser. No. 60/104,128, filed Oct. 13, 1998; and to U.S. Provisional Appln. Ser. No. 60/111,981, filed Dec. 11, 1998. U.S. application Ser. No. 09/233,218 also claims the benefit of U.S. Provisional Appln. Ser. No. 60/072,027, filed Jan. 21, 1998; and to U.S. Provisional Appln. Ser. No. 60/072,888, filed Jan. 27, 1998; and to U.S. Provisional Appln. Ser. No. 60/076,709, filed Mar. 4, 1998; and to U.S. Provisional Appln. Ser. No. 60/076,912, filed Mar. 6, 1998; and to U.S. Provisional Appln. Ser. No. 60/078,031, filed Mar. 16, 1998; and to U.S. Provisional Appln. Ser. No. 60/083,390, filed Apr. 29, 1998; and to U.S. Provisional Appln. Ser. No. 60/084,684, filed May 8, 1998; and to U.S. Provisional Appln. Ser. No. 60/085,057, filed May 8, 1998; and to U.S. Provisional Appln. Ser. No. 60/085,429, filed May 8, 1998; and to U.S. Provisional Appln. Ser. No. 60/085,245, filed May 13, 1998; and to U.S. Provisional Appln. Ser. No. 60/085,533, filed May 15, 1998; and to U.S. Provisional Appln. Ser. No. 60/085,940, filed May 19, 1998; and to U.S. Provisional Appln. Ser. No. 60/086,339, filed May 21, 1998; and to U.S. Provisional Appln. Ser. No. 60/086,594, filed May 22, 1998; and to U.S. Provisional Appln. Ser. No. 60/086,608, filed May 22, 1998; and to U.S. Provisional Appln. Ser. No. 60/087,422, filed Jun. 1, 1998; and to U.S. Provisional Appln. Ser. No. 60/087,631, filed Jun. 2, 1998; and to U.S. Provisional Appln. Ser. No. 60/087,762, filed Jun. 2, 1998; and to U.S. Provisional Appln. Ser. No. 60/087,972 filed Jun. 4, 1998; and to U.S. Provisional Appln. Ser. No. 60/087,973 filed Jun. 4, 1998; and to U.S. Provisional Appln. Ser. No. 60/088,441, filed Jun. 8, 1998; and to U.S. Provisional Appln. Ser. No. 60/089,627, filed Jun. 16, 1998; and to U.S. Provisional Appln. Ser. No. 60/089,789, filed Jun. 18, 1998; and to U.S. Provisional Appln. Ser. No. 60/090,170, filed Jun. 22, 1998; and to U.S. Provisional Appln. Ser. No. 60/090,856, filed Jun. 26, 1998; and to U.S. Provisional Appln. Ser. No. 60/090,928, filed Jun. 26, 1998; and to U.S. Provisional Appln. Ser. No. 60/091,035, filed Jun. 29, 1998; and to U.S. Provisional Appln. Ser. No. 60/091,247, filed Jun. 30, 1998; and to U.S. Provisional Appln. Ser. No. 60/091,405, filed Jun. 30, 1998; and to U.S. Provisional Appln. Ser. No. 60/092,036, filed Jul. 8, 1998; and to U.S. Provisional Appln. Ser. No. 60/100,963, filed Sep. 17, 1998; and to U.S. Provisional Appln. Ser. No. 60/110,108, filed Nov. 25, 1998; and to U.S. Provisional Appln. Ser. No. 60/110,109, filed Nov. 25, 1998; and to U.S. Provisional Appln. Ser. No. 60/111,033, filed Dec. 4, 1998; and to U.S. Provisional Appln. Ser. No. 60/111,742, filed Dec. 10, 1998. U.S. application Ser. No. 09/237,183 also claims the benefit of U.S. Provisional Appln. Ser. No. 60/072,888, filed Jan. 27, 1998; and to U.S. Provisional Appln. Ser. No. 60/076,709, filed Mar. 4, 1998; and to U.S. Provisional Appln. Ser. No. 60/076,912, filed Mar. 6, 1998; and to U.S. Provisional Appln. Ser. No. 60/078,031, filed Mar. 16, 1998; and to U.S. Provisional Appln. Ser. No. 60/083,390, filed Apr. 29, 1998; and to U.S. Provisional Appln. Ser. No. 60/084,684, filed May 8, 1998; and to U.S. Provisional Appln. Ser. No. 60/085,057, filed May 8, 1998; and to U.S. Provisional Appln. Ser. No. 60/085,429, filed May 8, 1998; and to U.S. Provisional Appln. Ser. No. 60/085,245, filed May 13, 1998; and to U.S. Provisional Appln. Ser. No. 60/085,533, filed May 15, 1998; and to U.S. Provisional Appln. Ser. No. 60/085,940, filed May 19, 1998; and to U.S. Provisional Appln. Ser. No. 60/086,339, filed May 21, 1998; and to U.S. Provisional Appln. Ser. No. 60/086,594, filed May 22, 1998; and to U.S. Provisional Appln. Ser. No. 60/086,608, filed May 22, 1998; and to U.S. Provisional Appln. Ser. No. 60/087,422, filed Jun. 1, 1998; and to U.S. Provisional Appln. Ser. No. 60/087,631, filed Jun. 2, 1998; and to U.S. Provisional Appln. Ser. No. 60/087,762, filed Jun. 2, 1998; and to U.S. Provisional Appln. Ser. No. 60/087,972 filed Jun. 4, 1998; and to U.S. Provisional Appln. Ser. No. 60/087,973 filed Jun. 4, 1998; and to U.S. Provisional Appln. Ser. No. 60/088,441, filed Jun. 8, 1998; and to U.S. Provisional Appln. Ser. No. 60/089,627, filed Jun. 16, 1998; and to U.S. Provisional Appln. Ser. No. 60/089,789, filed Jun. 18, 1998; and to U.S. Provisional Appln. Ser. No. 60/090,170, filed Jun. 22, 1998; and to U.S. Provisional Appln. Ser. No. 60/090,856, filed Jun. 26, 1998; and to U.S. Provisional Appln. Ser. No. 60/090,928, filed Jun. 26, 1998; and to U.S. Provisional Appln. Ser. No. 60/091,035, filed Jun. 29, 1998; and to U.S. Provisional Appln. Ser. No. 60/091,247, filed Jun. 30, 1998; and to U.S. Provisional Appln. Ser. No. 60/091,405, filed Jun. 30, 1998; and to U.S. Provisional Appln. Ser. No. 60/092,036, filed Jul. 8, 1998; and to U.S. Provisional Appln. Ser. No. 60/100,963, filed Sep. 17, 1998; and to U.S. Provisional Appln. Ser. No. 60/110,108, filed Nov. 25, 1998; and to U.S. Provisional Appln. Ser. No. 60/110,109, filed Nov. 25, 1998; and to U.S. Provisional Appln. Ser. No. 60/111,033, filed Dec. 4, 1998; and to U.S. Provisional Appln. Ser. No. 60/111,742, filed Dec. 10, 1998. Appln Ser. No. 09/553,094 is also a continuation-in-part of U.S. application Ser. No. 09/371,146, filed Aug. 9, 1999, which is a continuation-in-part of U.S. application Ser. No. 09/198,779, filed Nov. 24, 1998 (abandoned), which claims the benefit of U.S. Provisional Appln. Ser. No. 60/067,000, filed Nov. 24, 1997; and to U.S. Provisional Appln. Ser. No. 60/066,873, filed Nov. 25, 1997; and to U.S. Provisional Appln. Ser. No. 60/069,472, filed Dec. 9, 1997; and to U.S. Provisional Appln. Ser. No. 60/074,201, filed Feb. 10, 1998; and to U.S. Provisional Appln. Ser. No. 60/074,280, filed Feb. 10, 1998; and to U.S. Provisional Appln. Ser. No. 60/074,281, filed Feb. 10, 1998; and to U.S. Provisional Appln. Ser. No. 60/074,282, filed Feb. 10, 1998; and to U.S. Provisional Appln. Ser. No. 60/074,565, filed Feb. 12, 1998; and to U.S. Provisional Appln. Ser. No. 60/074,566, filed Feb. 12, 1998; and to U.S. Provisional Appln. Ser. No. 60/074,567, filed Feb. 12, 1998; and to U.S. Provisional Appln. Ser. No. 60/074,789, filed Feb. 19, 1998; and to U.S. Provisional Appln. Ser. No. 60/075,459, filed Feb. 19, 1998; and to U.S. Provisional Appln. Ser. No. 60/075,460, filed Feb. 19, 1998; and to U.S. Provisional Appln. Ser. No. 60/075,461, filed Feb. 19, 1998; and to U.S. Provisional Appln. Ser. No. 60/075,462, filed Feb. 19, 1998; and to U.S. Provisional Appln. Ser. No. 60/075,463, filed Feb. 19, 1998; and to U.S. Provisional Appln. Ser. No. 60/075,464, filed Feb. 19, 1998; and to U.S. Provisional Appln. Ser. No. 60/077,229, filed Mar. 9, 1998; and to U.S. Provisional Appln. Ser. No. 60/077,230, filed Mar. 9, 1998; and to U.S. Provisional Appln. Ser. No. 60/077,231, filed Mar. 9, 1998; and to U.S. Provisional Appln. Ser. No. 60/078,031, filed Mar. 16, 1998; and to U.S. Provisional Appln. Ser. No. 60/078,368, filed Mar. 18, 1998; and to U.S. Provisional Appln. Ser. No. 60/080,844, filed Apr. 7, 1998; and to U.S. Provisional Appln. Ser. No. 60/083,067, filed Apr. 27, 1998; and to U.S. Provisional Appln. Ser. No. 60/083,386, filed Apr. 29, 1998; and to U.S. Provisional Appln. Ser. No. 60/083,387, filed Apr. 29, 1998; and to U.S. Provisional Appln. Ser. No. 60/083,388, filed Apr. 29, 1998; and to U.S. Provisional Appln. Ser. No. 60/083,389, filed Apr. 29, 1998; and to U.S. Provisional Appln. Ser. No. 60/084,684, filed May 8, 1998; and to U.S. Provisional Appln. Ser. No. 60/085,222, filed May 13, 1998; and to U.S. Provisional Appln. Ser. No. 60/085,223, filed May 13, 1998; and to U.S. Provisional Appln. Ser. No. 60/085,224, filed May 13, 1998; and to U.S. Provisional Appln. Ser. No. 60/085,245, filed May 13, 1998; and to U.S. Provisional Appln. Ser. No. 60/086,183, filed May 21, 1998; and to U.S. Provisional Appln. Ser. No. 60/086,184, filed May 21, 1998; and to U.S. Provisional Appln. Ser. No. 60/086,185, filed May 21, 1998; and to U.S. Provisional Appln. Ser. No. 60/086,186, filed May 21, 1998; and to U.S. Provisional Appln. Ser. No. 60/086,187, filed May 21, 1998; and to U.S. Provisional Appln. Ser. No. 60/086,188, filed May 21, 1998; and to U.S. Provisional Appln. Ser. No. 60/086,339, filed May 21, 1998; and to U.S. Provisional Appln. Ser. No. 60/089,524, filed Jun. 16, 1998; and to U.S. Provisional Appln. Ser. No. 60/089,810, filed Jun. 18, 1998; and to U.S. Provisional Appln. Ser. No. 60/089,814, filed Jun. 18, 1998; and to U.S. Provisional Appln. Ser. No. 60/091,247, filed Jun. 30, 1998; and to U.S. Provisional Appln. Ser. No. 60/092,036, filed Jul. 8, 1998; and to U.S. Provisional Appln. Ser. No. 60/099,667, filed Sep. 9, 1998; and to U.S. Provisional Appln. Ser. No. 60/099,668, filed Sep. 9, 1998; and to U.S. Provisional Appln. Ser. No. 60/099,670, filed Sep. 9, 1998; and to U.S. Provisional Appln. Ser. No. 60/099,697, filed Sep. 9, 1998; and to U.S. Provisional Appln. Ser. No. 60/100,672, filed Sep. 16, 1998; and to U.S. Provisional Appln. Ser. No. 60/100,673, filed Sep. 16, 1998; and to U.S. Provisional Appln. Ser. No. 60/100,674, filed Sep. 16, 1998; and to U.S. Provisional Appln. Ser. No. 60/101,130, filed Sep. 21, 1998; and to U.S. Provisional Appln. Ser. No. 60/101,132, filed Sep. 21, 1998; and to U.S. Provisional Appln. Ser. No. 60/108,996, filed Nov. 18, 1998; and to U.S. Provisional Appln. Ser. No. 60/109,018, filed Nov. 18, 1998. U.S. application Ser. No. 09/371,146 is also a continuation-in-part of U.S. application Ser. No. 09/227,586, filed Jan. 8, 1999 (abandoned), which claims the benefit of U.S. Provisional Appln. Ser. No. 60/071,064, filed Jan. 9, 1998; and to U.S. Provisional Appln. Ser. No. 60/090,170, filed Jun. 22, 1998; and to U.S. Provisional Appln. Ser. No. 60/092,036, filed Jul. 8, 1998. U.S. application Ser. No. 09/371,146 is also a continuation-in-part of U.S. application Ser. No. 09/229,413, filed Jan. 12, 1999 (abandoned), which claims the benefit of U.S. Appln. Ser. No. 60/071,479, filed Jan. 13, 1998; and to U.S. Provisional Appln. Ser. No. 60/085,533, filed May 15, 1998; and to U.S. Provisional Appln. Ser. No. 60/089,806, filed Jun. 18, 1998; and to U.S. Provisional Appln. Ser. No. 60/089,807, filed Jun. 18, 1998; and to U.S. Provisional Appln. Ser. No. 60/089,808, filed Jun. 18, 1998; and to U.S. Provisional Appln. Ser. No. 60/089,811, filed Jun. 18, 1998; and to U.S. Provisional Appln. Ser. No. 60/089,812, filed Jun. 18, 1998; and to U.S. Provisional Appln. Ser. No. 60/089,813, filed Jun. 18, 1998; and to U.S. Provisional Appln. Ser. No. 60/091,247, filed Jun. 30, 1998; and to U.S. Provisional Appln. Ser. No. 60/091,405, filed Jun. 30, 1998; and to U.S. Provisional Appln. Ser. No. 60/099,697, filed Sep. 9, 1998; and to U.S. Provisional Appln. Ser. No. 60/100,963, filed Sep. 17, 1998; and to U.S. Provisional Appln. Ser. No. 60/101,343, filed Sep. 22, 1998; and to U.S. Provisional Appln. Ser. No. 60/101,344, filed Sep. 22, 1998; and to U.S. Provisional Appln. Ser. No. 60/101,347, filed Sep. 22, 1998; and to U.S. Provisional Appln. Ser. No. 60/101,508, filed Sep. 22, 1998; and to U.S. Provisional Appln. Ser. No. 60/101,707, filed Sep. 25, 1998; and to U.S. Provisional Appln. Ser. No. 60/104,124, filed Oct. 13, 1998; and to U.S. Provisional Appln. Ser. No. 60/104,126, filed Oct. 13, 1998; and to U.S. Provisional Appln. Ser. No. 60/104,127, filed Oct. 13, 1998; and to U.S. Provisional Appln. Ser. No. 60/104,128, filed Oct. 13, 1998; and to U.S. Provisional Appln. Ser. No. 60/111,981, filed Dec. 11, 1998. U.S. application Ser. No. 09/371,146 is also a continuation-in-part of U.S. application Ser. No. 09/244,000, filed Feb. 8, 1999 (abandoned), which is a continuation-in-part of U.S. application Ser. No. 09/198,779, filed Nov. 24, 1998 (abandoned), which claims the benefit of U.S. Provisional Appln. Ser. No. 60/067,000, filed Nov. 24, 1997; and to U.S. Provisional Appln. Ser. No. 60/066,873, filed Nov. 25, 1997; and to U.S. Provisional Appln. Ser. No. 60/069,472, filed Dec. 9, 1997; and to U.S. Provisional Appln. Ser. No. 60/074,201, filed Feb. 10, 1998; and to U.S. Provisional Appln. Ser. No. 60/074,280, filed Feb. 10, 1998; and to U.S. Provisional Appln. Ser. No. 60/074,281, filed Feb. 10, 1998; and to U.S. Provisional Appln. Ser. No. 60/074,282, filed Feb. 10, 1998; and to U.S. Provisional Appln. Ser. No. 60/074,565, filed Feb. 12, 1998; and to U.S. Provisional Appln. Ser. No. 60/074,566, filed Feb. 12, 1998; and to U.S. Provisional Appln. Ser. No. 60/074,567, filed Feb. 12, 1998; and to U.S. Provisional Appln. Ser. No. 60/074,789, filed Feb. 19, 1998; and to U.S. Provisional Appln. Ser. No. 60/075,459, filed Feb. 19, 1998; and to U.S. Provisional Appln. Ser. No. 60/075,460, filed Feb. 19, 1998; and to U.S. Provisional Appln. Ser. No. 60/075,461, filed Feb. 19, 1998; and to U.S. Provisional Appln. Ser. No. 60/075,462, filed Feb. 19, 1998; and to U.S. Provisional Appln. Ser. No. 60/075,463, filed Feb. 19, 1998; and to U.S. Provisional Appln. Ser. No. 60/075,464, filed Feb. 19, 1998; and to U.S. Provisional Appln. Ser. No. 60/077,229, filed Mar. 9, 1998; and to U.S. Provisional Appln. Ser. No. 60/077,230, filed Mar. 9, 1998; and to U.S. Provisional Appln. Ser. No. 60/077,231, filed Mar. 9, 1998; and to U.S. Provisional Appln. Ser. No. 60/078,031, filed Mar. 16, 1998; and to U.S. Provisional Appln. Ser. No. 60/078,368, filed Mar. 18, 1998; and to U.S. Provisional Appln. Ser. No. 60/080,844, filed Apr. 7, 1998; and to U.S. Provisional Appln. Ser. No. 60/083,067, filed Apr. 27, 1998; and to U.S. Provisional Appln. Ser. No. 60/083,386, filed Apr. 29, 1998; and to U.S. Provisional Appln. Ser. No. 60/083,387, filed Apr. 29, 1998; and to U.S. Provisional Appln. Ser. No. 60/083,388, filed Apr. 29, 1998; and to U.S. Provisional Appln. Ser. No. 60/083,389, filed Apr. 29, 1998; and to U.S. Provisional Appln. Ser. No. 60/084,684, filed May 8, 1998; and to U.S. Provisional Appln. Ser. No. 60/085,222, filed May 13, 1998; and to U.S. Provisional Appln. Ser. No. 60/085,223, filed May 13, 1998; and to U.S. Provisional Appln. Ser. No. 60/085,224, filed May 13, 1998; and to U.S. Provisional Appln. Ser. No. 60/085,245, filed May 13, 1998; and to U.S. Provisional Appln. Ser. No. 60/086,183, filed May 21, 1998; and to U.S. Provisional Appln. Ser. No. 60/086,184, filed May 21, 1998; and to U.S. Provisional Appln. Ser. No. 60/086,185, filed May 21, 1998; and to U.S. Provisional Appln. Ser. No. 60/086,186, filed May 21, 1998; and to U.S. Provisional Appln. Ser. No. 60/086,187, filed May 21, 1998; and to U.S. Provisional Appln. Ser. No. 60/086,188, filed May 21, 1998; and to U.S. Provisional Appln. Ser. No. 60/086,339, filed May 21, 1998; and to U.S. Provisional Appln. Ser. No. 60/089,524, filed Jun. 16, 1998; and to U.S. Provisional Appln. Ser. No. 60/089,810, filed Jun. 18, 1998; and to U.S. Provisional Appln. Ser. No. 60/089,814, filed Jun. 18, 1998; and to U.S. Provisional Appln. Ser. No. 60/091,247, filed Jun. 30, 1998; and to U.S. Provisional Appln. Ser. No. 60/092,036, filed Jul. 8, 1998; and to U.S. Provisional Appln. Ser. No. 60/099,667, filed Sep. 9, 1998; and to U.S. Provisional Appln. Ser. No. 60/099,668, filed Sep. 9, 1998; and to U.S. Provisional Appln. Ser. No. 60/099,670, filed Sep. 9, 1998; and to U.S. Provisional Appln. Ser. No. 60/099,697, filed Sep. 9, 1998; and to U.S. Provisional Appln. Ser. No. 60/100,672, filed Sep. 16, 1998; and to U.S. Provisional Appln. Ser. No. 60/100,673, filed Sep. 16, 1998; and to U.S. Provisional Appln. Ser. No. 60/100,674, filed Sep. 16, 1998; and to U.S. Provisional Appln. Ser. No. 60/101,130, filed Sep. 21, 1998; and to U.S. Provisional Appln. Ser. No. 60/101,132, filed Sep. 21, 1998; and to U.S. Provisional Appln. Ser. No. 60/108,996, filed Nov. 18, 1998; and to U.S. Provisional Appln. Ser. No. 60/109,018, filed Nov. 18, 1998. U.S. application Ser. No. 09/244,000 also claims the benefit of U.S. Provisional Appln. Ser. No. 60/074,201, filed Feb. 10, 1998; and to U.S. Provisional Appln. Ser. No. 60/074,280, filed Feb. 10, 1998; and to U.S. Provisional Appln. Ser. No. 60/074,281, filed Feb. 10, 1998; and to U.S. Provisional Appln. Ser. No. 60/074,565, filed Feb. 12, 1998; and to U.S. Provisional Appln. Ser. No. 60/074,566, filed Feb. 12, 1998; and to U.S. Provisional Appln. Ser. No. 60/074,567, filed Feb. 12, 1998; and to U.S. Provisional Appln. Ser. No. 60/074,789, filed Feb. 19, 1998; and to U.S. Provisional Appln. Ser. No. 60/075,459, filed Feb. 19, 1998; and to U.S. Provisional Appln. Ser. No. 60/075,460, filed Feb. 19, 1998; and to U.S. Provisional Appln. Ser. No. 60/075,461, filed Feb. 19, 1998; and to U.S. Provisional Appln. Ser. No. 60/075,463, filed Feb. 19, 1998; and to U.S. Provisional Appln. Ser. No. 60/075,464, filed Feb. 19, 1998; and to U.S. Provisional Appln. Ser. No. 60/086,183, filed May 21, 1998; and to U.S. Provisional Appln. Ser. No. 60/086,188, filed May 21, 1998. U.S. application Ser. No. 09/371,146 is also a continuation-in-part of U.S. application Ser. No. 09/252,974, filed Feb. 19, 1999 (abandoned), which claims the benefit of U.S. Provisional Appln. Ser. No. 60/076,709, filed Mar. 4, 1998; and to U.S. Provisional Appln. Ser. No. 60/084,684, filed May 8, 1998. U.S. application Ser. No. 09/371,146 is also a continuation-in-part of U.S. application Ser. No. 09/262,979, filed Mar. 4, 1999 (abandoned), which claims the benefit of U.S. Provisional Appln. Ser. No. 60/076,912, filed Mar. 6, 1998. U.S. application Ser. No. 09/371,146 is also a continuation-in-part of U.S. application Ser. No. 09/304,517, filed May 6, 1999 (abandoned). U.S. application Ser. No. 09/371,146 is also a continuation-in-part of U.S. application Ser. No. 09/233,218, filed Jan. 20, 1999, which is a continuation-in-part of U.S. application Ser. No. 09/198,779, filed Nov. 24, 1998 (abandoned), which claims the benefit of U.S. Provisional Appln. Ser. No. 60/067,000, filed Nov. 24, 1997; and to U.S. Provisional Appln. Ser. No. 60/066,873, filed Nov. 25, 1997; and to U.S. Provisional Appln. Ser. No. 60/069,472, filed Dec. 9, 1997; and to U.S. Provisional Appln. Ser. No. 60/074,201, filed Feb. 10, 1998; and to U.S. Provisional Appln. Ser. No. 60/074,280, filed Feb. 10, 1998; and to U.S. Provisional Appln. Ser. No. 60/074,281, filed Feb. 10, 1998; and to U.S. Provisional Appln. Ser. No. 60/074,282, filed Feb. 10, 1998; and to U.S. Provisional Appln. Ser. No. 60/074,565, filed Feb. 12, 1998; and to U.S. Provisional Appln. Ser. No. 60/074,566, filed Feb. 12, 1998; and to U.S. Provisional Appln. Ser. No. 60/074,567, filed Feb. 12, 1998; and to U.S. Provisional Appln. Ser. No. 60/074,789, filed Feb. 19, 1998; and to U.S. Provisional Appln. Ser. No. 60/075,459, filed Feb. 19, 1998; and to U.S. Provisional Appln. Ser. No. 60/075,460, filed Feb. 19, 1998; and to U.S. Provisional Appln. Ser. No. 60/075,461, filed Feb. 19, 1998; and to U.S. Provisional Appln. Ser. No. 60/075,462, filed Feb. 19, 1998; and to U.S. Provisional Appln. Ser. No. 60/075,463, filed Feb. 19, 1998; and to U.S. Provisional Appln. Ser. No. 60/075,464, filed Feb. 19, 1998; and to U.S. Provisional Appln. Ser. No. 60/077,229, filed Mar. 9, 1998; and to U.S. Provisional Appln. Ser. No. 60/077,230, filed Mar. 9, 1998; and to U.S. Provisional Appln. Ser. No. 60/077,231, filed Mar. 9, 1998; and to U.S. Provisional Appln. Ser. No. 60/078,031, filed Mar. 16, 1998; and to U.S. Provisional Appln. Ser. No. 60/078,368, filed Mar. 18, 1998; and to U.S. Provisional Appln. Ser. No. 60/080,844, filed Apr. 7, 1998; and to U.S. Provisional Appln. Ser. No. 60/083,067, filed Apr. 27, 1998; and to U.S. Provisional Appln. Ser. No. 60/083,386, filed Apr. 29, 1998; and to U.S. Provisional Appln. Ser. No. 60/083,387, filed Apr. 29, 1998; and to U.S. Provisional Appln. Ser. No. 60/083,388, filed Apr. 29, 1998; and to U.S. Provisional Appln. Ser. No. 60/083,389, filed Apr. 29, 1998; and to U.S. Provisional Appln. Ser. No. 60/084,684, filed May 8, 1998; and to U.S. Provisional Appln. Ser. No. 60/085,222, filed May 13, 1998; and to U.S. Provisional Appln. Ser. No. 60/085,223, filed May 13, 1998; and to U.S. Provisional Appln. Ser. No. 60/085,224, filed May 13, 1998; and to U.S. Provisional Appln. Ser. No. 60/085,245, filed May 13, 1998; and to U.S. Provisional Appln. Ser. No. 60/086,183, filed May 21, 1998; and to U.S. Provisional Appln. Ser. No. 60/086,184, filed May 21, 1998; and to U.S. Provisional Appln. Ser. No. 60/086,185, filed May 21, 1998; and to U.S. Provisional Appln. Ser. No. 60/086,186, filed May 21, 1998; and to U.S. Provisional Appln. Ser. No. 60/086,187, filed May 21, 1998; and to U.S. Provisional Appln. Ser. No. 60/086,188, filed May 21, 1998; and to U.S. Provisional Appln. Ser. No. 60/086,339, filed May 21, 1998; and to U.S. Provisional Appln. Ser. No. 60/089,524, filed Jun. 16, 1998; and to U.S. Provisional Appln. Ser. No. 60/089,810, filed Jun. 18, 1998; and to U.S. Provisional Appln. Ser. No. 60/089,814, filed Jun. 18, 1998; and to U.S. Provisional Appln. Ser. No. 60/091,247, filed Jun. 30, 1998; and to U.S. Provisional Appln. Ser. No. 60/092,036, filed Jul. 8, 1998; and to U.S. Provisional Appln. Ser. No. 60/099,667, filed Sep. 9, 1998; and to U.S. Provisional Appln. Ser. No. 60/099,668, filed Sep. 9, 1998; and to U.S. Provisional Appln. Ser. No. 60/099,670, filed Sep. 9, 1998; and to U.S. Provisional Appln. Ser. No. 60/099,697, filed Sep. 9, 1998; and to U.S. Provisional Appln. Ser. No. 60/100,672, filed Sep. 16, 1998; and to U.S. Provisional Appln. Ser. No. 60/100,673, filed Sep. 16, 1998; and to U.S. Provisional Appln. Ser. No. 60/100,674, filed Sep. 16, 1998; and to U.S. Provisional Appln. Ser. No. 60/101,130, filed Sep. 21, 1998; and to U.S. Provisional Appln. Ser. No. 60/101,132, filed Sep. 21, 1998; and to U.S. Provisional Appln. Ser. No. 60/108,996, filed Nov. 18, 1998; and to U.S. Provisional Appln. Ser. No. 60/109,018, filed Nov. 18, 1998. U.S. application Ser. No. 09/233,218 is also a continuation-in-part of U.S. application Ser. No. 09/227,586, filed Jan. 8, 1999 (abandoned), which claims the benefit of U.S. Provisional Appln. Ser. No. 60/071,064, filed Jan. 9, 1998; and to U.S. Provisional Appln. Ser. No. 60/090,170, filed Jun. 22, 1998; and to U.S. Provisional Appln. Ser. No. 60/092,036, filed Jul. 8, 1998. U.S. application Ser. No. 09/233,218 is also a continuation-in-part of U.S. application Ser. No. 09/229,413, filed Jan. 12, 1999 (abandoned), which claims the benefit of U.S. Appln. Ser. No. 60/071,479, filed Jan. 13, 1998; and to U.S. Provisional Appln. Ser. No. 60/085,533, filed May 15, 1998; and to U.S. Provisional Appln. Ser. No. 60/089,806, filed Jun. 18, 1998; and to U.S. Provisional Appln. Ser. No. 60/089,807, filed Jun. 18, 1998; and to U.S. Provisional Appln. Ser. No. 60/089,808, filed Jun. 18, 1998; and to U.S. Provisional Appln. Ser. No. 60/089,811, filed Jun. 18, 1998; and to U.S. Provisional Appln. Ser. No. 60/089,812, filed Jun. 18, 1998; and to U.S. Provisional Appln. Ser. No. 60/089,813, filed Jun. 18, 1998; and to U.S. Provisional Appln. Ser. No. 60/091,247, filed Jun. 30, 1998; and to U.S. Provisional Appln. Ser. No. 60/091,405, filed Jun. 30, 1998; and to U.S. Provisional Appln. Ser. No. 60/099,697, filed Sep. 9, 1998; and to U.S. Provisional Appln. Ser. No. 60/100,963, filed Sep. 17, 1998; and to U.S. Provisional Appln. Ser. No. 60/101,343, filed Sep. 22, 1998; and to U.S. Provisional Appln. Ser. No. 60/101,344, filed Sep. 22, 1998; and to U.S. Provisional Appln. Ser. No. 60/101,347, filed Sep. 22, 1998; and to U.S. Provisional Appln. Ser. No. 60/101,508, filed Sep. 22, 1998; and to U.S. Provisional Appln. Ser. No. 60/101,707, filed Sep. 25, 1998; and to U.S. Provisional Appln. Ser. No. 60/104,124, filed Oct. 13, 1998; and to U.S. Provisional Appln. Ser. No. 60/104,126, filed Oct. 13, 1998; and to U.S. Provisional Appln. Ser. No. 60/104,127, filed Oct. 13, 1998; and to U.S. Provisional Appln. Ser. No. 60/104,128, filed Oct. 13, 1998; and to U.S. Provisional Appln. Ser. No. 60/111,981, filed Dec. 11, 1998. U.S. application Ser. No. 09/233,218 also claims the benefit of U.S. Provisional Appln. Ser. No. 60/072,027, filed Jan. 21, 1998; and to U.S. Provisional Appln. Ser. No. 60/072,888, filed Jan. 27, 1998; and to U.S. Provisional Appln. Ser. No. 60/076,709, filed Mar. 4, 1998; and to U.S. Provisional Appln. Ser. No. 60/076,912, filed Mar. 6, 1998; and to U.S. Provisional Appln. Ser. No. 60/078,031, filed Mar. 16, 1998; and to U.S. Provisional Appln. Ser. No. 60/083,390, filed Apr. 29, 1998; and to U.S. Provisional Appln. Ser. No. 60/084,684, filed May 8, 1998; and to U.S. Provisional Appln. Ser. No. 60/085,057, filed May 8, 1998; and to U.S. Provisional Appln. Ser. No. 60/085,429, filed May 8, 1998; and to U.S. Provisional Appln. Ser. No. 60/085,245, filed May 13, 1998; and to U.S. Provisional Appln. Ser. No. 60/085,533, filed May 15, 1998; and to U.S. Provisional Appln. Ser. No. 60/085,940, filed May 19, 1998; and to U.S. Provisional Appln. Ser. No. 60/086,339, filed May 21, 1998; and to U.S. Provisional Appln. Ser. No. 60/086,594, filed May 22, 1998; and to U.S. Provisional Appln. Ser. No. 60/086,608, filed May 22, 1998; and to U.S. Provisional Appln. Ser. No. 60/087,422, filed Jun. 1, 1998; and to U.S. Provisional Appln. Ser. No. 60/087,631, filed Jun. 2, 1998; and to U.S. Provisional Appln. Ser. No. 60/087,762, filed Jun. 2, 1998; and to U.S. Provisional Appln. Ser. No. 60/087,972 filed Jun. 4, 1998; and to U.S. Provisional Appln. Ser. No. 60/087,973 filed Jun. 4, 1998; and to U.S. Provisional Appln. Ser. No. 60/088,441, filed Jun. 8, 1998; and to U.S. Provisional Appln. Ser. No. 60/089,627, filed Jun. 16, 1998; and to U.S. Provisional Appln. Ser. No. 60/089,789, filed Jun. 18, 1998; and to U.S. Provisional Appln. Ser. No. 60/090,170, filed Jun. 22, 1998; and to U.S. Provisional Appln. Ser. No. 60/090,856, filed Jun. 26, 1998; and to U.S. Provisional Appln. Ser. No. 60/090,928, filed Jun. 26, 1998; and to U.S. Provisional Appln. Ser. No. 60/091,035, filed Jun. 29, 1998; and to U.S. Provisional Appln. Ser. No. 60/091,247, filed Jun. 30, 1998; and to U.S. Provisional Appln. Ser. No. 60/091,405, filed Jun. 30, 1998; and to U.S. Provisional Appln. Ser. No. 60/092,036, filed Jul. 8, 1998; and to U.S. Provisional Appln. Ser. No. 60/100,963, filed Sep. 17, 1998; and to U.S. Provisional Appln. Ser. No. 60/110,108, filed Nov. 25, 1998; and to U.S. Provisional Appln. Ser. No. 60/110,109, filed Nov. 25, 1998; and to U.S. Provisional Appln. Ser. No. 60/111,033, filed Dec. 4, 1998; and to U.S. Provisional Appln. Ser. No. 60/111,742, filed Dec. 10, 1998. U.S. application Ser. No. 09/371,146 is also a continuation-in-part of U.S. application Ser. No. 09/237,183, filed Jan. 26, 1999, which is a continuation-in-part of U.S. application Ser. No. 09/198,779, filed Nov. 24, 1998 (abandoned), which claims the benefit of U.S. Provisional Appln. Ser. No. 60/067,000, filed Nov. 24, 1997; and to U.S. Provisional Appln. Ser. No. 60/066,873, filed Nov. 25, 1997; and to U.S. Provisional Appln. Ser. No. 60/069,472, filed Dec. 9, 1997; and to U.S. Provisional Appln. Ser. No. 60/074,201, filed Feb. 10, 1998; and to U.S. Provisional Appln. Ser. No. 60/074,280, filed Feb. 10, 1998; and to U.S. Provisional Appln. Ser. No. 60/074,281, filed Feb. 10, 1998; and to U.S. Provisional Appln. Ser. No. 60/074,282, filed Feb. 10, 1998; and to U.S. Provisional Appln. Ser. No. 60/074,565, filed Feb. 12, 1998; and to U.S. Provisional Appln. Ser. No. 60/074,566, filed Feb. 12, 1998; and to U.S. Provisional Appln. Ser. No. 60/074,567, filed Feb. 12, 1998; and to U.S. Provisional Appln. Ser. No. 60/074,789, filed Feb. 19, 1998; and to U.S. Provisional Appln. Ser. No. 60/075,459, filed Feb. 19, 1998; and to U.S. Provisional Appln. Ser. No. 60/075,460, filed Feb. 19, 1998; and to U.S. Provisional Appln. Ser. No. 60/075,461, filed Feb. 19, 1998; and to U.S. Provisional Appln. Ser. No. 60/075,462, filed Feb. 19, 1998; and to U.S. Provisional Appln. Ser. No. 60/075,463, filed Feb. 19, 1998; and to U.S. Provisional Appln. Ser. No. 60/075,464, filed Feb. 19, 1998; and to U.S. Provisional Appln. Ser. No. 60/077,229, filed Mar. 9, 1998; and to U.S. Provisional Appln. Ser. No. 60/077,230, filed Mar. 9, 1998; and to U.S. Provisional Appln. Ser. No. 60/077,231, filed Mar. 9, 1998; and to U.S. Provisional Appln. Ser. No. 60/078,031, filed Mar. 16, 1998; and to U.S. Provisional Appln. Ser. No. 60/078,368, filed Mar. 18, 1998; and to U.S. Provisional Appln. Ser. No. 60/080,844, filed Apr. 7, 1998; and to U.S. Provisional Appln. Ser. No. 60/083,067, filed Apr. 27, 1998; and to U.S. Provisional Appln. Ser. No. 60/083,386, filed Apr. 29, 1998; and to U.S. Provisional Appln. Ser. No. 60/083,387, filed Apr. 29, 1998; and to U.S. Provisional Appln. Ser. No. 60/083,388, filed Apr. 29, 1998; and to U.S. Provisional Appln. Ser. No. 60/083,389, filed Apr. 29, 1998; and to U.S. Provisional Appln. Ser. No. 60/084,684, filed May 8, 1998; and to U.S. Provisional Appln. Ser. No. 60/085,222, filed May 13, 1998; and to U.S. Provisional Appln. Ser. No. 60/085,223, filed May 13, 1998; and to U.S. Provisional Appln. Ser. No. 60/085,224, filed May 13, 1998; and to U.S. Provisional Appln. Ser. No. 60/085,245, filed May 13, 1998; and to U.S. Provisional Appln. Ser. No. 60/086,183, filed May 21, 1998; and to U.S. Provisional Appln. Ser. No. 60/086,184, filed May 21, 1998; and to U.S. Provisional Appln. Ser. No. 60/086,185, filed May 21, 1998; and to U.S. Provisional Appln. Ser. No. 60/086,186, filed May 21, 1998; and to U.S. Provisional Appln. Ser. No. 60/086,187, filed May 21, 1998; and to U.S. Provisional Appln. Ser. No. 60/086,188, filed May 21, 1998; and to U.S. Provisional Appln. Ser. No. 60/086,339, filed May 21, 1998; and to U.S. Provisional Appln. Ser. No. 60/089,524, filed Jun. 16, 1998; and to U.S. Provisional Appln. Ser. No. 60/089,810, filed Jun. 18, 1998; and to U.S. Provisional Appln. Ser. No. 60/089,814, filed Jun. 18, 1998; and to U.S. Provisional Appln. Ser. No. 60/091,247, filed Jun. 30, 1998; and to U.S. Provisional Appln. Ser. No. 60/092,036, filed Jul. 8, 1998; and to U.S. Provisional Appln. Ser. No. 60/099,667, filed Sep. 9, 1998; and to U.S. Provisional Appln. Ser. No. 60/099,668, filed Sep. 9, 1998; and to U.S. Provisional Appln. Ser. No. 60/099,670, filed Sep. 9, 1998; and to U.S. Provisional Appln. Ser. No. 60/099,697, filed Sep. 9, 1998; and to U.S. Provisional Appln. Ser. No. 60/100,672, filed Sep. 16, 1998; and to U.S. Provisional Appln. Ser. No. 60/100,673, filed Sep. 16, 1998; and to U.S. Provisional Appln. Ser. No. 60/100,674, filed Sep. 16, 1998; and to U.S. Provisional Appln. Ser. No. 60/101,130, filed Sep. 21, 1998; and to U.S. Provisional Appln. Ser. No. 60/101,132, filed Sep. 21, 1998; and to U.S. Provisional Appln. Ser. No. 60/108,996, filed Nov. 18, 1998; and to U.S. Provisional Appln. Ser. No. 60/109,018, filed Nov. 18, 1998. U.S. application Ser. No. 09/237,183 is also a continuation-in-part of U.S. application Ser. No. 09/227,586, filed Jan. 8, 1999 (abandoned), which claims the benefit of U.S. Provisional Appln. Ser. No. 60/071,064, filed Jan. 9, 1998; and to U.S. Provisional Appln. Ser. No. 60/090,170, filed Jun. 22, 1998; and to U.S. Provisional Appln. Ser. No. 60/092,036, filed Jul. 8, 1998. U.S. application Ser. No. 09/237,183 is also a continuation-in-part of U.S. application Ser. No. 09/229,413, filed Jan. 12, 1999 (abandoned), which claims the benefit of U.S. Appln. Ser. No. 60/071,479, filed Jan. 13, 1998; and to U.S. Provisional Appln. Ser. No. 60/085,533, filed May 15, 1998; and to U.S. Provisional Appln. Ser. No. 60/089,806, filed Jun. 18, 1998; and to U.S. Provisional Appln. Ser. No. 60/089,807, filed Jun. 18, 1998; and to U.S. Provisional Appln. Ser. No. 60/089,808, filed Jun. 18, 1998; and to U.S. Provisional Appln. Ser. No. 60/089,811, filed Jun. 18, 1998; and to U.S. Provisional Appln. Ser. No. 60/089,812, filed Jun. 18, 1998; and to U.S. Provisional Appln. Ser. No. 60/089,813, filed Jun. 18, 1998; and to U.S. Provisional Appln. Ser. No. 60/091,247, filed Jun. 30, 1998; and to U.S. Provisional Appln. Ser. No. 60/091,405, filed Jun. 30, 1998; and to U.S. Provisional Appln. Ser. No. 60/099,697, filed Sep. 9, 1998; and to U.S. Provisional Appln. Ser. No. 60/100,963, filed Sep. 17, 1998; and to U.S. Provisional Appln. Ser. No. 60/101,343, filed Sep. 22, 1998; and to U.S. Provisional Appln. Ser. No. 60/101,344, filed Sep. 22, 1998; and to U.S. Provisional Appln. Ser. No. 60/101,347, filed Sep. 22, 1998; and to U.S. Provisional Appln. Ser. No. 60/101,508, filed Sep. 22, 1998; and to U.S. Provisional Appln. Ser. No. 60/101,707, filed Sep. 25, 1998; and to U.S. Provisional Appln. Ser. No. 60/104,124, filed Oct. 13, 1998; and to U.S. Provisional Appln. Ser. No. 60/104,126, filed Oct. 13, 1998; and to U.S. Provisional Appln. Ser. No. 60/104,127, filed Oct. 13, 1998; and to U.S. Provisional Appln. Ser. No. 60/104,128, filed Oct. 13, 1998; and to U.S. Provisional Appln. Ser. No. 60/111,981, filed Dec. 11, 1998. U.S. application Ser. No. 09/237,183 is also a continuation-in-part of U.S. application Ser. No. 09/233,218, filed Jan. 20, 1999, which is a continuation-in-part of U.S. application Ser. No. 09/198,779, filed Nov. 24, 1998 (abandoned), which claims the benefit of U.S. Provisional Appln. Ser. No. 60/067,000, filed Nov. 24, 1997; and to U.S. Provisional Appln. Ser. No. 60/066,873, filed Nov. 25, 1997; and to U.S. Provisional Appln. Ser. No. 60/069,472, filed Dec. 9, 1997; and to U.S. Provisional Appln. Ser. No. 60/074,201, filed Feb. 10, 1998; and to U.S. Provisional Appln. Ser. No. 60/074,280, filed Feb. 10, 1998; and to U.S. Provisional Appln. Ser. No. 60/074,281, filed Feb. 10, 1998; and to U.S. Provisional Appln. Ser. No. 60/074,282, filed Feb. 10, 1998; and to U.S. Provisional Appln. Ser. No. 60/074,565, filed Feb. 12, 1998; and to U.S. Provisional Appln. Ser. No. 60/074,566, filed Feb. 12, 1998; and to U.S. Provisional Appln. Ser. No. 60/074,567, filed Feb. 12, 1998; and to U.S. Provisional Appln. Ser. No. 60/074,789, filed Feb. 19, 1998; and to U.S. Provisional Appln. Ser. No. 60/075,459, filed Feb. 19, 1998; and to U.S. Provisional Appln. Ser. No. 60/075,460, filed Feb. 19, 1998; and to U.S. Provisional Appln. Ser. No. 60/075,461, filed Feb. 19, 1998; and to U.S. Provisional Appln. Ser. No. 60/075,462, filed Feb. 19, 1998; and to U.S. Provisional Appln. Ser. No. 60/075,463, filed Feb. 19, 1998; and to U.S. Provisional Appln. Ser. No. 60/075,464, filed Feb. 19, 1998; and to U.S. Provisional Appln. Ser. No. 60/077,229, filed Mar. 9, 1998; and to U.S. Provisional Appln. Ser. No. 60/077,230, filed Mar. 9, 1998; and to U.S. Provisional Appln. Ser. No. 60/077,231, filed Mar. 9, 1998; and to U.S. Provisional Appln. Ser. No. 60/078,031, filed Mar. 16, 1998; and to U.S. Provisional Appln. Ser. No. 60/078,368, filed Mar. 18, 1998; and to U.S. Provisional Appln. Ser. No. 60/080,844, filed Apr. 7, 1998; and to U.S. Provisional Appln. Ser. No. 60/083,067, filed Apr. 27, 1998; and to U.S. Provisional Appln. Ser. No. 60/083,386, filed Apr. 29, 1998; and to U.S. Provisional Appln. Ser. No. 60/083,387, filed Apr. 29, 1998; and to U.S. Provisional Appln. Ser. No. 60/083,388, filed Apr. 29, 1998; and to U.S. Provisional Appln. Ser. No. 60/083,389, filed Apr. 29, 1998; and to U.S. Provisional Appln. Ser. No. 60/084,684, filed May 8, 1998; and to U.S. Provisional Appln. Ser. No. 60/085,222, filed May 13, 1998; and to U.S. Provisional Appln. Ser. No. 60/085,223, filed May 13, 1998; and to U.S. Provisional Appln. Ser. No. 60/085,224, filed May 13, 1998; and to U.S. Provisional Appln. Ser. No. 60/085,245, filed May 13, 1998; and to U.S. Provisional Appln. Ser. No. 60/086,183, filed May 21, 1998; and to U.S. Provisional Appln. Ser. No. 60/086,184, filed May 21, 1998; and to U.S. Provisional Appln. Ser. No. 60/086,185, filed May 21, 1998; and to U.S. Provisional Appln. Ser. No. 60/086,186, filed May 21, 1998; and to U.S. Provisional Appln. Ser. No. 60/086,187, filed May 21, 1998; and to U.S. Provisional Appln. Ser. No. 60/086,188, filed May 21, 1998; and to U.S. Provisional Appln. Ser. No. 60/086,339, filed May 21, 1998; and to U.S. Provisional Appln. Ser. No. 60/089,524, filed Jun. 16, 1998; and to U.S. Provisional Appln. Ser. No. 60/089,810, filed Jun. 18, 1998; and to U.S. Provisional Appln. Ser. No. 60/089,814, filed Jun. 18, 1998; and to U.S. Provisional Appln. Ser. No. 60/091,247, filed Jun. 30, 1998; and to U.S. Provisional Appln. Ser. No. 60/092,036, filed Jul. 8, 1998; and to U.S. Provisional Appln. Ser. No. 60/099,667, filed Sep. 9, 1998; and to U.S. Provisional Appln. Ser. No. 60/099,668, filed Sep. 9, 1998; and to U.S. Provisional Appln. Ser. No. 60/099,670, filed Sep. 9, 1998; and to U.S. Provisional Appln. Ser. No. 60/099,697, filed Sep. 9, 1998; and to U.S. Provisional Appln. Ser. No. 60/100,672, filed Sep. 16, 1998; and to U.S. Provisional Appln. Ser. No. 60/100,673, filed Sep. 16, 1998; and to U.S. Provisional Appln. Ser. No. 60/100,674, filed Sep. 16, 1998; and to U.S. Provisional Appln. Ser. No. 60/101,130, filed Sep. 21, 1998; and to U.S. Provisional Appln. Ser. No. 60/101,132, filed Sep. 21, 1998; and to U.S. Provisional Appln. Ser. No. 60/108,996, filed Nov. 18, 1998; and to U.S. Provisional Appln. Ser. No. 60/109,018, filed Nov. 18, 1998. U.S. application Ser. No. 09/233,218 is also a continuation-in-part of U.S. application Ser. No. 09/227,586, filed Jan. 8, 1999 (abandoned), which claims the benefit of U.S. Provisional Appln. Ser. No. 60/071,064, filed Jan. 9, 1998; and to U.S. Provisional Appln. Ser. No. 60/090,170, filed Jun. 22, 1998; and to U.S. Provisional Appln. Ser. No. 60/092,036, filed Jul. 8, 1998. U.S. application Ser. No. 09/233,218 is also a continuation-in-part of U.S. application Ser. No. 09/229,413, filed Jan. 12, 1999 (abandoned), which claims the benefit of U.S. Appln. Ser. No. 60/071,479, filed Jan. 13, 1998; and to U.S. Provisional Appln. Ser. No. 60/085,533, filed May 15, 1998; and to U.S. Provisional Appln. Ser. No. 60/089,806, filed Jun. 18, 1998; and to U.S. Provisional Appln. Ser. No. 60/089,807, filed Jun. 18, 1998; and to U.S. Provisional Appln. Ser. No. 60/089,808, filed Jun. 18, 1998; and to U.S. Provisional Appln. Ser. No. 60/089,811, filed Jun. 18, 1998; and to U.S. Provisional Appln. Ser. No. 60/089,812, filed Jun. 18, 1998; and to U.S. Provisional Appln. Ser. No. 60/089,813, filed Jun. 18, 1998; and to U.S. Provisional Appln. Ser. No. 60/091,247, filed Jun. 30, 1998; and to U.S. Provisional Appln. Ser. No. 60/091,405, filed Jun. 30, 1998; and to U.S. Provisional Appln. Ser. No. 60/099,697, filed Sep. 9, 1998; and to U.S. Provisional Appln. Ser. No. 60/100,963, filed Sep. 17, 1998; and to U.S. Provisional Appln. Ser. No. 60/101,343, filed Sep. 22, 1998; and to U.S. Provisional Appln. Ser. No. 60/101,344, filed Sep. 22, 1998; and to U.S. Provisional Appln. Ser. No. 60/101,347, filed Sep. 22, 1998; and to U.S. Provisional Appln. Ser. No. 60/101,508, filed Sep. 22, 1998; and to U.S. Provisional Appln. Ser. No. 60/101,707, filed Sep. 25, 1998; and to U.S. Provisional Appln. Ser. No. 60/104,124, filed Oct. 13, 1998; and to U.S. Provisional Appln. Ser. No. 60/104,126, filed Oct. 13, 1998; and to U.S. Provisional Appln. Ser. No. 60/104,127, filed Oct. 13, 1998; and to U.S. Provisional Appln. Ser. No. 60/104,128, filed Oct. 13, 1998; and to U.S. Provisional Appln. Ser. No. 60/111,981, filed Dec. 11, 1998. U.S. application Ser. No. 09/233,218 also claims the benefit of U.S. Provisional Appln. Ser. No. 60/072,027, filed Jan. 21, 1998; and to U.S. Provisional Appln. Ser. No. 60/072,888, filed Jan. 27, 1998; and to U.S. Provisional Appln. Ser. No. 60/076,709, filed Mar. 4, 1998; and to U.S. Provisional Appln. Ser. No. 60/076,912, filed Mar. 6, 1998; and to U.S. Provisional Appln. Ser. No. 60/078,031, filed Mar. 16, 1998; and to U.S. Provisional Appln. Ser. No. 60/083,390, filed Apr. 29, 1998; and to U.S. Provisional Appln. Ser. No. 60/084,684, filed May 8, 1998; and to U.S. Provisional Appln. Ser. No. 60/085,057, filed May 8, 1998; and to U.S. Provisional Appln. Ser. No. 60/085,429, filed May 8, 1998; and to U.S. Provisional Appln. Ser. No. 60/085,245, filed May 13, 1998; and to U.S. Provisional Appln. Ser. No. 60/085,533, filed May 15, 1998; and to U.S. Provisional Appln. Ser. No. 60/085,940, filed May 19, 1998; and to U.S. Provisional Appln. Ser. No. 60/086,339, filed May 21, 1998; and to U.S. Provisional Appln. Ser. No. 60/086,594, filed May 22, 1998; and to U.S. Provisional Appln. Ser. No. 60/086,608, filed May 22, 1998; and to U.S. Provisional Appln. Ser. No. 60/087,422, filed Jun. 1, 1998; and to U.S. Provisional Appln. Ser. No. 60/087,631, filed Jun. 2, 1998; and to U.S. Provisional Appln. Ser. No. 60/087,762, filed Jun. 2, 1998; and to U.S. Provisional Appln. Ser. No. 60/087,972 filed Jun. 4, 1998; and to U.S. Provisional Appln. Ser. No. 60/087,973 filed Jun. 4, 1998; and to U.S. Provisional Appln. Ser. No. 60/088,441, filed Jun. 8, 1998; and to U.S. Provisional Appln. Ser. No. 60/089,627, filed Jun. 16, 1998; and to U.S. Provisional Appln. Ser. No. 60/089,789, filed Jun. 18, 1998; and to U.S. Provisional Appln. Ser. No. 60/090,170, filed Jun. 22, 1998; and to U.S. Provisional Appln. Ser. No. 60/090,856, filed Jun. 26, 1998; and to U.S. Provisional Appln. Ser. No. 60/090,928, filed Jun. 26, 1998; and to U.S. Provisional Appln. Ser. No. 60/091,035, filed Jun. 29, 1998; and to U.S. Provisional Appln. Ser. No. 60/091,247, filed Jun. 30, 1998; and to U.S. Provisional Appln. Ser. No. 60/091,405, filed Jun. 30, 1998; and to U.S. Provisional Appln. Ser. No. 60/092,036, filed Jul. 8, 1998; and to U.S. Provisional Appln. Ser. No. 60/100,963, filed Sep. 17, 1998; and to U.S. Provisional Appln. Ser. No. 60/110,108, filed Nov. 25, 1998; and to U.S. Provisional Appln. Ser. No. 60/110,109, filed Nov. 25, 1998; and to U.S. Provisional Appln. Ser. No. 60/111,033, filed Dec. 4, 1998; and to U.S. Provisional Appln. Ser. No. 60/111,742, filed Dec. 10, 1998. U.S. application Ser. No. 09/237,183 also claims the benefit of U.S. Provisional Appln. Ser. No. 60/072,888, filed Jan. 27, 1998; and to U.S. Provisional Appln. Ser. No. 60/076,709, filed Mar. 4, 1998; and to U.S. Provisional Appln. Ser. No. 60/076,912, filed Mar. 6, 1998; and to U.S. Provisional Appln. Ser. No. 60/078,031, filed Mar. 16, 1998; and to U.S. Provisional Appln. Ser. No. 60/083,390, filed Apr. 29, 1998; and to U.S. Provisional Appln. Ser. No. 60/084,684, filed May 8, 1998; and to U.S. Provisional Appln. Ser. No. 60/085,057, filed May 8, 1998; and to U.S. Provisional Appln. Ser. No. 60/085,429, filed May 8, 1998; and to U.S. Provisional Appln. Ser. No. 60/085,245, filed May 13, 1998; and to U.S. Provisional Appln. Ser. No. 60/085,533, filed May 15, 1998; and to U.S. Provisional Appln. Ser. No. 60/085,940, filed May 19, 1998; and to U.S. Provisional Appln. Ser. No. 60/086,339, filed May 21, 1998; and to U.S. Provisional Appln. Ser. No. 60/086,594, filed May 22, 1998; and to U.S. Provisional Appln. Ser. No. 60/086,608, filed May 22, 1998; and to U.S. Provisional Appln. Ser. No. 60/087,422, filed Jun. 1, 1998; and to U.S. Provisional Appln. Ser. No. 60/087,631, filed Jun. 2, 1998; and to U.S. Provisional Appln. Ser. No. 60/087,762, filed Jun. 2, 1998; and to U.S. Provisional Appln. Ser. No. 60/087,972 filed Jun. 4, 1998; and to U.S. Provisional Appln. Ser. No. 60/087,973 filed Jun. 4, 1998; and to U.S. Provisional Appln. Ser. No. 60/088,441, filed Jun. 8, 1998; and to U.S. Provisional Appln. Ser. No. 60/089,627, filed Jun. 16, 1998; and to U.S. Provisional Appln. Ser. No. 60/089,789, filed Jun. 18, 1998; and to U.S. Provisional Appln. Ser. No. 60/090,170, filed Jun. 22, 1998; and to U.S. Provisional Appln. Ser. No. 60/090,856, filed Jun. 26, 1998; and to U.S. Provisional Appln. Ser. No. 60/090,928, filed Jun. 26, 1998; and to U.S. Provisional Appln. Ser. No. 60/091,035, filed Jun. 29, 1998; and to U.S. Provisional Appln. Ser. No. 60/091,247, filed Jun. 30, 1998; and to U.S. Provisional Appln. Ser. No. 60/091,405, filed Jun. 30, 1998; and to U.S. Provisional Appln. Ser. No. 60/092,036, filed Jul. 8, 1998; and to U.S. Provisional Appln. Ser. No. 60/100,963, filed Sep. 17, 1998; and to U.S. Provisional Appln. Ser. No. 60/110,108, filed Nov. 25, 1998; and to U.S. Provisional Appln. Ser. No. 60/110,109, filed Nov. 25, 1998; and to U.S. Provisional Appln. Ser. No. 60/111,033, filed Dec. 4, 1998; and to U.S. Provisional Appln. Ser. No. 60/111,742, filed Dec. 10, 1998. U.S. application Ser. No. 09/371,146 is also a continuation-in-part of U.S. application Ser. No. 09/267,199, filed Mar. 12, 1999, which is a continuation-in-part of U.S. application Ser. No. 09/198,779, filed Nov. 24, 1998 (abandoned), which claims the benefit of U.S. Provisional Appln. Ser. No. 60/067,000, filed Nov. 24, 1997; and to U.S. Provisional Appln. Ser. No. 60/066,873, filed Nov. 25, 1997; and to U.S. Provisional Appln. Ser. No. 60/069,472, filed Dec. 9, 1997; and to U.S. Provisional Appln. Ser. No. 60/074,201, filed Feb. 10, 1998; and to U.S. Provisional Appln. Ser. No. 60/074,280, filed Feb. 10, 1998; and to U.S. Provisional Appln. Ser. No. 60/074,281, filed Feb. 10, 1998; and to U.S. Provisional Appln. Ser. No. 60/074,282, filed Feb. 10, 1998; and to U.S. Provisional Appln. Ser. No. 60/074,565, filed Feb. 12, 1998; and to U.S. Provisional Appln. Ser. No. 60/074,566, filed Feb. 12, 1998; and to U.S. Provisional Appln. Ser. No. 60/074,567, filed Feb. 12, 1998; and to U.S. Provisional Appln. Ser. No. 60/074,789, filed Feb. 19, 1998; and to U.S. Provisional Appln. Ser. No. 60/075,459, filed Feb. 19, 1998; and to U.S. Provisional Appln. Ser. No. 60/075,460, filed Feb. 19, 1998; and to U.S. Provisional Appln. Ser. No. 60/075,461, filed Feb. 19, 1998; and to U.S. Provisional Appln. Ser. No. 60/075,462, filed Feb. 19, 1998; and to U.S. Provisional Appln. Ser. No. 60/075,463, filed Feb. 19, 1998; and to U.S. Provisional Appln. Ser. No. 60/075,464, filed Feb. 19, 1998; and to U.S. Provisional Appln. Ser. No. 60/077,229, filed Mar. 9, 1998; and to U.S. Provisional Appln. Ser. No. 60/077,230, filed Mar. 9, 1998; and to U.S. Provisional Appln. Ser. No. 60/077,231, filed Mar. 9, 1998; and to U.S. Provisional Appln. Ser. No. 60/078,031, filed Mar. 16, 1998; and to U.S. Provisional Appln. Ser. No. 60/078,368, filed Mar. 18, 1998; and to U.S. Provisional Appln. Ser. No. 60/080,844, filed Apr. 7, 1998; and to U.S. Provisional Appln. Ser. No. 60/083,067, filed Apr. 27, 1998; and to U.S. Provisional Appln. Ser. No. 60/083,386, filed Apr. 29, 1998; and to U.S. Provisional Appln. Ser. No. 60/083,387, filed Apr. 29, 1998; and to U.S. Provisional Appln. Ser. No. 60/083,388, filed Apr. 29, 1998; and to U.S. Provisional Appln. Ser. No. 60/083,389, filed Apr. 29, 1998; and to U.S. Provisional Appln. Ser. No. 60/084,684, filed May 8, 1998; and to U.S. Provisional Appln. Ser. No. 60/085,222, filed May 13, 1998; and to U.S. Provisional Appln. Ser. No. 60/085,223, filed May 13, 1998; and to U.S. Provisional Appln. Ser. No. 60/085,224, filed May 13, 1998; and to U.S. Provisional Appln. Ser. No. 60/085,245, filed May 13, 1998; and to U.S. Provisional Appln. Ser. No. 60/086,183, filed May 21, 1998; and to U.S. Provisional Appln. Ser. No. 60/086,184, filed May 21, 1998; and to U.S. Provisional Appln. Ser. No. 60/086,185, filed May 21, 1998; and to U.S. Provisional Appln. Ser. No. 60/086,186, filed May 21, 1998; and to U.S. Provisional Appln. Ser. No. 60/086,187, filed May 21, 1998; and to U.S. Provisional Appln. Ser. No. 60/086,188, filed May 21, 1998; and to U.S. Provisional Appln. Ser. No. 60/086,339, filed May 21, 1998; and to U.S. Provisional Appln. Ser. No. 60/089,524, filed Jun. 16, 1998; and to U.S. Provisional Appln. Ser. No. 60/089,810, filed Jun. 18, 1998; and to U.S. Provisional Appln. Ser. No. 60/089,814, filed Jun. 18, 1998; and to U.S. Provisional Appln. Ser. No. 60/091,247, filed Jun. 30, 1998; and to U.S. Provisional Appln. Ser. No. 60/092,036, filed Jul. 8, 1998; and to U.S. Provisional Appln. Ser. No. 60/099,667, filed Sep. 9, 1998; and to U.S. Provisional Appln. Ser. No. 60/099,668, filed Sep. 9, 1998; and to U.S. Provisional Appln. Ser. No. 60/099,670, filed Sep. 9, 1998; and to U.S. Provisional Appln. Ser. No. 60/099,697, filed Sep. 9, 1998; and to U.S. Provisional Appln. Ser. No. 60/100,672, filed Sep. 16, 1998; and to U.S. Provisional Appln. Ser. No. 60/100,673, filed Sep. 16, 1998; and to U.S. Provisional Appln. Ser. No. 60/100,674, filed Sep. 16, 1998; and to U.S. Provisional Appln. Ser. No. 60/101,130, filed Sep. 21, 1998; and to U.S. Provisional Appln. Ser. No. 60/101,132, filed Sep. 21, 1998; and to U.S. Provisional Appln. Ser. No. 60/108,996, filed Nov. 18, 1998; and to U.S. Provisional Appln. Ser. No. 60/109,018, filed Nov. 18, 1998. U.S. application Ser. No. 09/267,199 is also a continuation-in-part of U.S. application Ser. No. 09/227,586, filed Jan. 8, 1999 (abandoned), which claims the benefit of U.S. Provisional Appln. Ser. No. 60/071,064, filed Jan. 9, 1998; and to U.S. Provisional Appln. Ser. No. 60/090,170, filed Jun. 22, 1998; and to U.S. Provisional Appln. Ser. No. 60/092,036, filed Jul. 8, 1998. U.S. application Ser. No. 09/267,199 is also a continuation-in-part of U.S. application Ser. No. 09/229,413, filed Jan. 12, 1999 (abandoned), which claims the benefit of U.S. Appln. Ser. No. 60/071,479, filed Jan. 13, 1998; and to U.S. Provisional Appln. Ser. No. 60/085,533, filed May 15, 1998; and to U.S. Provisional Appln. Ser. No. 60/089,806, filed Jun. 18, 1998; and to U.S. Provisional Appln. Ser. No. 60/089,807, filed Jun. 18, 1998; and to U.S. Provisional Appln. Ser. No. 60/089,808, filed Jun. 18, 1998; and to U.S. Provisional Appln. Ser. No. 60/089,811, filed Jun. 18, 1998; and to U.S. Provisional Appln. Ser. No. 60/089,812, filed Jun. 18, 1998; and to U.S. Provisional Appln. Ser. No. 60/089,813, filed Jun. 18, 1998; and to U.S. Provisional Appln. Ser. No. 60/091,247, filed Jun. 30, 1998; and to U.S. Provisional Appln. Ser. No. 60/091,405, filed Jun. 30, 1998; and to U.S. Provisional Appln. Ser. No. 60/099,697, filed Sep. 9, 1998; and to U.S. Provisional Appln. Ser. No. 60/100,963, filed Sep. 17, 1998; and to U.S. Provisional Appln. Ser. No. 60/101,343, filed Sep. 22, 1998; and to U.S. Provisional Appln. Ser. No. 60/101,344, filed Sep. 22, 1998; and to U.S. Provisional Appln. Ser. No. 60/101,347, filed Sep. 22, 1998; and to U.S. Provisional Appln. Ser. No. 60/101,508, filed Sep. 22, 1998; and to U.S. Provisional Appln. Ser. No. 60/101,707, filed Sep. 25, 1998; and to U.S. Provisional Appln. Ser. No. 60/104,124, filed Oct. 13, 1998; and to U.S. Provisional Appln. Ser. No. 60/104,126, filed Oct. 13, 1998; and to U.S. Provisional Appln. Ser. No. 60/104,127, filed Oct. 13, 1998; and to U.S. Provisional Appln. Ser. No. 60/104,128, filed Oct. 13, 1998; and to U.S. Provisional Appln. Ser. No. 60/111,981, filed Dec. 11, 1998. U.S. application Ser. No. 09/267,199 is also a continuation-in-part of U.S. application Ser. No. 09/252,974, filed Feb. 19, 1999 (abandoned), which claims the benefit of U.S. Provisional Appln. Ser. No. 60/076,709, filed Mar. 4, 1998; and to U.S. Provisional Appln. Ser. No. 60/084,684, filed May 8, 1998. U.S. application Ser. No. 09/267,199 is also a continuation-in-part of U.S. application Ser. No. 09/262,979, filed Mar. 4, 1999 (abandoned), which claims the benefit of U.S. Provisional Appln. Ser. No. 60/076,912, filed Mar. 6, 1998. U.S. application Ser. No. 09/267,199 is also a continuation-in-part of U.S. application Ser. No. 09/233,218, filed Jan. 20, 1999, which is a continuation-in-part of U.S. application Ser. No. 09/198,779, filed Nov. 24, 1998 (abandoned), which claims the benefit of U.S. Provisional Appln. Ser. No. 60/067,000, filed Nov. 24, 1997; and to U.S. Provisional Appln. Ser. No. 60/066,873, filed Nov. 25, 1997; and to U.S. Provisional Appln. Ser. No. 60/069,472, filed Dec. 9, 1997; and to U.S. Provisional Appln. Ser. No. 60/074,201, filed Feb. 10, 1998; and to U.S. Provisional Appln. Ser. No. 60/074,280, filed Feb. 10, 1998; and to U.S. Provisional Appln. Ser. No. 60/074,281, filed Feb. 10, 1998; and to U.S. Provisional Appln. Ser. No. 60/074,282, filed Feb. 10, 1998; and to U.S. Provisional Appln. Ser. No. 60/074,565, filed Feb. 12, 1998; and to U.S. Provisional Appln. Ser. No. 60/074,566, filed Feb. 12, 1998; and to U.S. Provisional Appln. Ser. No. 60/074,567, filed Feb. 12, 1998; and to U.S. Provisional Appln. Ser. No. 60/074,789, filed Feb. 19, 1998; and to U.S. Provisional Appln. Ser. No. 60/075,459, filed Feb. 19, 1998; and to U.S. Provisional Appln. Ser. No. 60/075,460, filed Feb. 19, 1998; and to U.S. Provisional Appln. Ser. No. 60/075,461, filed Feb. 19, 1998; and to U.S. Provisional Appln. Ser. No. 60/075,462, filed Feb. 19, 1998; and to U.S. Provisional Appln. Ser. No. 60/075,463, filed Feb. 19, 1998; and to U.S. Provisional Appln. Ser. No. 60/075,464, filed Feb. 19, 1998; and to U.S. Provisional Appln. Ser. No. 60/077,229, filed Mar. 9, 1998; and to U.S. Provisional Appln. Ser. No. 60/077,230, filed Mar. 9, 1998; and to U.S. Provisional Appln. Ser. No. 60/077,231, filed Mar. 9, 1998; and to U.S. Provisional Appln. Ser. No. 60/078,031, filed Mar. 16, 1998; and to U.S. Provisional Appln. Ser. No. 60/078,368, filed Mar. 18, 1998; and to U.S. Provisional Appln. Ser. No. 60/080,844, filed Apr. 7, 1998; and to U.S. Provisional Appln. Ser. No. 60/083,067, filed Apr. 27, 1998; and to U.S. Provisional Appln. Ser. No. 60/083,386, filed Apr. 29, 1998; and to U.S. Provisional Appln. Ser. No. 60/083,387, filed Apr. 29, 1998; and to U.S. Provisional Appln. Ser. No. 60/083,388, filed Apr. 29, 1998; and to U.S. Provisional Appln. Ser. No. 60/083,389, filed Apr. 29, 1998; and to U.S. Provisional Appln. Ser. No. 60/084,684, filed May 8, 1998; and to U.S. Provisional Appln. Ser. No. 60/085,222, filed May 13, 1998; and to U.S. Provisional Appln. Ser. No. 60/085,223, filed May 13, 1998; and to U.S. Provisional Appln. Ser. No. 60/085,224, filed May 13, 1998; and to U.S. Provisional Appln. Ser. No. 60/085,245, filed May 13, 1998; and to U.S. Provisional Appln. Ser. No. 60/086,183, filed May 21, 1998; and to U.S. Provisional Appln. Ser. No. 60/086,184, filed May 21, 1998; and to U.S. Provisional Appln. Ser. No. 60/086,185, filed May 21, 1998; and to U.S. Provisional Appln. Ser. No. 60/086,186, filed May 21, 1998; and to U.S. Provisional Appln. Ser. No. 60/086,187, filed May 21, 1998; and to U.S. Provisional Appln. Ser. No. 60/086,188, filed May 21, 1998; and to U.S. Provisional Appln. Ser. No. 60/086,339, filed May 21, 1998; and to U.S. Provisional Appln. Ser. No. 60/089,524, filed Jun. 16, 1998; and to U.S. Provisional Appln. Ser. No. 60/089,810, filed Jun. 18, 1998; and to U.S. Provisional Appln. Ser. No. 60/089,814, filed Jun. 18, 1998; and to U.S. Provisional Appln. Ser. No. 60/091,247, filed Jun. 30, 1998; and to U.S. Provisional Appln. Ser. No. 60/092,036, filed Jul. 8, 1998; and to U.S. Provisional Appln. Ser. No. 60/099,667, filed Sep. 9, 1998; and to U.S. Provisional Appln. Ser. No. 60/099,668, filed Sep. 9, 1998; and to U.S. Provisional Appln. Ser. No. 60/099,670, filed Sep. 9, 1998; and to U.S. Provisional Appln. Ser. No. 60/099,697, filed Sep. 9, 1998; and to U.S. Provisional Appln. Ser. No. 60/100,672, filed Sep. 16, 1998; and to U.S. Provisional Appln. Ser. No. 60/100,673, filed Sep. 16, 1998; and to U.S. Provisional Appln. Ser. No. 60/100,674, filed Sep. 16, 1998; and to U.S. Provisional Appln. Ser. No. 60/101,130, filed Sep. 21, 1998; and to U.S. Provisional Appln. Ser. No. 60/101,132, filed Sep. 21, 1998; and to U.S. Provisional Appln. Ser. No. 60/108,996, filed Nov. 18, 1998; and to U.S. Provisional Appln. Ser. No. 60/109,018, filed Nov. 18, 1998. U.S. application Ser. No. 09/233,218 is also a continuation-in-part of U.S. application Ser. No. 09/227,586, filed Jan. 8, 1999 (abandoned), which claims the benefit of U.S. Provisional Appln. Ser. No. 60/071,064, filed Jan. 9, 1998; and to U.S. Provisional Appln. Ser. No. 60/090,170, filed Jun. 22, 1998; and to U.S. Provisional Appln. Ser. No. 60/092,036, filed Jul. 8, 1998. U.S. application Ser. No. 09/233,218 is also a continuation-in-part of U.S. application Ser. No. 09/229,413, filed Jan. 12, 1999 (abandoned), which claims the benefit of U.S. Appln. Ser. No. 60/071,479, filed Jan. 13, 1998; and to U.S. Provisional Appln. Ser. No. 60/085,533, filed May 15, 1998; and to U.S. Provisional Appln. Ser. No. 60/089,806, filed Jun. 18, 1998; and to U.S. Provisional Appln. Ser. No. 60/089,807, filed Jun. 18, 1998; and to U.S. Provisional Appln. Ser. No. 60/089,808, filed Jun. 18, 1998; and to U.S. Provisional Appln. Ser. No. 60/089,811, filed Jun. 18, 1998; and to U.S. Provisional Appln. Ser. No. 60/089,812, filed Jun. 18, 1998; and to U.S. Provisional Appln. Ser. No. 60/089,813, filed Jun. 18, 1998; and to U.S. Provisional Appln. Ser. No. 60/091,247, filed Jun. 30, 1998; and to U.S. Provisional Appln. Ser. No. 60/091,405, filed Jun. 30, 1998; and to U.S. Provisional Appln. Ser. No. 60/099,697, filed Sep. 9, 1998; and to U.S. Provisional Appln. Ser. No. 60/100,963, filed Sep. 17, 1998; and to U.S. Provisional Appln. Ser. No. 60/101,343, filed Sep. 22, 1998; and to U.S. Provisional Appln. Ser. No. 60/101,344, filed Sep. 22, 1998; and to U.S. Provisional Appln. Ser. No. 60/101,347, filed Sep. 22, 1998; and to U.S. Provisional Appln. Ser. No. 60/101,508, filed Sep. 22, 1998; and to U.S. Provisional Appln. Ser. No. 60/101,707, filed Sep. 25, 1998; and to U.S. Provisional Appln. Ser. No. 60/104,124, filed Oct. 13, 1998; and to U.S. Provisional Appln. Ser. No. 60/104,126, filed Oct. 13, 1998; and to U.S. Provisional Appln. Ser. No. 60/104,127, filed Oct. 13, 1998; and to U.S. Provisional Appln. Ser. No. 60/104,128, filed Oct. 13, 1998; and to U.S. Provisional Appln. Ser. No. 60/111,981, filed Dec. 11, 1998. U.S. application Ser. No. 09/233,218 also claims the benefit of U.S. Provisional Appln. Ser. No. 60/072,027, filed Jan. 21, 1998; and to U.S. Provisional Appln. Ser. No. 60/072,888, filed Jan. 27, 1998; and to U.S. Provisional Appln. Ser. No. 60/076,709, filed Mar. 4, 1998; and to U.S. Provisional Appln. Ser. No. 60/076,912, filed Mar. 6, 1998; and to U.S. Provisional Appln. Ser. No. 60/078,031, filed Mar. 16, 1998; and to U.S. Provisional Appln. Ser. No. 60/083,390, filed Apr. 29, 1998; and to U.S. Provisional Appln. Ser. No. 60/084,684, filed May 8, 1998; and to U.S. Provisional Appln. Ser. No. 60/085,057, filed May 8, 1998; and to U.S. Provisional Appln. Ser. No. 60/085,429, filed May 8, 1998; and to U.S. Provisional Appln. Ser. No. 60/085,245, filed May 13, 1998; and to U.S. Provisional Appln. Ser. No. 60/085,533, filed May 15, 1998; and to U.S. Provisional Appln. Ser. No. 60/085,940, filed May 19, 1998; and to U.S. Provisional Appln. Ser. No. 60/086,339, filed May 21, 1998; and to U.S. Provisional Appln. Ser. No. 60/086,594, filed May 22, 1998; and to U.S. Provisional Appln. Ser. No. 60/086,608, filed May 22, 1998; and to U.S. Provisional Appln. Ser. No. 60/087,422, filed Jun. 1, 1998; and to U.S. Provisional Appln. Ser. No. 60/087,631, filed Jun. 2, 1998; and to U.S. Provisional Appln. Ser. No. 60/087,762, filed Jun. 2, 1998; and to U.S. Provisional Appln. Ser. No. 60/087,972 filed Jun. 4, 1998; and to U.S. Provisional Appln. Ser. No. 60/087,973 filed Jun. 4, 1998; and to U.S. Provisional Appln. Ser. No. 60/088,441, filed Jun. 8, 1998; and to U.S. Provisional Appln. Ser. No. 60/089,627, filed Jun. 16, 1998; and to U.S. Provisional Appln. Ser. No. 60/089,789, filed Jun. 18, 1998; and to U.S. Provisional Appln. Ser. No. 60/090,170, filed Jun. 22, 1998; and to U.S. Provisional Appln. Ser. No. 60/090,856, filed Jun. 26, 1998; and to U.S. Provisional Appln. Ser. No. 60/090,928, filed Jun. 26, 1998; and to U.S. Provisional Appln. Ser. No. 60/091,035, filed Jun. 29, 1998; and to U.S. Provisional Appln. Ser. No. 60/091,247, filed Jun. 30, 1998; and to U.S. Provisional Appln. Ser. No. 60/091,405, filed Jun. 30, 1998; and to U.S. Provisional Appln. Ser. No. 60/092,036, filed Jul. 8, 1998; and to U.S. Provisional Appln. Ser. No. 60/100,963, filed Sep. 17, 1998; and to U.S. Provisional Appln. Ser. No. 60/110,108, filed Nov. 25, 1998; and to U.S. Provisional Appln. Ser. No. 60/110,109, filed Nov. 25, 1998; and to U.S. Provisional Appln. Ser. No. 60/111,033, filed Dec. 4, 1998; and to U.S. Provisional Appln. Ser. No. 60/111,742, filed Dec. 10, 1998. U.S. application Ser. No. 09/267,199 is also a continuation-in-part of U.S. application Ser. No. 09/237,183, filed Jan. 26, 1999, which is a continuation-in-part of U.S. application Ser. No. 09/198,779, filed Nov. 24, 1998 (abandoned), which claims the benefit of U.S. Provisional Appln. Ser. No. 60/067,000, filed Nov. 24, 1997; and to U.S. Provisional Appln. Ser. No. 60/066,873, filed Nov. 25, 1997; and to U.S. Provisional Appln. Ser. No. 60/069,472, filed Dec. 9, 1997; and to U.S. Provisional Appln. Ser. No. 60/074,201, filed Feb. 10, 1998; and to U.S. Provisional Appln. Ser. No. 60/074,280, filed Feb. 10, 1998; and to U.S. Provisional Appln. Ser. No. 60/074,281, filed Feb. 10, 1998; and to U.S. Provisional Appln. Ser. No. 60/074,282, filed Feb. 10, 1998; and to U.S. Provisional Appln. Ser. No. 60/074,565, filed Feb. 12, 1998; and to U.S. Provisional Appln. Ser. No. 60/074,566, filed Feb. 12, 1998; and to U.S. Provisional Appln. Ser. No. 60/074,567, filed Feb. 12, 1998; and to U.S. Provisional Appln. Ser. No. 60/074,789, filed Feb. 19, 1998; and to U.S. Provisional Appln. Ser. No. 60/075,459, filed Feb. 19, 1998; and to U.S. Provisional Appln. Ser. No. 60/075,460, filed Feb. 19, 1998; and to U.S. Provisional Appln. Ser. No. 60/075,461, filed Feb. 19, 1998; and to U.S. Provisional Appln. Ser. No. 60/075,462, filed Feb. 19, 1998; and to U.S. Provisional Appln. Ser. No. 60/075,463, filed Feb. 19, 1998; and to U.S. Provisional Appln. Ser. No. 60/075,464, filed Feb. 19, 1998; and to U.S. Provisional Appln. Ser. No. 60/077,229, filed Mar. 9, 1998; and to U.S. Provisional Appln. Ser. No. 60/077,230, filed Mar. 9, 1998; and to U.S. Provisional Appln. Ser. No. 60/077,231, filed Mar. 9, 1998; and to U.S. Provisional Appln. Ser. No. 60/078,031, filed Mar. 16, 1998; and to U.S. Provisional Appln. Ser. No. 60/078,368, filed Mar. 18, 1998; and to U.S. Provisional Appln. Ser. No. 60/080,844, filed Apr. 7, 1998; and to U.S. Provisional Appln. Ser. No. 60/083,067, filed Apr. 27, 1998; and to U.S. Provisional Appln. Ser. No. 60/083,386, filed Apr. 29, 1998; and to U.S. Provisional Appln. Ser. No. 60/083,387, filed Apr. 29, 1998; and to U.S. Provisional Appln. Ser. No. 60/083,388, filed Apr. 29, 1998; and to U.S. Provisional Appln. Ser. No. 60/083,389, filed Apr. 29, 1998; and to U.S. Provisional Appln. Ser. No. 60/084,684, filed May 8, 1998; and to U.S. Provisional Appln. Ser. No. 60/085,222, filed May 13, 1998; and to U.S. Provisional Appln. Ser. No. 60/085,223, filed May 13, 1998; and to U.S. Provisional Appln. Ser. No. 60/085,224, filed May 13, 1998; and to U.S. Provisional Appln. Ser. No. 60/085,245, filed May 13, 1998; and to U.S. Provisional Appln. Ser. No. 60/086,183, filed May 21, 1998; and to U.S. Provisional Appln. Ser. No. 60/086,184, filed May 21, 1998; and to U.S. Provisional Appln. Ser. No. 60/086,185, filed May 21, 1998; and to U.S. Provisional Appln. Ser. No. 60/086,186, filed May 21, 1998; and to U.S. Provisional Appln. Ser. No. 60/086,187, filed May 21, 1998; and to U.S. Provisional Appln. Ser. No. 60/086,188, filed May 21, 1998; and to U.S. Provisional Appln. Ser. No. 60/086,339, filed May 21, 1998; and to U.S. Provisional Appln. Ser. No. 60/089,524, filed Jun. 16, 1998; and to U.S. Provisional Appln. Ser. No. 60/089,810, filed Jun. 18, 1998; and to U.S. Provisional Appln. Ser. No. 60/089,814, filed Jun. 18, 1998; and to U.S. Provisional Appln. Ser. No. 60/091,247, filed Jun. 30, 1998; and to U.S. Provisional Appln. Ser. No. 60/092,036, filed Jul. 8, 1998; and to U.S. Provisional Appln. Ser. No. 60/099,667, filed Sep. 9, 1998; and to U.S. Provisional Appln. Ser. No. 60/099,668, filed Sep. 9, 1998; and to U.S. Provisional Appln. Ser. No. 60/099,670, filed Sep. 9, 1998; and to U.S. Provisional Appln. Ser. No. 60/099,697, filed Sep. 9, 1998; and to U.S. Provisional Appln. Ser. No. 60/100,672, filed Sep. 16, 1998; and to U.S. Provisional Appln. Ser. No. 60/100,673, filed Sep. 16, 1998; and to U.S. Provisional Appln. Ser. No. 60/100,674, filed Sep. 16, 1998; and to U.S. Provisional Appln. Ser. No. 60/101,130, filed Sep. 21, 1998; and to U.S. Provisional Appln. Ser. No. 60/101,132, filed Sep. 21, 1998; and to U.S. Provisional Appln. Ser. No. 60/108,996, filed Nov. 18, 1998; and to U.S. Provisional Appln. Ser. No. 60/109,018, filed Nov. 18, 1998. U.S. application Ser. No. 09/237,183 is also a continuation-in-part of U.S. application Ser. No. 09/227,586, filed Jan. 8, 1999 (abandoned), which claims the benefit of U.S. Provisional Appln. Ser. No. 60/071,064, filed Jan. 9, 1998; and to U.S. Provisional Appln. Ser. No. 60/090,170, filed Jun. 22, 1998; and to U.S. Provisional Appln. Ser. No. 60/092,036, filed Jul. 8, 1998. U.S. application Ser. No. 09/237,183 is also a continuation-in-part of U.S. application Ser. No. 09/229,413, filed Jan. 12, 1999 (abandoned), which claims the benefit of U.S. Appln. Ser. No. 60/071,479, filed Jan. 13, 1998; and to U.S. Provisional Appln. Ser. No. 60/085,533, filed May 15, 1998; and to U.S. Provisional Appln. Ser. No. 60/089,806, filed Jun. 18, 1998; and to U.S. Provisional Appln. Ser. No. 60/089,807, filed Jun. 18, 1998; and to U.S. Provisional Appln. Ser. No. 60/089,808, filed Jun. 18, 1998; and to U.S. Provisional Appln. Ser. No. 60/089,811, filed Jun. 18, 1998; and to U.S. Provisional Appln. Ser. No. 60/089,812, filed Jun. 18, 1998; and to U.S. Provisional Appln. Ser. No. 60/089,813, filed Jun. 18, 1998; and to U.S. Provisional Appln. Ser. No. 60/091,247, filed Jun. 30, 1998; and to U.S. Provisional Appln. Ser. No. 60/091,405, filed Jun. 30, 1998; and to U.S. Provisional Appln. Ser. No. 60/099,697, filed Sep. 9, 1998; and to U.S. Provisional Appln. Ser. No. 60/100,963, filed Sep. 17, 1998; and to U.S. Provisional Appln. Ser. No. 60/101,343, filed Sep. 22, 1998; and to U.S. Provisional Appln. Ser. No. 60/101,344, filed Sep. 22, 1998; and to U.S. Provisional Appln. Ser. No. 60/101,347, filed Sep. 22, 1998; and to U.S. Provisional Appln. Ser. No. 60/101,508, filed Sep. 22, 1998; and to U.S. Provisional Appln. Ser. No. 60/101,707, filed Sep. 25, 1998; and to U.S. Provisional Appln. Ser. No. 60/104,124, filed Oct. 13, 1998; and to U.S. Provisional Appln. Ser. No. 60/104,126, filed Oct. 13, 1998; and to U.S. Provisional Appln. Ser. No. 60/104,127, filed Oct. 13, 1998; and to U.S. Provisional Appln. Ser. No. 60/104,128, filed Oct. 13, 1998; and to U.S. Provisional Appln. Ser. No. 60/111,981, filed Dec. 11, 1998. U.S. application Ser. No. 09/237,183 is also a continuation-in-part of U.S. application Ser. No. 09/233,218, filed Jan. 20, 1999, which is a continuation-in-part of U.S. application Ser. No. 09/198,779, filed Nov. 24, 1998 (abandoned), which claims the benefit of U.S. Provisional Appln. Ser. No. 60/067,000, filed Nov. 24, 1997; and to U.S. Provisional Appln. Ser. No. 60/066,873, filed Nov. 25, 1997; and to U.S. Provisional Appln. Ser. No. 60/069,472, filed Dec. 9, 1997; and to U.S. Provisional Appln. Ser. No. 60/074,201, filed Feb. 10, 1998; and to U.S. Provisional Appln. Ser. No. 60/074,280, filed Feb. 10, 1998; and to U.S. Provisional Appln. Ser. No. 60/074,281, filed Feb. 10, 1998; and to U.S. Provisional Appln. Ser. No. 60/074,282, filed Feb. 10, 1998; and to U.S. Provisional Appln. Ser. No. 60/074,565, filed Feb. 12, 1998; and to U.S. Provisional Appln. Ser. No. 60/074,566, filed Feb. 12, 1998; and to U.S. Provisional Appln. Ser. No. 60/074,567, filed Feb. 12, 1998; and to U.S. Provisional Appln. Ser. No. 60/074,789, filed Feb. 19, 1998; and to U.S. Provisional Appln. Ser. No. 60/075,459, filed Feb. 19, 1998; and to U.S. Provisional Appln. Ser. No. 60/075,460, filed Feb. 19, 1998; and to U.S. Provisional Appln. Ser. No. 60/075,461, filed Feb. 19, 1998; and to U.S. Provisional Appln. Ser. No. 60/075,462, filed Feb. 19, 1998; and to U.S. Provisional Appln. Ser. No. 60/075,463, filed Feb. 19, 1998; and to U.S. Provisional Appln. Ser. No. 60/075,464, filed Feb. 19, 1998; and to U.S. Provisional Appln. Ser. No. 60/077,229, filed Mar. 9, 1998; and to U.S. Provisional Appln. Ser. No. 60/077,230, filed Mar. 9, 1998; and to U.S. Provisional Appln. Ser. No. 60/077,231, filed Mar. 9, 1998; and to U.S. Provisional Appln. Ser. No. 60/078,031, filed Mar. 16, 1998; and to U.S. Provisional Appln. Ser. No. 60/078,368, filed Mar. 18, 1998; and to U.S. Provisional Appln. Ser. No. 60/080,844, filed Apr. 7, 1998; and to U.S. Provisional Appln. Ser. No. 60/083,067, filed Apr. 27, 1998; and to U.S. Provisional Appln. Ser. No. 60/083,386, filed Apr. 29, 1998; and to U.S. Provisional Appln. Ser. No. 60/083,387, filed Apr. 29, 1998; and to U.S. Provisional Appln. Ser. No. 60/083,388, filed Apr. 29, 1998; and to U.S. Provisional Appln. Ser. No. 60/083,389, filed Apr. 29, 1998; and to U.S. Provisional Appln. Ser. No. 60/084,684, filed May 8, 1998; and to U.S. Provisional Appln. Ser. No. 60/085,222, filed May 13, 1998; and to U.S. Provisional Appln. Ser. No. 60/085,223, filed May 13, 1998; and to U.S. Provisional Appln. Ser. No. 60/085,224, filed May 13, 1998; and to U.S. Provisional Appln. Ser. No. 60/085,245, filed May 13, 1998; and to U.S. Provisional Appln. Ser. No. 60/086,183, filed May 21, 1998; and to U.S. Provisional Appln. Ser. No. 60/086,184, filed May 21, 1998; and to U.S. Provisional Appln. Ser. No. 60/086,185, filed May 21, 1998; and to U.S. Provisional Appln. Ser. No. 60/086,186, filed May 21, 1998; and to U.S. Provisional Appln. Ser. No. 60/086,187, filed May 21, 1998; and to U.S. Provisional Appln. Ser. No. 60/086,188, filed May 21, 1998; and to U.S. Provisional Appln. Ser. No. 60/086,339, filed May 21, 1998; and to U.S. Provisional Appln. Ser. No. 60/089,524, filed Jun. 16, 1998; and to U.S. Provisional Appln. Ser. No. 60/089,810, filed Jun. 18, 1998; and to U.S. Provisional Appln. Ser. No. 60/089,814, filed Jun. 18, 1998; and to U.S. Provisional Appln. Ser. No. 60/091,247, filed Jun. 30, 1998; and to U.S. Provisional Appln. Ser. No. 60/092,036, filed Jul. 8, 1998; and to U.S. Provisional Appln. Ser. No. 60/099,667, filed Sep. 9, 1998; and to U.S. Provisional Appln. Ser. No. 60/099,668, filed Sep. 9, 1998; and to U.S. Provisional Appln. Ser. No. 60/099,670, filed Sep. 9, 1998; and to U.S. Provisional Appln. Ser. No. 60/099,697, filed Sep. 9, 1998; and to U.S. Provisional Appln. Ser. No. 60/100,672, filed Sep. 16, 1998; and to U.S. Provisional Appln. Ser. No. 60/100,673, filed Sep. 16, 1998; and to U.S. Provisional Appln. Ser. No. 60/100,674, filed Sep. 16, 1998; and to U.S. Provisional Appln. Ser. No. 60/101,130, filed Sep. 21, 1998; and to U.S. Provisional Appln. Ser. No. 60/101,132, filed Sep. 21, 1998; and to U.S. Provisional Appln. Ser. No. 60/108,996, filed Nov. 18, 1998; and to U.S. Provisional Appln. Ser. No. 60/109,018, filed Nov. 18, 1998. U.S. application Ser. No. 09/233,218 is also a continuation-in-part of U.S. application Ser. No. 09/227,586, filed Jan. 8, 1999 (abandoned), which claims the benefit of U.S. Provisional Appln. Ser. No. 60/071,064, filed Jan. 9, 1998; and to U.S. Provisional Appln. Ser. No. 60/090,170, filed Jun. 22, 1998; and to U.S. Provisional Appln. Ser. No. 60/092,036, filed Jul. 8, 1998. U.S. application Ser. No. 09/233,218 is also a continuation-in-part of U.S. application Ser. No. 09/229,413, filed Jan. 12, 1999 (abandoned), which claims the benefit of U.S. Appln. Ser. No. 60/071,479, filed Jan. 13, 1998; and to U.S. Provisional Appln. Ser. No. 60/085,533, filed May 15, 1998; and to U.S. Provisional Appln. Ser. No. 60/089,806, filed Jun. 18, 1998; and to U.S. Provisional Appln. Ser. No. 60/089,807, filed Jun. 18, 1998; and to U.S. Provisional Appln. Ser. No. 60/089,808, filed Jun. 18, 1998; and to U.S. Provisional Appln. Ser. No. 60/089,811, filed Jun. 18, 1998; and to U.S. Provisional Appln. Ser. No. 60/089,812, filed Jun. 18, 1998; and to U.S. Provisional Appln. Ser. No. 60/089,813, filed Jun. 18, 1998; and to U.S. Provisional Appln. Ser. No. 60/091,247, filed Jun. 30, 1998; and to U.S. Provisional Appln. Ser. No. 60/091,405, filed Jun. 30, 1998; and to U.S. Provisional Appln. Ser. No. 60/099,697, filed Sep. 9, 1998; and to U.S. Provisional Appln. Ser. No. 60/100,963, filed Sep. 17, 1998; and to U.S. Provisional Appln. Ser. No. 60/101,343, filed Sep. 22, 1998; and to U.S. Provisional Appln. Ser. No. 60/101,344, filed Sep. 22, 1998; and to U.S. Provisional Appln. Ser. No. 60/101,347, filed Sep. 22, 1998; and to U.S. Provisional Appln. Ser. No. 60/101,508, filed Sep. 22, 1998; and to U.S. Provisional Appln. Ser. No. 60/101,707, filed Sep. 25, 1998; and to U.S. Provisional Appln. Ser. No. 60/104,124, filed Oct. 13, 1998; and to U.S. Provisional Appln. Ser. No. 60/104,126, filed Oct. 13, 1998; and to U.S. Provisional Appln. Ser. No. 60/104,127, filed Oct. 13, 1998; and to U.S. Provisional Appln. Ser. No. 60/104,128, filed Oct. 13, 1998; and to U.S. Provisional Appln. Ser. No. 60/111,981, filed Dec. 11, 1998. U.S. application Ser. No. 09/233,218 also claims the benefit of U.S. Provisional Appln. Ser. No. 60/072,027, filed Jan. 21, 1998; and to U.S. Provisional Appln. Ser. No. 60/072,888, filed Jan. 27, 1998; and to U.S. Provisional Appln. Ser. No. 60/076,709, filed Mar. 4, 1998; and to U.S. Provisional Appln. Ser. No. 60/076,912, filed Mar. 6, 1998; and to U.S. Provisional Appln. Ser. No. 60/078,031, filed Mar. 16, 1998; and to U.S. Provisional Appln. Ser. No. 60/083,390, filed Apr. 29, 1998; and to U.S. Provisional Appln. Ser. No. 60/084,684, filed May 8, 1998; and to U.S. Provisional Appln. Ser. No. 60/085,057, filed May 8, 1998; and to U.S. Provisional Appln. Ser. No. 60/085,429, filed May 8, 1998; and to U.S. Provisional Appln. Ser. No. 60/085,245, filed May 13, 1998; and to U.S. Provisional Appln. Ser. No. 60/085,533, filed May 15, 1998; and to U.S. Provisional Appln. Ser. No. 60/085,940, filed May 19, 1998; and to U.S. Provisional Appln. Ser. No. 60/086,339, filed May 21, 1998; and to U.S. Provisional Appln. Ser. No. 60/086,594, filed May 22, 1998; and to U.S. Provisional Appln. Ser. No. 60/086,608, filed May 22, 1998; and to U.S. Provisional Appln. Ser. No. 60/087,422, filed Jun. 1, 1998; and to U.S. Provisional Appln. Ser. No. 60/087,631, filed Jun. 2, 1998; and to U.S. Provisional Appln. Ser. No. 60/087,762, filed Jun. 2, 1998; and to U.S. Provisional Appln. Ser. No. 60/087,972 filed Jun. 4, 1998; and to U.S. Provisional Appln. Ser. No. 60/087,973 filed Jun. 4, 1998; and to U.S. Provisional Appln. Ser. No. 60/088,441, filed Jun. 8, 1998; and to U.S. Provisional Appln. Ser. No. 60/089,627, filed Jun. 16, 1998; and to U.S. Provisional Appln. Ser. No. 60/089,789, filed Jun. 18, 1998; and to U.S. Provisional Appln. Ser. No. 60/090,170, filed Jun. 22, 1998; and to U.S. Provisional Appln. Ser. No. 60/090,856, filed Jun. 26, 1998; and to U.S. Provisional Appln. Ser. No. 60/090,928, filed Jun. 26, 1998; and to U.S. Provisional Appln. Ser. No. 60/091,035, filed Jun. 29, 1998; and to U.S. Provisional Appln. Ser. No. 60/091,247, filed Jun. 30, 1998; and to U.S. Provisional Appln. Ser. No. 60/091,405, filed Jun. 30, 1998; and to U.S. Provisional Appln. Ser. No. 60/092,036, filed Jul. 8, 1998; and to U.S. Provisional Appln. Ser. No. 60/100,963, filed Sep. 17, 1998; and to U.S. Provisional Appln. Ser. No. 60/110,108, filed Nov. 25, 1998; and to U.S. Provisional Appln. Ser. No. 60/110,109, filed Nov. 25, 1998; and to U.S. Provisional Appln. Ser. No. 60/111,033, filed Dec. 4, 1998; and to U.S. Provisional Appln. Ser. No. 60/111,742, filed Dec. 10, 1998. U.S. application Ser. No. 09/237,183 also claims the benefit of U.S. Provisional Appln. Ser. No. 60/072,888, filed Jan. 27, 1998; and to U.S. Provisional Appln. Ser. No. 60/076,709, filed Mar. 4, 1998; and to U.S. Provisional Appln. Ser. No. 60/076,912, filed Mar. 6, 1998; and to U.S. Provisional Appln. Ser. No. 60/078,031, filed Mar. 16, 1998; and to U.S. Provisional Appln. Ser. No. 60/083,390, filed Apr. 29, 1998; and to U.S. Provisional Appln. Ser. No. 60/084,684, filed May 8, 1998; and to U.S. Provisional Appln. Ser. No. 60/085,057, filed May 8, 1998; and to U.S. Provisional Appln. Ser. No. 60/085,429, filed May 8, 1998; and to U.S. Provisional Appln. Ser. No. 60/085,245, filed May 13, 1998; and to U.S. Provisional Appln. Ser. No. 60/085,533, filed May 15, 1998; and to U.S. Provisional Appln. Ser. No. 60/085,940, filed May 19, 1998; and to U.S. Provisional Appln. Ser. No. 60/086,339, filed May 21, 1998; and to U.S. Provisional Appln. Ser. No. 60/086,594, filed May 22, 1998; and to U.S. Provisional Appln. Ser. No. 60/086,608, filed May 22, 1998; and to U.S. Provisional Appln. Ser. No. 60/087,422, filed Jun. 1, 1998; and to U.S. Provisional Appln. Ser. No. 60/087,631, filed Jun. 2, 1998; and to U.S. Provisional Appln. Ser. No. 60/087,762, filed Jun. 2, 1998; and to U.S. Provisional Appln. Ser. No. 60/087,972 filed Jun. 4, 1998; and to U.S. Provisional Appln. Ser. No. 60/087,973 filed Jun. 4, 1998; and to U.S. Provisional Appln. Ser. No. 60/088,441, filed Jun. 8, 1998; and to U.S. Provisional Appln. Ser. No. 60/089,627, filed Jun. 16, 1998; and to U.S. Provisional Appln. Ser. No. 60/089,789, filed Jun. 18, 1998; and to U.S. Provisional Appln. Ser. No. 60/090,170, filed Jun. 22, 1998; and to U.S. Provisional Appln. Ser. No. 60/090,856, filed Jun. 26, 1998; and to U.S. Provisional Appln. Ser. No. 60/090,928, filed Jun. 26, 1998; and to U.S. Provisional Appln. Ser. No. 60/091,035, filed Jun. 29, 1998; and to U.S. Provisional Appln. Ser. No. 60/091,247, filed Jun. 30, 1998; and to U.S. Provisional Appln. Ser. No. 60/091,405, filed Jun. 30, 1998; and to U.S. Provisional Appln. Ser. No. 60/092,036, filed Jul. 8, 1998; and to U.S. Provisional Appln. Ser. No. 60/100,963, filed Sep. 17, 1998; and to U.S. Provisional Appln. Ser. No. 60/110,108, filed Nov. 25, 1998; and to U.S. Provisional Appln. Ser. No. 60/110,109, filed Nov. 25, 1998; and to U.S. Provisional Appln. Ser. No. 60/111,033, filed Dec. 4, 1998; and to U.S. Provisional Appln. Ser. No. 60/111,742, filed Dec. 10, 1998. U.S. application Ser. No. 09/267,199 also claims the benefit of U.S. Provisional Appln. Ser. No. 60/078,031, filed Mar. 16, 1998; and to U.S. Provisional Appln. Ser. No. 60/083,390, filed Apr. 29, 1998; and to U.S. Provisional Appln. Ser. No. 60/084,684, filed May 8, 1998; and to U.S. Provisional Appln. Ser. No. 60/085,057, filed May 8, 1998; and to U.S. Provisional Appln. Ser. No. 60/085,429, filed May 8, 1998; and to U.S. Provisional Appln. Ser. No. 60/085,245, filed May 13, 1998; and to U.S. Provisional Appln. Ser. No. 60/085,533, filed May 15, 1998; and to U.S. Provisional Appln. Ser. No. 60/085,940, filed May 19, 1998; and to U.S. Provisional Appln. Ser. No. 60/086,339, filed May 21, 1998; and to U.S. Provisional Appln. Ser. No. 60/086,594, filed May 22, 1998; and to U.S. Provisional Appln. Ser. No. 60/086,608, filed May 22, 1998; and to U.S. Provisional Appln. Ser. No. 60/087,422, filed Jun. 1, 1998; and to U.S. Provisional Appln. Ser. No. 60/087,631, filed Jun. 2, 1998; and to U.S. Provisional Appln. Ser. No. 60/087,762, filed Jun. 2, 1998; and to U.S. Provisional Appln. Ser. No. 60/087,972 filed Jun. 4, 1998; and to U.S. Provisional Appln. Ser. No. 60/087,973 filed Jun. 4, 1998; and to U.S. Provisional Appln. Ser. No. 60/088,441, filed Jun. 8, 1998; and to U.S. Provisional Appln. Ser. No. 60/089,627, filed Jun. 16, 1998; and to U.S. Provisional Appln. Ser. No. 60/089,789, filed Jun. 18, 1998; and to U.S. Provisional Appln. Ser. No. 60/090,170, filed Jun. 22, 1998; and to U.S. Provisional Appln. Ser. No. 60/090,856, filed Jun. 26, 1998; and to U.S. Provisional Appln. Ser. No. 60/090,928, filed Jun. 26, 1998; and to U.S. Provisional Appln. Ser. No. 60/091,035, filed Jun. 29, 1998; and to U.S. Provisional Appln. Ser. No. 60/091,247, filed Jun. 30, 1998; and to U.S. Provisional Appln. Ser. No. 60/091,405, filed Jun. 30, 1998; and to U.S. Provisional Appln. Ser. No. 60/092,036, filed Jul. 8, 1998; and to U.S. Provisional Appln. Ser. No. 60/100,963, filed Sep. 17, 1998; and to U.S. Provisional Appln. Ser. No. 60/110,108, filed Nov. 25, 1998; and to U.S. Provisional Appln. Ser. No. 60/110,109, filed Nov. 25, 1998; and to U.S. Provisional Appln. Ser. No. 60/111,033, filed Dec. 4, 1998; and to U.S. Provisional Appln. Ser. No. 60/111,742, filed Dec. 10, 1998. U.S. application Ser. No. 09/371,146 is also a continuation-in-part of U.S. application Ser. No. 09/300,482, filed Apr. 28, 1999, which is a continuation-in-part of U.S. application Ser. No. 09/198,779, filed Nov. 24, 1998 (abandoned), which claims the benefit of U.S. Provisional Appln. Ser. No. 60/067,000, filed Nov. 24, 1997; and to U.S. Provisional Appln. Ser. No. 60/066,873, filed Nov. 25, 1997; and to U.S. Provisional Appln. Ser. No. 60/069,472, filed Dec. 9, 1997; and to U.S. Provisional Appln. Ser. No. 60/074,201, filed Feb. 10, 1998; and to U.S. Provisional Appln. Ser. No. 60/074,280, filed Feb. 10, 1998; and to U.S. Provisional Appln. Ser. No. 60/074,281, filed Feb. 10, 1998; and to U.S. Provisional Appln. Ser. No. 60/074,282, filed Feb. 10, 1998; and to U.S. Provisional Appln. Ser. No. 60/074,565, filed Feb. 12, 1998; and to U.S. Provisional Appln. Ser. No. 60/074,566, filed Feb. 12, 1998; and to U.S. Provisional Appln. Ser. No. 60/074,567, filed Feb. 12, 1998; and to U.S. Provisional Appln. Ser. No. 60/074,789, filed Feb. 19, 1998; and to U.S. Provisional Appln. Ser. No. 60/075,459, filed Feb. 19, 1998; and to U.S. Provisional Appln. Ser. No. 60/075,460, filed Feb. 19, 1998; and to U.S. Provisional Appln. Ser. No. 60/075,461, filed Feb. 19, 1998; and to U.S. Provisional Appln. Ser. No. 60/075,462, filed Feb. 19, 1998; and to U.S. Provisional Appln. Ser. No. 60/075,463, filed Feb. 19, 1998; and to U.S. Provisional Appln. Ser. No. 60/075,464, filed Feb. 19, 1998; and to U.S. Provisional Appln. Ser. No. 60/077,229, filed Mar. 9, 1998; and to U.S. Provisional Appln. Ser. No. 60/077,230, filed Mar. 9, 1998; and to U.S. Provisional Appln. Ser. No. 60/077,231, filed Mar. 9, 1998; and to U.S. Provisional Appln. Ser. No. 60/078,031, filed Mar. 16, 1998; and to U.S. Provisional Appln. Ser. No. 60/078,368, filed Mar. 18, 1998; and to U.S. Provisional Appln. Ser. No. 60/080,844, filed Apr. 7, 1998; and to U.S. Provisional Appln. Ser. No. 60/083,067, filed Apr. 27, 1998; and to U.S. Provisional Appln. Ser. No. 60/083,386, filed Apr. 29, 1998; and to U.S. Provisional Appln. Ser. No. 60/083,387, filed Apr. 29, 1998; and to U.S. Provisional Appln. Ser. No. 60/083,388, filed Apr. 29, 1998; and to U.S. Provisional Appln. Ser. No. 60/083,389, filed Apr. 29, 1998; and to U.S. Provisional Appln. Ser. No. 60/084,684, filed May 8, 1998; and to U.S. Provisional Appln. Ser. No. 60/085,222, filed May 13, 1998; and to U.S. Provisional Appln. Ser. No. 60/085,223, filed May 13, 1998; and to U.S. Provisional Appln. Ser. No. 60/085,224, filed May 13, 1998; and to U.S. Provisional Appln. Ser. No. 60/085,245, filed May 13, 1998; and to U.S. Provisional Appln. Ser. No. 60/086,183, filed May 21, 1998; and to U.S. Provisional Appln. Ser. No. 60/086,184, filed May 21, 1998; and to U.S. Provisional Appln. Ser. No. 60/086,185, filed May 21, 1998; and to U.S. Provisional Appln. Ser. No. 60/086,186, filed May 21, 1998; and to U.S. Provisional Appln. Ser. No. 60/086,187, filed May 21, 1998; and to U.S. Provisional Appln. Ser. No. 60/086,188, filed May 21, 1998; and to U.S. Provisional Appln. Ser. No. 60/086,339, filed May 21, 1998; and to U.S. Provisional Appln. Ser. No. 60/089,524, filed Jun. 16, 1998; and to U.S. Provisional Appln. Ser. No. 60/089,810, filed Jun. 18, 1998; and to U.S. Provisional Appln. Ser. No. 60/089,814, filed Jun. 18, 1998; and to U.S. Provisional Appln. Ser. No. 60/091,247, filed Jun. 30, 1998; and to U.S. Provisional Appln. Ser. No. 60/092,036, filed Jul. 8, 1998; and to U.S. Provisional Appln. Ser. No. 60/099,667, filed Sep. 9, 1998; and to U.S. Provisional Appln. Ser. No. 60/099,668, filed Sep. 9, 1998; and to U.S. Provisional Appln. Ser. No. 60/099,670, filed Sep. 9, 1998; and to U.S. Provisional Appln. Ser. No. 60/099,697, filed Sep. 9, 1998; and to U.S. Provisional Appln. Ser. No. 60/100,672, filed Sep. 16, 1998; and to U.S. Provisional Appln. Ser. No. 60/100,673, filed Sep. 16, 1998; and to U.S. Provisional Appln. Ser. No. 60/100,674, filed Sep. 16, 1998; and to U.S. Provisional Appln. Ser. No. 60/101,130, filed Sep. 21, 1998; and to U.S. Provisional Appln. Ser. No. 60/101,132, filed Sep. 21, 1998; and to U.S. Provisional Appln. Ser. No. 60/108,996, filed Nov. 18, 1998; and to U.S. Provisional Appln. Ser. No. 60/109,018, filed Nov. 18, 1998. U.S. application Ser. No. 09/300,482 is also a continuation-in-part of U.S. application Ser. No. 09/227,586, filed Jan. 8, 1999 (abandoned), which claims the benefit of U.S. Provisional Appln. Ser. No. 60/071,064, filed Jan. 9, 1998; and to U.S. Provisional Appln. Ser. No. 60/090,170, filed Jun. 22, 1998; and to U.S. Provisional Appln. Ser. No. 60/092,036, filed Jul. 8, 1998. U.S. application Ser. No. 09/300,482 is also a continuation-in-part of U.S. application Ser. No. 09/229,413, filed Jan. 12, 1999 (abandoned), which claims the benefit of U.S. Appln. Ser. No. 60/071,479, filed Jan. 13, 1998; and to U.S. Provisional Appln. Ser. No. 60/085,533, filed May 15, 1998; and to U.S. Provisional Appln. Ser. No. 60/089,806, filed Jun. 18, 1998; and to U.S. Provisional Appln. Ser. No. 60/089,807, filed Jun. 18, 1998; and to U.S. Provisional Appln. Ser. No. 60/089,808, filed Jun. 18, 1998; and to U.S. Provisional Appln. Ser. No. 60/089,811, filed Jun. 18, 1998; and to U.S. Provisional Appln. Ser. No. 60/089,812, filed Jun. 18, 1998; and to U.S. Provisional Appln. Ser. No. 60/089,813, filed Jun. 18, 1998; and to U.S. Provisional Appln. Ser. No. 60/091,247, filed Jun. 30, 1998; and to U.S. Provisional Appln. Ser. No. 60/091,405, filed Jun. 30, 1998; and to U.S. Provisional Appln. Ser. No. 60/099,697, filed Sep. 9, 1998; and to U.S. Provisional Appln. Ser. No. 60/100,963, filed Sep. 17, 1998; and to U.S. Provisional Appln. Ser. No. 60/101,343, filed Sep. 22, 1998; and to U.S. Provisional Appln. Ser. No. 60/101,344, filed Sep. 22, 1998; and to U.S. Provisional Appln. Ser. No. 60/101,347, filed Sep. 22, 1998; and to U.S. Provisional Appln. Ser. No. 60/101,508, filed Sep. 22, 1998; and to U.S. Provisional Appln. Ser. No. 60/101,707, filed Sep. 25, 1998; and to U.S. Provisional Appln. Ser. No. 60/104,124, filed Oct. 13, 1998; and to U.S. Provisional Appln. Ser. No. 60/104,126, filed Oct. 13, 1998; and to U.S. Provisional Appln. Ser. No. 60/104,127, filed Oct. 13, 1998; and to U.S. Provisional Appln. Ser. No. 60/104,128, filed Oct. 13, 1998; and to U.S. Provisional Appln. Ser. No. 60/111,981, filed Dec. 11, 1998. U.S. application Ser. No. 09/300,482 is also a continuation-in-part of U.S. application Ser. No. 09/252,974, filed Feb. 19, 1999 (abandoned), which claims the benefit of U.S. Provisional Appln. Ser. No. 60/076,709, filed Mar. 4, 1998; and to U.S. Provisional Appln. Ser. No. 60/084,684, filed May 8, 1998. U.S. application Ser. No. 09/300,482 is also a continuation-in-part of U.S. application Ser. No. 09/262,979, filed Mar. 4, 1999 (abandoned), which claims the benefit of U.S. Provisional Appln. Ser. No. 60/076,912, filed Mar. 6, 1998. U.S. application Ser. No. 09/300,482 is also a continuation-in-part of U.S. application Ser. No. 09/233,218, filed Jan. 20, 1999, which is a continuation-in-part of U.S. application Ser. No. 09/198,779, filed Nov. 24, 1998 (abandoned), which claims the benefit of U.S. Provisional Appln. Ser. No. 60/067,000, filed Nov. 24, 1997; and to U.S. Provisional Appln. Ser. No. 60/066,873, filed Nov. 25, 1997; and to U.S. Provisional Appln. Ser. No. 60/069,472, filed Dec. 9, 1997; and to U.S. Provisional Appln. Ser. No. 60/074,201, filed Feb. 10, 1998; and to U.S. Provisional Appln. Ser. No. 60/074,280, filed Feb. 10, 1998; and to U.S. Provisional Appln. Ser. No. 60/074,281, filed Feb. 10, 1998; and to U.S. Provisional Appln. Ser. No. 60/074,282, filed Feb. 10, 1998; and to U.S. Provisional Appln. Ser. No. 60/074,565, filed Feb. 12, 1998; and to U.S. Provisional Appln. Ser. No. 60/074,566, filed Feb. 12, 1998; and to U.S. Provisional Appln. Ser. No. 60/074,567, filed Feb. 12, 1998; and to U.S. Provisional Appln. Ser. No. 60/074,789, filed Feb. 19, 1998; and to U.S. Provisional Appln. Ser. No. 60/075,459, filed Feb. 19, 1998; and to U.S. Provisional Appln. Ser. No. 60/075,460, filed Feb. 19, 1998; and to U.S. Provisional Appln. Ser. No. 60/075,461, filed Feb. 19, 1998; and to U.S. Provisional Appln. Ser. No. 60/075,462, filed Feb. 19, 1998; and to U.S. Provisional Appln. Ser. No. 60/075,463, filed Feb. 19, 1998; and to U.S. Provisional Appln. Ser. No. 60/075,464, filed Feb. 19, 1998; and to U.S. Provisional Appln. Ser. No. 60/077,229, filed Mar. 9, 1998; and to U.S. Provisional Appln. Ser. No. 60/077,230, filed Mar. 9, 1998; and to U.S. Provisional Appln. Ser. No. 60/077,231, filed Mar. 9, 1998; and to U.S. Provisional Appln. Ser. No. 60/078,031, filed Mar. 16, 1998; and to U.S. Provisional Appln. Ser. No. 60/078,368, filed Mar. 18, 1998; and to U.S. Provisional Appln. Ser. No. 60/080,844, filed Apr. 7, 1998; and to U.S. Provisional Appln. Ser. No. 60/083,067, filed Apr. 27, 1998; and to U.S. Provisional Appln. Ser. No. 60/083,386, filed Apr. 29, 1998; and to U.S. Provisional Appln. Ser. No. 60/083,387, filed Apr. 29, 1998; and to U.S. Provisional Appln. Ser. No. 60/083,388, filed Apr. 29, 1998; and to U.S. Provisional Appln. Ser. No. 60/083,389, filed Apr. 29, 1998; and to U.S. Provisional Appln. Ser. No. 60/084,684, filed May 8, 1998; and to U.S. Provisional Appln. Ser. No. 60/085,222, filed May 13, 1998; and to U.S. Provisional Appln. Ser. No. 60/085,223, filed May 13, 1998; and to U.S. Provisional Appln. Ser. No. 60/085,224, filed May 13, 1998; and to U.S. Provisional Appln. Ser. No. 60/085,245, filed May 13, 1998; and to U.S. Provisional Appln. Ser. No. 60/086,183, filed May 21, 1998; and to U.S. Provisional Appln. Ser. No. 60/086,184, filed May 21, 1998; and to U.S. Provisional Appln. Ser. No. 60/086,185, filed May 21, 1998; and to U.S. Provisional Appln. Ser. No. 60/086,186, filed May 21, 1998; and to U.S. Provisional Appln. Ser. No. 60/086,187, filed May 21, 1998; and to U.S. Provisional Appln. Ser. No. 60/086,188, filed May 21, 1998; and to U.S. Provisional Appln. Ser. No. 60/086,339, filed May 21, 1998; and to U.S. Provisional Appln. Ser. No. 60/089,524, filed Jun. 16, 1998; and to U.S. Provisional Appln. Ser. No. 60/089,810, filed Jun. 18, 1998; and to U.S. Provisional Appln. Ser. No. 60/089,814, filed Jun. 18, 1998; and to U.S. Provisional Appln. Ser. No. 60/091,247, filed Jun. 30, 1998; and to U.S. Provisional Appln. Ser. No. 60/092,036, filed Jul. 8, 1998; and to U.S. Provisional Appln. Ser. No. 60/099,667, filed Sep. 9, 1998; and to U.S. Provisional Appln. Ser. No. 60/099,668, filed Sep. 9, 1998; and to U.S. Provisional Appln. Ser. No. 60/099,670, filed Sep. 9, 1998; and to U.S. Provisional Appln. Ser. No. 60/099,697, filed Sep. 9, 1998; and to U.S. Provisional Appln. Ser. No. 60/100,672, filed Sep. 16, 1998; and to U.S. Provisional Appln. Ser. No. 60/100,673, filed Sep. 16, 1998; and to U.S. Provisional Appln. Ser. No. 60/100,674, filed Sep. 16, 1998; and to U.S. Provisional Appln. Ser. No. 60/101,130, filed Sep. 21, 1998; and to U.S. Provisional Appln. Ser. No. 60/101,132, filed Sep. 21, 1998; and to U.S. Provisional Appln. Ser. No. 60/108,996, filed Nov. 18, 1998; and to U.S. Provisional Appln. Ser. No. 60/109,018, filed Nov. 18, 1998. U.S. application Ser. No. 09/233,218 is also a continuation-in-part of U.S. application Ser. No. 09/227,586, filed Jan. 8, 1999 (abandoned), which claims the benefit of U.S. Provisional Appln. Ser. No. 60/071,064, filed Jan. 9, 1998; and to U.S. Provisional Appln. Ser. No. 60/090,170, filed Jun. 22, 1998; and to U.S. Provisional Appln. Ser. No. 60/092,036, filed Jul. 8, 1998. U.S. application Ser. No. 09/233,218 is also a continuation-in-part of U.S. application Ser. No. 09/229,413, filed Jan. 12, 1999 (abandoned), which claims the benefit of U.S. Appln. Ser. No. 60/071,479, filed Jan. 13, 1998; and to U.S. Provisional Appln. Ser. No. 60/085,533, filed May 15, 1998; and to U.S. Provisional Appln. Ser. No. 60/089,806, filed Jun. 18, 1998; and to U.S. Provisional Appln. Ser. No. 60/089,807, filed Jun. 18, 1998; and to U.S. Provisional Appln. Ser. No. 60/089,808, filed Jun. 18, 1998; and to U.S. Provisional Appln. Ser. No. 60/089,811, filed Jun. 18, 1998; and to U.S. Provisional Appln. Ser. No. 60/089,812, filed Jun. 18, 1998; and to U.S. Provisional Appln. Ser. No. 60/089,813, filed Jun. 18, 1998; and to U.S. Provisional Appln. Ser. No. 60/091,247, filed Jun. 30, 1998; and to U.S. Provisional Appln. Ser. No. 60/091,405, filed Jun. 30, 1998; and to U.S. Provisional Appln. Ser. No. 60/099,697, filed Sep. 9, 1998; and to U.S. Provisional Appln. Ser. No. 60/100,963, filed Sep. 17, 1998; and to U.S. Provisional Appln. Ser. No. 60/101,343, filed Sep. 22, 1998; and to U.S. Provisional Appln. Ser. No. 60/101,344, filed Sep. 22, 1998; and to U.S. Provisional Appln. Ser. No. 60/101,347, filed Sep. 22, 1998; and to U.S. Provisional Appln. Ser. No. 60/101,508, filed Sep. 22, 1998; and to U.S. Provisional Appln. Ser. No. 60/101,707, filed Sep. 25, 1998; and to U.S. Provisional Appln. Ser. No. 60/104,124, filed Oct. 13, 1998; and to U.S. Provisional Appln. Ser. No. 60/104,126, filed Oct. 13, 1998; and to U.S. Provisional Appln. Ser. No. 60/104,127, filed Oct. 13, 1998; and to U.S. Provisional Appln. Ser. No. 60/104,128, filed Oct. 13, 1998; and to U.S. Provisional Appln. Ser. No. 60/111,981, filed Dec. 11, 1998. U.S. application Ser. No. 09/233,218 also claims the benefit of U.S. Provisional Appln. Ser. No. 60/072,027, filed Jan. 21, 1998; and to U.S. Provisional Appln. Ser. No. 60/072,888, filed Jan. 27, 1998; and to U.S. Provisional Appln. Ser. No. 60/076,709, filed Mar. 4, 1998; and to U.S. Provisional Appln. Ser. No. 60/076,912, filed Mar. 6, 1998; and to U.S. Provisional Appln. Ser. No. 60/078,031, filed Mar. 16, 1998; and to U.S. Provisional Appln. Ser. No. 60/083,390, filed Apr. 29, 1998; and to U.S. Provisional Appln. Ser. No. 60/084,684, filed May 8, 1998; and to U.S. Provisional Appln. Ser. No. 60/085,057, filed May 8, 1998; and to U.S. Provisional Appln. Ser. No. 60/085,429, filed May 8, 1998; and to U.S. Provisional Appln. Ser. No. 60/085,245, filed May 13, 1998; and to U.S. Provisional Appln. Ser. No. 60/085,533, filed May 15, 1998; and to U.S. Provisional Appln. Ser. No. 60/085,940, filed May 19, 1998; and to U.S. Provisional Appln. Ser. No. 60/086,339, filed May 21, 1998; and to U.S. Provisional Appln. Ser. No. 60/086,594, filed May 22, 1998; and to U.S. Provisional Appln. Ser. No. 60/086,608, filed May 22, 1998; and to U.S. Provisional Appln. Ser. No. 60/087,422, filed Jun. 1, 1998; and to U.S. Provisional Appln. Ser. No. 60/087,631, filed Jun. 2, 1998; and to U.S. Provisional Appln. Ser. No. 60/087,762, filed Jun. 2, 1998; and to U.S. Provisional Appln. Ser. No. 60/087,972 filed Jun. 4, 1998; and to U.S. Provisional Appln. Ser. No. 60/087,973 filed Jun. 4, 1998; and to U.S. Provisional Appln. Ser. No. 60/088,441, filed Jun. 8, 1998; and to U.S. Provisional Appln. Ser. No. 60/089,627, filed Jun. 16, 1998; and to U.S. Provisional Appln. Ser. No. 60/089,789, filed Jun. 18, 1998; and to U.S. Provisional Appln. Ser. No. 60/090,170, filed Jun. 22, 1998; and to U.S. Provisional Appln. Ser. No. 60/090,856, filed Jun. 26, 1998; and to U.S. Provisional Appln. Ser. No. 60/090,928, filed Jun. 26, 1998; and to U.S. Provisional Appln. Ser. No. 60/091,035, filed Jun. 29, 1998; and to U.S. Provisional Appln. Ser. No. 60/091,247, filed Jun. 30, 1998; and to U.S. Provisional Appln. Ser. No. 60/091,405, filed Jun. 30, 1998; and to U.S. Provisional Appln. Ser. No. 60/092,036, filed Jul. 8, 1998; and to U.S. Provisional Appln. Ser. No. 60/100,963, filed Sep. 17, 1998; and to U.S. Provisional Appln. Ser. No. 60/110,108, filed Nov. 25, 1998; and to U.S. Provisional Appln. Ser. No. 60/110,109, filed Nov. 25, 1998; and to U.S. Provisional Appln. Ser. No. 60/111,033, filed Dec. 4, 1998; and to U.S. Provisional Appln. Ser. No. 60/111,742, filed Dec. 10, 1998. U.S. application Ser. No. 09/300,482 is also a continuation-in-part of U.S. application Ser. No. 09/237,183, filed Jan. 26, 1999, which is a continuation-in-part of U.S. application Ser. No. 09/198,779, filed Nov. 24, 1998 (abandoned), which claims the benefit of U.S. Provisional Appln. Ser. No. 60/067,000, filed Nov. 24, 1997; and to U.S. Provisional Appln. Ser. No. 60/066,873, filed Nov. 25, 1997; and to U.S. Provisional Appln. Ser. No. 60/069,472, filed Dec. 9, 1997; and to U.S. Provisional Appln. Ser. No. 60/074,201, filed Feb. 10, 1998; and to U.S. Provisional Appln. Ser. No. 60/074,280, filed Feb. 10, 1998; and to U.S. Provisional Appln. Ser. No. 60/074,281, filed Feb. 10, 1998; and to U.S. Provisional Appln. Ser. No. 60/074,282, filed Feb. 10, 1998; and to U.S. Provisional Appln. Ser. No. 60/074,565, filed Feb. 12, 1998; and to U.S. Provisional Appln. Ser. No. 60/074,566, filed Feb. 12, 1998; and to U.S. Provisional Appln. Ser. No. 60/074,567, filed Feb. 12, 1998; and to U.S. Provisional Appln. Ser. No. 60/074,789, filed Feb. 19, 1998; and to U.S. Provisional Appln. Ser. No. 60/075,459, filed Feb. 19, 1998; and to U.S. Provisional Appln. Ser. No. 60/075,460, filed Feb. 19, 1998; and to U.S. Provisional Appln. Ser. No. 60/075,461, filed Feb. 19, 1998; and to U.S. Provisional Appln. Ser. No. 60/075,462, filed Feb. 19, 1998; and to U.S. Provisional Appln. Ser. No. 60/075,463, filed Feb. 19, 1998; and to U.S. Provisional Appln. Ser. No. 60/075,464, filed Feb. 19, 1998; and to U.S. Provisional Appln. Ser. No. 60/077,229, filed Mar. 9, 1998; and to U.S. Provisional Appln. Ser. No. 60/077,230, filed Mar. 9, 1998; and to U.S. Provisional Appln. Ser. No. 60/077,231, filed Mar. 9, 1998; and to U.S. Provisional Appln. Ser. No. 60/078,031, filed Mar. 16, 1998; and to U.S. Provisional Appln. Ser. No. 60/078,368, filed Mar. 18, 1998; and to U.S. Provisional Appln. Ser. No. 60/080,844, filed Apr. 7, 1998; and to U.S. Provisional Appln. Ser. No. 60/083,067, filed Apr. 27, 1998; and to U.S. Provisional Appln. Ser. No. 60/083,386, filed Apr. 29, 1998; and to U.S. Provisional Appln. Ser. No. 60/083,387, filed Apr. 29, 1998; and to U.S. Provisional Appln. Ser. No. 60/083,388, filed Apr. 29, 1998; and to U.S. Provisional Appln. Ser. No. 60/083,389, filed Apr. 29, 1998; and to U.S. Provisional Appln. Ser. No. 60/084,684, filed May 8, 1998; and to U.S. Provisional Appln. Ser. No. 60/085,222, filed May 13, 1998; and to U.S. Provisional Appln. Ser. No. 60/085,223, filed May 13, 1998; and to U.S. Provisional Appln. Ser. No. 60/085,224, filed May 13, 1998; and to U.S. Provisional Appln. Ser. No. 60/085,245, filed May 13, 1998; and to U.S. Provisional Appln. Ser. No. 60/086,183, filed May 21, 1998; and to U.S. Provisional Appln. Ser. No. 60/086,184, filed May 21, 1998; and to U.S. Provisional Appln. Ser. No. 60/086,185, filed May 21, 1998; and to U.S. Provisional Appln. Ser. No. 60/086,186, filed May 21, 1998; and to U.S. Provisional Appln. Ser. No. 60/086,187, filed May 21, 1998; and to U.S. Provisional Appln. Ser. No. 60/086,188, filed May 21, 1998; and to U.S. Provisional Appln. Ser. No. 60/086,339, filed May 21, 1998; and to U.S. Provisional Appln. Ser. No. 60/089,524, filed Jun. 16, 1998; and to U.S. Provisional Appln. Ser. No. 60/089,810, filed Jun. 18, 1998; and to U.S. Provisional Appln. Ser. No. 60/089,814, filed Jun. 18, 1998; and to U.S. Provisional Appln. Ser. No. 60/091,247, filed Jun. 30, 1998; and to U.S. Provisional Appln. Ser. No. 60/092,036, filed Jul. 8, 1998; and to U.S. Provisional Appln. Ser. No. 60/099,667, filed Sep. 9, 1998; and to U.S. Provisional Appln. Ser. No. 60/099,668, filed Sep. 9, 1998; and to U.S. Provisional Appln. Ser. No. 60/099,670, filed Sep. 9, 1998; and to U.S. Provisional Appln. Ser. No. 60/099,697, filed Sep. 9, 1998; and to U.S. Provisional Appln. Ser. No. 60/100,672, filed Sep. 16, 1998; and to U.S. Provisional Appln. Ser. No. 60/100,673, filed Sep. 16, 1998; and to U.S. Provisional Appln. Ser. No. 60/100,674, filed Sep. 16, 1998; and to U.S. Provisional Appln. Ser. No. 60/101,130, filed Sep. 21, 1998; and to U.S. Provisional Appln. Ser. No. 60/101,132, filed Sep. 21, 1998; and to U.S. Provisional Appln. Ser. No. 60/108,996, filed Nov. 18, 1998; and to U.S. Provisional Appln. Ser. No. 60/109,018, filed Nov. 18, 1998. U.S. application Ser. No. 09/237,183 is also a continuation-in-part of U.S. application Ser. No. 09/227,586, filed Jan. 8, 1999 (abandoned), which claims the benefit of U.S. Provisional Appln. Ser. No. 60/071,064, filed Jan. 9, 1998; and to U.S. Provisional Appln. Ser. No. 60/090,170, filed Jun. 22, 1998; and to U.S. Provisional Appln. Ser. No. 60/092,036, filed Jul. 8, 1998. U.S. application Ser. No. 09/237,183 is also a continuation-in-part of U.S. application Ser. No. 09/229,413, filed Jan. 12, 1999 (abandoned), which claims the benefit of U.S. Appln. Ser. No. 60/071,479, filed Jan. 13, 1998; and to U.S. Provisional Appln. Ser. No. 60/085,533, filed May 15, 1998; and to U.S. Provisional Appln. Ser. No. 60/089,806, filed Jun. 18, 1998; and to U.S. Provisional Appln. Ser. No. 60/089,807, filed Jun. 18, 1998; and to U.S. Provisional Appln. Ser. No. 60/089,808, filed Jun. 18, 1998; and to U.S. Provisional Appln. Ser. No. 60/089,811, filed Jun. 18, 1998; and to U.S. Provisional Appln. Ser. No. 60/089,812, filed Jun. 18, 1998; and to U.S. Provisional Appln. Ser. No. 60/089,813, filed Jun. 18, 1998; and to U.S. Provisional Appln. Ser. No. 60/091,247, filed Jun. 30, 1998; and to U.S. Provisional Appln. Ser. No. 60/091,405, filed Jun. 30, 1998; and to U.S. Provisional Appln. Ser. No. 60/099,697, filed Sep. 9, 1998; and to U.S. Provisional Appln. Ser. No. 60/100,963, filed Sep. 17, 1998; and to U.S. Provisional Appln. Ser. No. 60/101,343, filed Sep. 22, 1998; and to U.S. Provisional Appln. Ser. No. 60/101,344, filed Sep. 22, 1998; and to U.S. Provisional Appln. Ser. No. 60/101,347, filed Sep. 22, 1998; and to U.S. Provisional Appln. Ser. No. 60/101,508, filed Sep. 22, 1998; and to U.S. Provisional Appln. Ser. No. 60/101,707, filed Sep. 25, 1998; and to U.S. Provisional Appln. Ser. No. 60/104,124, filed Oct. 13, 1998; and to U.S. Provisional Appln. Ser. No. 60/104,126, filed Oct. 13, 1998; and to U.S. Provisional Appln. Ser. No. 60/104,127, filed Oct. 13, 1998; and to U.S. Provisional Appln. Ser. No. 60/104,128, filed Oct. 13, 1998; and to U.S. Provisional Appln. Ser. No. 60/111,981, filed Dec. 11, 1998. U.S. application Ser. No. 09/237,183 is also a continuation-in-part of U.S. application Ser. No. 09/233,218, filed Jan. 20, 1999, which is a continuation-in-part of U.S. application Ser. No. 09/198,779, filed Nov. 24, 1998 (abandoned), which claims the benefit of U.S. Provisional Appln. Ser. No. 60/067,000, filed Nov. 24, 1997; and to U.S. Provisional Appln. Ser. No. 60/066,873, filed Nov. 25, 1997; and to U.S. Provisional Appln. Ser. No. 60/069,472, filed Dec. 9, 1997; and to U.S. Provisional Appln. Ser. No. 60/074,201, filed Feb. 10, 1998; and to U.S. Provisional Appln. Ser. No. 60/074,280, filed Feb. 10, 1998; and to U.S. Provisional Appln. Ser. No. 60/074,281, filed Feb. 10, 1998; and to U.S. Provisional Appln. Ser. No. 60/074,282, filed Feb. 10, 1998; and to U.S. Provisional Appln. Ser. No. 60/074,565, filed Feb. 12, 1998; and to U.S. Provisional Appln. Ser. No. 60/074,566, filed Feb. 12, 1998; and to U.S. Provisional Appln. Ser. No. 60/074,567, filed Feb. 12, 1998; and to U.S. Provisional Appln. Ser. No. 60/074,789, filed Feb. 19, 1998; and to U.S. Provisional Appln. Ser. No. 60/075,459, filed Feb. 19, 1998; and to U.S. Provisional Appln. Ser. No. 60/075,460, filed Feb. 19, 1998; and to U.S. Provisional Appln. Ser. No. 60/075,461, filed Feb. 19, 1998; and to U.S. Provisional Appln. Ser. No. 60/075,462, filed Feb. 19, 1998; and to U.S. Provisional Appln. Ser. No. 60/075,463, filed Feb. 19, 1998; and to U.S. Provisional Appln. Ser. No. 60/075,464, filed Feb. 19, 1998; and to U.S. Provisional Appln. Ser. No. 60/077,229, filed Mar. 9, 1998; and to U.S. Provisional Appln. Ser. No. 60/077,230, filed Mar. 9, 1998; and to U.S. Provisional Appln. Ser. No. 60/077,231, filed Mar. 9, 1998; and to U.S. Provisional Appln. Ser. No. 60/078,031, filed Mar. 16, 1998; and to U.S. Provisional Appln. Ser. No. 60/078,368, filed Mar. 18, 1998; and to U.S. Provisional Appln. Ser. No. 60/080,844, filed Apr. 7, 1998; and to U.S. Provisional Appln. Ser. No. 60/083,067, filed Apr. 27, 1998; and to U.S. Provisional Appln. Ser. No. 60/083,386, filed Apr. 29, 1998; and to U.S. Provisional Appln. Ser. No. 60/083,387, filed Apr. 29, 1998; and to U.S. Provisional Appln. Ser. No. 60/083,388, filed Apr. 29, 1998; and to U.S. Provisional Appln. Ser. No. 60/083,389, filed Apr. 29, 1998; and to U.S. Provisional Appln. Ser. No. 60/084,684, filed May 8, 1998; and to U.S. Provisional Appln. Ser. No. 60/085,222, filed May 13, 1998; and to U.S. Provisional Appln. Ser. No. 60/085,223, filed May 13, 1998; and to U.S. Provisional Appln. Ser. No. 60/085,224, filed May 13, 1998; and to U.S. Provisional Appln. Ser. No. 60/085,245, filed May 13, 1998; and to U.S. Provisional Appln. Ser. No. 60/086,183, filed May 21, 1998; and to U.S. Provisional Appln. Ser. No. 60/086,184, filed May 21, 1998; and to U.S. Provisional Appln. Ser. No. 60/086,185, filed May 21, 1998; and to U.S. Provisional Appln. Ser. No. 60/086,186, filed May 21, 1998; and to U.S. Provisional Appln. Ser. No. 60/086,187, filed May 21, 1998; and to U.S. Provisional Appln. Ser. No. 60/086,188, filed May 21, 1998; and to U.S. Provisional Appln. Ser. No. 60/086,339, filed May 21, 1998; and to U.S. Provisional Appln. Ser. No. 60/089,524, filed Jun. 16, 1998; and to U.S. Provisional Appln. Ser. No. 60/089,810, filed Jun. 18, 1998; and to U.S. Provisional Appln. Ser. No. 60/089,814, filed Jun. 18, 1998; and to U.S. Provisional Appln. Ser. No. 60/091,247, filed Jun. 30, 1998; and to U.S. Provisional Appln. Ser. No. 60/092,036, filed Jul. 8, 1998; and to U.S. Provisional Appln. Ser. No. 60/099,667, filed Sep. 9, 1998; and to U.S. Provisional Appln. Ser. No. 60/099,668, filed Sep. 9, 1998; and to U.S. Provisional Appln. Ser. No. 60/099,670, filed Sep. 9, 1998; and to U.S. Provisional Appln. Ser. No. 60/099,697, filed Sep. 9, 1998; and to U.S. Provisional Appln. Ser. No. 60/100,672, filed Sep. 16, 1998; and to U.S. Provisional Appln. Ser. No. 60/100,673, filed Sep. 16, 1998; and to U.S. Provisional Appln. Ser. No. 60/100,674, filed Sep. 16, 1998; and to U.S. Provisional Appln. Ser. No. 60/101,130, filed Sep. 21, 1998; and to U.S. Provisional Appln. Ser. No. 60/101,132, filed Sep. 21, 1998; and to U.S. Provisional Appln. Ser. No. 60/108,996, filed Nov. 18, 1998; and to U.S. Provisional Appln. Ser. No. 60/109,018, filed Nov. 18, 1998. U.S. application Ser. No. 09/233,218 is also a continuation-in-part of U.S. application Ser. No. 09/227,586, filed Jan. 8, 1999 (abandoned), which claims the benefit of U.S. Provisional Appln. Ser. No. 60/071,064, filed Jan. 9, 1998; and to U.S. Provisional Appln. Ser. No. 60/090,170, filed Jun. 22, 1998; and to U.S. Provisional Appln. Ser. No. 60/092,036, filed Jul. 8, 1998. U.S. application Ser. No. 09/233,218 is also a continuation-in-part of U.S. application Ser. No. 09/229,413, filed Jan. 12, 1999 (abandoned), which claims the benefit of U.S. Appln. Ser. No. 60/071,479, filed Jan. 13, 1998; and to U.S. Provisional Appln. Ser. No. 60/085,533, filed May 15, 1998; and to U.S. Provisional Appln. Ser. No. 60/089,806, filed Jun. 18, 1998; and to U.S. Provisional Appln. Ser. No. 60/089,807, filed Jun. 18, 1998; and to U.S. Provisional Appln. Ser. No. 60/089,808, filed Jun. 18, 1998; and to U.S. Provisional Appln. Ser. No. 60/089,811, filed Jun. 18, 1998; and to U.S. Provisional Appln. Ser. No. 60/089,812, filed Jun. 18, 1998; and to U.S. Provisional Appln. Ser. No. 60/089,813, filed Jun. 18, 1998; and to U.S. Provisional Appln. Ser. No. 60/091,247, filed Jun. 30, 1998; and to U.S. Provisional Appln. Ser. No. 60/091,405, filed Jun. 30, 1998; and to U.S. Provisional Appln. Ser. No. 60/099,697, filed Sep. 9, 1998; and to U.S. Provisional Appln. Ser. No. 60/100,963, filed Sep. 17, 1998; and to U.S. Provisional Appln. Ser. No. 60/101,343, filed Sep. 22, 1998; and to U.S. Provisional Appln. Ser. No. 60/101,344, filed Sep. 22, 1998; and to U.S. Provisional Appln. Ser. No. 60/101,347, filed Sep. 22, 1998; and to U.S. Provisional Appln. Ser. No. 60/101,508, filed Sep. 22, 1998; and to U.S. Provisional Appln. Ser. No. 60/101,707, filed Sep. 25, 1998; and to U.S. Provisional Appln. Ser. No. 60/104,124, filed Oct. 13, 1998; and to U.S. Provisional Appln. Ser. No. 60/104,126, filed Oct. 13, 1998; and to U.S. Provisional Appln. Ser. No. 60/104,127, filed Oct. 13, 1998; and to U.S. Provisional Appln. Ser. No. 60/104,128, filed Oct. 13, 1998; and to U.S. Provisional Appln. Ser. No. 60/111,981, filed Dec. 11, 1998. U.S. application Ser. No. 09/233,218 also claims the benefit of U.S. Provisional Appln. Ser. No. 60/072,027, filed Jan. 21, 1998; and to U.S. Provisional Appln. Ser. No. 60/072,888, filed Jan. 27, 1998; and to U.S. Provisional Appln. Ser. No. 60/076,709, filed Mar. 4, 1998; and to U.S. Provisional Appln. Ser. No. 60/076,912, filed Mar. 6, 1998; and to U.S. Provisional Appln. Ser. No. 60/078,031, filed Mar. 16, 1998; and to U.S. Provisional Appln. Ser. No. 60/083,390, filed Apr. 29, 1998; and to U.S. Provisional Appln. Ser. No. 60/084,684, filed May 8, 1998; and to U.S. Provisional Appln. Ser. No. 60/085,057, filed May 8, 1998; and to U.S. Provisional Appln. Ser. No. 60/085,429, filed May 8, 1998; and to U.S. Provisional Appln. Ser. No. 60/085,245, filed May 13, 1998; and to U.S. Provisional Appln. Ser. No. 60/085,533, filed May 15, 1998; and to U.S. Provisional Appln. Ser. No. 60/085,940, filed May 19, 1998; and to U.S. Provisional Appln. Ser. No. 60/086,339, filed May 21, 1998; and to U.S. Provisional Appln. Ser. No. 60/086,594, filed May 22, 1998; and to U.S. Provisional Appln. Ser. No. 60/086,608, filed May 22, 1998; and to U.S. Provisional Appln. Ser. No. 60/087,422, filed Jun. 1, 1998; and to U.S. Provisional Appln. Ser. No. 60/087,631, filed Jun. 2, 1998; and to U.S. Provisional Appln. Ser. No. 60/087,762, filed Jun. 2, 1998; and to U.S. Provisional Appln. Ser. No. 60/087,972 filed Jun. 4, 1998; and to U.S. Provisional Appln. Ser. No. 60/087,973 filed Jun. 4, 1998; and to U.S. Provisional Appln. Ser. No. 60/088,441, filed Jun. 8, 1998; and to U.S. Provisional Appln. Ser. No. 60/089,627, filed Jun. 16, 1998; and to U.S. Provisional Appln. Ser. No. 60/089,789, filed Jun. 18, 1998; and to U.S. Provisional Appln. Ser. No. 60/090,170, filed Jun. 22, 1998; and to U.S. Provisional Appln. Ser. No. 60/090,856, filed Jun. 26, 1998; and to U.S. Provisional Appln. Ser. No. 60/090,928, filed Jun. 26, 1998; and to U.S. Provisional Appln. Ser. No. 60/091,035, filed Jun. 29, 1998; and to U.S. Provisional Appln. Ser. No. 60/091,247, filed Jun. 30, 1998; and to U.S. Provisional Appln. Ser. No. 60/091,405, filed Jun. 30, 1998; and to U.S. Provisional Appln. Ser. No. 60/092,036, filed Jul. 8, 1998; and to U.S. Provisional Appln. Ser. No. 60/100,963, filed Sep. 17, 1998; and to U.S. Provisional Appln. Ser. No. 60/110,108, filed Nov. 25, 1998; and to U.S. Provisional Appln. Ser. No. 60/110,109, filed Nov. 25, 1998; and to U.S. Provisional Appln. Ser. No. 60/111,033, filed Dec. 4, 1998; and to U.S. Provisional Appln. Ser. No. 60/111,742, filed Dec. 10, 1998. U.S. application Ser. No. 09/237,183 also claims the benefit of U.S. Provisional Appln. Ser. No. 60/072,888, filed Jan. 27, 1998; and to U.S. Provisional Appln. Ser. No. 60/076,709, filed Mar. 4, 1998; and to U.S. Provisional Appln. Ser. No. 60/076,912, filed Mar. 6, 1998; and to U.S. Provisional Appln. Ser. No. 60/078,031, filed Mar. 16, 1998; and to U.S. Provisional Appln. Ser. No. 60/083,390, filed Apr. 29, 1998; and to U.S. Provisional Appln. Ser. No. 60/084,684, filed May 8, 1998; and to U.S. Provisional Appln. Ser. No. 60/085,057, filed May 8, 1998; and to U.S. Provisional Appln. Ser. No. 60/085,429, filed May 8, 1998; and to U.S. Provisional Appln. Ser. No. 60/085,245, filed May 13, 1998; and to U.S. Provisional Appln. Ser. No. 60/085,533, filed May 15, 1998; and to U.S. Provisional Appln. Ser. No. 60/085,940, filed May 19, 1998; and to U.S. Provisional Appln. Ser. No. 60/086,339, filed May 21, 1998; and to U.S. Provisional Appln. Ser. No. 60/086,594, filed May 22, 1998; and to U.S. Provisional Appln. Ser. No. 60/086,608, filed May 22, 1998; and to U.S. Provisional Appln. Ser. No. 60/087,422, filed Jun. 1, 1998; and to U.S. Provisional Appln. Ser. No. 60/087,631, filed Jun. 2, 1998; and to U.S. Provisional Appln. Ser. No. 60/087,762, filed Jun. 2, 1998; and to U.S. Provisional Appln. Ser. No. 60/087,972 filed Jun. 4, 1998; and to U.S. Provisional Appln. Ser. No. 60/087,973 filed Jun. 4, 1998; and to U.S. Provisional Appln. Ser. No. 60/088,441, filed Jun. 8, 1998; and to U.S. Provisional Appln. Ser. No. 60/089,627, filed Jun. 16, 1998; and to U.S. Provisional Appln. Ser. No. 60/089,789, filed Jun. 18, 1998; and to U.S. Provisional Appln. Ser. No. 60/090,170, filed Jun. 22, 1998; and to U.S. Provisional Appln. Ser. No. 60/090,856, filed Jun. 26, 1998; and to U.S. Provisional Appln. Ser. No. 60/090,928, filed Jun. 26, 1998; and to U.S. Provisional Appln. Ser. No. 60/091,035, filed Jun. 29, 1998; and to U.S. Provisional Appln. Ser. No. 60/091,247, filed Jun. 30, 1998; and to U.S. Provisional Appln. Ser. No. 60/091,405, filed Jun. 30, 1998; and to U.S. Provisional Appln. Ser. No. 60/092,036, filed Jul. 8, 1998; and to U.S. Provisional Appln. Ser. No. 60/100,963, filed Sep. 17, 1998; and to U.S. Provisional Appln. Ser. No. 60/110,108, filed Nov. 25, 1998; and to U.S. Provisional Appln. Ser. No. 60/110,109, filed Nov. 25, 1998; and to U.S. Provisional Appln. Ser. No. 60/111,033, filed Dec. 4, 1998; and to U.S. Provisional Appln. Ser. No. 60/111,742, filed Dec. 10, 1998. U.S. application Ser. No. 09/300,482 is also a continuation-in-part of U.S. application Ser. No. 09/267,199, filed Mar. 12, 1999, which is a continuation-in-part of U.S. application Ser. No. 09/198,779, filed Nov. 24, 1998 (abandoned), which claims the benefit of U.S. Provisional Appln. Ser. No. 60/067,000, filed Nov. 24, 1997; and to U.S. Provisional Appln. Ser. No. 60/066,873, filed Nov. 25, 1997; and to U.S. Provisional Appln. Ser. No. 60/069,472, filed Dec. 9, 1997; and to U.S. Provisional Appln. Ser. No. 60/074,201, filed Feb. 10, 1998; and to U.S. Provisional Appln. Ser. No. 60/074,280, filed Feb. 10, 1998; and to U.S. Provisional Appln. Ser. No. 60/074,281, filed Feb. 10, 1998; and to U.S. Provisional Appln. Ser. No. 60/074,282, filed Feb. 10, 1998; and to U.S. Provisional Appln. Ser. No. 60/074,565, filed Feb. 12, 1998; and to U.S. Provisional Appln. Ser. No. 60/074,566, filed Feb. 12, 1998; and to U.S. Provisional Appln. Ser. No. 60/074,567, filed Feb. 12, 1998; and to U.S. Provisional Appln. Ser. No. 60/074,789, filed Feb. 19, 1998; and to U.S. Provisional Appln. Ser. No. 60/075,459, filed Feb. 19, 1998; and to U.S. Provisional Appln. Ser. No. 60/075,460, filed Feb. 19, 1998; and to U.S. Provisional Appln. Ser. No. 60/075,461, filed Feb. 19, 1998; and to U.S. Provisional Appln. Ser. No. 60/075,462, filed Feb. 19, 1998; and to U.S. Provisional Appln. Ser. No. 60/075,463, filed Feb. 19, 1998; and to U.S. Provisional Appln. Ser. No. 60/075,464, filed Feb. 19, 1998; and to U.S. Provisional Appln. Ser. No. 60/077,229, filed Mar. 9, 1998; and to U.S. Provisional Appln. Ser. No. 60/077,230, filed Mar. 9, 1998; and to U.S. Provisional Appln. Ser. No. 60/077,231, filed Mar. 9, 1998; and to U.S. Provisional Appln. Ser. No. 60/078,031, filed Mar. 16, 1998; and to U.S. Provisional Appln. Ser. No. 60/078,368, filed Mar. 18, 1998; and to U.S. Provisional Appln. Ser. No. 60/080,844, filed Apr. 7, 1998; and to U.S. Provisional Appln. Ser. No. 60/083,067, filed Apr. 27, 1998; and to U.S. Provisional Appln. Ser. No. 60/083,386, filed Apr. 29, 1998; and to U.S. Provisional Appln. Ser. No. 60/083,387, filed Apr. 29, 1998; and to U.S. Provisional Appln. Ser. No. 60/083,388, filed Apr. 29, 1998; and to U.S. Provisional Appln. Ser. No. 60/083,389, filed Apr. 29, 1998; and to U.S. Provisional Appln. Ser. No. 60/084,684, filed May 8, 1998; and to U.S. Provisional Appln. Ser. No. 60/085,222, filed May 13, 1998; and to U.S. Provisional Appln. Ser. No. 60/085,223, filed May 13, 1998; and to U.S. Provisional Appln. Ser. No. 60/085,224, filed May 13, 1998; and to U.S. Provisional Appln. Ser. No. 60/085,245, filed May 13, 1998; and to U.S. Provisional Appln. Ser. No. 60/086,183, filed May 21, 1998; and to U.S. Provisional Appln. Ser. No. 60/086,184, filed May 21, 1998; and to U.S. Provisional Appln. Ser. No. 60/086,185, filed May 21, 1998; and to U.S. Provisional Appln. Ser. No. 60/086,186, filed May 21, 1998; and to U.S. Provisional Appln. Ser. No. 60/086,187, filed May 21, 1998; and to U.S. Provisional Appln. Ser. No. 60/086,188, filed May 21, 1998; and to U.S. Provisional Appln. Ser. No. 60/086,339, filed May 21, 1998; and to U.S. Provisional Appln. Ser. No. 60/089,524, filed Jun. 16, 1998; and to U.S. Provisional Appln. Ser. No. 60/089,810, filed Jun. 18, 1998; and to U.S. Provisional Appln. Ser. No. 60/089,814, filed Jun. 18, 1998; and to U.S. Provisional Appln. Ser. No. 60/091,247, filed Jun. 30, 1998; and to U.S. Provisional Appln. Ser. No. 60/092,036, filed Jul. 8, 1998; and to U.S. Provisional Appln. Ser. No. 60/099,667, filed Sep. 9, 1998; and to U.S. Provisional Appln. Ser. No. 60/099,668, filed Sep. 9, 1998; and to U.S. Provisional Appln. Ser. No. 60/099,670, filed Sep. 9, 1998; and to U.S. Provisional Appln. Ser. No. 60/099,697, filed Sep. 9, 1998; and to U.S. Provisional Appln. Ser. No. 60/100,672, filed Sep. 16, 1998; and to U.S. Provisional Appln. Ser. No. 60/100,673, filed Sep. 16, 1998; and to U.S. Provisional Appln. Ser. No. 60/100,674, filed Sep. 16, 1998; and to U.S. Provisional Appln. Ser. No. 60/101,130, filed Sep. 21, 1998; and to U.S. Provisional Appln. Ser. No. 60/101,132, filed Sep. 21, 1998; and to U.S. Provisional Appln. Ser. No. 60/108,996, filed Nov. 18, 1998; and to U.S. Provisional Appln. Ser. No. 60/109,018, filed Nov. 18, 1998. U.S. application Ser. No. 09/267,199 is also a continuation-in-part of U.S. application Ser. No. 09/227,586, filed Jan. 8, 1999 (abandoned), which claims the benefit of U.S. Provisional Appln. Ser. No. 60/071,064, filed Jan. 9, 1998; and to U.S. Provisional Appln. Ser. No. 60/090,170, filed Jun. 22, 1998; and to U.S. Provisional Appln. Ser. No. 60/092,036, filed Jul. 8, 1998. U.S. application Ser. No. 09/267,199 is also a continuation-in-part of U.S. application Ser. No. 09/229,413, filed Jan. 12, 1999 (abandoned), which claims the benefit of U.S. Appln. Ser. No. 60/071,479, filed Jan. 13, 1998; and to U.S. Provisional Appln. Ser. No. 60/085,533, filed May 15, 1998; and to U.S. Provisional Appln. Ser. No. 60/089,806, filed Jun. 18, 1998; and to U.S. Provisional Appln. Ser. No. 60/089,807, filed Jun. 18, 1998; and to U.S. Provisional Appln. Ser. No. 60/089,808, filed Jun. 18, 1998; and to U.S. Provisional Appln. Ser. No. 60/089,811, filed Jun. 18, 1998; and to U.S. Provisional Appln. Ser. No. 60/089,812, filed Jun. 18, 1998; and to U.S. Provisional Appln. Ser. No. 60/089,813, filed Jun. 18, 1998; and to U.S. Provisional Appln. Ser. No. 60/091,247, filed Jun. 30, 1998; and to U.S. Provisional Appln. Ser. No. 60/091,405, filed Jun. 30, 1998; and to U.S. Provisional Appln. Ser. No. 60/099,697, filed Sep. 9, 1998; and to U.S. Provisional Appln. Ser. No. 60/100,963, filed Sep. 17, 1998; and to U.S. Provisional Appln. Ser. No. 60/101,343, filed Sep. 22, 1998; and to U.S. Provisional Appln. Ser. No. 60/101,344, filed Sep. 22, 1998; and to U.S. Provisional Appln. Ser. No. 60/101,347, filed Sep. 22, 1998; and to U.S. Provisional Appln. Ser. No. 60/101,508, filed Sep. 22, 1998; and to U.S. Provisional Appln. Ser. No. 60/101,707, filed Sep. 25, 1998; and to U.S. Provisional Appln. Ser. No. 60/104,124, filed Oct. 13, 1998; and to U.S. Provisional Appln. Ser. No. 60/104,126, filed Oct. 13, 1998; and to U.S. Provisional Appln. Ser. No. 60/104,127, filed Oct. 13, 1998; and to U.S. Provisional Appln. Ser. No. 60/104,128, filed Oct. 13, 1998; and to U.S. Provisional Appln. Ser. No. 60/111,981, filed Dec. 11, 1998. U.S. application Ser. No. 09/267,199 is also a continuation-in-part of U.S. application Ser. No. 09/252,974, filed Feb. 19, 1999 (abandoned), which claims the benefit of U.S. Provisional Appln. Ser. No. 60/076,709, filed Mar. 4, 1998; and to U.S. Provisional Appln. Ser. No. 60/084,684, filed May 8, 1998. U.S. application Ser. No. 09/267,199 is also a continuation-in-part of U.S. application Ser. No. 09/262,979, filed Mar. 4, 1999 (abandoned), which claims the benefit of U.S. Provisional Appln. Ser. No. 60/076,912, filed Mar. 6, 1998. U.S. application Ser. No. 09/267,199 is also a continuation-in-part of U.S. application Ser. No. 09/233,218, filed Jan. 20, 1999, which is a continuation-in-part of U.S. application Ser. No. 09/198,779, filed Nov. 24, 1998 (abandoned), which claims the benefit of U.S. Provisional Appln. Ser. No. 60/067,000, filed Nov. 24, 1997; and to U.S. Provisional Appln. Ser. No. 60/066,873, filed Nov. 25, 1997; and to U.S. Provisional Appln. Ser. No. 60/069,472, filed Dec. 9, 1997; and to U.S. Provisional Appln. Ser. No. 60/074,201, filed Feb. 10, 1998; and to U.S. Provisional Appln. Ser. No. 60/074,280, filed Feb. 10, 1998; and to U.S. Provisional Appln. Ser. No. 60/074,281, filed Feb. 10, 1998; and to U.S. Provisional Appln. Ser. No. 60/074,282, filed Feb. 10, 1998; and to U.S. Provisional Appln. Ser. No. 60/074,565, filed Feb. 12, 1998; and to U.S. Provisional Appln. Ser. No. 60/074,566, filed Feb. 12, 1998; and to U.S. Provisional Appln. Ser. No. 60/074,567, filed Feb. 12, 1998; and to U.S. Provisional Appln. Ser. No. 60/074,789, filed Feb. 19, 1998; and to U.S. Provisional Appln. Ser. No. 60/075,459, filed Feb. 19, 1998; and to U.S. Provisional Appln. Ser. No. 60/075,460, filed Feb. 19, 1998; and to U.S. Provisional Appln. Ser. No. 60/075,461, filed Feb. 19, 1998; and to U.S. Provisional Appln. Ser. No. 60/075,462, filed Feb. 19, 1998; and to U.S. Provisional Appln. Ser. No. 60/075,463, filed Feb. 19, 1998; and to U.S. Provisional Appln. Ser. No. 60/075,464, filed Feb. 19, 1998; and to U.S. Provisional Appln. Ser. No. 60/077,229, filed Mar. 9, 1998; and to U.S. Provisional Appln. Ser. No. 60/077,230, filed Mar. 9, 1998; and to U.S. Provisional Appln. Ser. No. 60/077,231, filed Mar. 9, 1998; and to U.S. Provisional Appln. Ser. No. 60/078,031, filed Mar. 16, 1998; and to U.S. Provisional Appln. Ser. No. 60/078,368, filed Mar. 18, 1998; and to U.S. Provisional Appln. Ser. No. 60/080,844, filed Apr. 7, 1998; and to U.S. Provisional Appln. Ser. No. 60/083,067, filed Apr. 27, 1998; and to U.S. Provisional Appln. Ser. No. 60/083,386, filed Apr. 29, 1998; and to U.S. Provisional Appln. Ser. No. 60/083,387, filed Apr. 29, 1998; and to U.S. Provisional Appln. Ser. No. 60/083,388, filed Apr. 29, 1998; and to U.S. Provisional Appln. Ser. No. 60/083,389, filed Apr. 29, 1998; and to U.S. Provisional Appln. Ser. No. 60/084,684, filed May 8, 1998; and to U.S. Provisional Appln. Ser. No. 60/085,222, filed May 13, 1998; and to U.S. Provisional Appln. Ser. No. 60/085,223, filed May 13, 1998; and to U.S. Provisional Appln. Ser. No. 60/085,224, filed May 13, 1998; and to U.S. Provisional Appln. Ser. No. 60/085,245, filed May 13, 1998; and to U.S. Provisional Appln. Ser. No. 60/086,183, filed May 21, 1998; and to U.S. Provisional Appln. Ser. No. 60/086,184, filed May 21, 1998; and to U.S. Provisional Appln. Ser. No. 60/086,185, filed May 21, 1998; and to U.S. Provisional Appln. Ser. No. 60/086,186, filed May 21, 1998; and to U.S. Provisional Appln. Ser. No. 60/086,187, filed May 21, 1998; and to U.S. Provisional Appln. Ser. No. 60/086,188, filed May 21, 1998; and to U.S. Provisional Appln. Ser. No. 60/086,339, filed May 21, 1998; and to U.S. Provisional Appln. Ser. No. 60/089,524, filed Jun. 16, 1998; and to U.S. Provisional Appln. Ser. No. 60/089,810, filed Jun. 18, 1998; and to U.S. Provisional Appln. Ser. No. 60/089,814, filed Jun. 18, 1998; and to U.S. Provisional Appln. Ser. No. 60/091,247, filed Jun. 30, 1998; and to U.S. Provisional Appln. Ser. No. 60/092,036, filed Jul. 8, 1998; and to U.S. Provisional Appln. Ser. No. 60/099,667, filed Sep. 9, 1998; and to U.S. Provisional Appln. Ser. No. 60/099,668, filed Sep. 9, 1998; and to U.S. Provisional Appln. Ser. No. 60/099,670, filed Sep. 9, 1998; and to U.S. Provisional Appln. Ser. No. 60/099,697, filed Sep. 9, 1998; and to U.S. Provisional Appln. Ser. No. 60/100,672, filed Sep. 16, 1998; and to U.S. Provisional Appln. Ser. No. 60/100,673, filed Sep. 16, 1998; and to U.S. Provisional Appln. Ser. No. 60/100,674, filed Sep. 16, 1998; and to U.S. Provisional Appln. Ser. No. 60/101,130, filed Sep. 21, 1998; and to U.S. Provisional Appln. Ser. No. 60/101,132, filed Sep. 21, 1998; and to U.S. Provisional Appln. Ser. No. 60/108,996, filed Nov. 18, 1998; and to U.S. Provisional Appln. Ser. No. 60/109,018, filed Nov. 18, 1998. U.S. application Ser. No. 09/233,218 is also a continuation-in-part of U.S. application Ser. No. 09/227,586, filed Jan. 8, 1999 (abandoned), which claims the benefit of U.S. Provisional Appln. Ser. No. 60/071,064, filed Jan. 9, 1998; and to U.S. Provisional Appln. Ser. No. 60/090,170, filed Jun. 22, 1998; and to U.S. Provisional Appln. Ser. No. 60/092,036, filed Jul. 8, 1998. U.S. application Ser. No. 09/233,218 is also a continuation-in-part of U.S. application Ser. No. 09/229,413, filed Jan. 12, 1999 (abandoned), which claims the benefit of U.S. Appln. Ser. No. 60/071,479, filed Jan. 13, 1998; and to U.S. Provisional Appln. Ser. No. 60/085,533, filed May 15, 1998; and to U.S. Provisional Appln. Ser. No. 60/089,806, filed Jun. 18, 1998; and to U.S. Provisional Appln. Ser. No. 60/089,807, filed Jun. 18, 1998; and to U.S. Provisional Appln. Ser. No. 60/089,808, filed Jun. 18, 1998; and to U.S. Provisional Appln. Ser. No. 60/089,811, filed Jun. 18, 1998; and to U.S. Provisional Appln. Ser. No. 60/089,812, filed Jun. 18, 1998; and to U.S. Provisional Appln. Ser. No. 60/089,813, filed Jun. 18, 1998; and to U.S. Provisional Appln. Ser. No. 60/091,247, filed Jun. 30, 1998; and to U.S. Provisional Appln. Ser. No. 60/091,405, filed Jun. 30, 1998; and to U.S. Provisional Appln. Ser. No. 60/099,697, filed Sep. 9, 1998; and to U.S. Provisional Appln. Ser. No. 60/100,963, filed Sep. 17, 1998; and to U.S. Provisional Appln. Ser. No. 60/101,343, filed Sep. 22, 1998; and to U.S. Provisional Appln. Ser. No. 60/101,344, filed Sep. 22, 1998; and to U.S. Provisional Appln. Ser. No. 60/101,347, filed Sep. 22, 1998; and to U.S. Provisional Appln. Ser. No. 60/101,508, filed Sep. 22, 1998; and to U.S. Provisional Appln. Ser. No. 60/101,707, filed Sep. 25, 1998; and to U.S. Provisional Appln. Ser. No. 60/104,124, filed Oct. 13, 1998; and to U.S. Provisional Appln. Ser. No. 60/104,126, filed Oct. 13, 1998; and to U.S. Provisional Appln. Ser. No. 60/104,127, filed Oct. 13, 1998; and to U.S. Provisional Appln. Ser. No. 60/104,128, filed Oct. 13, 1998; and to U.S. Provisional Appln. Ser. No. 60/111,981, filed Dec. 11, 1998. U.S. application Ser. No. 09/233,218 also claims the benefit of U.S. Provisional Appln. Ser. No. 60/072,027, filed Jan. 21, 1998; and to U.S. Provisional Appln. Ser. No. 60/072,888, filed Jan. 27, 1998; and to U.S. Provisional Appln. Ser. No. 60/076,709, filed Mar. 4, 1998; and to U.S. Provisional Appln. Ser. No. 60/076,912, filed Mar. 6, 1998; and to U.S. Provisional Appln. Ser. No. 60/078,031, filed Mar. 16, 1998; and to U.S. Provisional Appln. Ser. No. 60/083,390, filed Apr. 29, 1998; and to U.S. Provisional Appln. Ser. No. 60/084,684, filed May 8, 1998; and to U.S. Provisional Appln. Ser. No. 60/085,057, filed May 8, 1998; and to U.S. Provisional Appln. Ser. No. 60/085,429, filed May 8, 1998; and to U.S. Provisional Appln. Ser. No. 60/085,245, filed May 13, 1998; and to U.S. Provisional Appln. Ser. No. 60/085,533, filed May 15, 1998; and to U.S. Provisional Appln. Ser. No. 60/085,940, filed May 19, 1998; and to U.S. Provisional Appln. Ser. No. 60/086,339, filed May 21, 1998; and to U.S. Provisional Appln. Ser. No. 60/086,594, filed May 22, 1998; and to U.S. Provisional Appln. Ser. No. 60/086,608, filed May 22, 1998; and to U.S. Provisional Appln. Ser. No. 60/087,422, filed Jun. 1, 1998; and to U.S. Provisional Appln. Ser. No. 60/087,631, filed Jun. 2, 1998; and to U.S. Provisional Appln. Ser. No. 60/087,762, filed Jun. 2, 1998; and to U.S. Provisional Appln. Ser. No. 60/087,972 filed Jun. 4, 1998; and to U.S. Provisional Appln. Ser. No. 60/087,973 filed Jun. 4, 1998; and to U.S. Provisional Appln. Ser. No. 60/088,441, filed Jun. 8, 1998; and to U.S. Provisional Appln. Ser. No. 60/089,627, filed Jun. 16, 1998; and to U.S. Provisional Appln. Ser. No. 60/089,789, filed Jun. 18, 1998; and to U.S. Provisional Appln. Ser. No. 60/090,170, filed Jun. 22, 1998; and to U.S. Provisional Appln. Ser. No. 60/090,856, filed Jun. 26, 1998; and to U.S. Provisional Appln. Ser. No. 60/090,928, filed Jun. 26, 1998; and to U.S. Provisional Appln. Ser. No. 60/091,035, filed Jun. 29, 1998; and to U.S. Provisional Appln. Ser. No. 60/091,247, filed Jun. 30, 1998; and to U.S. Provisional Appln. Ser. No. 60/091,405, filed Jun. 30, 1998; and to U.S. Provisional Appln. Ser. No. 60/092,036, filed Jul. 8, 1998; and to U.S. Provisional Appln. Ser. No. 60/100,963, filed Sep. 17, 1998; and to U.S. Provisional Appln. Ser. No. 60/110,108, filed Nov. 25, 1998; and to U.S. Provisional Appln. Ser. No. 60/110,109, filed Nov. 25, 1998; and to U.S. Provisional Appln. Ser. No. 60/111,033, filed Dec. 4, 1998; and to U.S. Provisional Appln. Ser. No. 60/111,742, filed Dec. 10, 1998. U.S. application Ser. No. 09/267,199 is also a continuation-in-part of U.S. application Ser. No. 09/237,183, filed Jan. 26, 1999, which is a continuation-in-part of U.S. application Ser. No. 09/198,779, filed Nov. 24, 1998 (abandoned), which claims the benefit of U.S. Provisional Appln. Ser. No. 60/067,000, filed Nov. 24, 1997; and to U.S. Provisional Appln. Ser. No. 60/066,873, filed Nov. 25, 1997; and to U.S. Provisional Appln. Ser. No. 60/069,472, filed Dec. 9, 1997; and to U.S. Provisional Appln. Ser. No. 60/074,201, filed Feb. 10, 1998; and to U.S. Provisional Appln. Ser. No. 60/074,280, filed Feb. 10, 1998; and to U.S. Provisional Appln. Ser. No. 60/074,281, filed Feb. 10, 1998; and to U.S. Provisional Appln. Ser. No. 60/074,282, filed Feb. 10, 1998; and to U.S. Provisional Appln. Ser. No. 60/074,565, filed Feb. 12, 1998; and to U.S. Provisional Appln. Ser. No. 60/074,566, filed Feb. 12, 1998; and to U.S. Provisional Appln. Ser. No. 60/074,567, filed Feb. 12, 1998; and to U.S. Provisional Appln. Ser. No. 60/074,789, filed Feb. 19, 1998; and to U.S. Provisional Appln. Ser. No. 60/075,459, filed Feb. 19, 1998; and to U.S. Provisional Appln. Ser. No. 60/075,460, filed Feb. 19, 1998; and to U.S. Provisional Appln. Ser. No. 60/075,461, filed Feb. 19, 1998; and to U.S. Provisional Appln. Ser. No. 60/075,462, filed Feb. 19, 1998; and to U.S. Provisional Appln. Ser. No. 60/075,463, filed Feb. 19, 1998; and to U.S. Provisional Appln. Ser. No. 60/075,464, filed Feb. 19, 1998; and to U.S. Provisional Appln. Ser. No. 60/077,229, filed Mar. 9, 1998; and to U.S. Provisional Appln. Ser. No. 60/077,230, filed Mar. 9, 1998; and to U.S. Provisional Appln. Ser. No. 60/077,231, filed Mar. 9, 1998; and to U.S. Provisional Appln. Ser. No. 60/078,031, filed Mar. 16, 1998; and to U.S. Provisional Appln. Ser. No. 60/078,368, filed Mar. 18, 1998; and to U.S. Provisional Appln. Ser. No. 60/080,844, filed Apr. 7, 1998; and to U.S. Provisional Appln. Ser. No. 60/083,067, filed Apr. 27, 1998; and to U.S. Provisional Appln. Ser. No. 60/083,386, filed Apr. 29, 1998; and to U.S. Provisional Appln. Ser. No. 60/083,387, filed Apr. 29, 1998; and to U.S. Provisional Appln. Ser. No. 60/083,388, filed Apr. 29, 1998; and to U.S. Provisional Appln. Ser. No. 60/083,389, filed Apr. 29, 1998; and to U.S. Provisional Appln. Ser. No. 60/084,684, filed May 8, 1998; and to U.S. Provisional Appln. Ser. No. 60/085,222, filed May 13, 1998; and to U.S. Provisional Appln. Ser. No. 60/085,223, filed May 13, 1998; and to U.S. Provisional Appln. Ser. No. 60/085,224, filed May 13, 1998; and to U.S. Provisional Appln. Ser. No. 60/085,245, filed May 13, 1998; and to U.S. Provisional Appln. Ser. No. 60/086,183, filed May 21, 1998; and to U.S. Provisional Appln. Ser. No. 60/086,184, filed May 21, 1998; and to U.S. Provisional Appln. Ser. No. 60/086,185, filed May 21, 1998; and to U.S. Provisional Appln. Ser. No. 60/086,186, filed May 21, 1998; and to U.S. Provisional Appln. Ser. No. 60/086,187, filed May 21, 1998; and to U.S. Provisional Appln. Ser. No. 60/086,188, filed May 21, 1998; and to U.S. Provisional Appln. Ser. No. 60/086,339, filed May 21, 1998; and to U.S. Provisional Appln. Ser. No. 60/089,524, filed Jun. 16, 1998; and to U.S. Provisional Appln. Ser. No. 60/089,810, filed Jun. 18, 1998; and to U.S. Provisional Appln. Ser. No. 60/089,814, filed Jun. 18, 1998; and to U.S. Provisional Appln. Ser. No. 60/091,247, filed Jun. 30, 1998; and to U.S. Provisional Appln. Ser. No. 60/092,036, filed Jul. 8, 1998; and to U.S. Provisional Appln. Ser. No. 60/099,667, filed Sep. 9, 1998; and to U.S. Provisional Appln. Ser. No. 60/099,668, filed Sep. 9, 1998; and to U.S. Provisional Appln. Ser. No. 60/099,670, filed Sep. 9, 1998; and to U.S. Provisional Appln. Ser. No. 60/099,697, filed Sep. 9, 1998; and to U.S. Provisional Appln. Ser. No. 60/100,672, filed Sep. 16, 1998; and to U.S. Provisional Appln. Ser. No. 60/100,673, filed Sep. 16, 1998; and to U.S. Provisional Appln. Ser. No. 60/100,674, filed Sep. 16, 1998; and to U.S. Provisional Appln. Ser. No. 60/101,130, filed Sep. 21, 1998; and to U.S. Provisional Appln. Ser. No. 60/101,132, filed Sep. 21, 1998; and to U.S. Provisional Appln. Ser. No. 60/108,996, filed Nov. 18, 1998; and to U.S. Provisional Appln. Ser. No. 60/109,018, filed Nov. 18, 1998. U.S. application Ser. No. 09/237,183 is also a continuation-in-part of U.S. application Ser. No. 09/227,586, filed Jan. 8, 1999 (abandoned), which claims the benefit of U.S. Provisional Appln. Ser. No. 60/071,064, filed Jan. 9, 1998; and to U.S. Provisional Appln. Ser. No. 60/090,170, filed Jun. 22, 1998; and to U.S. Provisional Appln. Ser. No. 60/092,036, filed Jul. 8, 1998. U.S. application Ser. No. 09/237,183 is also a continuation-in-part of U.S. application Ser. No. 09/229,413, filed Jan. 12, 1999 (abandoned), which claims the benefit of U.S. Appln. Ser. No. 60/071,479, filed Jan. 13, 1998; and to U.S. Provisional Appln. Ser. No. 60/085,533, filed May 15, 1998; and to U.S. Provisional Appln. Ser. No. 60/089,806, filed Jun. 18, 1998; and to U.S. Provisional Appln. Ser. No. 60/089,807, filed Jun. 18, 1998; and to U.S. Provisional Appln. Ser. No. 60/089,808, filed Jun. 18, 1998; and to U.S. Provisional Appln. Ser. No. 60/089,811, filed Jun. 18, 1998; and to U.S. Provisional Appln. Ser. No. 60/089,812, filed Jun. 18, 1998; and to U.S. Provisional Appln. Ser. No. 60/089,813, filed Jun. 18, 1998; and to U.S. Provisional Appln. Ser. No. 60/091,247, filed Jun. 30, 1998; and to U.S. Provisional Appln. Ser. No. 60/091,405, filed Jun. 30, 1998; and to U.S. Provisional Appln. Ser. No. 60/099,697, filed Sep. 9, 1998; and to U.S. Provisional Appln. Ser. No. 60/100,963, filed Sep. 17, 1998; and to U.S. Provisional Appln. Ser. No. 60/101,343, filed Sep. 22, 1998; and to U.S. Provisional Appln. Ser. No. 60/101,344, filed Sep. 22, 1998; and to U.S. Provisional Appln. Ser. No. 60/101,347, filed Sep. 22, 1998; and to U.S. Provisional Appln. Ser. No. 60/101,508, filed Sep. 22, 1998; and to U.S. Provisional Appln. Ser. No. 60/101,707, filed Sep. 25, 1998; and to U.S. Provisional Appln. Ser. No. 60/104,124, filed Oct. 13, 1998; and to U.S. Provisional Appln. Ser. No. 60/104,126, filed Oct. 13, 1998; and to U.S. Provisional Appln. Ser. No. 60/104,127, filed Oct. 13, 1998; and to U.S. Provisional Appln. Ser. No. 60/104,128, filed Oct. 13, 1998; and to U.S. Provisional Appln. Ser. No. 60/111,981, filed Dec. 11, 1998. U.S. application Ser. No. 09/237,183 is also a continuation-in-part of U.S. application Ser. No. 09/233,218, filed Jan. 20, 1999, which is a continuation-in-part of U.S. application Ser. No. 09/198,779, filed Nov. 24, 1998 (abandoned), which claims the benefit of U.S. Provisional Appln. Ser. No. 60/067,000, filed Nov. 24, 1997; and to U.S. Provisional Appln. Ser. No. 60/066,873, filed Nov. 25, 1997; and to U.S. Provisional Appln. Ser. No. 60/069,472, filed Dec. 9, 1997; and to U.S. Provisional Appln. Ser. No. 60/074,201, filed Feb. 10, 1998; and to U.S. Provisional Appln. Ser. No. 60/074,280, filed Feb. 10, 1998; and to U.S. Provisional Appln. Ser. No. 60/074,281, filed Feb. 10, 1998; and to U.S. Provisional Appln. Ser. No. 60/074,282, filed Feb. 10, 1998; and to U.S. Provisional Appln. Ser. No. 60/074,565, filed Feb. 12, 1998; and to U.S. Provisional Appln. Ser. No. 60/074,566, filed Feb. 12, 1998; and to U.S. Provisional Appln. Ser. No. 60/074,567, filed Feb. 12, 1998; and to U.S. Provisional Appln. Ser. No. 60/074,789, filed Feb. 19, 1998; and to U.S. Provisional Appln. Ser. No. 60/075,459, filed Feb. 19, 1998; and to U.S. Provisional Appln. Ser. No. 60/075,460, filed Feb. 19, 1998; and to U.S. Provisional Appln. Ser. No. 60/075,461, filed Feb. 19, 1998; and to U.S. Provisional Appln. Ser. No. 60/075,462, filed Feb. 19, 1998; and to U.S. Provisional Appln. Ser. No. 60/075,463, filed Feb. 19, 1998; and to U.S. Provisional Appln. Ser. No. 60/075,464, filed Feb. 19, 1998; and to U.S. Provisional Appln. Ser. No. 60/077,229, filed Mar. 9, 1998; and to U.S. Provisional Appln. Ser. No. 60/077,230, filed Mar. 9, 1998; and to U.S. Provisional Appln. Ser. No. 60/077,231, filed Mar. 9, 1998; and to U.S. Provisional Appln. Ser. No. 60/078,031, filed Mar. 16, 1998; and to U.S. Provisional Appln. Ser. No. 60/078,368, filed Mar. 18, 1998; and to U.S. Provisional Appln. Ser. No. 60/080,844, filed Apr. 7, 1998; and to U.S. Provisional Appln. Ser. No. 60/083,067, filed Apr. 27, 1998; and to U.S. Provisional Appln. Ser. No. 60/083,386, filed Apr. 29, 1998; and to U.S. Provisional Appln. Ser. No. 60/083,387, filed Apr. 29, 1998; and to U.S. Provisional Appln. Ser. No. 60/083,388, filed Apr. 29, 1998; and to U.S. Provisional Appln. Ser. No. 60/083,389, filed Apr. 29, 1998; and to U.S. Provisional Appln. Ser. No. 60/084,684, filed May 8, 1998; and to U.S. Provisional Appln. Ser. No. 60/085,222, filed May 13, 1998; and to U.S. Provisional Appln. Ser. No. 60/085,223, filed May 13, 1998; and to U.S. Provisional Appln. Ser. No. 60/085,224, filed May 13, 1998; and to U.S. Provisional Appln. Ser. No. 60/085,245, filed May 13, 1998; and to U.S. Provisional Appln. Ser. No. 60/086,183, filed May 21, 1998; and to U.S. Provisional Appln. Ser. No. 60/086,184, filed May 21, 1998; and to U.S. Provisional Appln. Ser. No. 60/086,185, filed May 21, 1998; and to U.S. Provisional Appln. Ser. No. 60/086,186, filed May 21, 1998; and to U.S. Provisional Appln. Ser. No. 60/086,187, filed May 21, 1998; and to U.S. Provisional Appln. Ser. No. 60/086,188, filed May 21, 1998; and to U.S. Provisional Appln. Ser. No. 60/086,339, filed May 21, 1998; and to U.S. Provisional Appln. Ser. No. 60/089,524, filed Jun. 16, 1998; and to U.S. Provisional Appln. Ser. No. 60/089,810, filed Jun. 18, 1998; and to U.S. Provisional Appln. Ser. No. 60/089,814, filed Jun. 18, 1998; and to U.S. Provisional Appln. Ser. No. 60/091,247, filed Jun. 30, 1998; and to U.S. Provisional Appln. Ser. No. 60/092,036, filed Jul. 8, 1998; and to U.S. Provisional Appln. Ser. No. 60/099,667, filed Sep. 9, 1998; and to U.S. Provisional Appln. Ser. No. 60/099,668, filed Sep. 9, 1998; and to U.S. Provisional Appln. Ser. No. 60/099,670, filed Sep. 9, 1998; and to U.S. Provisional Appln. Ser. No. 60/099,697, filed Sep. 9, 1998; and to U.S. Provisional Appln. Ser. No. 60/100,672, filed Sep. 16, 1998; and to U.S. Provisional Appln. Ser. No. 60/100,673, filed Sep. 16, 1998; and to U.S. Provisional Appln. Ser. No. 60/100,674, filed Sep. 16, 1998; and to U.S. Provisional Appln. Ser. No. 60/101,130, filed Sep. 21, 1998; and to U.S. Provisional Appln. Ser. No. 60/101,132, filed Sep. 21, 1998; and to U.S. Provisional Appln. Ser. No. 60/108,996, filed Nov. 18, 1998; and to U.S. Provisional Appln. Ser. No. 60/109,018, filed Nov. 18, 1998. U.S. application Ser. No. 09/233,218 is also a continuation-in-part of U.S. application Ser. No. 09/227,586, filed Jan. 8, 1999 (abandoned), which claims the benefit of U.S. Provisional Appln. Ser. No. 60/071,064, filed Jan. 9, 1998; and to U.S. Provisional Appln. Ser. No. 60/090,170, filed Jun. 22, 1998; and to U.S. Provisional Appln. Ser. No. 60/092,036, filed Jul. 8, 1998. U.S. application Ser. No. 09/233,218 is also a continuation-in-part of U.S. application Ser. No. 09/229,413, filed Jan. 12, 1999 (abandoned), which claims the benefit of U.S. Appln. Ser. No. 60/071,479, filed Jan. 13, 1998; and to U.S. Provisional Appln. Ser. No. 60/085,533, filed May 15, 1998; and to U.S. Provisional Appln. Ser. No. 60/089,806, filed Jun. 18, 1998; and to U.S. Provisional Appln. Ser. No. 60/089,807, filed Jun. 18, 1998; and to U.S. Provisional Appln. Ser. No. 60/089,808, filed Jun. 18, 1998; and to U.S. Provisional Appln. Ser. No. 60/089,811, filed Jun. 18, 1998; and to U.S. Provisional Appln. Ser. No. 60/089,812, filed Jun. 18, 1998; and to U.S. Provisional Appln. Ser. No. 60/089,813, filed Jun. 18, 1998; and to U.S. Provisional Appln. Ser. No. 60/091,247, filed Jun. 30, 1998; and to U.S. Provisional Appln. Ser. No. 60/091,405, filed Jun. 30, 1998; and to U.S. Provisional Appln. Ser. No. 60/099,697, filed Sep. 9, 1998; and to U.S. Provisional Appln. Ser. No. 60/100,963, filed Sep. 17, 1998; and to U.S. Provisional Appln. Ser. No. 60/101,343, filed Sep. 22, 1998; and to U.S. Provisional Appln. Ser. No. 60/101,344, filed Sep. 22, 1998; and to U.S. Provisional Appln. Ser. No. 60/101,347, filed Sep. 22, 1998; and to U.S. Provisional Appln. Ser. No. 60/101,508, filed Sep. 22, 1998; and to U.S. Provisional Appln. Ser. No. 60/101,707, filed Sep. 25, 1998; and to U.S. Provisional Appln. Ser. No. 60/104,124, filed Oct. 13, 1998; and to U.S. Provisional Appln. Ser. No. 60/104,126, filed Oct. 13, 1998; and to U.S. Provisional Appln. Ser. No. 60/104,127, filed Oct. 13, 1998; and to U.S. Provisional Appln. Ser. No. 60/104,128, filed Oct. 13, 1998; and to U.S. Provisional Appln. Ser. No. 60/111,981, filed Dec. 11, 1998. U.S. application Ser. No. 09/233,218 also claims the benefit of U.S. Provisional Appln. Ser. No. 60/072,027, filed Jan. 21, 1998; and to U.S. Provisional Appln. Ser. No. 60/072,888, filed Jan. 27, 1998; and to U.S. Provisional Appln. Ser. No. 60/076,709, filed Mar. 4, 1998; and to U.S. Provisional Appln. Ser. No. 60/076,912, filed Mar. 6, 1998; and to U.S. Provisional Appln. Ser. No. 60/078,031, filed Mar. 16, 1998; and to U.S. Provisional Appln. Ser. No. 60/083,390, filed Apr. 29, 1998; and to U.S. Provisional Appln. Ser. No. 60/084,684, filed May 8, 1998; and to U.S. Provisional Appln. Ser. No. 60/085,057, filed May 8, 1998; and to U.S. Provisional Appln. Ser. No. 60/085,429, filed May 8, 1998; and to U.S. Provisional Appln. Ser. No. 60/085,245, filed May 13, 1998; and to U.S. Provisional Appln. Ser. No. 60/085,533, filed May 15, 1998; and to U.S. Provisional Appln. Ser. No. 60/085,940, filed May 19, 1998; and to U.S. Provisional Appln. Ser. No. 60/086,339, filed May 21, 1998; and to U.S. Provisional Appln. Ser. No. 60/086,594, filed May 22, 1998; and to U.S. Provisional Appln. Ser. No. 60/086,608, filed May 22, 1998; and to U.S. Provisional Appln. Ser. No. 60/087,422, filed Jun. 1, 1998; and to U.S. Provisional Appln. Ser. No. 60/087,631, filed Jun. 2, 1998; and to U.S. Provisional Appln. Ser. No. 60/087,762, filed Jun. 2, 1998; and to U.S. Provisional Appln. Ser. No. 60/087,972 filed Jun. 4, 1998; and to U.S. Provisional Appln. Ser. No. 60/087,973 filed Jun. 4, 1998; and to U.S. Provisional Appln. Ser. No. 60/088,441, filed Jun. 8, 1998; and to U.S. Provisional Appln. Ser. No. 60/089,627, filed Jun. 16, 1998; and to U.S. Provisional Appln. Ser. No. 60/089,789, filed Jun. 18, 1998; and to U.S. Provisional Appln. Ser. No. 60/090,170, filed Jun. 22, 1998; and to U.S. Provisional Appln. Ser. No. 60/090,856, filed Jun. 26, 1998; and to U.S. Provisional Appln. Ser. No. 60/090,928, filed Jun. 26, 1998; and to U.S. Provisional Appln. Ser. No. 60/091,035, filed Jun. 29, 1998; and to U.S. Provisional Appln. Ser. No. 60/091,247, filed Jun. 30, 1998; and to U.S. Provisional Appln. Ser. No. 60/091,405, filed Jun. 30, 1998; and to U.S. Provisional Appln. Ser. No. 60/092,036, filed Jul. 8, 1998; and to U.S. Provisional Appln. Ser. No. 60/100,963, filed Sep. 17, 1998; and to U.S. Provisional Appln. Ser. No. 60/110,108, filed Nov. 25, 1998; and to U.S. Provisional Appln. Ser. No. 60/110,109, filed Nov. 25, 1998; and to U.S. Provisional Appln. Ser. No. 60/111,033, filed Dec. 4, 1998; and to U.S. Provisional Appln. Ser. No. 60/111,742, filed Dec. 10, 1998. U.S. application Ser. No. 09/237,183 also claims the benefit of U.S. Provisional Appln. Ser. No. 60/072,888, filed Jan. 27, 1998; and to U.S. Provisional Appln. Ser. No. 60/076,709, filed Mar. 4, 1998; and to U.S. Provisional Appln. Ser. No. 60/076,912, filed Mar. 6, 1998; and to U.S. Provisional Appln. Ser. No. 60/078,031, filed Mar. 16, 1998; and to U.S. Provisional Appln. Ser. No. 60/083,390, filed Apr. 29, 1998; and to U.S. Provisional Appln. Ser. No. 60/084,684, filed May 8, 1998; and to U.S. Provisional Appln. Ser. No. 60/085,057, filed May 8, 1998; and to U.S. Provisional Appln. Ser. No. 60/085,429, filed May 8, 1998; and to U.S. Provisional Appln. Ser. No. 60/085,245, filed May 13, 1998; and to U.S. Provisional Appln. Ser. No. 60/085,533, filed May 15, 1998; and to U.S. Provisional Appln. Ser. No. 60/085,940, filed May 19, 1998; and to U.S. Provisional Appln. Ser. No. 60/086,339, filed May 21, 1998; and to U.S. Provisional Appln. Ser. No. 60/086,594, filed May 22, 1998; and to U.S. Provisional Appln. Ser. No. 60/086,608, filed May 22, 1998; and to U.S. Provisional Appln. Ser. No. 60/087,422, filed Jun. 1, 1998; and to U.S. Provisional Appln. Ser. No. 60/087,631, filed Jun. 2, 1998; and to U.S. Provisional Appln. Ser. No. 60/087,762, filed Jun. 2, 1998; and to U.S. Provisional Appln. Ser. No. 60/087,972 filed Jun. 4, 1998; and to U.S. Provisional Appln. Ser. No. 60/087,973 filed Jun. 4, 1998; and to U.S. Provisional Appln. Ser. No. 60/088,441, filed Jun. 8, 1998; and to U.S. Provisional Appln. Ser. No. 60/089,627, filed Jun. 16, 1998; and to U.S. Provisional Appln. Ser. No. 60/089,789, filed Jun. 18, 1998; and to U.S. Provisional Appln. Ser. No. 60/090,170, filed Jun. 22, 1998; and to U.S. Provisional Appln. Ser. No. 60/090,856, filed Jun. 26, 1998; and to U.S. Provisional Appln. Ser. No. 60/090,928, filed Jun. 26, 1998; and to U.S. Provisional Appln. Ser. No. 60/091,035, filed Jun. 29, 1998; and to U.S. Provisional Appln. Ser. No. 60/091,247, filed Jun. 30, 1998; and to U.S. Provisional Appln. Ser. No. 60/091,405, filed Jun. 30, 1998; and to U.S. Provisional Appln. Ser. No. 60/092,036, filed Jul. 8, 1998; and to U.S. Provisional Appln. Ser. No. 60/100,963, filed Sep. 17, 1998; and to U.S. Provisional Appln. Ser. No. 60/110,108, filed Nov. 25, 1998; and to U.S. Provisional Appln. Ser. No. 60/110,109, filed Nov. 25, 1998; and to U.S. Provisional Appln. Ser. No. 60/111,033, filed Dec. 4, 1998; and to U.S. Provisional Appln. Ser. No. 60/111,742, filed Dec. 10, 1998. U.S. application Ser. No. 09/267,199 also claims the benefit of U.S. Provisional Appln. Ser. No. 60/078,031, filed Mar. 16, 1998; and to U.S. Provisional Appln. Ser. No. 60/083,390, filed Apr. 29, 1998; and to U.S. Provisional Appln. Ser. No. 60/084,684, filed May 8, 1998; and to U.S. Provisional Appln. Ser. No. 60/085,057, filed May 8, 1998; and to U.S. Provisional Appln. Ser. No. 60/085,429, filed May 8, 1998; and to U.S. Provisional Appln. Ser. No. 60/085,245, filed May 13, 1998; and to U.S. Provisional Appln. Ser. No. 60/085,533, filed May 15, 1998; and to U.S. Provisional Appln. Ser. No. 60/085,940, filed May 19, 1998; and to U.S. Provisional Appln. Ser. No. 60/086,339, filed May 21, 1998; and to U.S. Provisional Appln. Ser. No. 60/086,594, filed May 22, 1998; and to U.S. Provisional Appln. Ser. No. 60/086,608, filed May 22, 1998; and to U.S. Provisional Appln. Ser. No. 60/087,422, filed Jun. 1, 1998; and to U.S. Provisional Appln. Ser. No. 60/087,631, filed Jun. 2, 1998; and to U.S. Provisional Appln. Ser. No. 60/087,762, filed Jun. 2, 1998; and to U.S. Provisional Appln. Ser. No. 60/087,972 filed Jun. 4, 1998; and to U.S. Provisional Appln. Ser. No. 60/087,973 filed Jun. 4, 1998; and to U.S. Provisional Appln. Ser. No. 60/088,441, filed Jun. 8, 1998; and to U.S. Provisional Appln. Ser. No. 60/089,627, filed Jun. 16, 1998; and to U.S. Provisional Appln. Ser. No. 60/089,789, filed Jun. 18, 1998; and to U.S. Provisional Appln. Ser. No. 60/090,170, filed Jun. 22, 1998; and to U.S. Provisional Appln. Ser. No. 60/090,856, filed Jun. 26, 1998; and to U.S. Provisional Appln. Ser. No. 60/090,928, filed Jun. 26, 1998; and to U.S. Provisional Appln. Ser. No. 60/091,035, filed Jun. 29, 1998; and to U.S. Provisional Appln. Ser. No. 60/091,247, filed Jun. 30, 1998; and to U.S. Provisional Appln. Ser. No. 60/091,405, filed Jun. 30, 1998; and to U.S. Provisional Appln. Ser. No. 60/092,036, filed Jul. 8, 1998; and to U.S. Provisional Appln. Ser. No. 60/100,963, filed Sep. 17, 1998; and to U.S. Provisional Appln. Ser. No. 60/110,108, filed Nov. 25, 1998; and to U.S. Provisional Appln. Ser. No. 60/110,109, filed Nov. 25, 1998; and to U.S. Provisional Appln. Ser. No. 60/111,033, filed Dec. 4, 1998; and to U.S. Provisional Appln. Ser. No. 60/111,742, filed Dec. 10, 1998. U.S. application Ser. No. 09/300,482 also claims the benefit of U.S. Provisional Appln. Ser. No. 60/083,390, filed Apr. 29, 1998; and to U.S. Provisional Appln. Ser. No. 60/084,684, filed May 8, 1998; and to U.S. Provisional Appln. Ser. No. 60/085,057, filed May 8, 1998; and to U.S. Provisional Appln. Ser. No. 60/085,429, filed May 8, 1998; and to U.S. Provisional Appln. Ser. No. 60/085,245, filed May 13, 1998; and to U.S. Provisional Appln. Ser. No. 60/085,533, filed May 15, 1998; and to U.S. Provisional Appln. Ser. No. 60/085,940, filed May 19, 1998; and to U.S. Provisional Appln. Ser. No. 60/086,339, filed May 21, 1998; and to U.S. Provisional Appln. Ser. No. 60/086,594, filed May 22, 1998; and to U.S. Provisional Appln. Ser. No. 60/086,608, filed May 22, 1998; and to U.S. Provisional Appln. Ser. No. 60/087,422, filed Jun. 1, 1998; and to U.S. Provisional Appln. Ser. No. 60/087,631, filed Jun. 2, 1998; and to U.S. Provisional Appln. Ser. No. 60/087,762, filed Jun. 2, 1998; and to U.S. Provisional Appln. Ser. No. 60/087,972 filed Jun. 4, 1998; and to U.S. Provisional Appln. Ser. No. 60/087,973 filed Jun. 4, 1998; and to U.S. Provisional Appln. Ser. No. 60/088,441, filed Jun. 8, 1998; and to U.S. Provisional Appln. Ser. No. 60/089,627, filed Jun. 16, 1998; and to U.S. Provisional Appln. Ser. No. 60/089,789, filed Jun. 18, 1998; and to U.S. Provisional Appln. Ser. No. 60/090,170, filed Jun. 22, 1998; and to U.S. Provisional Appln. Ser. No. 60/090,856, filed Jun. 26, 1998; and to U.S. Provisional Appln. Ser. No. 60/090,928, filed Jun. 26, 1998; and to U.S. Provisional Appln. Ser. No. 60/091,035, filed Jun. 29, 1998; and to U.S. Provisional Appln. Ser. No. 60/091,247, filed Jun. 30, 1998; and to U.S. Provisional Appln. Ser. No. 60/091,405, filed Jun. 30, 1998; and to U.S. Provisional Appln. Ser. No. 60/092,036, filed Jul. 8, 1998; and to U.S. Provisional Appln. Ser. No. 60/100,963, filed Sep. 17, 1998; and to U.S. Provisional Appln. Ser. No. 60/110,108, filed Nov. 25, 1998; and to U.S. Provisional Appln. Ser. No. 60/110,109, filed Nov. 25, 1998; and to U.S. Provisional Appln. Ser. No. 60/111,033, filed Dec. 4, 1998; and to U.S. Provisional Appln. Ser. No. 60/111,742, filed Dec. 10, 1998. U.S. application Ser. No. 09/371,146 is also a continuation-in-part of U.S. application Ser. No. 09/333,535, which is a continuation-in-part of U.S. application Ser. No. 09/198,779, filed Nov. 24, 1998 (abandoned), which claims the benefit of U.S. Provisional Appln. Ser. No. 60/067,000, filed Nov. 24, 1997; and to U.S. Provisional Appln. Ser. No. 60/066,873, filed Nov. 25, 1997; and to U.S. Provisional Appln. Ser. No. 60/069,472, filed Dec. 9, 1997; and to U.S. Provisional Appln. Ser. No. 60/074,201, filed Feb. 10, 1998; and to U.S. Provisional Appln. Ser. No. 60/074,280, filed Feb. 10, 1998; and to U.S. Provisional Appln. Ser. No. 60/074,281, filed Feb. 10, 1998; and to U.S. Provisional Appln. Ser. No. 60/074,282, filed Feb. 10, 1998; and to U.S. Provisional Appln. Ser. No. 60/074,565, filed Feb. 12, 1998; and to U.S. Provisional Appln. Ser. No. 60/074,566, filed Feb. 12, 1998; and to U.S. Provisional Appln. Ser. No. 60/074,567, filed Feb. 12, 1998; and to U.S. Provisional Appln. Ser. No. 60/074,789, filed Feb. 19, 1998; and to U.S. Provisional Appln. Ser. No. 60/075,459, filed Feb. 19, 1998; and to U.S. Provisional Appln. Ser. No. 60/075,460, filed Feb. 19, 1998; and to U.S. Provisional Appln. Ser. No. 60/075,461, filed Feb. 19, 1998; and to U.S. Provisional Appln. Ser. No. 60/075,462, filed Feb. 19, 1998; and to U.S. Provisional Appln. Ser. No. 60/075,463, filed Feb. 19, 1998; and to U.S. Provisional Appln. Ser. No. 60/075,464, filed Feb. 19, 1998; and to U.S. Provisional Appln. Ser. No. 60/077,229, filed Mar. 9, 1998; and to U.S. Provisional Appln. Ser. No. 60/077,230, filed Mar. 9, 1998; and to U.S. Provisional Appln. Ser. No. 60/077,231, filed Mar. 9, 1998; and to U.S. Provisional Appln. Ser. No. 60/078,031, filed Mar. 16, 1998; and to U.S. Provisional Appln. Ser. No. 60/078,368, filed Mar. 18, 1998; and to U.S. Provisional Appln. Ser. No. 60/080,844, filed Apr. 7, 1998; and to U.S. Provisional Appln. Ser. No. 60/083,067, filed Apr. 27, 1998; and to U.S. Provisional Appln. Ser. No. 60/083,386, filed Apr. 29, 1998; and to U.S. Provisional Appln. Ser. No. 60/083,387, filed Apr. 29, 1998; and to U.S. Provisional Appln. Ser. No. 60/083,388, filed Apr. 29, 1998; and to U.S. Provisional Appln. Ser. No. 60/083,389, filed Apr. 29, 1998; and to U.S. Provisional Appln. Ser. No. 60/084,684, filed May 8, 1998; and to U.S. Provisional Appln. Ser. No. 60/085,222, filed May 13, 1998; and to U.S. Provisional Appln. Ser. No. 60/085,223, filed May 13, 1998; and to U.S. Provisional Appln. Ser. No. 60/085,224, filed May 13, 1998; and to U.S. Provisional Appln. Ser. No. 60/085,245, filed May 13, 1998; and to U.S. Provisional Appln. Ser. No. 60/086,183, filed May 21, 1998; and to U.S. Provisional Appln. Ser. No. 60/086,184, filed May 21, 1998; and to U.S. Provisional Appln. Ser. No. 60/086,185, filed May 21, 1998; and to U.S. Provisional Appln. Ser. No. 60/086,186, filed May 21, 1998; and to U.S. Provisional Appln. Ser. No. 60/086,187, filed May 21, 1998; and to U.S. Provisional Appln. Ser. No. 60/086,188, filed May 21, 1998; and to U.S. Provisional Appln. Ser. No. 60/086,339, filed May 21, 1998; and to U.S. Provisional Appln. Ser. No. 60/089,524, filed Jun. 16, 1998; and to U.S. Provisional Appln. Ser. No. 60/089,810, filed Jun. 18, 1998; and to U.S. Provisional Appln. Ser. No. 60/089,814, filed Jun. 18, 1998; and to U.S. Provisional Appln. Ser. No. 60/091,247, filed Jun. 30, 1998; and to U.S. Provisional Appln. Ser. No. 60/092,036, filed Jul. 8, 1998; and to U.S. Provisional Appln. Ser. No. 60/099,667, filed Sep. 9, 1998; and to U.S. Provisional Appln. Ser. No. 60/099,668, filed Sep. 9, 1998; and to U.S. Provisional Appln. Ser. No. 60/099,670, filed Sep. 9, 1998; and to U.S. Provisional Appln. Ser. No. 60/099,697, filed Sep. 9, 1998; and to U.S. Provisional Appln. Ser. No. 60/100,672, filed Sep. 16, 1998; and to U.S. Provisional Appln. Ser. No. 60/100,673, filed Sep. 16, 1998; and to U.S. Provisional Appln. Ser. No. 60/100,674, filed Sep. 16, 1998; and to U.S. Provisional Appln. Ser. No. 60/101,130, filed Sep. 21, 1998; and to U.S. Provisional Appln. Ser. No. 60/101,132, filed Sep. 21, 1998; and to U.S. Provisional Appln. Ser. No. 60/108,996, filed Nov. 18, 1998; and to U.S. Provisional Appln. Ser. No. 60/109,018, filed Nov. 18, 1998. U.S. application Ser. No. 09/333,535 is also a continuation-in-part of U.S. application Ser. No. 09/206,040, filed Dec. 4, 1998 (abandoned), which claims the benefit of U.S. Provisional Appln. Ser. No. 60/100,647, filed Sep. 16, 1998. U.S. application Ser. No. 09/333,535 is also a continuation-in-part of U.S. application Ser. No. 09/210,297, filed Dec. 8, 1998 (abandoned), which is a continuation-in-part of U.S. application Ser. No. 09/198,779, filed Nov. 24, 1998 (abandoned), which claims the benefit of U.S. Provisional Appln. Ser. No. 60/067,000, filed Nov. 24, 1997; and to U.S. Provisional Appln. Ser. No. 60/066,873, filed Nov. 25, 1997; and to U.S. Provisional Appln. Ser. No. 60/069,472, filed Dec. 9, 1997; and to U.S. Provisional Appln. Ser. No. 60/074,201, filed Feb. 10, 1998; and to U.S. Provisional Appln. Ser. No. 60/074,280, filed Feb. 10, 1998; and to U.S. Provisional Appln. Ser. No. 60/074,281, filed Feb. 10, 1998; and to U.S. Provisional Appln. Ser. No. 60/074,282, filed Feb. 10, 1998; and to U.S. Provisional Appln. Ser. No. 60/074,565, filed Feb. 12, 1998; and to U.S. Provisional Appln. Ser. No. 60/074,566, filed Feb. 12, 1998; and to U.S. Provisional Appln. Ser. No. 60/074,567, filed Feb. 12, 1998; and to U.S. Provisional Appln. Ser. No. 60/074,789, filed Feb. 19, 1998; and to U.S. Provisional Appln. Ser. No. 60/075,459, filed Feb. 19, 1998; and to U.S. Provisional Appln. Ser. No. 60/075,460, filed Feb. 19, 1998; and to U.S. Provisional Appln. Ser. No. 60/075,461, filed Feb. 19, 1998; and to U.S. Provisional Appln. Ser. No. 60/075,462, filed Feb. 19, 1998; and to U.S. Provisional Appln. Ser. No. 60/075,463, filed Feb. 19, 1998; and to U.S. Provisional Appln. Ser. No. 60/075,464, filed Feb. 19, 1998; and to U.S. Provisional Appln. Ser. No. 60/077,229, filed Mar. 9, 1998; and to U.S. Provisional Appln. Ser. No. 60/077,230, filed Mar. 9, 1998; and to U.S. Provisional Appln. Ser. No. 60/077,231, filed Mar. 9, 1998; and to U.S. Provisional Appln. Ser. No. 60/078,031, filed Mar. 16, 1998; and to U.S. Provisional Appln. Ser. No. 60/078,368, filed Mar. 18, 1998; and to U.S. Provisional Appln. Ser. No. 60/080,844, filed Apr. 7, 1998; and to U.S. Provisional Appln. Ser. No. 60/083,067, filed Apr. 27, 1998; and to U.S. Provisional Appln. Ser. No. 60/083,386, filed Apr. 29, 1998; and to U.S. Provisional Appln. Ser. No. 60/083,387, filed Apr. 29, 1998; and to U.S. Provisional Appln. Ser. No. 60/083,388, filed Apr. 29, 1998; and to U.S. Provisional Appln. Ser. No. 60/083,389, filed Apr. 29, 1998; and to U.S. Provisional Appln. Ser. No. 60/084,684, filed May 8, 1998; and to U.S. Provisional Appln. Ser. No. 60/085,222, filed May 13, 1998; and to U.S. Provisional Appln. Ser. No. 60/085,223, filed May 13, 1998; and to U.S. Provisional Appln. Ser. No. 60/085,224, filed May 13, 1998; and to U.S. Provisional Appln. Ser. No. 60/085,245, filed May 13, 1998; and to U.S. Provisional Appln. Ser. No. 60/086,183, filed May 21, 1998; and to U.S. Provisional Appln. Ser. No. 60/086,184, filed May 21, 1998; and to U.S. Provisional Appln. Ser. No. 60/086,185, filed May 21, 1998; and to U.S. Provisional Appln. Ser. No. 60/086,186, filed May 21, 1998; and to U.S. Provisional Appln. Ser. No. 60/086,187, filed May 21, 1998; and to U.S. Provisional Appln. Ser. No. 60/086,188, filed May 21, 1998; and to U.S. Provisional Appln. Ser. No. 60/086,339, filed May 21, 1998; and to U.S. Provisional Appln. Ser. No. 60/089,524, filed Jun. 16, 1998; and to U.S. Provisional Appln. Ser. No. 60/089,810, filed Jun. 18, 1998; and to U.S. Provisional Appln. Ser. No. 60/089,814, filed Jun. 18, 1998; and to U.S. Provisional Appln. Ser. No. 60/091,247, filed Jun. 30, 1998; and to U.S. Provisional Appln. Ser. No. 60/092,036, filed Jul. 8, 1998; and to U.S. Provisional Appln. Ser. No. 60/099,667, filed Sep. 9, 1998; and to U.S. Provisional Appln. Ser. No. 60/099,668, filed Sep. 9, 1998; and to U.S. Provisional Appln. Ser. No. 60/099,670, filed Sep. 9, 1998; and to U.S. Provisional Appln. Ser. No. 60/099,697, filed Sep. 9, 1998; and to U.S. Provisional Appln. Ser. No. 60/100,672, filed Sep. 16, 1998; and to U.S. Provisional Appln. Ser. No. 60/100,673, filed Sep. 16, 1998; and to U.S. Provisional Appln. Ser. No. 60/100,674, filed Sep. 16, 1998; and to U.S. Provisional Appln. Ser. No. 60/101,130, filed Sep. 21, 1998; and to U.S. Provisional Appln. Ser. No. 60/101,132, filed Sep. 21, 1998; and to U.S. Provisional Appln. Ser. No. 60/108,996, filed Nov. 18, 1998; and to U.S. Provisional Appln. Ser. No. 60/109,018, filed Nov. 18, 1998. U.S. application Ser. No. 09/333,535 is also a continuation-in-part of U.S. application Ser. No. 09/244,000, filed Feb. 8, 1999 (abandoned), which is a continuation-in-part of U.S. application Ser. No. 09/198,779, filed Nov. 24, 1998 (abandoned), which claims the benefit of U.S. Provisional Appln. Ser. No. 60/067,000, filed Nov. 24, 1997; and to U.S. Provisional Appln. Ser. No. 60/066,873, filed Nov. 25, 1997; and to U.S. Provisional Appln. Ser. No. 60/069,472, filed Dec. 9, 1997; and to U.S. Provisional Appln. Ser. No. 60/074,201, filed Feb. 10, 1998; and to U.S. Provisional Appln. Ser. No. 60/074,280, filed Feb. 10, 1998; and to U.S. Provisional Appln. Ser. No. 60/074,281, filed Feb. 10, 1998; and to U.S. Provisional Appln. Ser. No. 60/074,282, filed Feb. 10, 1998; and to U.S. Provisional Appln. Ser. No. 60/074,565, filed Feb. 12, 1998; and to U.S. Provisional Appln. Ser. No. 60/074,566, filed Feb. 12, 1998; and to U.S. Provisional Appln. Ser. No. 60/074,567, filed Feb. 12, 1998; and to U.S. Provisional Appln. Ser. No. 60/074,789, filed Feb. 19, 1998; and to U.S. Provisional Appln. Ser. No. 60/075,459, filed Feb. 19, 1998; and to U.S. Provisional Appln. Ser. No. 60/075,460, filed Feb. 19, 1998; and to U.S. Provisional Appln. Ser. No. 60/075,461, filed Feb. 19, 1998; and to U.S. Provisional Appln. Ser. No. 60/075,462, filed Feb. 19, 1998; and to U.S. Provisional Appln. Ser. No. 60/075,463, filed Feb. 19, 1998; and to U.S. Provisional Appln. Ser. No. 60/075,464, filed Feb. 19, 1998; and to U.S. Provisional Appln. Ser. No. 60/077,229, filed Mar. 9, 1998; and to U.S. Provisional Appln. Ser. No. 60/077,230, filed Mar. 9, 1998; and to U.S. Provisional Appln. Ser. No. 60/077,231, filed Mar. 9, 1998; and to U.S. Provisional Appln. Ser. No. 60/078,031, filed Mar. 16, 1998; and to U.S. Provisional Appln. Ser. No. 60/078,368, filed Mar. 18, 1998; and to U.S. Provisional Appln. Ser. No. 60/080,844, filed Apr. 7, 1998; and to U.S. Provisional Appln. Ser. No. 60/083,067, filed Apr. 27, 1998; and to U.S. Provisional Appln. Ser. No. 60/083,386, filed Apr. 29, 1998; and to U.S. Provisional Appln. Ser. No. 60/083,387, filed Apr. 29, 1998; and to U.S. Provisional Appln. Ser. No. 60/083,388, filed Apr. 29, 1998; and to U.S. Provisional Appln. Ser. No. 60/083,389, filed Apr. 29, 1998; and to U.S. Provisional Appln. Ser. No. 60/084,684, filed May 8, 1998; and to U.S. Provisional Appln. Ser. No. 60/085,222, filed May 13, 1998; and to U.S. Provisional Appln. Ser. No. 60/085,223, filed May 13, 1998; and to U.S. Provisional Appln. Ser. No. 60/085,224, filed May 13, 1998; and to U.S. Provisional Appln. Ser. No. 60/085,245, filed May 13, 1998; and to U.S. Provisional Appln. Ser. No. 60/086,183, filed May 21, 1998; and to U.S. Provisional Appln. Ser. No. 60/086,184, filed May 21, 1998; and to U.S. Provisional Appln. Ser. No. 60/086,185, filed May 21, 1998; and to U.S. Provisional Appln. Ser. No. 60/086,186, filed May 21, 1998; and to U.S. Provisional Appln. Ser. No. 60/086,187, filed May 21, 1998; and to U.S. Provisional Appln. Ser. No. 60/086,188, filed May 21, 1998; and to U.S. Provisional Appln. Ser. No. 60/086,339, filed May 21, 1998; and to U.S. Provisional Appln. Ser. No. 60/089,524, filed Jun. 16, 1998; and to U.S. Provisional Appln. Ser. No. 60/089,810, filed Jun. 18, 1998; and to U.S. Provisional Appln. Ser. No. 60/089,814, filed Jun. 18, 1998; and to U.S. Provisional Appln. Ser. No. 60/091,247, filed Jun. 30, 1998; and to U.S. Provisional Appln. Ser. No. 60/092,036, filed Jul. 8, 1998; and to U.S. Provisional Appln. Ser. No. 60/099,667, filed Sep. 9, 1998; and to U.S. Provisional Appln. Ser. No. 60/099,668, filed Sep. 9, 1998; and to U.S. Provisional Appln. Ser. No. 60/099,670, filed Sep. 9, 1998; and to U.S. Provisional Appln. Ser. No. 60/099,697, filed Sep. 9, 1998; and to U.S. Provisional Appln. Ser. No. 60/100,672, filed Sep. 16, 1998; and to U.S. Provisional Appln. Ser. No. 60/100,673, filed Sep. 16, 1998; and to U.S. Provisional Appln. Ser. No. 60/100,674, filed Sep. 16, 1998; and to U.S. Provisional Appln. Ser. No. 60/101,130, filed Sep. 21, 1998; and to U.S. Provisional Appln. Ser. No. 60/101,132, filed Sep. 21, 1998; and to U.S. Provisional Appln. Ser. No. 60/108,996, filed Nov. 18, 1998; and to U.S. Provisional Appln. Ser. No. 60/109,018, filed Nov. 18, 1998. U.S. application Ser. No. 09/244,000 also claims the benefit of U.S. Provisional Appln. Ser. No. 60/074,201, filed Feb. 10, 1998; and to U.S. Provisional Appln. Ser. No. 60/074,280, filed Feb. 10, 1998; and to U.S. Provisional Appln. Ser. No. 60/074,281, filed Feb. 10, 1998; and to U.S. Provisional Appln. Ser. No. 60/074,565, filed Feb. 12, 1998; and to U.S. Provisional Appln. Ser. No. 60/074,566, filed Feb. 12, 1998; and to U.S. Provisional Appln. Ser. No. 60/074,567, filed Feb. 12, 1998; and to U.S. Provisional Appln. Ser. No. 60/074,789, filed Feb. 19, 1998; and to U.S. Provisional Appln. Ser. No. 60/075,459, filed Feb. 19, 1998; and to U.S. Provisional Appln. Ser. No. 60/075,460, filed Feb. 19, 1998; and to U.S. Provisional Appln. Ser. No. 60/075,461, filed Feb. 19, 1998; and to U.S. Provisional Appln. Ser. No. 60/075,463, filed Feb. 19, 1998; and to U.S. Provisional Appln. Ser. No. 60/075,464, filed Feb. 19, 1998; and to U.S. Provisional Appln. Ser. No. 60/086,183, filed May 21, 1998; and to U.S. Provisional Appln. Ser. No. 60/086,188, filed May 21, 1998. U.S. application Ser. No. 09/333,535 is also a continuation-in-part of U.S. application Ser. No. 09/263,191, filed Mar. 5, 1999 (abandoned). U.S. application Ser. No. 09/333,535 is also a continuation-in-part of U.S. application Ser. No. 09/283,466, filed Apr. 2, 1999 (abandoned). U.S. application Ser. No. 09/333,535 is also a continuation-in-part of U.S. application Ser. No. 09/306,349, filed May 10, 1999 (abandoned). U.S. application Ser. No. 09/333,535 is also a continuation-in-part of U.S. application Ser. No. 09/199,129, filed Nov. 24, 1998, which is a continuation-in-part of U.S. application Ser. No. 09/198,779, filed Nov. 24, 1998 (abandoned), which claims the benefit of U.S. Provisional Appln. Ser. No. 60/067,000, filed Nov. 24, 1997; and to U.S. Provisional Appln. Ser. No. 60/066,873, filed Nov. 25, 1997; and to U.S. Provisional Appln. Ser. No. 60/069,472, filed Dec. 9, 1997; and to U.S. Provisional Appln. Ser. No. 60/074,201, filed Feb. 10, 1998; and to U.S. Provisional Appln. Ser. No. 60/074,280, filed Feb. 10, 1998; and to U.S. Provisional Appln. Ser. No. 60/074,281, filed Feb. 10, 1998; and to U.S. Provisional Appln. Ser. No. 60/074,282, filed Feb. 10, 1998; and to U.S. Provisional Appln. Ser. No. 60/074,565, filed Feb. 12, 1998; and to U.S. Provisional Appln. Ser. No. 60/074,566, filed Feb. 12, 1998; and to U.S. Provisional Appln. Ser. No. 60/074,567, filed Feb. 12, 1998; and to U.S. Provisional Appln. Ser. No. 60/074,789, filed Feb. 19, 1998; and to U.S. Provisional Appln. Ser. No. 60/075,459, filed Feb. 19, 1998; and to U.S. Provisional Appln. Ser. No. 60/075,460, filed Feb. 19, 1998; and to U.S. Provisional Appln. Ser. No. 60/075,461, filed Feb. 19, 1998; and to U.S. Provisional Appln. Ser. No. 60/075,462, filed Feb. 19, 1998; and to U.S. Provisional Appln. Ser. No. 60/075,463, filed Feb. 19, 1998; and to U.S. Provisional Appln. Ser. No. 60/075,464, filed Feb. 19, 1998; and to U.S. Provisional Appln. Ser. No. 60/077,229, filed Mar. 9, 1998; and to U.S. Provisional Appln. Ser. No. 60/077,230, filed Mar. 9, 1998; and to U.S. Provisional Appln. Ser. No. 60/077,231, filed Mar. 9, 1998; and to U.S. Provisional Appln. Ser. No. 60/078,031, filed Mar. 16, 1998; and to U.S. Provisional Appln. Ser. No. 60/078,368, filed Mar. 18, 1998; and to U.S. Provisional Appln. Ser. No. 60/080,844, filed Apr. 7, 1998; and to U.S. Provisional Appln. Ser. No. 60/083,067, filed Apr. 27, 1998; and to U.S. Provisional Appln. Ser. No. 60/083,386, filed Apr. 29, 1998; and to U.S. Provisional Appln. Ser. No. 60/083,387, filed Apr. 29, 1998; and to U.S. Provisional Appln. Ser. No. 60/083,388, filed Apr. 29, 1998; and to U.S. Provisional Appln. Ser. No. 60/083,389, filed Apr. 29, 1998; and to U.S. Provisional Appln. Ser. No. 60/084,684, filed May 8, 1998; and to U.S. Provisional Appln. Ser. No. 60/085,222, filed May 13, 1998; and to U.S. Provisional Appln. Ser. No. 60/085,223, filed May 13, 1998; and to U.S. Provisional Appln. Ser. No. 60/085,224, filed May 13, 1998; and to U.S. Provisional Appln. Ser. No. 60/085,245, filed May 13, 1998; and to U.S. Provisional Appln. Ser. No. 60/086,183, filed May 21, 1998; and to U.S. Provisional Appln. Ser. No. 60/086,184, filed May 21, 1998; and to U.S. Provisional Appln. Ser. No. 60/086,185, filed May 21, 1998; and to U.S. Provisional Appln. Ser. No. 60/086,186, filed May 21, 1998; and to U.S. Provisional Appln. Ser. No. 60/086,187, filed May 21, 1998; and to U.S. Provisional Appln. Ser. No. 60/086,188, filed May 21, 1998; and to U.S. Provisional Appln. Ser. No. 60/086,339, filed May 21, 1998; and to U.S. Provisional Appln. Ser. No. 60/089,524, filed Jun. 16, 1998; and to U.S. Provisional Appln. Ser. No. 60/089,810, filed Jun. 18, 1998; and to U.S. Provisional Appln. Ser. No. 60/089,814, filed Jun. 18, 1998; and to U.S. Provisional Appln. Ser. No. 60/091,247, filed Jun. 30, 1998; and to U.S. Provisional Appln. Ser. No. 60/092,036, filed Jul. 8, 1998; and to U.S. Provisional Appln. Ser. No. 60/099,667, filed Sep. 9, 1998; and to U.S. Provisional Appln. Ser. No. 60/099,668, filed Sep. 9, 1998; and to U.S. Provisional Appln. Ser. No. 60/099,670, filed Sep. 9, 1998; and to U.S. Provisional Appln. Ser. No. 60/099,697, filed Sep. 9, 1998; and to U.S. Provisional Appln. Ser. No. 60/100,672, filed Sep. 16, 1998; and to U.S. Provisional Appln. Ser. No. 60/100,673, filed Sep. 16, 1998; and to U.S. Provisional Appln. Ser. No. 60/100,674, filed Sep. 16, 1998; and to U.S. Provisional Appln. Ser. No. 60/101,130, filed Sep. 21, 1998; and to U.S. Provisional Appln. Ser. No. 60/101,132, filed Sep. 21, 1998; and to U.S. Provisional Appln. Ser. No. 60/108,996, filed Nov. 18, 1998; and to U.S. Provisional Appln. Ser. No. 60/109,018, filed Nov. 18, 1998. U.S. Appln. Ser. No. 09/199,129 also claims the benefit of U.S. Provisional Appln. Ser. No. 60/067,000, filed Nov. 24, 1997; and to U.S. Provisional Appln. Ser. No. 60/069,472, filed Dec. 9, 1997; and to U.S. Provisional Appln. Ser. No. 60/074,201, filed Feb. 10, 1998; and to U.S. Provisional Appln. Ser. No. 60/074,280, filed Feb. 10, 1998; and to U.S. Provisional Appln. Ser. No. 60/074,281, filed Feb. 10, 1998; and to U.S. Provisional Appln. Ser. No. 60/074,282, filed Feb. 10, 1998; and to U.S. Provisional Appln. Ser. No. 60/074,565, filed Feb. 12, 1998; and to U.S. Provisional Appln. Ser. No. 60/074,566, filed Feb. 12, 1998; and to U.S. Provisional Appln. Ser. No. 60/074,567, filed Feb. 12, 1998; and to U.S. Provisional Appln. Ser. No. 60/074,789, filed Feb. 19, 1998; and to U.S. Provisional Appln. Ser. No. 60/075,459, filed Feb. 19, 1998; and to U.S. Provisional Appln. Ser. No. 60/075,460, filed Feb. 19, 1998; and to U.S. Provisional Appln. Ser. No. 60/075,461, filed Feb. 19, 1998; and to U.S. Provisional Appln. Ser. No. 60/075,462, filed Feb. 19, 1998; and to U.S. Provisional Appln. Ser. No. 60/075,463, filed Feb. 19, 1998; and to U.S. Provisional Appln. Ser. No. 60/075,464, filed Feb. 19, 1998; and to U.S. Provisional Appln. Ser. No. 60/077,229, filed Mar. 9, 1998; and to U.S. Provisional Appln. Ser. No. 60/077,230, filed Mar. 9, 1998; and to U.S. Provisional Appln. Ser. No. 60/077,231, filed Mar. 9, 1998; and to U.S. Provisional Appln. Ser. No. 60/078,368, filed Mar. 18, 1998; and to U.S. Provisional Appln. Ser. No. 60/080,844, filed Apr. 7, 1998; and to U.S. Provisional Appln. Ser. No. 60/083,067, filed Apr. 27, 1998; and to U.S. Provisional Appln. Ser. No. 60/083,386, filed Apr. 29, 1998; and to U.S. Provisional Appln. Ser. No. 60/083,387, filed Apr. 29, 1998; and to U.S. Provisional Appln. Ser. No. 60/083,388, filed Apr. 29, 1998; and to U.S. Provisional Appln. Ser. No. 60/083,389, filed Apr. 29, 1998; and to U.S. Provisional Appln. Ser. No. 60/085,222, filed May 13, 1998; and to U.S. Provisional Appln. Ser. No. 60/085,223, filed May 13, 1998; and to U.S. Provisional Appln. Ser. No. 60/085,224, filed May 13, 1998; and to U.S. Provisional Appln. Ser. No. 60/086,183, filed May 21, 1998; and to U.S. Provisional Appln. Ser. No. 60/086,184, filed May 21, 1998; and to U.S. Provisional Appln. Ser. No. 60/086,185, filed May 21, 1998; and to U.S. Provisional Appln. Ser. No. 60/086,186, filed May 21, 1998; and to U.S. Provisional Appln. Ser. No. 60/086,187, filed May 21, 1998; and to U.S. Provisional Appln. Ser. No. 60/086,188, filed May 21, 1998; and to U.S. Provisional Appln. Ser. No. 60/089,524, filed Jun. 16, 1998; and to U.S. Provisional Appln. Ser. No. 60/089,793, filed Jun. 18, 1998; and to U.S. Provisional Appln. Ser. No. 60/089,810, filed Jun. 18, 1998; and to U.S. Provisional Appln. Ser. No. 60/089,814, filed Jun. 18, 1998; and to U.S. Provisional Appln. Ser. No. 60/099,668, filed Sep. 9, 1998; and to U.S. Provisional Appln. Ser. No. 60/099,670, filed Sep. 9, 1998; and to U.S. Provisional Appln. Ser. No. 60/099,697, filed Sep. 9, 1998; and to U.S. Provisional Appln. Ser. No. 60/100,672, filed Sep. 16, 1998; and to U.S. Provisional Appln. Ser. No. 60/100,673, filed Sep. 16, 1998; and to U.S. Provisional Appln. Ser. No. 60/100,674, filed Sep. 16, 1998; and to U.S. Provisional Appln. Ser. No. 60/101,130, filed Sep. 21, 1998; and to U.S. Provisional Appln. Ser. No. 60/101,131, filed Sep. 21, 1998; and to U.S. Provisional Appln. Ser. No. 60/101,132, filed September 21, and to U.S. Provisional Appln. Ser. No. 60/108,996, filed Nov. 18, 1998; and to U.S. Provisional Appln. Ser. No. 60/109,018, filed Nov. 18, 1998. U.S. application Ser. No. 09/333,535 also claims the benefit of U.S. Provisional Appln. Ser. No. 60/089,524, filed Jun. 16, 1998; and to U.S. Provisional Appln. Ser. No. 60/089,793, filed Jun. 18, 1998; and to U.S. Provisional Appln. Ser. No. 60/089,810, filed Jun. 18, 1998; and to U.S. Provisional Appln. Ser. No. 60/089,814, filed Jun. 18, 1998; and to U.S. Provisional Appln. Serial No. 60/099,668, filed Sep. 9, 1998; and to U.S. Provisional Appln. Ser. No. 60/099,670, filed Sep. 9, 1998; and to U.S. Provisional Appln. Ser. No. 60/099,697, filed Sep. 9, 1998; and to U.S. Provisional Appln. Ser. No. 60/100,672, filed Sep. 16, 1998; and to U.S. Provisional Appln. Ser. No. 60/100,673, filed Sep. 16, 1998; and to U.S. Provisional Appln. Ser. No. 60/100,674, filed Sep. 16, 1998; and to U.S. Provisional Appln. Ser. No. 60/101,130, filed Sep. 21, 1998; and to U.S. Provisional Appln. Ser. No. 60/101,131, filed Sep. 21, 1998; and to U.S. Provisional Appln. Ser. No. 60/101,132, filed September 21, and to U.S. Provisional Appln. Ser. No. 60/108,996, filed Nov. 18, 1998; and to U.S. Provisional Appln. Ser. No. 60/109,018, filed Nov. 18, 1998; and to U.S. Provisional Appln. Ser. No. 60/111,981, filed Dec. 11, 1998; and to U.S. Provisional Appln. Ser. No. 60/112,221, filed Dec. 14, 1998; and to U.S. Provisional Appln. Ser. No. 60/112,229, filed Dec. 14, 1998; and to U.S. Provisional Appln. Ser. No. 60/112,808, filed Dec. 18, 1998; and to U.S. Provisional Appln. Ser. No. 60/113,224, filed Dec. 22, 1998; and to U.S. Provisional Appln. Ser. No. 60/125,816, filed Mar. 23, 1999; and to U.S. Provisional Appln. Ser. No. 60/125,817, filed Mar. 23, 1999; and to U.S. Provisional Appln. Ser. No. 60/125,818, filed Mar. 23, 1999; and to U.S. Provisional Appln. Ser. No. 60/130,174, filed Apr. 20, 1999; and to U.S. Provisional Appln. Ser. No. 60/130,464, filed Apr. 22, 1999; and to U.S. Provisional Appln. Ser. No. 60/133,690, filed May 10, 1999; and to U.S. Provisional Appln. Ser. No. 60/133,691, filed May 10, 1999; and to U.S. Provisional Appln. Ser. No. 60/133,692, filed May 10, 1999. U.S. application Ser. No. 09/371,146 also claims the benefit of U.S. Provisional Appln. Ser. No. 60/099,667, filed Sep. 9, 1998; and to U.S. Provisional Appln. Ser. No. 60/099,668, filed Sep. 9, 1998; and to U.S. Provisional Appln. Ser. No. 60/099,670, filed Sep. 9, 1998; and to U.S. Provisional Appln. Ser. No. 60/100,672, filed Sep. 16, 1998; and to U.S. Provisional Appln. Ser. No. 60/100,963, filed Sep. 17, 1998; and to U.S. Provisional Appln. Ser. No. 60/101,130, filed Sep. 21, 1998; and to U.S. Provisional Appln. Ser. No. 60/101,131, filed Sep. 21, 1998; and to U.S. Provisional Appln. Ser. No. 60/101,132, filed Sep. 21, 1998; and to U.S. Provisional Appln. Ser. No. 60/101,343, filed Sep. 22, 1998; and to U.S. Provisional Appln. Ser. No. 60/101,344, filed Sep. 22, 1998; and to U.S. Provisional Appln. Ser. No. 60/101,347, filed Sep. 22, 1998; and to U.S. Provisional Appln. Ser. No. 60/101,508, filed Sep. 22, 1998; and to U.S. Provisional Appln. Ser. No. 60/101,707, filed Sep. 25, 1998; and to U.S. Provisional Appln. Ser. No. 60/101,708, filed Sep. 25, 1998; and to U.S. Provisional Appln. Ser. No. 60/101,709, filed Sep. 25, 1998; and to U.S. Provisional Appln. Ser. No. 60/104,119, filed Oct. 13, 1998; and to U.S. Provisional Appln. Ser. No. 60/104,121, filed Oct. 13, 1998; and to U.S. Provisional Appln. Ser. No. 60/104,122, filed Oct. 13, 1998; and to U.S. Provisional Appln. Ser. No. 60/104,123, filed Oct. 13, 1998; and to U.S. Provisional Appln. Ser. No. 60/104,124, filed Oct. 13, 1998; and to U.S. Provisional Appln. Ser. No. 60/104,126, filed Oct. 13, 1998; and to U.S. Provisional Appln. Ser. No. 60/104,127, filed Oct. 13, 1998; and to U.S. Provisional Appln. Ser. No. 60/104,128, filed Oct. 13, 1998; and to U.S. Provisional Appln. Ser. No. 60/108,996, filed Nov. 18, 1998; and to U.S. Provisional Appln. Ser. No. 60/110,108, filed Nov. 25, 1998; and to U.S. Provisional Appln. Ser. No. 60/110,109, filed Nov. 25, 1998; and to U.S. Provisional Appln. Ser. No. 60/111,033, filed Dec. 4, 1998; and to U.S. Provisional Appln. Ser. No. 60/111,742, filed Dec. 10, 1998; and to U.S. Provisional Appln. Ser. No. 60/112,221, filed Dec. 14, 1998; and to U.S. Provisional Appln. Ser. No. 60/112,229, filed Dec. 14, 1998; and to U.S. Provisional Appln. Ser. No. 60/112,807, filed Dec. 18, 1998; and to U.S. Provisional Appln. Ser. No. 60/113,224, filed Dec. 22, 1998; and to U.S. Provisional Appln. Ser. No. 60/130,174, filed Apr. 20, 1999; and to U.S. Provisional Appln. Ser. No. 60/130,177, filed Apr. 20, 1999; and to U.S. Provisional Appln. Ser. No. 60/130,178, filed Apr. 20, 1999; and to U.S. Provisional Appln. Ser. No. 60/130,179, filed Apr. 20, 1999; and to U.S. Provisional Appln. Ser. No. 60/130,180, filed Apr. 20, 1999; and to U.S. Provisional Appln. Ser. No. 60/130,181, filed Apr. 20, 1999; and to U.S. Provisional Appln. Ser. No. 60/132,860, filed May 7, 1999; and to U.S. Provisional Appln. Ser. No. 60/133,691, filed May 10, 1999; and to U.S. Provisional Appln. Ser. No. 60/133,692, filed May 10, 1999; and to U.S. Provisional Appln. Ser. No. 60/141,128, filed Jun. 28, 1999; and to U.S. Provisional Appln. Ser. No. 60/141,134, filed Jun. 28, 1999; and to U.S. Provisional Appln. Ser. No. 60/144,084, filed Jul. 16, 1999; and to U.S. Provisional Appln. Ser. No. 60/145,146, filed Jul. 22, 1999; and to U.S. Provisional Appln. Ser. No. 60/145,147, filed Jul. 22, 1999; and to U.S. Provisional Appln. Ser. No. 60/145,148, filed Jul. 22, 1999; and to U.S. Provisional Appln. Ser. No. 60/145,485, filed Jul. 23, 1999. Appln Ser. No. 09/553,094 is also a continuation-in-part of U.S. application Ser. No. 09/394,745, filed Sep. 15, 1999, which is a continuation-in-part of U.S. application Ser. No. 09/237,183, filed Jan. 26, 1999, which is a continuation-in-part of U.S. application Ser. No. 09/198,779, filed Nov. 24, 1998 (abandoned), which claims the benefit of U.S. Provisional Appln. Ser. No. 60/067,000, filed Nov. 24, 1997; and to U.S. Provisional Appln. Ser. No. 60/066,873, filed Nov. 25, 1997; and to U.S. Provisional Appln. Ser. No. 60/069,472, filed Dec. 9, 1997; and to U.S. Provisional Appln. Ser. No. 60/074,201, filed Feb. 10, 1998; and to U.S. Provisional Appln. Ser. No. 60/074,280, filed Feb. 10, 1998; and to U.S. Provisional Appln. Ser. No. 60/074,281, filed Feb. 10, 1998; and to U.S. Provisional Appln. Ser. No. 60/074,282, filed Feb. 10, 1998; and to U.S. Provisional Appln. Ser. No. 60/074,565, filed Feb. 12, 1998; and to U.S. Provisional Appln. Ser. No. 60/074,566, filed Feb. 12, 1998; and to U.S. Provisional Appln. Ser. No. 60/074,567, filed Feb. 12, 1998; and to U.S. Provisional Appln. Ser. No. 60/074,789, filed Feb. 19, 1998; and to U.S. Provisional Appln. Ser. No. 60/075,459, filed Feb. 19, 1998; and to U.S. Provisional Appln. Ser. No. 60/075,460, filed Feb. 19, 1998; and to U.S. Provisional Appln. Ser. No. 60/075,461, filed Feb. 19, 1998; and to U.S. Provisional Appln. Ser. No. 60/075,462, filed Feb. 19, 1998; and to U.S. Provisional Appln. Ser. No. 60/075,463, filed Feb. 19, 1998; and to U.S. Provisional Appln. Ser. No. 60/075,464, filed Feb. 19, 1998; and to U.S. Provisional Appln. Ser. No. 60/077,229, filed Mar. 9, 1998; and to U.S. Provisional Appln. Ser. No. 60/077,230, filed Mar. 9, 1998; and to U.S. Provisional Appln. Ser. No. 60/077,231, filed Mar. 9, 1998; and to U.S. Provisional Appln. Ser. No. 60/078,031, filed Mar. 16, 1998; and to U.S. Provisional Appln. Ser. No. 60/078,368, filed Mar. 18, 1998; and to U.S. Provisional Appln. Ser. No. 60/080,844, filed Apr. 7, 1998; and to U.S. Provisional Appln. Ser. No. 60/083,067, filed Apr. 27, 1998; and to U.S. Provisional Appln. Ser. No. 60/083,386, filed Apr. 29, 1998; and to U.S. Provisional Appln. Ser. No. 60/083,387, filed Apr. 29, 1998; and to U.S. Provisional Appln. Ser. No. 60/083,388, filed Apr. 29, 1998; and to U.S. Provisional Appln. Ser. No. 60/083,389, filed Apr. 29, 1998; and to U.S. Provisional Appln. Ser. No. 60/084,684, filed May 8, 1998; and to U.S. Provisional Appln. Ser. No. 60/085,222, filed May 13, 1998; and to U.S. Provisional Appln. Ser. No. 60/085,223, filed May 13, 1998; and to U.S. Provisional Appln. Ser. No. 60/085,224, filed May 13, 1998; and to U.S. Provisional Appln. Ser. No. 60/085,245, filed May 13, 1998; and to U.S. Provisional Appln. Ser. No. 60/086,183, filed May 21, 1998; and to U.S. Provisional Appln. Ser. No. 60/086,184, filed May 21, 1998; and to U.S. Provisional Appln. Ser. No. 60/086,185, filed May 21, 1998; and to U.S. Provisional Appln. Ser. No. 60/086,186, filed May 21, 1998; and to U.S. Provisional Appln. Ser. No. 60/086,187, filed May 21, 1998; and to U.S. Provisional Appln. Ser. No. 60/086,188, filed May 21, 1998; and to U.S. Provisional Appln. Ser. No. 60/086,339, filed May 21, 1998; and to U.S. Provisional Appln. Ser. No. 60/089,524, filed Jun. 16, 1998; and to U.S. Provisional Appln. Ser. No. 60/089,810, filed Jun. 18, 1998; and to U.S. Provisional Appln. Ser. No. 60/089,814, filed Jun. 18, 1998; and to U.S. Provisional Appln. Ser. No. 60/091,247, filed Jun. 30, 1998; and to U.S. Provisional Appln. Ser. No. 60/092,036, filed Jul. 8, 1998; and to U.S. Provisional Appln. Ser. No. 60/099,667, filed Sep. 9, 1998; and to U.S. Provisional Appln. Ser. No. 60/099,668, filed Sep. 9, 1998; and to U.S. Provisional Appln. Ser. No. 60/099,670, filed Sep. 9, 1998; and to U.S. Provisional Appln. Ser. No. 60/099,697, filed Sep. 9, 1998; and to U.S. Provisional Appln. Ser. No. 60/100,672, filed Sep. 16, 1998; and to U.S. Provisional Appln. Ser. No. 60/100,673, filed Sep. 16, 1998; and to U.S. Provisional Appln. Ser. No. 60/100,674, filed Sep. 16, 1998; and to U.S. Provisional Appln. Ser. No. 60/101,130, filed Sep. 21, 1998; and to U.S. Provisional Appln. Ser. No. 60/101,132, filed Sep. 21, 1998; and to U.S. Provisional Appln. Ser. No. 60/108,996, filed Nov. 18, 1998; and to U.S. Provisional Appln. Ser. No. 60/109,018, filed Nov. 18, 1998. U.S. application Ser. No. 09/237,183 is also a continuation-in-part of U.S. application Ser. No. 09/227,586, filed Jan. 8, 1999 (abandoned), which claims the benefit of U.S. Provisional Appln. Ser. No. 60/071,064, filed Jan. 9, 1998; and to U.S. Provisional Appln. Ser. No. 60/090,170, filed Jun. 22, 1998; and to U.S. Provisional Appln. Ser. No. 60/092,036, filed Jul. 8, 1998. U.S. application Ser. No. 09/237,183 is also a continuation-in-part of U.S. application Ser. No. 09/229,413, filed Jan. 12, 1999 (abandoned), which claims the benefit of U.S. Appln. Ser. No. 60/071,479, filed Jan. 13, 1998; and to U.S. Provisional Appln. Ser. No. 60/085,533, filed May 15, 1998; and to U.S. Provisional Appln. Ser. No. 60/089,806, filed Jun. 18, 1998; and to U.S. Provisional Appln. Ser. No. 60/089,807, filed Jun. 18, 1998; and to U.S. Provisional Appln. Ser. No. 60/089,808, filed Jun. 18, 1998; and to U.S. Provisional Appln. Ser. No. 60/089,811, filed Jun. 18, 1998; and to U.S. Provisional Appln. Ser. No. 60/089,812, filed Jun. 18, 1998; and to U.S. Provisional Appln. Ser. No. 60/089,813, filed Jun. 18, 1998; and to U.S. Provisional Appln. Ser. No. 60/091,247, filed Jun. 30, 1998; and to U.S. Provisional Appln. Ser. No. 60/091,405, filed Jun. 30, 1998; and to U.S. Provisional Appln. Ser. No. 60/099,697, filed Sep. 9, 1998; and to U.S. Provisional Appln. Ser. No. 60/100,963, filed Sep. 17, 1998; and to U.S. Provisional Appln. Ser. No. 60/101,343, filed Sep. 22, 1998; and to U.S. Provisional Appln. Ser. No. 60/101,344, filed Sep. 22, 1998; and to U.S. Provisional Appln. Ser. No. 60/101,347, filed Sep. 22, 1998; and to U.S. Provisional Appln. Ser. No. 60/101,508, filed Sep. 22, 1998; and to U.S. Provisional Appln. Ser. No. 60/101,707, filed Sep. 25, 1998; and to U.S. Provisional Appln. Ser. No. 60/104,124, filed Oct. 13, 1998; and to U.S. Provisional Appln. Ser. No. 60/104,126, filed Oct. 13, 1998; and to U.S. Provisional Appln. Ser. No. 60/104,127, filed Oct. 13, 1998; and to U.S. Provisional Appln. Ser. No. 60/104,128, filed Oct. 13, 1998; and to U.S. Provisional Appln. Ser. No. 60/111,981, filed Dec. 11, 1998. U.S. application Ser. No. 09/237,183 is also a continuation-in-part of U.S. application Ser. No. 09/233,218, filed Jan. 20, 1999, which is a continuation-in-part of U.S. application Ser. No. 09/198,779, filed Nov. 24, 1998 (abandoned), which claims the benefit of U.S. Provisional Appln. Ser. No. 60/067,000, filed Nov. 24, 1997; and to U.S. Provisional Appln. Ser. No. 60/066,873, filed Nov. 25, 1997; and to U.S. Provisional Appln. Ser. No. 60/069,472, filed Dec. 9, 1997; and to U.S. Provisional Appln. Ser. No. 60/074,201, filed Feb. 10, 1998; and to U.S. Provisional Appln. Ser. No. 60/074,280, filed Feb. 10, 1998; and to U.S. Provisional Appln. Ser. No. 60/074,281, filed Feb. 10, 1998; and to U.S. Provisional Appln. Ser. No. 60/074,282, filed Feb. 10, 1998; and to U.S. Provisional Appln. Ser. No. 60/074,565, filed Feb. 12, 1998; and to U.S. Provisional Appln. Ser. No. 60/074,566, filed Feb. 12, 1998; and to U.S. Provisional Appln. Ser. No. 60/074,567, filed Feb. 12, 1998; and to U.S. Provisional Appln. Ser. No. 60/074,789, filed Feb. 19, 1998; and to U.S. Provisional Appln. Ser. No. 60/075,459, filed Feb. 19, 1998; and to U.S. Provisional Appln. Ser. No. 60/075,460, filed Feb. 19, 1998; and to U.S. Provisional Appln. Ser. No. 60/075,461, filed Feb. 19, 1998; and to U.S. Provisional Appln. Ser. No. 60/075,462, filed Feb. 19, 1998; and to U.S. Provisional Appln. Ser. No. 60/075,463, filed Feb. 19, 1998; and to U.S. Provisional Appln. Ser. No. 60/075,464, filed Feb. 19, 1998; and to U.S. Provisional Appln. Ser. No. 60/077,229, filed Mar. 9, 1998; and to U.S. Provisional Appln. Ser. No. 60/077,230, filed Mar. 9, 1998; and to U.S. Provisional Appln. Ser. No. 60/077,231, filed Mar. 9, 1998; and to U.S. Provisional Appln. Ser. No. 60/078,031, filed Mar. 16, 1998; and to U.S. Provisional Appln. Ser. No. 60/078,368, filed Mar. 18, 1998; and to U.S. Provisional Appln. Ser. No. 60/080,844, filed Apr. 7, 1998; and to U.S. Provisional Appln. Ser. No. 60/083,067, filed Apr. 27, 1998; and to U.S. Provisional Appln. Ser. No. 60/083,386, filed Apr. 29, 1998; and to U.S. Provisional Appln. Ser. No. 60/083,387, filed Apr. 29, 1998; and to U.S. Provisional Appln. Ser. No. 60/083,388, filed Apr. 29, 1998; and to U.S. Provisional Appln. Ser. No. 60/083,389, filed Apr. 29, 1998; and to U.S. Provisional Appln. Ser. No. 60/084,684, filed May 8, 1998; and to U.S. Provisional Appln. Ser. No. 60/085,222, filed May 13, 1998; and to U.S. Provisional Appln. Ser. No. 60/085,223, filed May 13, 1998; and to U.S. Provisional Appln. Ser. No. 60/085,224, filed May 13, 1998; and to U.S. Provisional Appln. Ser. No. 60/085,245, filed May 13, 1998; and to U.S. Provisional Appln. Ser. No. 60/086,183, filed May 21, 1998; and to U.S. Provisional Appln. Ser. No. 60/086,184, filed May 21, 1998; and to U.S. Provisional Appln. Ser. No. 60/086,185, filed May 21, 1998; and to U.S. Provisional Appln. Ser. No. 60/086,186, filed May 21, 1998; and to U.S. Provisional Appln. Ser. No. 60/086,187, filed May 21, 1998; and to U.S. Provisional Appln. Ser. No. 60/086,188, filed May 21, 1998; and to U.S. Provisional Appln. Ser. No. 60/086,339, filed May 21, 1998; and to U.S. Provisional Appln. Ser. No. 60/089,524, filed Jun. 16, 1998; and to U.S. Provisional Appln. Ser. No. 60/089,810, filed Jun. 18, 1998; and to U.S. Provisional Appln. Ser. No. 60/089,814, filed Jun. 18, 1998; and to U.S. Provisional Appln. Ser. No. 60/091,247, filed Jun. 30, 1998; and to U.S. Provisional Appln. Ser. No. 60/092,036, filed Jul. 8, 1998; and to U.S. Provisional Appln. Ser. No. 60/099,667, filed Sep. 9, 1998; and to U.S. Provisional Appln. Ser. No. 60/099,668, filed Sep. 9, 1998; and to U.S. Provisional Appln. Ser. No. 60/099,670, filed Sep. 9, 1998; and to U.S. Provisional Appln. Ser. No. 60/099,697, filed Sep. 9, 1998; and to U.S. Provisional Appln. Ser. No. 60/100,672, filed Sep. 16, 1998; and to U.S. Provisional Appln. Ser. No. 60/100,673, filed Sep. 16, 1998; and to U.S. Provisional Appln. Ser. No. 60/100,674, filed Sep. 16, 1998; and to U.S. Provisional Appln. Ser. No. 60/101,130, filed Sep. 21, 1998; and to U.S. Provisional Appln. Ser. No. 60/101,132, filed Sep. 21, 1998; and to U.S. Provisional Appln. Ser. No. 60/108,996, filed Nov. 18, 1998; and to U.S. Provisional Appln. Ser. No. 60/109,018, filed Nov. 18, 1998. U.S. application Ser. No. 09/233,218 is also a continuation-in-part of U.S. application Ser. No. 09/227,586, filed Jan. 8, 1999 (abandoned), which claims the benefit of U.S. Provisional Appln. Ser. No. 60/071,064, filed Jan. 9, 1998; and to U.S. Provisional Appln. Ser. No. 60/090,170, filed Jun. 22, 1998; and to U.S. Provisional Appln. Ser. No. 60/092,036, filed Jul. 8, 1998. U.S. application Ser. No. 09/233,218 is also a continuation-in-part of U.S. application Ser. No. 09/229,413, filed Jan. 12, 1999 (abandoned), which claims the benefit of U.S. Appln. Ser. No. 60/071,479, filed Jan. 13, 1998; and to U.S. Provisional Appln. Ser. No. 60/085,533, filed May 15, 1998; and to U.S. Provisional Appln. Ser. No. 60/089,806, filed Jun. 18, 1998; and to U.S. Provisional Appln. Ser. No. 60/089,807, filed Jun. 18, 1998; and to U.S. Provisional Appln. Ser. No. 60/089,808, filed Jun. 18, 1998; and to U.S. Provisional Appln. Ser. No. 60/089,811, filed Jun. 18, 1998; and to U.S. Provisional Appln. Ser. No. 60/089,812, filed Jun. 18, 1998; and to U.S. Provisional Appln. Ser. No. 60/089,813, filed Jun. 18, 1998; and to U.S. Provisional Appln. Ser. No. 60/091,247, filed Jun. 30, 1998; and to U.S. Provisional Appln. Ser. No. 60/091,405, filed Jun. 30, 1998; and to U.S. Provisional Appln. Ser. No. 60/099,697, filed Sep. 9, 1998; and to U.S. Provisional Appln. Ser. No. 60/100,963, filed Sep. 17, 1998; and to U.S. Provisional Appln. Ser. No. 60/101,343, filed Sep. 22, 1998; and to U.S. Provisional Appln. Ser. No. 60/101,344, filed Sep. 22, 1998; and to U.S. Provisional Appln. Ser. No. 60/101,347, filed Sep. 22, 1998; and to U.S. Provisional Appln. Ser. No. 60/101,508, filed Sep. 22, 1998; and to U.S. Provisional Appln. Ser. No. 60/101,707, filed Sep. 25, 1998; and to U.S. Provisional Appln. Ser. No. 60/104,124, filed Oct. 13, 1998; and to U.S. Provisional Appln. Ser. No. 60/104,126, filed Oct. 13, 1998; and to U.S. Provisional Appln. Ser. No. 60/104,127, filed Oct. 13, 1998; and to U.S. Provisional Appln. Ser. No. 60/104,128, filed Oct. 13, 1998; and to U.S. Provisional Appln. Ser. No. 60/111,981, filed Dec. 11, 1998. U.S. application Ser. No. 09/233,218 also claims the benefit of U.S. Provisional Appln. Ser. No. 60/072,027, filed Jan. 21, 1998; and to U.S. Provisional Appln. Ser. No. 60/072,888, filed Jan. 27, 1998; and to U.S. Provisional Appln. Ser. No. 60/076,709, filed Mar. 4, 1998; and to U.S. Provisional Appln. Ser. No. 60/076,912, filed Mar. 6, 1998; and to U.S. Provisional Appln. Ser. No. 60/078,031, filed Mar. 16, 1998; and to U.S. Provisional Appln. Ser. No. 60/083,390, filed Apr. 29, 1998; and to U.S. Provisional Appln. Ser. No. 60/084,684, filed May 8, 1998; and to U.S. Provisional Appln. Ser. No. 60/085,057, filed May 8, 1998; and to U.S. Provisional Appln. Ser. No. 60/085,429, filed May 8, 1998; and to U.S. Provisional Appln. Ser. No. 60/085,245, filed May 13, 1998; and to U.S. Provisional Appln. Ser. No. 60/085,533, filed May 15, 1998; and to U.S. Provisional Appln. Ser. No. 60/085,940, filed May 19, 1998; and to U.S. Provisional Appln. Ser. No. 60/086,339, filed May 21, 1998; and to U.S. Provisional Appln. Ser. No. 60/086,594, filed May 22, 1998; and to U.S. Provisional Appln. Ser. No. 60/086,608, filed May 22, 1998; and to U.S. Provisional Appln. Ser. No. 60/087,422, filed Jun. 1, 1998; and to U.S. Provisional Appln. Ser. No. 60/087,631, filed Jun. 2, 1998; and to U.S. Provisional Appln. Ser. No. 60/087,762, filed Jun. 2, 1998; and to U.S. Provisional Appln. Ser. No. 60/087,972 filed Jun. 4, 1998; and to U.S. Provisional Appln. Ser. No. 60/087,973 filed Jun. 4, 1998; and to U.S. Provisional Appln. Ser. No. 60/088,441, filed Jun. 8, 1998; and to U.S. Provisional Appln. Ser. No. 60/089,627, filed Jun. 16, 1998; and to U.S. Provisional Appln. Ser. No. 60/089,789, filed Jun. 18, 1998; and to U.S. Provisional Appln. Ser. No. 60/090,170, filed Jun. 22, 1998; and to U.S. Provisional Appln. Ser. No. 60/090,856, filed Jun. 26, 1998; and to U.S. Provisional Appln. Ser. No. 60/090,928, filed Jun. 26, 1998; and to U.S. Provisional Appln. Ser. No. 60/091,035, filed Jun. 29, 1998; and to U.S. Provisional Appln. Ser. No. 60/091,247, filed Jun. 30, 1998; and to U.S. Provisional Appln. Ser. No. 60/091,405, filed Jun. 30, 1998; and to U.S. Provisional Appln. Ser. No. 60/092,036, filed Jul. 8, 1998; and to U.S. Provisional Appln. Ser. No. 60/100,963, filed Sep. 17, 1998; and to U.S. Provisional Appln. Ser. No. 60/110,108, filed Nov. 25, 1998; and to U.S. Provisional Appln. Ser. No. 60/110,109, filed Nov. 25, 1998; and to U.S. Provisional Appln. Ser. No. 60/111,033, filed Dec. 4, 1998; and to U.S. Provisional Appln. Ser. No. 60/111,742, filed Dec. 10, 1998. U.S. application Ser. No. 09/237,183 also claims the benefit of U.S. Provisional Appln. Ser. No. 60/072,888, filed Jan. 27, 1998; and to U.S. Provisional Appln. Ser. No. 60/076,709, filed Mar. 4, 1998; and to U.S. Provisional Appln. Ser. No. 60/076,912, filed Mar. 6, 1998; and to U.S. Provisional Appln. Ser. No. 60/078,031, filed Mar. 16, 1998; and to U.S. Provisional Appln. Ser. No. 60/083,390, filed Apr. 29, 1998; and to U.S. Provisional Appln. Ser. No. 60/084,684, filed May 8, 1998; and to U.S. Provisional Appln. Ser. No. 60/085,057, filed May 8, 1998; and to U.S. Provisional Appln. Ser. No. 60/085,429, filed May 8, 1998; and to U.S. Provisional Appln. Ser. No. 60/085,245, filed May 13, 1998; and to U.S. Provisional Appln. Ser. No. 60/085,533, filed May 15, 1998; and to U.S. Provisional Appln. Ser. No. 60/085,940, filed May 19, 1998; and to U.S. Provisional Appln. Ser. No. 60/086,339, filed May 21, 1998; and to U.S. Provisional Appln. Ser. No. 60/086,594, filed May 22, 1998; and to U.S. Provisional Appln. Ser. No. 60/086,608, filed May 22, 1998; and to U.S. Provisional Appln. Ser. No. 60/087,422, filed Jun. 1, 1998; and to U.S. Provisional Appln. Ser. No. 60/087,631, filed Jun. 2, 1998; and to U.S. Provisional Appln. Ser. No. 60/087,762, filed Jun. 2, 1998; and to U.S. Provisional Appln. Ser. No. 60/087,972 filed Jun. 4, 1998; and to U.S. Provisional Appln. Ser. No. 60/087,973 filed Jun. 4, 1998; and to U.S. Provisional Appln. Ser. No. 60/088,441, filed Jun. 8, 1998; and to U.S. Provisional Appln. Ser. No. 60/089,627, filed Jun. 16, 1998; and to U.S. Provisional Appln. Ser. No. 60/089,789, filed Jun. 18, 1998; and to U.S. Provisional Appln. Ser. No. 60/090,170, filed Jun. 22, 1998; and to U.S. Provisional Appln. Ser. No. 60/090,856, filed Jun. 26, 1998; and to U.S. Provisional Appln. Ser. No. 60/090,928, filed Jun. 26, 1998; and to U.S. Provisional Appln. Ser. No. 60/091,035, filed Jun. 29, 1998; and to U.S. Provisional Appln. Ser. No. 60/091,247, filed Jun. 30, 1998; and to U.S. Provisional Appln. Ser. No. 60/091,405, filed Jun. 30, 1998; and to U.S. Provisional Appln. Ser. No. 60/092,036, filed Jul. 8, 1998; and to U.S. Provisional Appln. Ser. No. 60/100,963, filed Sep. 17, 1998; and to U.S. Provisional Appln. Ser. No. 60/110,108, filed Nov. 25, 1998; and to U.S. Provisional Appln. Ser. No. 60/110,109, filed Nov. 25, 1998; and to U.S. Provisional Appln. Ser. No. 60/111,033, filed Dec. 4, 1998; and to U.S. Provisional Appln. Ser. No. 60/111,742, filed Dec. 10, 1998. U.S. application Ser. No. 09/394,745 also claims the benefit of U.S. Provisional Appln. Ser. No. 60/101,344, filed Sep. 22, 1998; and to U.S. Provisional Appln. Ser. No. 60/101,347, filed Sep. 22, 1998; and to U.S. Provisional Appln. Ser. No. 60/101,707, filed Sep. 25, 1998; and to U.S. Provisional Appln. Ser. No. 60/104,119, filed Oct. 13, 1998; and to U.S. Provisional Appln. Ser. No. 60/104,121, filed Oct. 13, 1998; and to U.S. Provisional Appln. Ser. No. 60/104,123, filed Oct. 13, 1998; and to U.S. Provisional Appln. Ser. No. 60/104,124, filed Oct. 13, 1998; and to U.S. Provisional Appln. Ser. No. 60/104,127, filed Oct. 13, 1998; and to U.S. Provisional Appln. Ser. No. 60/111,033, filed Dec. 4, 1998; and to U.S. Provisional Appln. Ser. No. 60/130,180, filed Apr. 20, 1999; and to U.S. Provisional Appln. Ser. No. 60/145,146, filed Jul. 22, 1999; and to U.S. Provisional Appln. Ser. No. 60/145,147, filed Jul. 22, 1999; and to U.S. Provisional Appln. Ser. No. 60/145,148, filed Jul. 22, 1999; and to U.S. Provisional Appln. Ser. No. 60/145,485, filed Jul. 23, 1999; and to U.S. Provisional Appln. Ser. No. 60/146,904, filed Aug. 2, 1999; and to U.S. Provisional Appln. Ser. No. 60/146,907, filed Aug. 2, 1999. Appln Ser. No. 09/553,094 also claims the benefit of U.S. Provisional Appln. Ser. No. 60/130,178, filed Apr. 20, 1999; and to U.S. Provisional Appln. Ser. No. 60/130,180, filed Apr. 20, 1999; and to U.S. Provisional Appln. Ser. No. 60/132,860, filed May 7, 1999; and to U.S. Provisional Appln. Ser. No. 60/145,146, filed Jul. 22, 1999; and to U.S. Provisional Appln. Ser. No. 60/145,147, filed Jul. 22, 1999; and to U.S. Provisional Appln. Ser. No. 60/145,148, filed Jul. 22, 1999; and to U.S. Provisional Appln. Ser. No. 60/145,485, filed Jul. 23, 1999; and to U.S. Provisional Appln. Ser. No. 60/146,904, filed Aug. 2, 1999; and to U.S. Provisional Appln. Ser. No. 60/146,907, filed Aug. 2, 1999; and to U.S. Provisional Appln. Ser. No. 60/161,619, filed Oct. 26, 1999. Each of the above-listed applications is incorporated by reference in its entirety.

### INCORPORATION OF SEQUENCE LISTING

[0002] This application contains a sequence listing, which is contained on three identical CD-ROMs: two copies of the sequence listing (Copy 1 and Copy 2) and a sequence listing Computer Readable Form (CRF), all of which are herein incorporated by reference. All three CD-ROMs each contain one file called “15503C seq list.txt” which is 13,778,944 bytes in size (measured in Windows XP) and which was created on Jan. 11, 2006.

### FIELD OF THE INVENTION

[0003] The present invention is in the field of plant biochemistry. More specifically the invention relates to nucleic acid molecules that encode proteins and fragments of proteins produced in plant cells, in particular, maize plants. The invention also relates to proteins and fragments of proteins so encoded and antibodies capable of binding the proteins. The invention also relates to methods of using the nucleic acid molecules, proteins and fragments of proteins.

### BACKGROUND OF THE INVENTION

### I. Expressed Sequence Tag Nucleic Acid Molecules

[0004] Expressed sequence tags, or ESTs, are short sequences of randomly selected clones from a cDNA (or complementary DNA) library which are representative of the cDNA inserts of these randomly selected clones. McCombie, et al., Nature Genetics, 1: 124-130 (1992); Kurata, et al., Nature Genetics, 8: 365-372 (1994); Okubo, et al., Nature Genetics, 2: 173-179 (1992), all of which references are incorporated herein in their entirety.

[0005] Using conventional methodologies, cDNA libraries can be constructed from the mRNA (messenger RNA) of a given tissue or organism using poly dT primers and reverse transcriptase (Efstratiadis, et al., Cell 7:279-288 (1976), the entirety of which is herein incorporated by reference; Higuchi, et al., Proc. Natl. Acad. Sci. (U.S.A.) 73:3146-3150 (1976), the entirety of which is herein incorporated by reference; Maniatis, et al., Cell 8:163 (1976) the entirety of which is herein incorporated by reference; Land, et al., Nucleic Acids Res. 9:2251-2266 (1981), the entirety of which is herein incorporated by reference; Okayama, et al., Mol. Cell. Biol. 2:161-170 (1982), the entirety of which is herein incorporated by reference; Gubler, et al., Gene 25:263 (1983), the entirety of which is herein incorporated by reference).

[0006] Several methods may be employed to obtain full-length cDNA constructs. For example, terminal transferase can be used to add homopolymeric tails of dC residues to the free 3′ hydroxyl groups (Land, et al., Nucleic Acids Res. 9:2251-2266 (1981), the entirety of which is herein incorporated by reference). This tail can then be hybridized by a poly dG oligo which can act as a primer for the synthesis of full length second strand cDNA. Okayama and Berg, report a method for obtaining full length cDNA constructs. This method has been simplified by using synthetic primer-adapters that have both homopolymeric tails for priming the synthesis of the first and second strands and restriction sites for cloning into plasmids (Coleclough, et al., Gene 34:305-314 (1985), the entirety of which is herein incorporated by reference) and bacteriophage vectors (Krawinkel, et al., Nucleic Acids Res. 14:1913 (1986), the entirety of which is herein incorporated by reference; and Han, et al., Nucleic Acids Res. 15:6304 (1987), the entirety of which is herein incorporated by reference).

[0007] These strategies have been coupled with additional strategies for isolating rare mRNA populations. For example, a typical mammalian cell contains between 10,000 and 30,000 different mRNA sequences. Davidson, Gene Activity in Early Development, 2nd ed., Academic Press, New York (1976). The number of clones required to achieve a given probability that a low-abundance mRNA will be present in a cDNA library is N=(ln(1−P))/(ln(1−1/n)) where N is the number of clones required, P is the probability desired, and 1/n is the fractional proportion of the total mRNA that is represented by a single rare mRNA. (Sambrook, et al., Molecular Cloning: A Laboratory Manual, 2nd ed., Cold Spring Harbor Laboratory Press (1989), the entirety of which is herein incorporated by reference.).

[0008] A method to enrich preparations of mRNA for sequences of interest is to fractionate by size. One such method is to fractionate by electrophoresis through an agarose gel (Pennica, et al., Nature 301:214-221 (1983), the entirety of which is herein incorporated by reference). Another such method employs sucrose gradient centrifugation in the presence of an agent, such as methylmercuric hydroxide, that denatures secondary structure in RNA (Schweinfest, et al., Proc. Natl. Acad. Sci. (U.S.A.) 79:4997-5000 (1982), the entirety of which is herein incorporated by reference).

[0009] A frequently adopted method is to construct equalized or normalized cDNA libraries (Ko, Nucleic Acids Res. 18:5705-5711 (1990), the entirety of which is herein incorporated by reference; Patanjali, S. R. et al., Proc. Natl. Acad. Sci. (U.S.A.) 88:1943-1947 (1991), the entirety of which is herein incorporated by reference). Typically, the cDNA population is normalized by subtractive hybridization. Schmid, et al., J. Neurochem. 48:307-312 (1987) the entirety of which is herein incorporated by reference; Fargnoli, et al., Anal. Biochem. 187:364-373 (1990) the entirety of which is herein incorporated by reference; Travis, et al., Proc. Natl. Acad. Sci. (U.S.A.) 85:1696-1700 (1988) the entirety of which is herein incorporated by reference; Kato, Eur. J. Neurosci. 2:704 (1990); and Schweinfest, et al., Genet. Anal. Tech. Appl. 7:64 (1990), the entirety of which is herein incorporated by reference). Subtraction represents another method for reducing the population of certain sequences in the cDNA library. Swaroop, et al., Nucleic Acids Res. 19:1954 (1991), the entirety of which is herein incorporated by reference).

[0010] ESTs can be sequenced by a number of methods. Two basic methods may be used for DNA sequencing, the chain termination method of Sanger et al., Proc. Natl. Acad. Sci. (U.S.A.) 74: 5463-5467 (1977), the entirety of which is herein incorporated by reference and the chemical degradation method of Maxam and Gilbert, Proc. Nat. Acad. Sci. (U.S.A.) 74: 560-564 (1977), the entirety of which is herein incorporated by reference. Automation and advances in technology such as the replacement of radioisotopes with fluorescence-based sequencing have reduced the effort required to sequence DNA (Craxton, Methods, 2: 20-26 (1991), the entirety of which is herein incorporated by reference; Ju et al., Proc. Natl. Acad. Sci. (U.S.A.) 92: 4347-4351 (1995), the entirety of which is herein incorporated by reference; Tabor and Richardson, Proc. Natl. Acad. Sci. (U.S.A.) 92: 6339-6343 (1995), the entirety of which is herein incorporated by reference). Automated sequencers are available from, for example, Pharmacia Biotech, Inc., Piscataway, N.J. (Pharmacia ALF), LI-COR, Inc., Lincoln, Nebr. (LI-COR 4,000) and Millipore, Bedford, Mass. (Millipore BaseStation).

[0011] In addition, advances in capillary gel electrophoresis have also reduced the effort required to sequence DNA and such advances provide a rapid high resolution approach for sequencing DNA samples (Swerdlow and Gesteland, Nucleic Acids Res. 18:1415-1419 (1990); Smith, Nature 349:812-813 (1991); Luckey et al., Methods Enzymol. 218:154-172 (1993); Lu et al., J. Chromatog. A. 680:497-501 (1994); Carson et al., Anal. Chem. 65:3219-3226 (1993); Huang et al., Anal. Chem. 64:2149-2154 (1992); Kheterpal et al., Electrophoresis 17:1852-1859 (1996); Quesada and Zhang, Electrophoresis 17:1841-1851 (1996); Baba, Yakugaku Zasshi 117:265-281 (1997), all of which are herein incorporated by reference in their entirety).

[0012] ESTs longer than 150 bases have been found to be useful for similarity searches and mapping. (Adams, et al., Science 252:1651-1656 (1991), herein incorporated by reference.) EST sequences normally range from 150-450 bases. This is the length of sequence information that is routinely and reliably generated using single run sequence data. Typically, only single run sequence data is obtained from the cDNA library, Adams, et al., Science 252:1651-1656 (1991). Automated single run sequencing typically results in an approximately 2-3% error or base ambiguity rate. (Boguski, et al., Nature Genetics, 4:332-333 (1993), the entirety of which is herein incorporated by reference).

[0013] EST databases have been constructed or partially constructed from, for example, C. elegans (McCombrie, et al., Nature Genetics 1:124-131 (1992), human liver cell line HepG2 (Okubo, et al., Nature Genetics 2:173-179 (1992)), human brain RNA (Adams, et al., Science 252:1651-1656 (1991); Adams, et al., Nature 355:632-635 (1992)), Arabidopsis, (Newman, et al., Plant Physiol. 106:1241-1255 (1994)); and rice (Kurata, et al., Nature Genetics 8:365-372 (1994).

### II. Sequence Comparisons

[0014] A characteristic feature of a protein or DNA sequence is that it can be compared with other known protein or DNA sequences. Sequence comparisons can be undertaken by determining the similarity of the test or query sequence with sequences in publicly available or propriety databases (“similarity analysis”) or by searching for certain motifs (“intrinsic sequence analysis”) (e.g. cis elements) (Coulson, Trends in Biotechnology, 12: 76-80 (1994), the entirety of which is herein incorporated by reference; Birren, et al., Genome Analysis, 1: 543-559 (1997), the entirety of which is herein incorporated by reference).

[0015] Similarity analysis includes database search and alignment. Examples of public databases include the DNA Database of Japan (DDBJ) (available on the Worldwide Web at ddbj.nig.ac.jp/); Genebank (available on the Worldwide Web at ncbi.nlm.nih.gov/web/Genbank/Index.htlm); and the European Molecular Biology Laboratory Nucleic Acid Sequence Database (EMBL) (available on the Worldwide Web at ebi.ac.uk/ebi_docs/embl_db.html). A number of different search algorithms have been developed, one example of which are the suite of programs referred to as BLAST programs. There are five implementations of BLAST, three designed for nucleotide sequences queries (BLASTN, BLASTX, and TBLASTX) and two designed for protein sequence queries (BLASTP and TBLASTN) (Coulson, Trends in Biotechnology, 12: 76-80 (1994); Birren, et al., Genome Analysis, 1: 543-559 (1997)).

[0016] BLASTN takes a nucleotide sequence (the query sequence) and its reverse complement and searches them against a nucleotide sequence database. BLASTN was designed for speed, not maximum sensitivity, and may not find distantly related coding sequences. BLASTX takes a nucleotide sequence, translates it in three forward reading frames and three reverse complement reading frames, and then compares the six translations against a protein sequence database. BLASTX is useful for sensitive analysis of preliminary (single-pass) sequence data and is tolerant of sequencing errors (Gish and States, Nature Genetics, 3: 266-272 (1993), the entirety of which is herein incorporated by reference). BLASTN and BLASTX may be used in concert for analyzing EST data (Coulson, Trends in Biotechnology, 12: 76-80 (1994); Birren, et al., Genome Analysis, 1: 543-559 (1997).

[0017] Given a coding nucleotide sequence and the protein it encodes, it is often preferable to use the protein as the query sequence to search a database because of the greatly increased sensitivity to detect more subtle relationships. This is due to the larger alphabet of proteins (20 amino acids) compared with the alphabet of nucleic acid sequences (4 bases), where it is far easier to obtain a match by chance. In addition, with nucleotide alignments, only a match (positive score) or a mismatch (negative score) is obtained, but with proteins, the presence of conservative amino acid substitutions can be taken into account. Here, a mismatch may yield a positive score if the non-identical residue has physical/chemical properties similar to the one it replaced. Various scoring matrices are used to supply the substitution scores of all possible amino acid pairs. A general purpose scoring system is the BLOSUM62 matrix (Henikoff and Henikoff, Proteins, 17: 49-61 (1993), the entirety of which is herein incorporated by reference), which is currently the default choice for BLAST programs. BLOSUM62 is tailored for alignments of moderately diverged sequences and thus may not yield the best results under all conditions. Altschul, J. Mol. Biol. 36: 290-300 (1993), the entirety of which is herein incorporated by reference, uses a combination of three matrices to cover all contingencies. This may improve sensitivity, but at the expense of slower searches. In practice, a single BLOSUM62 matrix is often used but others (PAM40 and PAM250) may be attempted when additional analysis is necessary. Low PAM matrices are directed at detecting very strong but localized sequence similarities, whereas high PAM matrices are directed at detecting long but weak alignments between very distantly related sequences.

[0018] Homologues in other organisms are available that can be used for comparative sequence analysis. Multiple alignments are performed to study similarities and differences in a group of related sequences. CLUSTAL W is a multiple sequence alignment package available that performs progressive multiple sequence alignments based on the method of Feng and Doolittle, J. Mol. Evol. 25: 351-360 (1987), the entirety of which is herein incorporated by reference. Each pair of sequences is aligned and the distance between each pair is calculated; from this distance matrix, a guide tree is calculated, and all of the sequences are progressively aligned based on this tree. A feature of the program is its sensitivity to the effect of gaps on the alignment; gap penalties are varied to encourage the insertion of gaps in probable loop regions instead of in the middle of structured regions. Users can specify gap penalties, choose between a number of scoring matrices, or supply their own scoring matrix for both the pairwise alignments and the multiple alignments. CLUSTAL W for UNIX and VMS systems is available at: ftp.ebi.ac.uk. Another program is MACAW (Schuler et al., Proteins, Struct. Func. Genet, 9:180-190 (1991), the entirety of which is herein incorporated by reference, for which both Macintosh and Microsoft Windows versions are available. MACAW uses a graphical interface, provides a choice of several alignment algorithms, and is available by anonymous ftp at: ncbi.nlm.nih.gov (directory/pub/macaw).

[0019] Sequence motifs are derived from multiple alignments and can be used to examine individual sequences or an entire database for subtle patterns. With motifs, it is sometimes possible to detect distant relationships that may not be demonstrable based on comparisons of primary sequences alone. Currently, the largest collection of sequence motifs in the world is PROSITE (Bairoch and Bucher, Nucleic Acid Research, 22: 3583-3589 (1994), the entirety of which is herein incorporated by reference.) PROSITE may be accessed via either the ExPASy server on the World Wide Web or anonymous ftp site. Many commercial sequence analysis packages also provide search programs that use PROSITE data.

[0020] A resource for searching protein motifs is the BLOCKS E-mail server developed by S. Henikoff, Trends Biochem Sci., 18:267-268 (1993), the entirety of which is herein incorporated by reference; Henikoff and Henikoff, Nucleic Acid Research, 19:6565-6572 (1991), the entirety of which is herein incorporated by reference; Henikoff and Henikoff, Proteins, 17: 49-61 (1993). BLOCKS searches a protein or nucleotide sequence against a database of protein motifs or “blocks.” Blocks are defined as short, ungapped multiple alignments that represent highly conserved protein patterns. The blocks themselves are derived from entries in PROSITE as well as other sources. Either a protein or nucleotide query can be submitted to the BLOCKS server; if a nucleotide sequence is submitted, the sequence is translated in all six reading frames and motifs are sought in these conceptual translations. Once the search is completed, the server will return a ranked list of significant matches, along with an alignment of the query sequence to the matched BLOCKS entries.

[0021] Conserved protein domains can be represented by two-dimensional matrices, which measure either the frequency or probability of the occurrences of each amino acid residue and deletions or insertions in each position of the domain. This type of model, when used to search against protein databases, is sensitive and usually yields more accurate results than simple motif searches. Two popular implementations of this approach are profile searches (such as GCG program ProfileSearch) and Hidden Markov Models (HMMs) (Krough et al., J. Mol. Biol. 235:1501-1531 (1994); Eddy, Current Opinion in Structural Biology 6:361-365 (1996), both of which are herein incorporated by reference in their entirety). In both cases, a large number of common protein domains have been converted into profiles, as present in the PROSITE library, or HHM models, as in the Pfam protein domain library (Sonnhammer et al., Proteins 28:405-420 (1997), the entirety of which is herein incorporated by reference). Pfam contains more than 500 HMM models for enzymes, transcription factors, signal transduction molecules, and structural proteins. Protein databases can be queried with these profiles or HMM models, which will identify proteins containing the domain of interest. For example, HMMSW or HMMFS, two programs in a public domain package called HMMER (Sonnhammer et al., Proteins 28:405-420 (1997)) can be used.

[0022] PROSITE and BLOCKS represent collected families of protein motifs. Thus, searching these databases entails submitting a single sequence to determine whether or not that sequence is similar to the members of an established family. Programs working in the opposite direction compare a collection of sequences with individual entries in the protein databases. An example of such a program is the Motif Search Tool, or MoST (Tatusov et al. Proc. Natl. Acad. Sci. 91: 12091-12095 (1994), the entirety of which is herein incorporated by reference.) On the basis of an aligned set of input sequences, a weight matrix is calculated by using one of four methods (selected by the user); a weight matrix is simply a representation, position by position in an alignment, of how likely a particular amino acid will appear. The calculated weight matrix is then used to search the databases. To increase sensitivity, newly found sequences are added to the original data set, the weight matrix is recalculated, and the search is performed again. This procedure continues until no new sequences are found.

### SUMMARY OF THE INVENTION

[0023] The present invention provides a substantially purified nucleic acid molecule that encodes a maize protein or fragment thereof comprising a nucleic acid sequence selected from the group consisting of SEQ ID NO: 1 through SEQ ID NO: 18831.

[0024] The present invention also provides one or more substantially purified nucleic acid molecules comprising a nucleic acid sequence selected from the group consisting of SEQ ID NO: 1 through SEQ ID NO:18831 or complements thereof.

[0025] The present invention also provides a substantially purified maize protein or fragment thereof, wherein said maize protein is encoded by a nucleic acid molecule that comprises a nucleic acid sequence selected from the group consisting of SEQ ID NO: 1 through SEQ ID NO: 18831.

[0026] The present invention further provides a substantially purified protein, peptide, or fragment thereof encoded by a nucleic acid sequence which specifically hybridizes to a nucleic acid molecule comprising a nucleic acid sequence selected from the group consisting of a complement of SEQ ID NO: 1 through SEQ ID NO: 18831.

[0027] The present invention further provides a substantially purified antibody capable of specifically binding to a protein or fragment thereof encoded by a nucleic acid sequence which specifically hybridizes to a nucleic acid molecule having a nucleic acid sequence selected from the group consisting of a complement of SEQ ID NO: 1 through SEQ ID NO:18831.

[0028] The present invention also provides a transformed plant transformed to contain a nucleic acid molecule which comprises: (A) an exogenous promoter region which functions in plant cells to cause the production of an mRNA molecule; which is linked to (B) a structural nucleic acid molecule, wherein said structural nucleic acid molecule comprises a nucleic acid molecule that encodes a protein, peptide, or fragment thereof which hybridizes to a nucleic acid sequence selected from the group consisting of a complement of SEQ ID NO: 1 through SEQ ID NO: 18831 expressed in an effective amount to produce a desirable agronomic effect; which is linked to (C) a 3′ non-translated translated sequence that functions in plant cells to cause the termination of transcription and the addition of polyadenylated ribonucleotides to the 3′ end of the mRNA sequence.

[0029] The present invention also provides a transformed plant cell containing a nucleic acid molecule whose non-transcribed strand encodes a protein or fragment thereof, wherein the transcribed strand of said nucleic acid is complementary to a nucleic acid molecule that encodes a protein or fragment thereof. The present invention also provides bacterial, viral, microbial, and plant cells comprising a nucleic acid molecule of the present invention

[0030] The present invention also provides a method of producing a plant containing one or more proteins encoded by sequences comprising SEQ ID NO:1 or complement thereof through SEQ ID NO: 18831 or complements thereof, expressed in a sufficient amount and/or fashion to produce a desirable agronomic effect.

[0031] In accomplishing the foregoing, there is provided, in accordance with one aspect of the present invention, methods of producing genetically transformed plants, comprising the steps of:
[0032] (a) inserting into the genome of a plant cell a recombinant, double-stranded DNA molecule comprising
   [0033] (i) a promoter which functions in plant cells to cause the production of an RNA sequence,
   [0034] (ii) a structural DNA sequence that causes the production of an RNA sequence which encodes a desired protein.
   [0035] (iii) a 3′ non-translated DNA sequence which functions in plant cells to cause the addition of polyadenylated nucleotides to the 3′ end of RNA sequence; where the promoter is homologous or heterologous with respect to the coding sequence and adapted to cause sufficient expression of a protein in desired plant tissues to enhance the agronomic utility of a plant transformed with said gene.
[0036] (b) obtaining a transformed plant cell with said nucleic acid molecule that encodes one or more proteins, wherein said nucleic acid molecule is transcribed and results in expression of said protein(s); and
[0037] (c) regenerating from the transformed plant cell a genetically transformed plant

[0038] The present invention also encompasses differentiated plants, seeds, and progeny comprising said transformed plant cells and which exhibit novel properties of agronomic significance.

[0039] The present invention also provides a method of producing a plant containing reduced levels of a protein comprising: (A) transforming a plant cell with a nucleic acid molecule that encodes a protein, wherein said nucleic acid molecule is transcribed and results in co-suppression of endogenous protein synthesis activity, and (B) regenerating plants and producing subsequent progeny from the transformed plant.

[0040] The present invention also provides a method of determining an association between a polymorphism and a plant trait comprising: (A) hybridizing a nucleic acid molecule specific for a polymorphism to genetic material of a plant, wherein said nucleic acid molecule comprising a nucleic acid sequence selected from the group consisting of SEQ ID NO: 1 through SEQ ID NO: 18831 or complements thereof; and (B) calculating the degree of association between the polymorphism and the plant trait.

[0041] The present invention also provides a method of isolating a genetic region, or nucleic acid that encodes a protein or fragment thereof comprising: (A) incubating under conditions permitting nucleic acid hybridization: a marker nucleic acid molecule, preferably an EST, with a complementary nucleic acid molecule obtained from a plant cell or plant tissue; (B) permitting hybridization between said marker nucleic acid molecule, preferably an EST, and said complementary nucleic acid molecule obtained from said plant cell or plant tissue; and (C) isolating said complementary nucleic acid molecule.

[0042] The present invention also provides a method for determining a level or pattern in a plant cell of a protein in a plant comprising: (A) incubating, under conditions permitting nucleic acid hybridization, a marker nucleic acid molecule, the marker nucleic acid molecule selected from the group of marker nucleic acid molecules which specifically hybridize to a nucleic acid molecule having the nucleic acid sequence selected from the group consisting of SEQ ID NO: 1 through SEQ ID NO: 18831 or complements thereof or fragments of either, with a complementary nucleic acid molecule obtained from the plant cell or plant tissue, wherein nucleic acid hybridization between the marker nucleic acid molecule and the complementary nucleic acid molecule obtained from the plant cell or plant tissue permits the detection of an mRNA for the enzyme; (B) permitting hybridization between the marker nucleic acid molecule and the complementary nucleic acid molecule obtained from the plant cell or plant tissue; and (C) detecting the level or pattern of the complementary nucleic acid, wherein the detection of the complementary nucleic acid is predictive of the level or pattern of the protein.

[0043] The present invention also provides a method for determining the level or pattern of a protein in a plant cell or plant tissue comprising: (A) incubating under conditions permitting nucleic acid hybridization: a marker nucleic acid molecule, the marker nucleic acid molecule comprising a nucleotide sequence selected from the group consisting of SEQ ID NO: 1 through SEQ ID NO: 18831 or complements thereof, with a complementary nucleic acid molecule obtained from a plant cell or plant tissue, wherein nucleic acid hybridization between the marker nucleic acid molecule, and the complementary nucleic acid molecule obtained from the plant cell or plant tissue permits the detection of said protein; (B) permitting hybridization between the marker nucleic acid molecule and the complementary nucleic acid molecule obtained from the plant cell or plant tissue; and (C) detecting the level or pattern of the complementary nucleic acid, wherein the detection of said complementary nucleic acid is predictive of the level or pattern of the protein synthesis.

[0044] The present invention also provides a method for determining a level or pattern of a protein in a plant cell or plant tissue which comprises assaying the concentration of a molecule, whose concentration is dependent upon the expression of a gene, the gene having a nucleic acid sequence which specifically hybridizes to a protein marker nucleic acid molecule, the molecule being present in a plant cell or plant tissue, in comparison to the concentration of that molecule present in a plant cell or plant tissue with a known level or pattern of said protein, wherein an assayed concentration of the molecule is compared to the assayed concentration of the molecule in a plant cell or plant tissue with a known level or pattern of said protein.

[0045] The present invention also provides a method of determining a mutation in a plant whose presence is predictive of a mutation affecting a level or pattern of a protein comprising the steps: (A) incubating, under conditions permitting nucleic acid hybridization, a marker nucleic acid, the marker nucleic acid selected from the group of marker nucleic acid molecules which specifically hybridize to a nucleic acid molecule consisting of the nucleic acid sequence selected from the group consisting of SEQ ID NO: 1 through SEQ ID NO: 18831 or complements thereof or fragments of either and a complementary nucleic acid molecule obtained from the plant, wherein nucleic acid hybridization between the marker nucleic acid molecule and the complementary nucleic acid molecule obtained from the plant permits the detection of a polymorphism whose presence is predictive of a mutation affecting the level or pattern of the protein in the plant; (B) permitting hybridization between the marker nucleic acid molecule and the complementary nucleic acid molecule obtained from the plant; and (C) detecting the presence of the polymorphism, wherein the detection of the polymorphism is predictive of the mutation.

[0046] The present invention also provides a method for determining a mutation in a plant whose presence is predictive of a mutation affecting the level or pattern of protein synthesis comprising the steps: (A) incubating under conditions permitting nucleic acid hybridization: a marker nucleic acid molecule, the marker nucleic acid molecule comprising a nucleic acid molecule that is linked to gene, the gene having a nucleic acid sequence which specifically hybridizes to a sequence selected from the group consisting of SEQ ID NO: 1 through SEQ ID NO: 18831 and complements thereof, and a complementary nucleic acid molecule obtained from a plant tissue or plant cell of the plant, wherein nucleic acid hybridization between the marker nucleic acid molecule and the complementary nucleic acid molecule obtained from the plant permits the detection of a polymorphism whose presence is predictive of a mutation affecting said level or pattern of a protein synthesis in the plant; (B) permitting hybridization between said marker nucleic acid molecule and said complementary nucleic acid molecule obtained from said plant; and; (C) detecting the presence of the polymorphism, wherein the detection of the polymorphism is predictive of the mutation.

[0047] The present invention also provides a method for reducing expression of a protein in a plant cell, the method comprising: growing a transformed plant cell containing a nucleic acid molecule whose non-transcribed strand encodes a protein or fragment thereof, wherein the transcribed strand of said nucleic acid is complementary to a nucleic acid molecule that encodes the protein in said plant cell, and whereby the strand that is complementary to the nucleic acid molecule that encodes the protein reduces or depresses expression of the protein.

[0048] The present invention provides maize nucleic acid molecules for use as molecular tags to isolate genetic regions (i.e. promoters and flanking sequences), isolate genes, map genes, and determine gene function. The present invention further provides maize nucleic acid molecules for use in determining if genes are members of a particular gene family.

[0049] The present invention also provides a method of obtaining full length genes using maize ESTs or complements thereof or fragments of either.

[0050] The present invention also provides a method of isolating promoters and flanking sequences using maize ESTs or complements thereof or fragments of either.

[0051] The present invention also provides maize ESTs or complements thereof or fragments of either for use in marker-assisted breeding programs.

[0052] The present invention also provides a method of identifying tissues comprising hybridizing nucleic acids from the tissue with maize ESTs or complements thereof or fragments of either.

[0053] The present invention also provides a method for production of antibodies targeted against the proteins, peptides, or fragments produced by the disclosed or complements thereof or fragments of either.

[0054] The present invention also provides a method for the transformation and regeneration of plants comprising sequences hybridizable to the disclosed ESTs or complements thereof or fragments of either.

[0055] The present invention also provides a method of modifying plant protein expression by inserting in a chimeric gene sense or antisense constructs of the maize ESTs.

### DETAILED DESCRIPTION OF THE INVENTION

### Agents

[0056] (a) Nucleic Acid Molecules

[0057] Agents of the present invention include nucleic acid molecules and more specifically EST nucleic acid molecules or nucleic acid fragment molecules thereof. Fragment EST nucleic acid molecules may encode significant portion(s) of, or indeed most of, the EST nucleic acid molecule. Alternatively, the fragments may comprise smaller oligonucleotides (having from about 15 to about 250 nucleotide residues, and more preferably, about 15 to about 30 nucleotide residues).

[0058] A subset of the nucleic acid molecules of the present invention includes nucleic acid molecules that are marker molecules. Another subset of the nucleic acid molecules of the present invention include nucleic acid molecules that encode a protein or fragment thereof. Another subset of the nucleic acid molecules of the present invention are EST molecules.

[0059] The term “substantially purified”, as used herein, refers to a molecule separated from substantially all other molecules normally associated with it in its native state. More preferably a substantially purified molecule is the predominant species present in a preparation. A substantially purified molecule may be greater than 60% free, preferably 75% free, more preferably 90% free, and most preferably 95% free from the other molecules (exclusive of solvent) present in the natural mixture. The term “substantially purified” is not intended to encompass molecules present in their native state.

[0060] The agents of the present invention will preferably be “biologically active” with respect to either a structural attribute, such as the capacity of a nucleic acid to hybridize to another nucleic acid molecule, or the ability of a protein to be bound by antibody (or to compete with another molecule for such binding). Alternatively, such an attribute may be catalytic, and thus involve the capacity of the agent to mediate a chemical reaction or response.

[0061] The agents of the present invention may also be recombinant. As used herein, the term recombinant means any agent (e.g. DNA, peptide etc.), that is, or results, however indirect, from human manipulation of a nucleic acid molecule.

[0062] It is understood that the agents of the present invention may be labeled with reagents that facilitate detection of the agent (e.g. fluorescent labels (Prober, et al., Science 238:336-340 (1987); Albarella et al., EP 144914, chemical labels (Sheldon et al., U.S. Pat. No. 4,582,789; Albarella et al., U.S. Pat. No. 4,563,417, modified bases (Miyoshi et al., EP 119448, all of which are hereby incorporated by reference in their entirety).

[0063] It is further understood, that the present invention provides bacterial, viral, microbial, and plant cells comprising the agents of the present invention.

[0064] Nucleic acid molecules or fragment thereof of the present invention are capable of specifically hybridizing to other nucleic acid molecules under certain circumstances. As used herein, two nucleic acid molecules are said to be capable of specifically hybridizing to one another if the two molecules are capable of forming an anti-parallel, double-stranded nucleic acid structure. A nucleic acid molecule is said to be the “complement” of another nucleic acid molecule if they exhibit complete complementarity. As used herein, molecules are said to exhibit “complete complementarity” when every nucleotide of one of the molecules is complementary to a nucleotide of the other. Two molecules are said to be “minimally complementary” if they can hybridize to one another with sufficient stability to permit them to remain annealed to one another under at least conventional “low-stringency” conditions. Similarly, the molecules are said to be “complementary” if they can hybridize to one another with sufficient stability to permit them to remain annealed to one another under conventional “high-stringency” conditions. Conventional stringency conditions are described by Sambrook, et al., In: Molecular Cloning, A Laboratory Manual, 2nd Edition, Cold Spring Harbor Press, Cold Spring Harbor, N.Y. (1989), and by Haymes, et al. In: Nucleic Acid Hybridization, A Practical Approach, IRL Press, Washington, D.C. (1985), the entirety of which is herein incorporated by reference. Departures from complete complementarity are therefore permissible, as long as such departures do not completely preclude the capacity of the molecules to form a double-stranded structure. Thus, in order for an nucleic acid molecule or fragment of the present invention to serve as a primer or probe it need only be sufficiently complementary in sequence to be able to form a stable double-stranded structure under the particular solvent and salt concentrations employed.

[0065] Appropriate stringency conditions which promote DNA hybridization are, for example, 6.0× sodium chloride/sodium citrate (SSC) at about 45° C., followed by a wash of 2.0×SSC at 50° C., are known to those skilled in the art or can be found in Current Protocols in Molecular Biology, John Wiley & Sons, N.Y. (1989), 6.3.1-6.3.6. For example, the salt concentration in the wash step can be selected from a low stringency of about 2.0×SSC at 50° C. to a high stringency of about 0.2×SSC at 50° C. In addition, the temperature in the wash step can be increased from low stringency conditions at room temperature, about 22° C., to high stringency conditions at about 65° C. Both temperature and salt may be varied, or either the temperature or the salt concentration may be held constant while the other variable is changed.

[0066] In a preferred embodiment, a nucleic acid of the present invention will specifically hybridize to one or more of the nucleic acid molecules set forth in SEQ ID NO: 1 through SEQ ID NO: 18831 or complements thereof under moderately stringent conditions, for example, at about 2.0×SSC and about 65° C.

[0067] In a particularly preferred embodiment, a nucleic acid of the present invention will include those nucleic acid molecules that specifically hybridize to one or more of the nucleic acid molecules set forth in SEQ ID NO: 1 through SEQ ID NO: 18831 or complements thereof under high stringency conditions.

[0068] In one aspect of the present invention, the nucleic acid molecules of the present invention have one or more of the nucleic acid sequences set forth in SEQ ID NO: 1 through SEQ ID NO: 18831 or complements thereof. In another aspect of the present invention, one or more of the nucleic acid molecules of the present invention share between 100% and 90% sequence identity with one or more of the nucleic acid sequences set forth in SEQ ID NO: 1 through SEQ ID NO: 18831 or complements thereof. In a further aspect of the present invention, one or more of the nucleic acid molecules of the present invention share between 100% and 95% sequence identity with one or more of the nucleic acid sequences set forth in SEQ ID NO: 1 through SEQ ID NO: 18831 or complements thereof. In a more preferred aspect of the present invention, one or more of the nucleic acid molecules of the present invention share between 100% and 98% sequence identity with one or more of the nucleic acid sequences set forth in SEQ ID NO: 1 through SEQ ID NO: 18831 or complements thereof. In an even more preferred aspect of the present invention, one or more of the nucleic acid molecules of the present invention share between 100% and 99% sequence identity with one or more of the sequences set forth in SEQ ID NO: 1 through SEQ ID NO: 18831 or complements thereof. In a further, even more preferred aspect of the present invention, one or more of the nucleic acid molecules of the present invention exhibit 100% sequence identity with one or more nucleic acid molecules present within the cDNA libraries LIB3061, LIB3077, LIB36, LIB83, and LIB84 (Monsanto Company, St. Louis, Mo., United States of America).

[0069] In a preferred embodiment of the present invention, a maize protein or fragment thereof of the present invention is a homologue of another plant protein. In another preferred embodiment of the present invention, a maize protein or fragment thereof of the present invention is a homologue of a fungal protein. In another preferred embodiment of the present invention, a maize protein or fragment thereof of the present invention is a homologue of a mammalian protein. In another preferred embodiment of the present invention, a maize protein or fragment thereof of the present invention is a homologue of an algal protein. In another preferred embodiment of the present invention, a maize protein or fragment thereof of the present invention is a homologue of a bacterial protein. In another preferred embodiment of the present invention, a maize protein or fragment thereof of the present invention is a homologue of a soybean protein.

[0070] In a preferred embodiment of the present invention, the nucleic molecule of the present invention encodes a maize protein or fragment thereof where a maize protein or fragment thereof exhibits a BLAST probability score of greater than 1E-12, preferably a BLAST probability score of between about 1E-30 and about 1E-12, even more preferably a BLAST probability score of greater than 1E-30 with its homologue.

[0071] In another preferred embodiment of the present invention, the nucleic acid molecule encoding a maize protein or fragment thereof exhibits a % identity with its homologue of between about 25% and about 40%, more preferably of between about 40% and about 70%, even more preferably of between about 70% and about 90% and even more preferably between about 90% and 99%. In another preferred embodiment, of the present invention, a maize protein or fragment thereof exhibits a % identity with its homologue of 100%.

[0072] In a preferred embodiment of the present invention, the nucleic acid molecule of the present invention encodes a maize protein or fragment thereof where the maize protein exhibits a BLAST score of greater than 120, preferably a BLAST score of between about 1450 and about 120, even more preferably a BLAST score of greater than 1450 with its homologue.

[0073] Nucleic acid molecules of the present invention also include non-maize homologues. Preferred non-maize homologues are selected from the group consisting of alfalfa, Arabidopsis, barley, Brassica, broccoli, cabbage, citrus, cotton, garlic, oat, oilseed rape, onion, canola, flax, an ornamental plant, pea, peanut, pepper, potato, rice, rye, sorghum, soybean strawberry, sugarcane, sugarbeet, tomato, wheat, poplar, pine, fir, eucalyptus, apple, lettuce, lentils, grape, banana, tea, turf grasses, sunflower, oil palm and Phaseolus.

[0074] The degeneracy of the genetic code, which allows different nucleic acid sequences to code for the same protein or peptide, is known in the literature. (U.S. Pat. No. 4,757,006, the entirety of which is herein incorporated by reference).

[0075] In an aspect of the present invention, one or more of the nucleic acid molecules of the present invention differ in nucleic acid sequence from those encoding a soybean protein or fragment thereof in SEQ ID NO: 1 through SEQ ID NO: 18831 due to the degeneracy in the genetic code in that they encode the same protein but differ in nucleic acid sequence.

[0076] In another further aspect of the present invention, one or more of the nucleic acid molecules of the present invention differ in nucleic acid sequence from those encoding a soybean protein or fragment thereof in SEQ ID NO: 1 through SEQ ID NO: 18831 due to the fact that the different nucleic acid sequences encode a protein having one or more conservative amino acid residues.

[0077] It is understood that codons capable of coding for such conservative amino acid substitutions are known in the art.

[0078] It is well known in the art that one or more amino acids in a native sequence can be substituted with another amino acid(s), the charge and polarity of which are similar to that of the native amino acid, i.e., a conservative amino acid substitution, resulting in a silent change. Conserved substitutes for an amino acid within the native polypeptide sequence can be selected from other members of the class to which the naturally occurring amino acid belongs. Amino acids can be divided into the following four groups: (1) acidic amino acids, (2) basic amino acids, (3) neutral polar amino acids, and (4) neutral nonpolar amino acids. Representative amino acids within these various groups include, but are not limited to, (1) acidic (negatively charged) amino acids such as aspartic acid and glutamic acid; (2) basic (positively charged) amino acids such as arginine, histidine, and lysine; (3) neutral polar amino acids such as glycine, serine, threonine, cysteine, cystine, tyrosine, asparagine, and glutamine; and (4) neutral nonpolar (hydrophobic) amino acids such as alanine, leucine, isoleucine, valine, proline, phenylalanine, tryptophan, and methionine.

[0079] Conservative amino acid changes within the native polypeptides sequence can be made by substituting one amino acid within one of these groups with another amino acid within the same group. Biologically functional equivalents of the proteins or fragments thereof of the present invention can have 10 or fewer conservative amino acid changes, more preferably seven or fewer conservative amino acid changes, and most preferably five or fewer conservative amino acid changes. The encoding nucleotide sequence will thus have corresponding base substitutions, permitting it to encode biologically functional equivalent forms of the proteins or fragments of the present invention.

[0080] It is understood that certain amino acids may be substituted for other amino acids in a protein structure without appreciable loss of interactive binding capacity with structures such as, for example, antigen-binding regions of antibodies or binding sites on substrate molecules. Because it is the interactive capacity and nature of a protein that defines that protein's biological functional activity, certain amino acid sequence substitutions can be made in a protein sequence and, of course, its underlying DNA coding sequence and, nevertheless, obtain a protein with like properties. It is thus contemplated by the inventors that various changes may be made in the peptide sequences of the proteins or fragments of the present invention, or corresponding DNA sequences that encode said peptides, without appreciable loss of their biological utility or activity. It is understood that codons capable of coding for such amino acid changes are known in the art.

[0081] In making such changes, the hydropathic index of amino acids may be considered. The importance of the hydropathic amino acid index in conferring interactive biological function on a protein is generally understood in the art (Kyte and Doolittle, J. Mol. Biol. 157, 105-132 (1982), herein incorporated by reference in its entirety). It is accepted that the relative hydropathic character of the amino acid contributes to the secondary structure of the resultant protein, which in turn defines the interaction of the protein with other molecules, for example, enzymes, substrates, receptors, DNA, antibodies, antigens, and the like.

[0082] Each amino acid has been assigned a hydropathic index on the basis of its hydrophobicity and charge characteristics (Kyte and Doolittle, 1982); these are isoleucine (+4.5), valine (+4.2), leucine (+3.8), phenylalanine (+2.8), cysteine/cystine (+2.5), methionine (+1.9), alanine (+1.8), glycine (−0.4), threonine (−0.7), serine (−0.8), tryptophan (−0.9), tyrosine (−1.3), proline (−1.6), histidine (−3.2), glutamate (−3.5), glutamine (−3.5), aspartate (−3.5), asparagine (−3.5), lysine (−3.9), and arginine (−4.5).

[0083] In making such changes, the substitution of amino acids whose hydropathic indices are within ±2 is preferred, those which are within ±1 are particularly preferred, and those within ±0.5 are even more particularly preferred.

[0084] It is also understood in the art that the substitution of like amino acids can be made effectively on the basis of hydrophilicity. U.S. Pat. No. 4,554,101, incorporated herein by reference in its entirety, states that the greatest local average hydrophilicity of a protein, as govern by the hydrophilicity of its adjacent amino acids, correlates with a biological property of the protein

As detailed in U.S. Pat. No. 4,554,101, the following hydrophilicity values have been assigned to amino acid residues: arginine (+3.0), lysine (+3.0), aspartate (+3.0±1), glutamate (+3.0±1), serine (+0.3), asparagine (+0.2), glutamine (+0.2), glycine (0), threonine (−0.4), proline (−0.5±1), alanine (−0.5), histidine (−0.5), cysteine (−1.0), methionine (−1.3), valine (−1.5), leucine (−1.8), isoleucine (−1.8), tyrosine (−2.3), phenylalanine (−2.5), and tryptophan (−3.4). In making such changes, the substitution of amino acids whose hydrophilicity values are within ±2 is preferred, those which are within ±1 are particularly preferred, and those within ±0.5 are even more particularly preferred.

[0085] In a further aspect of the present invention, one or more of the nucleic acid molecules of the present invention differ in nucleic acid sequence from those encoding a protein or fragment thereof set forth in SEQ ID NO: 1 through SEQ ID NO: 18831 or fragment thereof due to the fact that one or more codons encoding an amino acid has been substituted for a codon that encodes a nonessential substitution of the amino acid originally encoded.

[0086] One aspect of the present invention concerns markers that include nucleic acid molecules SEQ ID NO: 1 through SEQ ID NO: 18831 or complements thereof or fragments of either that can act as markers or other nucleic acid molecules of the present invention that can act as markers. Genetic markers of the present invention include “dominant” or “codominant” markers “Codominant markers” reveal the presence of two or more alleles (two per diploid individual) at a locus. “Dominant markers” reveal the presence of only a single allele per locus. The presence of the dominant marker phenotype (e.g., a band of DNA) is an indication that one allele is present in either the homozygous or heterozygous condition. The absence of the dominant marker phenotype (e.g. absence of a DNA band) is merely evidence that “some other” undefined allele is present. In the case of populations where individuals are predominantly homozygous and loci are predominately dimorphic, dominant and codominant markers can be equally valuable. As populations become more heterozygous and multi-allelic, codominant markers often become more informative of the genotype than dominant markers. Marker molecules can be, for example, capable of detecting polymorphisms such as single nucleotide polymorphisms (SNPs).

[0087] SNPs are single base changes in genomic DNA sequence. They occur at greater frequency and are spaced with a greater uniformity throughout a genome than other reported forms of polymorphism. The greater frequency and uniformity of SNPs means that there is greater probability that such a polymorphism will be found near or in a genetic locus of interest than would be the case for other polymorphisms. SNPs are located in protein-coding regions and noncoding regions of a genome. Some of these SNPs may result in defective or variant protein expression (e.g., as a results of mutations or defective splicing). Analysis (genotyping) of characterized SNPs can require only a plus/minus assay rather than a lengthy measurement, permitting easier automation.

[0088] SNPs can be characterized using any of a variety of methods. Such methods include the direct or indirect sequencing of the site, the use of restriction enzymes (Botstein et al., Am. J. Hum. Genet. 32:314-331 (1980), the entirety of which is herein incorporated reference; Konieczny and Ausubel, Plant J. 4:403-410 (1993), the entirety of which is herein incorporated by reference), enzymatic and chemical mismatch assays (Myers et al., Nature 313:495-498 (1985), the entirety of which is herein incorporated by reference), allele-specific PCR (Newton et al., Nucl. Acids Res. 17:2503-2516 (1989), the entirety of which is herein incorporated by reference; Wu et al., Proc. Natl. Acad. Sci. (U.S.A.) 86:2757-2760 (1989), the entirety of which is herein incorporated by reference), ligase chain reaction (Barany, Proc. Natl. Acad. Sci. (U.S.A.) 88:189-193 (1991), the entirety of which is herein incorporated by reference), single-strand conformation polymorphism analysis (Labrune et al., Am. J. Hum. Genet. 48: 1115-1120 (1991), the entirety of which is herein incorporated by reference), primer-directed nucleotide incorporation assays (Kuppuswami et al., Proc. Natl. Acad. Sci. USA 88:1143-1147 (1991), the entirety of which is herein incorporated by reference), dideoxy fingerprinting (Sarkar et al., Genomics 13:441-443 (1992), the entirety of which is herein incorporated by reference), solid-phase ELISA-based oligonucleotide ligation assays (Nikiforov et al., Nucl. Acids Res. 22:4167-4175 (1994), the entirety of which is herein incorporated by reference), oligonucleotide fluorescence-quenching assays (Livak et al., PCR Methods Appl. 4:357-362 (1995), the entirety of which is herein incorporated by reference), 5′-nuclease allele-specific hybridization TaqMan assay (Livak et al., Nature Genet. 9:341-342 (1995), the entirety of which is herein incorporated by reference), template-directed dye-terminator incorporation (TDI) assay (Chen and Kwok, Nucl. Acids Res. 25:347-353 (1997), the entirety of which is herein incorporated by reference), allele-specific molecular beacon assay (Tyagi et al., Nature Biotech. 16: 49-53 (1998), the entirety of which is herein incorporated by reference), PinPoint assay (Haff and Smimov, Genome Res. 7: 378-388 (1997), the entirety of which is herein incorporated by reference) and dCAPS analysis (Neff et al., Plant J. 14:387-392 (1998), the entirety of which is herein incorporated by reference).

[0089] Additional markers, such as AFLP markers, RFLP markers and RAPD markers, can be utilized (Walton, Seed World 22-29 (July, 1993), the entirety of which is herein incorporated by reference; Burow and Blake, Molecular Dissection of Complex Traits, 13-29, Paterson (ed.), CRC Press, New York (1988), the entirety of which is herein incorporated by reference). DNA markers can be developed from nucleic acid molecules using restriction endonucleases, the PCR and/or DNA sequence information. RFLP markers result from single base changes or insertions/deletions. These codominant markers are highly abundant in plant genomes, have a medium level of polymorphism and are developed by a combination of restriction endonuclease digestion and Southern blotting hybridization. CAPS are similarly developed from restriction nuclease digestion but only of specific PCR products. These markers are also codominant, have a medium level of polymorphism and are highly abundant in the genome. The CAPS result from single base changes and insertions/deletions.

[0090] Another marker type, RAPDs, are developed from DNA amplification with random primers and result from single base changes and insertions/deletions in plant genomes. They are dominant markers with a medium level of polymorphisms and are highly abundant. AFLP markers require using the PCR on a subset of restriction fragments from extended adapter primers. These markers are both dominant and codominant are highly abundant in genomes and exhibit a medium level of polymorphism.

[0091] SSRs require DNA sequence information. These codominant markers result from repeat length changes, are highly polymorphic and do not exhibit as high a degree of abundance in the genome as CAPS, AFLPs and RAPDs, SNPs also require DNA sequence information. These codominant markers result from single base substitutions. They are highly abundant and exhibit a medium of polymorphism (Rafalski et al., In: Nonmammalian Genomic Analysis, Birren and Lai (ed.), Academic Press, San Diego, Calif., pp. 75-134 (1996), the entirety of which is herein incorporated by reference). It is understood that a nucleic acid molecule of the present invention may be used as a marker.

[0092] A PCR probe is a nucleic acid molecule capable of initiating a polymerase activity while in a double-stranded structure with another nucleic acid. Various methods for determining the structure of PCR probes and PCR techniques exist in the art. Computer generated searches using programs such as Primer3 (available on the Worldwide Web at genome.wi.mit.edu/cgi-bin/primer/primer3.cgi), STSPipeline (available on the Worldwide Web at genome.wi.mit.edu/cgi-bin/www-STS_Pipeline), or GeneUp (Pesole et al., BioTechniques 25:112-123 (1998) the entirety of which is herein incorporated by reference), for example, can be used to identify potential PCR primers.

[0093] It is understood that a fragment of one or more of the nucleic acid molecules of the present invention may be a probe and specifically a PCR probe.

[0094] (b) Protein and Peptide Molecules

[0095] A class of agents comprises one or more of the protein or peptide molecules encoded by SEQ ID NO: 1 through SEQ ID NO: 18831 or one or more of the protein or fragment thereof or peptide molecules encoded by other nucleic acid agents of the present invention. As used herein, the term “protein molecule” or “peptide molecule” includes any molecule that comprises five or more amino acids. It is well know in the art that proteins may undergo modification, including post-translational modifications, such as, but not limited to, disulfide bond formation, glycosylation, phosphorylation, or oligomerization. Thus, as used herein, the term “protein molecule” or “peptide molecule” includes any protein molecule that is modified by any biological or non-biological process. The terms “amino acid” and “amino acids” refer to all naturally occurring L-amino acids. This definition is meant to include norleucine, ornithine, homocysteine, and homoserine.

[0096] One or more of the protein or fragment of peptide molecules may be produced via chemical synthesis, or more preferably, by expression in a suitable bacterial or eukaryotic host. Suitable methods for expression are described by Sambrook, et al., (In: Molecular Cloning, A Laboratory Manual, 2nd Edition, Cold Spring Harbor Press, Cold Spring Harbor, N.Y. (1989)), or similar texts.

[0097] A “protein fragment” is a peptide or polypeptide molecule whose amino acid sequence comprises a subset of the amino acid sequence of that protein. A protein or fragment thereof that comprises one or more additional peptide regions not derived from that protein is a “fusion” protein. Such molecules may be derivatized to contain carbohydrate or other moieties (such as keyhole limpet hemocyanin, etc.). Fusion protein or peptide molecule of the present invention are preferably produced via recombinant means.

[0098] Another class of agents comprise protein or peptide molecules encoded by SEQ ID NO: 1 through SEQ ID NO: 18831 or complements thereof or, fragments or fusions thereof in which non-essential, or not relevant, amino acid residues have been added, replaced, or deleted. An example of such a homologue is the homologue protein of all non-maize plant species, including but not limited to alfalfa, Arabidopsis, barley, Brassica, broccoli, cabbage, citrus, cotton, garlic, oat, oilseed rape, onion, canola, flax, an ornamental plant, pea, peanut, pepper, potato, rice, rye, sorghum, soybean, strawberry, sugarcane, sugarbeet, tomato, wheat, poplar, pine, fir, eukalyptus, apple, lettuce, peas, lentils, grape, banana, tea, turf grasses, etc. Particularly preferred non-maize plants to utilize for the isolation of homologues would include alfalfa, Arabidopsis, barley, cotton, oat, oilseed rape, rice, canola, ornamentals, soybean, sugarcane, sugarbeet, tomato, potato, wheat, and turf grasses. Such a homologue can be obtained by any of a variety of methods. Most preferably, as indicated above, one or more of the disclosed sequences (SEQ ID NO: 1 through SEQ ID NO: 18831 or complements thereof) will be used to define a pair of primers that may be used to isolate the homologue-encoding nucleic acid molecules from any desired species. Such molecules can be expressed to yield homologues by recombinant means.

[0099] (c) Antibodies

[0100] One aspect of the present invention concerns antibodies, single-chain antigen binding molecules, or other proteins that specifically bind to one or more of the protein or peptide molecules of the present invention and their homologues, fusions or fragments. Such antibodies may be used to quantitatively or qualitatively detect the protein or peptide molecules of the present invention. As used herein, an antibody or peptide is said to “specifically bind” to a protein or peptide molecule of the present invention if such binding is not competitively inhibited by the presence of non-related molecules.

[0101] Nucleic acid molecules that encode all or part of the protein of the present invention can be expressed, via recombinant means, to yield protein or peptides that can in turn be used to elicit antibodies that are capable of binding the expressed protein or peptide. Such antibodies may be used in immunoassays for that protein. Such protein-encoding molecules, or their fragments may be a “fusion” molecule (i.e., a part of a larger nucleic acid molecule) such that, upon expression, a fusion protein is produced. It is understood that any of the nucleic acid molecules of the present invention may be expressed, via recombinant means, to yield proteins or peptides encoded by these nucleic acid molecules.

[0102] The antibodies that specifically bind proteins and protein fragments of the present invention may be polyclonal or monoclonal, and may comprise intact immunoglobulins, or antigen binding portions of immunoglobulins (such as (F(ab′), F(ab′)₂) fragments, or single-chain immunoglobulins producible, for example, via recombinant means). It is understood that practitioners are familiar with the standard resource materials which describe specific conditions and procedures for the construction, manipulation and isolation of antibodies (see, for example, Harlow and Lane, In Antibodies: A Laboratory Manual, Cold Spring Harbor Press, Cold Spring Harbor, N.Y. (1988), the entirety of which is herein incorporated by reference).

[0103] Murine monoclonal antibodies are particularly preferred. BALB/c mice are preferred for this purpose, however, equivalent strains may also be used. The animals are preferably immunized with approximately 25 μg of purified protein (or fragment thereof) that has been emulsified a suitable adjuvant (such as TiterMax adjuvant (Vaxcel, Norcross, Ga.)). Immunization is preferably conducted at two intramuscular sites, one intraperitoneal site, and one subcutaneous site at the base of the tail. An additional i.v. injection of approximately 25 μg of antigen is preferably given in normal saline three weeks later. After approximately 11 days following the second injection, the mice may be bled and the blood screened for the presence of anti-protein or peptide antibodies. Preferably, a direct binding Enzyme-Linked Immunoassay (ELISA) is employed for this purpose.

[0104] More preferably, the mouse having the highest antibody titer is given a third i.v. injection of approximately 25 μg of the same protein or fragment. The splenic leukocytes from this animal may be recovered 3 days later, and are then permitted to fuse, most preferably, using polyethylene glycol, with cells of a suitable myeloma cell line (such as, for example, the P3X63Ag8.653 myeloma cell line). Hybridoma cells are selected by culturing the cells under “HAT” (hypoxanthine-aminopterin-thymine) selection for about one week. The resulting clones may then be screened for their capacity to produce monoclonal antibodies (“mAbs), preferably by direct ELISA.

[0105] In one embodiment, anti-protein or peptide monoclonal antibodies are isolated using a fusion of a protein, protein fragment, or peptide of the present invention, or conjugate of a protein, protein fragment, or peptide of the present invention, as immunogens. Thus, for example, a group of mice can be immunized using a fusion protein emulsified in Freund's complete adjuvant (e.g. approximately 50 μg of antigen per immunization). At three week intervals, an identical amount of antigen is emulsified in Freund's incomplete adjuvant and used to immunize the animals. Ten days following the third immunization, serum samples are taken and evaluated for the presence of antibody. If antibody titers are too low, a fourth booster can be employed. Polysera capable of binding the protein or peptide can also be obtained using this method.

[0106] In a preferred procedure for obtaining monoclonal antibodies, the spleens of the above-described immunized mice are removed, disrupted, and immune splenocytes are isolated over a ficoll gradient. The isolated splenocytes are fused, using polyethylene glycol with BALB/c-derived HGPRT (hypoxanthine guanine phosphoribosyl transferase) deficient P3×63×Ag8.653 plasmacytoma cells. The fused cells are plated into 96-well microtiter plates and screened for hybridoma fusion cells by their capacity to grow in culture medium supplemented with hypothanthine, aminopterin and thymidine for approximately 2-3 weeks.

[0107] Hybridoma cells that arise from such incubation are preferably screened for their capacity to produce an immunoglobulin that binds to a protein of interest. An indirect ELISA may be used for this purpose. In brief, the supernatants of hybridomas are incubated in microtiter wells that contain immobilized protein. After washing, the titer of bound immunoglobulin can be determined using, for example, a goat anti-mouse antibody conjugated to horseradish peroxidase. After additional washing, the amount of immobilized enzyme is determined (for example through the use of a chromogenic substrate). Such screening is performed as quickly as possible after the identification of the hybridoma in order to ensure that a desired clone is not overgrown by non-secreting neighbors. Desirably, the fusion plates are screened several times since the rates of hybridoma growth vary. In a preferred sub-embodiment, a different antigenic form of immunogen may be used to screen the hybridoma. Thus, for example, the splenocytes may be immunized with one immunogen, but the resulting hybridomas can be screened using a different immunogen. It is understood that any of the protein or peptide molecules of the present invention may be used to raise antibodies.

[0108] As discussed below, such antibody molecules or their fragments may be used for diagnostic purposes. Where the antibodies are intended for diagnostic purposes, it may be desirable to derivatize them, for example with a ligand group (such as biotin) or a detectable marker group (such as a fluorescent group, a radioisotope or an enzyme).

[0109] The ability to produce antibodies that bind the protein or peptide molecules of the present invention permits the identification of mimetic compounds of those molecules. A “mimetic compound” is a compound that is not that compound, or a fragment of that compound, but which nonetheless exhibits an ability to specifically bind to antibodies directed against that compound.

[0110] It is understood that any of the agents of the present invention can be substantially purified and/or be biologically active and/or recombinant.

[0111] Uses of the Agents of the Invention

[0112] The nucleic acid molecules and fragments thereof of the present invention are generated from the cDNA library, LIB3061, prepared from Zea mays endosperms. This tissue is harvested from 32 DAP plants beyond the V10 stage grown under greenhouse conditions. Libraries from this tissue can enable the acquisition of a variety of agronomically significant genes involved in the synthesis and catabolism of commercially important traits. The ESTs of the present invention can enable the acquisition of, including but not limited to genes that regulate protein, oils, amino acids, sterols, minerals, isoflavones, saponins, vitamins, tocopherols, antinutrient components, carbohydrates, starch metabolism and seed regulatory elements. Such genes are associated with plant growth, quality and yield, and could also serve as links in important developmental, metabolic, and catabolic pathways.

[0113] The nucleic acid molecules and fragments thereof of the present invention are generated from the cDNA library, LIB3077, prepared from Zea mays kernels from immature ear tissue, which is harvested from eight week old plants grown in a green house. Libraries from this tissue can enable the acquisition of a variety of agronomically significant genes involved in the synthesis and catabolism of commercially important traits. The ESTs of the present invention can enable the acquisition of, including but are not limited to, non-regulatory genes and genes that regulate protein, oils, amino acids, sterols, minerals, isoflavones, saponins, vitamins, tocopherols, antinutrient components, carbohydrates, starch metabolism and seed regulatory elements. Such genes are associated with plant growth, quality and yield, and could also serve as links in important developmental, metabolic, and catabolic pathways.

[0114] The nucleic acid molecules and fragments thereof of the present invention are generated from the cDNA library, LIB36, prepared from leaves harvested from V8 stage maize plants. Leaves are the carbohydrate factories of crop plants, therefore, the ESTs of the present invention will find great use in the isolation of a variety of agronomically significant genes, including but not limited to genes that are necessary for the interception and transformation of light energy via photosynthesis linked with plant growth, quality, and yield. Genes isolated utilizing the disclosed ESTs would also be critical in pathways including but not limited to a pathway such as nitrogen metabolism linked to fruiting and mobilization and distribution of nitrogen.

[0115] The nucleic acid molecules and fragments thereof of the present invention are generated from the normalized cDNA library, LIB83, prepared from leaves harvested from V8 stage maize plants. Leaves are the carbohydrate factories of crop plants, therefore, the ESTs of the present invention will find great use in the isolation of a variety of agronomically significant genes, including but not limited to genes that are necessary for the interception and transformation of light energy via photosynthesis linked with plant growth, quality, and yield. Genes isolated utilizing the disclosed ESTs would also be critical in pathways including but not limited to a pathway such as nitrogen metabolism linked to fruiting and mobilization and distribution of nitrogen.

[0116] The nucleic acid molecules and fragments thereof of the present invention are generated from the normalized cDNA library, LIB84, prepared from leaves harvested from V8 stage maize plants. Leaves are the carbohydrate factories of crop plants, therefore, the ESTs of the present invention will find great use in the isolation of a variety of agronomically significant genes, including but not limited to genes that are necessary for the interception and transformation of light energy via photosynthesis linked with plant growth, quality, and yield. Genes isolated utilizing the disclosed ESTs would also be involved in pathways including but not limited to a pathway such as nitrogen metabolism linked to fruiting and mobilization and distribution of nitrogen.

[0117] Nucleic acid molecules and fragments thereof of the present invention may be employed to obtain other nucleic acid molecules. Such molecules include the nucleic acid molecules of other plants or other organisms (e.g., alfalfa, rice, potato, cotton, oat, rye, barley, maize, wheat, Arabidopsis, Brassica, etc.) including the nucleic acid molecules that encode, in whole or in part, protein homologues of other plant species or other organisms, and sequences of genetic elements such as promoters and transcriptional regulatory elements. Such molecules can be readily obtained by using the above-described nucleic acid molecules or fragments thereof to screen cDNA or genomic libraries obtained from such plant species. Methods for forming such libraries are well known in the art. Such homologue molecules may differ in their nucleotide sequences from those found in one or more of SEQ ID NO:1 through SEQ ID NO:18831 or complements thereof because complete complementarity is not needed for stable hybridization. The nucleic acid molecules of the present invention therefore also include molecules that, although capable of specifically hybridizing with the nucleic acid molecules may lack “complete complementarity.”

[0118] Any of a variety of methods may be used to obtain one or more of the above-described nucleic acid molecules (Zamechik et al., Proc. Natl. Acad. Sci. (U.S.A.) 83:4143-4146 (1986), the entirety of which is herein incorporated by reference; Goodchild et al., Proc. Natl. Acad. Sci. (U.S.A.) 85:5507-5511 (1988), the entirety of which is herein incorporated by reference; Wickstrom et al., Proc. Natl. Acad. Sci. (U.S.A.) 85:1028-1032 (1988), the entirety of which is herein incorporated by reference; Holt, et al., Molec. Cell. Biol. 8:963-973 (1988), the entirety of which is herein incorporated by reference; Gerwirtz, et al., Science 242:1303-1306 (1988), the entirety of which is herein incorporated by reference; Anfossi, et al., Proc. Natl. Acad. Sci. (U.S.A.) 86:3379-3383 (1989), the entirety of which is herein incorporated by reference; Becker, et al., EMBO J. 8:3685-3691 (1989); the entirety of which is herein incorporated by reference). Automated nucleic acid synthesizers may be employed for this purpose. In lieu of such synthesis, the disclosed nucleic acid molecules may be used to define a pair of primers that can be used with the polymerase chain reaction (Mullis, et al., Cold Spring Harbor Symp. Quant. Biol. 51:263-273 (1986); Erlich et al., EP 50,424; EP 84,796, EP 258,017, EP 237,362; Mullis, EP 201,184; Mullis et al., U.S. Pat. No. 4,683,202; Erlich, U.S. Pat. No. 4,582,788; and Saiki, R. et al., U.S. Pat. No. 4,683,194, all of which are hereby incorporated by reference in their entirety) to amplify and obtain any desired nucleic acid molecule or fragment.

[0119] Promoter sequence(s) and other genetic elements including but not limited to transcriptional regulatory elements associated with one or more of the disclosed nucleic acid sequences can also be obtained using the disclosed nucleic acid sequences provided herein.

[0120] In one embodiment, such sequences are obtained by incubating EST nucleic acid molecules or preferably fragments thereof with members of genomic libraries (e.g. maize and soybean) and recovering clones that hybridize to the EST nucleic acid molecule or fragment thereof. In a second embodiment, methods of “chromosome walking,” or inverse PCR may be used to obtain such sequences (Frohman, et al., Proc. Natl. Acad. Sci. (U.S.A.) 85:8998-9002 (1988); Ohara, et al., Proc. Natl. Acad. Sci. (U.S.A.) 86: 5673-5677 (1989); Pang et al., Biotechniques, 22(6); 1046-1048 (1977); Huang et al., Methods Mol. Biol. 69: 89-96 (1977); Hartl et al., Methods Mol. Biol. 58: 293-301 (1996), all of which are hereby incorporated by reference in their entirety). In one embodiment, the disclosed nucleic acid molecules are used to identify cDNAs whose analogous genes contain promoters with desirable expression patterns. The nucleic acid molecules isolated from the library of the present invention are used to isolate promoters of tissue-enhanced, tissue-specific, developmentally- or environmentally-regulated expression profiles. Isolation and functional analysis of the 5′ flanking promoter sequences of these genes from genomic libraries, for example, using genomic screening methods and PCR techniques would result in the isolation of useful promoters and transcriptional regulatory elements. These methods are known to those of skill in the art and have been described (See for example Birren et al., Genome Analysis:Analyzing DNA, 1, (1997), Cold Spring Harbor Laboratory Press, Cold Spring Harbor, N.Y., the entirety of which is herein incorporated by reference).

[0121] Promoters obtained utilizing the nucleic acid molecules of the present invention could also be modified to affect their control characteristics. Examples of such modifications would include but are not limited to enhancer sequences as reported by Kay et al., Science 236:1299 (1987), herein incorporated by reference in its entirety. Such genetic elements could be used to enhance gene expression of new and existing traits for crop improvements.

[0122] The nucleic acid molecules of the present invention may be used to isolate promoters of tissue enhanced. tissue specific, cell-specific, cell-type, developmentally or environmentally regulated expression profiles. Isolation and functional analysis of the 5′ flanking promoter sequences of these genes from genomic libraries, for example, using genomic screening methods and PCR techniques would result in the isolation of useful promoters and transcriptional regulatory elements. These methods are known to those of skill in the art and have been described (See, for example, Birren et. al., Genome Analysis: Analyzing DNA, 1, Cold Spring Harbor Laboratory Press, Cold Spring Harbor, N.Y. (1997), the entirety of which is herein incorporated by reference). Promoters obtained utilizing the nucleic acid molecules of the present invention could also be modified to affect their control characteristics. Examples of such modifications would include but are not limited to enhancer sequences as reported by Kay, et al Science 236:1299 (1987), herein incorporated reference in its entirety. Such genetic elements could be used to enhance gene expression of new and existing traits for crop improvements.

[0123] In an aspect of the present invention, one or more of the nucleic molecules of the present invention are used to determine whether a plant (preferably maize) has a mutation affecting the level (i.e., the concentration of mRNA in a sample, etc.) or pattern (i.e., the kinetics of expression, rate of decomposition, stability profile, etc.) of the expression encoded in part or whole by one or more of the nucleic acid molecules of the present invention (collectively, the “Expression Response” of a cell or tissue). As used herein, the Expression Response manifested by a cell or tissue is said to be “altered” if it differs from the Expression Response of cells or tissues of plants not exhibiting the phenotype. To determine whether a Expression Response is altered, the Expression Response manifested by the cell or tissue of the plant exhibiting the phenotype is compared with that of a similar cell or tissue sample of a plant not exhibiting the phenotype. As will be appreciated, it is not necessary to re-determine the Expression Response of the cell or tissue sample of plants not exhibiting the phenotype each time such a comparison is made; rather, the Expression Response of a particular plant may be compared with previously obtained values of normal plants. As used herein, the phenotype of the organism is any of one or more characteristics of an organism (e.g. disease resistance, pest tolerance, environmental tolerance, male sterility, yield, quality improvements, etc.). A change in genotype or phenotype may be transient or permanent. Also as used herein, a tissue sample is any sample that comprises more than one cell. In a preferred aspect, a tissue sample comprises cells that share a common characteristic (e.g. derived from leaf, root, or pollen etc).

[0124] In one sub-aspect, such an analysis is conducted by determining the presence and/or identity of polymorphism(s) by one or more of the nucleic acid molecules of the present invention and more specifically, one or more of the EST nucleic acid molecules or fragments thereof which are associated with phenotype, or a predisposition to phenotype.

[0125] Any of a variety of molecules can be used to identify such polymorphism(s). In one embodiment, one or more of the EST nucleic acid molecules (or a sub-fragment thereof) may be employed as a marker nucleic acid molecule to identify such polymorphism(s). Alternatively, such polymorphisms can be detected through the use of a marker nucleic acid molecule or a marker protein that is genetically linked to (i.e., a polynucleotide that co-segregates with) such polymorphism(s).

[0126] In an alternative embodiment, such polymorphisms can be detected through the use of a marker nucleic acid molecule that is physically linked to such polymorphism(s). For this purpose, marker nucleic acid molecules comprising a nucleotide sequence of a polynucleotide located within 1 mb of the polymorphism(s), and more preferably within 100 kb of the polymorphism(s), and most preferably within 10 kb of the polymorphism(s) can be employed.

[0127] The genomes of animals and plants naturally undergo spontaneous mutation in the course of their continuing evolution (Gusella, Ann. Rev. Biochem. 55:831-854 (1986)). A “polymorphism” is a variation or difference in the sequence of the gene or its flanking regions that arises in some of the members of a species. The variant sequence and the “original” sequence co-exist in the species' population. In some instances, such co-existence is in stable or quasi-stable equilibrium.

[0128] A polymorphism is thus said to be “allelic,” in that, due to the existence of the polymorphism, some members of a species may have the original sequence (i.e., the original “allele”) whereas other members may have the variant sequence (i.e., the variant “allele”). In the simplest case, only one variant sequence may exist, and the polymorphism is thus said to be di-allelic. In other cases, the species' population may contain multiple alleles, and the polymorphism is termed tri-allelic, etc. A single gene may have multiple different unrelated polymorphisms. For example, it may have a di-allelic polymorphism at one site, and a multi-allelic polymorphism at another site.

[0129] The variation that defines the polymorphism may range from a single nucleotide variation to the insertion or deletion of extended regions within a gene. In some cases, the DNA sequence variations are in regions of the genome that are characterized by short tandem repeats (STRs) that include tandem di- or tri-nucleotide repeated motifs of nucleotides. Polymorphisms characterized by such tandem repeats are referred to as “variable number tandem repeat” (“VNTR”) polymorphisms. VNTRs have been used in identity analysis (Weber, U.S. Pat. No. 5,075,217; Armour, et al., FEBS Lett. 307:113-115 (1992); Jones, et al., Eur. J. Haematol. 39:144-147 (1987); Horn, et al., PCT Application WO91/14003; Jeffreys, European Patent Application 370,719; Jeffreys, U.S. Pat. No. 5,699,082; Jeffreys. et al., Amer. J. Hum. Genet. 39:11-24 (1986); Jeffreys. et al., Nature 316:76-79 (1985); Gray, et al., Proc. R. Acad. Soc. Lond. 243:241-253 (1991); Moore, et al., Genomics 10:654-660 (1991); Jeffreys, et al., Anim. Genet. 18:1-15 (1987); Hillel, et al., Anim. Genet. 20:145-155 (1989); Hillel, et al., Genet. 124:783-789 (1990), all of which are herein incorporated by reference in their entirety).

[0130] The detection of polymorphic sites in a sample of DNA may be facilitated through the use of nucleic acid amplification methods. Such methods specifically increase the concentration of polynucleotides that span the polymorphic site, or include that site and sequences located either distal or proximal to it. Such amplified molecules can be readily detected by gel electrophoresis or other means.

[0131] The most preferred method of achieving such amplification employs the polymerase chain reaction (“PCR”) (Mullis, et al., Cold Spring Harbor Symp. Quant. Biol. 51:263-273 (1986); Erlich, et al., European Patent Appln. 50,424; European Patent Appln. 84,796, European Patent Application 258,017, European Patent Appln. 237,362; Mullis, European Patent Appln. 201,184; Mullis, et al., U.S. Pat. No. 4,683,202; Erlich., U.S. Pat. No. 4,582,788; and Saiki, et al., U.S. Pat. No. 4,683,194, all of which are herein incorporated by reference), using primer pairs that are capable of hybridizing to the proximal sequences that define a polymorphism in its double-stranded form.

[0132] In lieu of PCR, alternative methods, such as the “Ligase Chain Reaction” (“LCR”) may be used (Barany, Proc. Natl. Acad. Sci. (U.S.A.) 88:189-193 (1991), the entirety of which is herein incorporated by reference). LCR uses two pairs of oligonucleotide probes to exponentially amplify a specific target. The sequences of each pair of oligonucleotides is selected to permit the pair to hybridize to abutting sequences of the same strand of the target. Such hybridization forms a substrate for a template-dependent ligase. As with PCR, the resulting products thus serve as a template in subsequent cycles and an exponential amplification of the desired sequence is obtained.

[0133] LCR can be performed with oligonucleotides having the proximal and distal sequences of the same strand of a polymorphic site. In one embodiment, either oligonucleotide will be designed to include the actual polymorphic site of the polymorphism. In such an embodiment, the reaction conditions are selected such that the oligonucleotides can be ligated together only if the target molecule either contains or lacks the specific nucleotide that is complementary to the polymorphic site present on the oligonucleotide. Alternatively, the oligonucleotides may be selected such that they do not include the polymorphic site (see, Segev, PCT Application WO 90/01069, the entirety of which is herein incorporated by reference).

[0134] The “Oligonucleotide Ligation Assay” (“OLA”) may alternatively be employed (Landegren, et al., Science 241: 1077-1080 (1988), the entirety of which is herein incorporated by reference). The OLA protocol uses two oligonucleotides which are designed to be capable of hybridizing to abutting sequences of a single strand of a target. OLA, like LCR, is particularly suited for the detection of point mutations. Unlike LCR, however, OLA results in “linear” rather than exponential amplification of the target sequence.

[0135] Nickerson, et al. have described a nucleic acid detection assay that combines attributes of PCR and OLA (Nickerson, et al, Proc. Natl. Acad. Sci. (U.S.A.) 87:8923-8927 (1990), the entirety of which is herein incorporated by reference). In this method, PCR is used to achieve the exponential amplification of target DNA, which is then detected using OLA. In addition to requiring multiple, and separate, processing steps, one problem associated with such combinations is that they inherit all of the problems associated with PCR and OLA.

[0136] Schemes based on ligation of two (or more) oligonucleotides in the presence of nucleic acid having the sequence of the resulting “di-oligonucleotide”, thereby amplifying the di-oligonucleotide, are also known (Wu, et al., Genomics 4:560 (1989), the entirety of which is herein incorporated by reference), and may be readily adapted to the purposes of the present invention.

[0137] Other known nucleic acid amplification procedures, such as allele-specific oligomers, branched DNA technology, transcription-based amplification systems, or isothermal amplification methods may also be used to amplify and analyze such polymorphisms (Malek, et al., U.S. Pat. No. 5,130,238; Davey, et al., European Patent Application 329,822; Schuster et al., U.S. Pat. No. 5,169,766; Miller, et al., PCT Application WO 89/06700; Kwoh, et al., Proc. Natl. Acad. Sci. (U.S.A.) 86:1173-1177 (1989); Gingeras, et al., PCT Application WO 88/10315; Walker, et al., Proc. Natl. Acad. Sci. (U.S.A.) 89:392-396 (1992), all of which are herein incorporated by reference in their entirety).

[0138] The identification of a polymorphism can be determined in a variety of ways. By correlating the presence or absence of it in a plant with the presence or absence of a phenotype, it is possible to predict the phenotype of that plant. If a polymorphism creates or destroys a restriction endonuclease cleavage site, or if it results in the loss or insertion of DNA (e.g., a VNTR polymorphism), it will alter the size or profile of the DNA fragments that are generated by digestion with that restriction endonuclease. As such, individuals that possess a variant sequence can be distinguished from those having the original sequence by restriction fragment analysis. Polymorphisms that can be identified in this manner are termed “restriction fragment length polymorphisms” (“RFLPs”). RFLPs have been widely used in human and plant genetic analyses (Glassberg, UK Patent Application 2135774; Skolnick, et al., Cytogen. Cell Genet. 32:58-67 (1982); Botstein, et al., Ann. J. Hum. Genet. 32:314-331 (1980); Fischer, et al. (PCT Application WO90/13668); Uhlen, PCT Application WO90/11369).

[0139] Polymorphisms can also be identified by Single Strand Conformation Polymorphism (SSCP) analysis. The SSCP technique is a method capable of identifying most sequence variations in a single strand of DNA, typically between 150 and 250 nucleotides in length (Elles, Methods in Molecular Medicine: Molecular Diagnosis of Genetic Diseases, Humana Press (1996), the entirety of which is herein incorporated by reference); Orita et al., Genomics 5: 874-879 (1989), the entirety of which is herein incorporated by reference). Under denaturing conditions a single strand of DNA will adopt a conformation that is uniquely dependent on its sequence conformation. This conformation usually will be different, even if only a single base is changed. Most conformations have been reported to alter the physical configuration or size sufficiently to be detectable by electrophoresis. A number of protocols have been described for SSCP including, but not limited to Lee et al., Anal. Biochem. 205: 289-293 (1992), the entirety of which is herein incorporated by reference; Suzuki et al., Anal. Biochem. 192: 82-84 (1991), the entirety of which is herein incorporated by reference; Lo et al., Nucleic Acids Research 20: 1005-1009 (1992), the entirety of which is herein incorporated by reference; Sarkar et al., Genomics 13: 441-443 (1992), the entirety of which is herein incorporated by reference). It is understood that one or more of the nucleic acids of the present invention, may be utilized as markers or probes to detect polymorphisms by SSCP analysis.

[0140] Polymorphisms may also be found using a DNA fingerprinting technique called amplified fragment length polymorphism (AFLP), which is based on the selective PCR amplification of restriction fragments from a total digest of genomic DNA to profile that DNA. Vos, et al., Nucleic Acids Res. 23:4407-4414 (1995), the entirety of which is herein incorporated by reference. This method allows for the specific co-amplification of high numbers of restriction fragments, which can be visualized by PCR without knowledge of the nucleic acid sequence.

[0141] AFLP employs basically three steps. Initially, a sample of genomic DNA is cut with restriction enzymes and oligonucleotide adapters are ligated to the restriction fragments of the DNA. The restriction fragments are then amplified using PCR by using the adapter and restriction sequence as target sites for primer annealing. The selective amplification is achieved by the use of primers that extend into the restriction fragments, amplifying only those fragments in which the primer extensions match the nucleotide flanking the restriction sites. These amplified fragments are then visualized on a denaturing polyacrylamide gel.

[0142] AFLP analysis has been performed on Salix (Beismann, et al., Mol. Ecol. 6:989-993 (1997), the entirety of which is herein incorporated by reference); Acinetobacter (Janssen, et al., Int. J. Syst. Bacteriol 47:1179-1187 (1997), the entirety of which is herein incorporated by reference), Aeromonas popoffi (Huys, et al., Int. J. Syst. Bacteriol. 47:1165-1171 (1997), the entirety of which is herein incorporated by reference), rice (McCouch, et al., Plant Mol. Biol. 35:89-99 (1997), the entirety of which is herein incorporated by reference); Nandi, et al., Mol. Gen. Genet. 255:1-8 (1997); Cho, et al., Genome 39:373-378 (1996), herein incorporated by reference), barley (Hordeum vulgare) (Simons, et al., Genomics 44:61-70 (1997), the entirety of which is herein incorporated by reference; Waugh, et al., Mol. Gen. Genet. 255:311-321 (1997), the entirety of which is herein incorporated by reference; Qi, et al., Mol. Gen. Genet. 254:330-336 (1997), the entirety of which is herein incorporated by reference; Becker, et al., Mol. Gen. Genet. 249:65-73 (1995), the entirety of which is herein incorporated by reference), potato (Van der Voort, et al., Mol. Gen. Genet. 255:438-447 (1997), the entirety of which is herein incorporated by reference; Meksem, et al., Mol. Gen. Genet. 249:74-81 (1995), the entirety of which is herein incorporated by reference), Phytophthora infestans (Van der Lee, et al., Fungal Genet. Biol. 21:278-291 (1997), the entirety of which is herein incorporated by reference), Bacillus anthracis (Keim, et al., J. Bacteriol. 179:818-824 (1997)), Astragalus cremnophylax (Travis, et al., Mol. Ecol. 5:735-745 (1996), the entirety of which is herein incorporated by reference), Arabidopsis (Cnops, et al., Mol. Gen. Genet. 253:32-41 (1996), the entirety of which is herein incorporated by reference), Escherichia coli (Lin, et al., Nucleic Acids Res. 24:3649-3650 (1996), the entirety of which is herein incorporated by reference), Aeromonas (Huys, et al., Int. J. Syst. Bacteriol. 46:572-580 (1996), the entirety of which is herein incorporated by reference), nematode (Folkertsma, et al., Mol. Plant. Microbe Interact. 9:47-54 (1996), the entirety of which is herein incorporated by reference), tomato (Thomas, et al., Plant J. 8:785-794 (1995), the entirety of which is herein incorporated by reference), and human (Latorra, et al., PCR Methods Appl. 3:351-358 (1994)). AFLP analysis has also been used for fingerprinting mRNA (Money, et al., Nucleic Acids Res. 24:2616-2617 (1996), the entirety of which is herein incorporated by reference; Bachem, et al., Plant J. 9:745-753 (1996), the entirety of which is herein incorporated by reference). It is understood that one or more of the nucleic acids of the present invention, may be utilized as markers or probes to detect polymorphisms by AFLP analysis for fingerprinting mRNA.

[0143] Polymorphisms may also be found using random amplified polymorphic DNA (RAPD) (Williams et al., Nuc. Acids Res. 18: 6531-6535 (1990), the entirety of which is herein incorporated by reference) and cleaveable amplified polymorphic sequences (CAPS) (Lyamichev et al., Science 260: 778-783 (1993), the entirety of which is herein incorporated by reference). It is understood that one or more of the nucleic acids of the present invention, may be utilized as markers or probes to detect polymorphisms by RAPD or CAPS analysis.

[0144] Polymorphisms are useful, through linkage analysis, to define the genetic distances or physical distances between polymorphic traits. A physical map or ordered array of genomic DNA fragments in the desired region containing the gene may be used to characterize and isolate genes corresponding to desirable traits. For this purpose, yeast artificial chromosomes (YACs), bacterial artificial chromosomes (BACs), and cosmids are appropriate vectors for cloning large segments of DNA molecules. Although fewer clones are needed to make a contig for a specific genomic region by using YACs (Agyare et al., Genome Res. 7: 1-9 (1997), the entirety of which is herein incorporated by reference; James et al., Genomics 32: 425-430 (1996), the entirety of which is herein incorporated by reference), chimerism in the inserted DNA fragment can arise. Cosmids are convenient for handling smaller-size DNA molecules and may be used for transformation in developing transgenic plants. BACs also carry DNA fragments and are less prone to chimerism.

[0145] Through genetic mapping, a fine scale linkage map can be developed using DNA markers and, then, a genomic DNA library of large-sized fragments can be screened with molecular markers linked to the desired trait. Molecular markers are advantageous for agronomic traits that are otherwise difficult to tag, such as resistance to pathogens, insects and nematodes, tolerance to abiotic stress, quality parameters and quantitative traits such as high yield potential.

[0146] The essential requirements for marker-assisted selection in a plant breeding program are: (1) the marker(s) should co-segregate or be closely linked with the desired trait; (2) an efficient means of screening large populations for the molecular marker(s) should be available; and (3) the screening technique should have high reproducibility across laboratories and preferably be economical to use and be user-friendly.

[0147] The genetic linkage of marker molecules can be established by a gene mapping model such as, without limitation, the flanking marker model reported by Lander and Botstein, Genetics 121:185-199 (1989) and the interval mapping, based on maximum likelihood methods described by Lander and Botstein, Genetics 121:185-199 (1989) and implemented in the software package MAPMAKER/QTL (Lincoln and Lander, Mapping Genes Controlling Quantitative Traits Using AMPMAKER/QTL, Whitehead Institute for Biomedical Research, Massachusetts, (1990). Additional software includes Qgene, Version 2.23 (1996), Department of Plant Breeding and Biometry, 266 Emerson Hall, Cornell University, Ithaca, N.Y., the manual of which is herein incorporated by reference in its entirety). Use of Qgene software is a particularly preferred approach.

[0148] A maximum likelihood estimate (MLE) for the presence of a marker is calculated, together with an MLE assuming no QTL effect, to avoid false positives. A log₁₀ of an odds ratio (LOD) is then calculated as: LOD=log₁₀ (MLE for the presence of a QTL/MLE given no linked QTL).

[0149] The LOD score essentially indicates how much more likely the data are to have arisen assuming the presence of a QTL than in its absence. The LOD threshold value for avoiding a false positive with a given confidence, say 95%, depends on the number of markers and the length of the genome. Graphs indicating LOD thresholds are set forth in Lander and Botstein, Genetics 121:185-199 (1989) the entirety of which is herein incorporated by reference and further described by Arús and Moreno-González, Plant Breeding, Hayward et al., (eds.) Chapman & Hall, London, pp. 314-331 (1993), the entirety of which is herein incorporated by reference.

[0150] Additional models can be used. Many modifications and alternative approaches to interval mapping have been reported, including the use of non-parametric methods (Kruglyak and Lander, Genetics 139:1421-1428 (1995), the entirety of which is herein incorporated by reference). Multiple regression methods or models can be also be used, in which the trait is regressed on a large number of markers (Jansen, Biometrics in Plant Breeding, van Oijen and Jansen (eds.), Proceedings of the Ninth Meeting of the Eucarpia Section Biometrics in Plant Breeding, The Netherlands, pp. 116-124 (1994); Weber and Wricke, Advances in Plant Breeding, Blackwell, Berlin, 16 (1994), both of which is herein incorporated by reference in their entirety). Procedures combining interval mapping with regression analysis, whereby the phenotype is regressed onto a single putative QTL at a given marker interval and at the same time onto a number of markers that serve as ‘cofactors,’ have been reported by Jansen and Stam, Genetics 136:1447-1455 (1994), the entirety of which is herein incorporated by reference and Zeng, Genetics 136:1457-1468 (1994) the entirety of which is herein incorporated by reference. Generally, the use of cofactors reduces the bias and sampling error of the estimated QTL positions (Utz and Melchinger, Biometrics in Plant Breeding, van Oijen and Jansen (eds.) Proceedings of the Ninth Meeting of the Eucarpia Section Biometrics in Plant Breeding, The Netherlands, pp. 195-204 (1994), the entirety of which is herein incorporated by reference, thereby improving the precision and efficiency of QTL mapping (Zeng, Genetics 136:1457-1468 (1994)). These models can be extended to multi-environment experiments to analyze genotype-environment interactions (Jansen et al., Theo. Appl. Genet. 91:33-37 (1995), the entirety of which is herein incorporated by reference).

[0151] Selection of an appropriate mapping population is important to map construction. The choice of an appropriate mapping population depends on the type of marker systems employed (Tanksley et al., Molecular mapping plant chromosomes. Chromosome structure and function: Impact of new concepts, Gustafson and Appels (eds.), Plenum Press, New York, pp 157-173 (1988), the entirety of which is herein incorporated by reference). Consideration must be given to the source of parents (adapted vs. exotic) used in the mapping population. Chromosome pairing and recombination rates can be severely disturbed (suppressed) in wide crosses (adapted×exotic) and generally yield greatly reduced linkage distances. Wide crosses will usually provide segregating populations with a relatively large array of polymorphisms when compared to progeny in a narrow cross (adapted×adapted).

[0152] An F₂ population is the first generation of selfing after the hybrid seed is produced. Usually a single F₁ plant is selfed to generate a population segregating for all the genes in Mendelian (1:2:1) fashion. Maximum genetic information is obtained from a completely classified F₂ population using a codominant marker system (Mather, Measurement of Linkage in Heredity, Methuen and Co., (1938), the entirety of which is herein incorporated by reference). In the case of dominant markers, progeny tests (e.g. F₃, BCF₂) are required to identify the heterozygotes, thus making it equivalent to a completely classified F₂ population. However, this procedure is often prohibitive because of the cost and time involved in progeny testing. Progeny testing of F₂ individuals is often used in map construction where phenotypes do not consistently reflect genotype (e.g. disease resistance) or where trait expression is controlled by a QTL. Segregation data from progeny test populations (e.g. F₃ or BCF₂) can be used in map construction. Marker-assisted selection can then be applied to cross progeny based on marker-trait map associations (F₂, F₃), where linkage groups have not been completely disassociated by recombination events (i.e., maximum disequillibrium).

[0153] Recombinant inbred lines (RIL) (genetically related lines; usually >F₅, developed from continuously selfing F₂ lines towards homozygosity) can be used as a mapping population. Information obtained from dominant markers can be maximized by using RIL because all loci are homozygous or nearly so. Under conditions of tight linkage (i.e., about <10% recombination), dominant and co-dominant markers evaluated in RIL populations provide more information per individual than either marker type in backcross populations (Reiter et al., Proc. Natl. Acad. Sci. (U.S.A.) 89:1477-1481 (1992), the entirety of which is herein incorporated by reference). However, as the distance between markers becomes larger (i.e., loci become more independent), the information in RIL populations decreases dramatically when compared to codominant markers.

[0154] Backcross populations (e.g., generated from a cross between a successful variety (recurrent parent) and another variety (donor parent) carrying a trait not present in the former) can be utilized as a mapping population. A series of backcrosses to the recurrent parent can be made to recover most of its desirable traits. Thus a population is created consisting of individuals nearly like the recurrent parent but each individual carries varying amounts or mosaic of genomic regions from the donor parent. Backcross populations can be useful for mapping dominant markers if all loci in the recurrent parent are homozygous and the donor and recurrent parent have contrasting polymorphic marker alleles (Reiter et al., Proc. Natl. Acad. Sci. (U.S.A.) 89:1477-1481 (1992)). Information obtained from backcross populations using either codominant or dominant markers is less than that obtained from F₂ populations because one, rather than two, recombinant gametes are sampled per plant. Backcross populations, however, are more informative (at low marker saturation) when compared to RILs as the distance between linked loci increases in RIL populations (i.e. about 15% recombination). Increased recombination can be beneficial for resolution of tight linkages, but may be undesirable in the construction of maps with low marker saturation.

[0155] Near-isogenic lines (NIL) created by many backcrosses to produce an array of individuals that are nearly identical in genetic composition except for the trait or genomic region under interrogation can be used as a mapping population. In mapping with NILs, only a portion of the polymorphic loci are expected to map to a selected region.

[0156] Bulk segregant analysis (BSA) is a method developed for the rapid identification of linkage between markers and traits of interest (Michelmore et al., Proc. Natl. Acad. Sci. (U.S.A.) 88:9828-9832 (1991), the entirety of which is herein incorporated by reference). In BSA, two bulked DNA samples are drawn from a segregating population originating from a single cross. These bulks contain individuals that are identical for a particular trait (resistant or susceptible to particular disease) or genomic region but arbitrary at unlinked regions (i.e. heterozygous). Regions unlinked to the target region will not differ between the bulked samples of many individuals in BSA.

[0157] It is understood that one or more of the nucleic acid molecules of the present invention may be used as molecular markers. It is also understood that one or more of the protein molecules of the present invention may be used as molecular markers.

[0158] In accordance with this aspect of the present invention, a sample nucleic acid is obtained from plants cells or tissues. Any source of nucleic acid may be used. Preferably, the nucleic acid is genomic DNA. The nucleic acid is subjected to restriction endonuclease digestion. For example, one or more EST nucleic acid molecule or fragment thereof can be used as a probe in accordance with the above-described polymorphic methods. The polymorphism obtained in this approach can then be cloned to identify the mutation at the coding region which alters the protein's structure or regulatory region of the gene which affects its expression level.

[0159] In one aspect of the present invention, an evaluation can be conducted to determine whether a particular mRNA molecule is present. One or more of the nucleic acid molecules of the present invention, preferably one or more of the EST nucleic acid molecules of the present invention are utilized to detect the presence or quantity of the mRNA species. Such molecules are then incubated with cell or tissue extracts of a plant under conditions sufficient to permit nucleic acid hybridization. The detection of double-stranded probe-mRNA hybrid molecules is indicative of the presence of the mRNA; the amount of such hybrid formed is proportional to the amount of mRNA. Thus, such probes may be used to ascertain the level and extent of the mRNA production in a plant's cells or tissues. Such nucleic acid hybridization may be conducted under quantitative conditions (thereby providing a numerical value of the amount of the mRNA present). Alternatively, the assay may be conducted as a qualitative assay that indicates either that the mRNA is present, or that its level exceeds a user set, predefined value.

[0160] A principle of in situ hybridization is that a labeled, single-stranded nucleic acid probe will hybridize to a complementary strand of cellular DNA or RNA and, under the appropriate conditions, these molecules will form a stable hybrid. When nucleic acid hybridization is combined with histological techniques, specific DNA or RNA sequences can be identified within a single cell. An advantage of in situ hybridization over more conventional techniques for the detection of nucleic acids is that it allows an investigator to determine the precise spatial population (Angerer et al., Dev. Biol. 101: 477-484 (1984), the entirety of which is herein incorporated by reference; Angerer et al., Dev. Biol. 112: 157-166 (1985), the entirety of which is herein incorporated by reference; Dixon et al., EMBO J. 10: 1317-1324 (1991), the entirety of which is herein incorporated by reference). In situ hybridization may be used to measure the steady-state level of RNA accumulation. It is a sensitive technique and RNA sequences present in as few as 5-10 copies per cell can be detected (Hardin et al., J. Mol. Biol. 202: 417-431 (1989), the entirety of which is herein incorporated by reference). A number of protocols have been devised for in situ hybridization, each with tissue preparation, hybridization, and washing conditions (Meyerowitz, Plant Mol. Biol. Rep. 5: 242-250 (1987), the entirety of which is herein incorporated by reference; Cox and Goldberg, In: Plant Molecular Biology: A Practical Approach (ed. C. H. Shaw), pp. 1-35. IRL Press, Oxford (1988), the entirety of which is herein incorporated by reference; Raikhel et al., In situ RNA hybridization in plant tissues. In Plant Molecular Biology Manual, vol. B9: 1-32. Kluwer Academic Publisher, Dordrecht, Belgium (1989), the entirety of which is herein incorporated by reference).

[0161] In situ hybridization also allows for the localization of proteins within a tissue or cell (Wilkinson, In Situ Hybridization, Oxford University Press, Oxford (1992), the entirety of which is herein incorporated by reference; Langdale, In Situ Hybridization 165-179 In: The Maize Handbook, eds. Freeling and Walbot, Springer-Verlag, New York (1994), the entirety of which is herein incorporated by reference). It is understood that one or more of the molecules of the present invention, preferably one or more of the EST nucleic acid molecules of the present invention or one or more of the antibodies of the present invention may be utilized to detect the level or pattern of a protein or fragment thereof by in situ hybridization.

[0162] Fluorescent in situ hybridization also enables the localization of a particular DNA sequence along a chromosome which is useful, among other uses, for gene mapping, following chromosomes in hybrid lines or detecting chromosomes with translocations, transversions or deletions. In situ hybridization has been used to identify chromosomes in several plant species (Griffor et al., Plant Mol. Biol. 17: 101-109 (1991), the entirety of which is herein incorporated by reference; Gustafson et al., Proc. Nat'l. Acad. Sci. (U.S.A). 87: 1899-1902 (1990), herein incorporated by reference; Mukai and Gill, Genome 34: 448-452. (1991); Schwarzacher and Heslop-Harrison, Genome 34: 317-323 (1991); Wang et al., Jpn. J. Genet. 66: 313-316 (1991), the entirety of which is herein incorporated by reference; Parra and Windle, Nature Genetics, 5: 17-21 (1993), the entirety of which is herein incorporated by reference). It is understood that the nucleic acid molecules of the present invention may be used as probes or markers to localize sequences along a chromosome.

[0163] It is also understood that one or more of the molecules of the present invention, preferably one or more of the EST nucleic acid molecules of the present invention or one or more of the antibodies of the present invention may be utilized to detect the expression level or pattern of a protein or mRNA thereof by in situ hybridization.

[0164] Another method to localize the expression of a molecule is tissue printing. Tissue printing provides a way to screen, at the same time on the same membrane many tissue sections from different plants or different developmental stages. Tissue-printing procedures utilize films designed to immobilize proteins and nucleic acids. In essence, a freshly cut section of an organ is pressed gently onto nitrocellulose paper, nylon membrane or polyvinylidene difluoride membrane. Such membranes are commercially available (e.g. Millipore, Bedford, Mass.). The contents of the cut cell transfer onto the membrane, and the molecules are immobilized to the membrane. The immobilized molecules form a latent print that can be visualized with appropriate probes. When a plant tissue print is made on nitrocellulose paper, the cell walls leave a physical print that makes the anatomy visible without further treatment (Varner and Taylor, Plant Physiol. 91: 31-33 (1989), the entirety of which is herein incorporated by reference).

[0165] Tissue printing on substrate films is described by Daoust, Exp. Cell Res. 12: 203-211 (1957), the entirety of which is herein incorporated by reference, who detected amylase, protease, ribonuclease, and deoxyribonuclease in animal tissues using starch, gelatin, and agar films. These techniques can be applied to plant tissues (Yomo and Taylor, Planta 112:35-43 (1973); Harris and Chrispeels, Plant Physiol. 56: 292-299 (1975). Advances in membrane technology have increased the range of applications of Daoust's tissue-printing techniques allowing (Cassab and Varner, J. Cell. Biol. 105: 2581-2588 (1987), the entirety of which is herein incorporated by reference; the histochemical localization of various plant enzymes and deoxyribonuclease on nitrocellulose paper and nylon (Spruce et al., Phytochemistry, 26: 2901-2903 (1987), the entirety of which is herein incorporated by reference; Barres et al. Neuron 5: 527-544 (1990), the entirety of which is herein incorporated by reference; the entirety of which is herein incorporated by reference; Reid and Pont-Lezica, Tissue Printing: Tools for the Study of Anatomy, Histochemistry, and Gene Expression, Academic Press, New York, N.Y. (1992), the entirety of which is herein incorporated by reference; Reid et al. Plant Physiol. 93: 160-165 (1990), herein incorporate by reference; Ye et al. Plant J. 1: 175-183 (1991), the entirety of which is herein incorporated by reference).

[0166] It is understood that one or more of the molecules of the present invention, preferably one or more of the EST nucleic acid molecules of the present invention or one or more of the antibodies of the present invention may be utilized to detect the presence or quantity of a protein by tissue printing.

[0167] Further, it is also understood that any of the nucleic acid molecules of the present invention may be used as marker nucleic acids and or probes in connection with methods that require probes or marker nucleic acids. As used herein, a probe is an agent that is utilized to determine an attribute or feature (e.g. presence or absence, location, correlation, etc.) or a molecule, cell, tissue or plant. As used herein, a marker nucleic acid is a nucleic acid molecule that is utilized to determine an attribute or feature (e.g., presence or absence, location, correlation, etc.) or a molecule, cell, tissue or plant.

[0168] A microarray-based method for high-throughput monitoring of plant gene expression may be utilized to measure gene-specific hybridization targets. This ‘chip’-based approach involves using microarrays of nucleic acid molecules as gene-specific hybridization targets to quantitatively measure expression of the corresponding plant genes (Schena et al., Science 270: 467-470 (1995), the entirety of which is herein incorporated by reference; Shalon, Ph.D. Thesis. Stanford University (1996), the entirety of which is herein incorporated by reference). Every nucleotide in a large sequence can be queried at the same time. Hybridization can be used to efficiently analyze large amounts of nucleotide sequence.

[0169] Several microarray methods have been described. One method compares the sequences to be analyzed by hybridization to a set of oligonucleotides representing all possible subsequences (Bains and Smith, J. Theor. Biol. 135: 303 (1989), the entirety of which is herein incorporated by reference). A second method hybridizes the sample to an array of oligonucleotide probes. An array consisting of oligonucleotides complementary to subsequences of a target sequence can be used to determine the identity of a target sequence, measure its amount, and detect differences between the target and a reference sequence. Nucleic acid molecules microarrays may also be screened with protein molecules or fragments thereof to determine nucleic acid molecules that specifically bind protein molecules or fragments thereof.

[0170] The microarray approach may be used with polypeptide targets (U.S. Pat. No. 5,445,934; U.S. Pat. No. 5,143,854; U.S. Pat. No. 5,079,600; U.S. Pat. No. 4,923,901, all of which are herein incorporated by reference in their entirety). Essentially, polypeptides are synthesized on a substrate (microarray) and these polypeptides can be screened with either protein molecules or fragments thereof or nucleic acid molecules in order to screen for either protein molecules or fragments thereof or nucleic acid molecules that specifically bind the target polypeptides. Implementation of these techniques rely on recently developed combinatorial technologies to generate any ordered array of a large number of oligonucleotide probes (Fodor et al., Science 251:767-773 (1991), the entirety of which is herein incorporated by reference).

[0171] It is understood that one or more of the molecules of the present invention, preferably one or more of the nucleic acid molecules or protein molecules or fragments thereof of the present invention may be utilized in a microarray based method.

[0172] In a preferred embodiment of the present invention microarrays may be prepared that comprise nucleic acid molecules where preferably at least 10%, preferably at least 25%, more preferably at least 50% and even more preferably at least 75%, 80%, 85%, 90% or 95% of the nucleic acid molecules located on that array are selected from the group of nucleic acid molecules that specifically hybridize to one or more nucleic acid molecule having a nucleic acid sequence selected from the group of SEQ ID NO: 1 through SEQ ID NO: 18831 or complement thereof or fragments of either.

[0173] A particular preferred microarray embodiment of the present invention is a microarray comprising nucleic acid molecules encoding genes or fragments thereof that are homologues of known genes or nucleic acid molecules that comprise genes or fragment thereof that elicit only limited or no matches to known genes. A further preferred microarray embodiment of the present invention is a microarray comprising nucleic acid molecules having genes or fragments thereof that are homologues of known genes and nucleic acid molecules that comprise genes or fragment thereof that elicit only limited or no matches to known genes. Site-directed mutagenesis may be utilized to modify nucleic acid sequences, particularly as it is a technique that allows one or more of the amino acids encoded by a nucleic acid molecule to be altered (e.g. a threonine to be replaced by a methionine). Three basic methods for site-directed mutagenesis are often employed. These are cassette mutagenesis (Wells et al., Gene 34:315-23 (1985), the entirety of which is herein incorporated by reference), primer extension (Gilliam et al., Gene 12:129-137 (1980), the entirety of which is herein incorporated by reference); Zoller and Smith, Methods Enzymol. 100:468-500 (1983), the entirety of which is herein incorporated by reference; and Dalbadie-McFarland et al., Proc. Natl. Acad. Sci. (U.S.A.) 79:6409-6413 (1982), the entirety of which is herein incorporated by reference) and methods based upon PCR (Scharf et al., Science 233:1076-1078 (1986), the entirety of which is herein incorporated by reference; Higuchi et al., Nucleic Acids Res. 16:7351-7367 (1988), the entirety of which is herein incorporated by reference). Site-directed mutagenesis approaches are also described in European Patent 0 385 962, the entirety of which is herein incorporated by reference, European Patent 0 359 472, the entirety of which is herein incorporated by reference, and PCT Patent Application WO 93/07278, the entirety of which is herein incorporated by reference.

[0174] Site-directed mutagenesis strategies have been applied to plants for both in vitro as well as in vivo site-directed mutagenesis (Lanz et al., J. Biol. Chem. 266:9971-6 (1991), the entirety of which is herein incorporated by reference; Kovgan and Zhdanov, Biotekhnologiya 5:148-154; No. 207160n, Chemical Abstracts 110:225 (1989), the entirety of which is herein incorporated by reference; Ge et al., Proc. Natl. Acad. Sci. (U.S.A.) 86:4037-4041 (1989), the entirety of which is herein incorporated by reference, Zhu et al., J. Biol. Chem. 271:18494-18498 (1996), Chu et al., Biochemistry 33:6150-6157 (1994), the entirety of which is herein incorporated by reference, Small et al., EMBO J. 11:1291-1296 (1992), the entirety of which is herein incorporated by reference, Cho et al., Mol. Biotechnol. 8:13-16 (1997), Kita et al., J. Biol. Chem. 271:26529-26535 (1996), the entirety of which is herein incorporated by reference, Jin et al., Mol. Microbiol. 7:555-562 (1993), the entirety of which is herein incorporated by reference, Hatfield and Vierstra, J. Biol. Chem. 267:14799-14803 (1992), the entirety of which is herein incorporated by reference, Zhao et al., Biochemistry 31:5093-5099 (1992), the entirety of which is herein incorporated by reference).

[0175] Any of the nucleic acid molecules of the present invention may either be modified by site-directed mutagenesis or used as, for example, nucleic acid molecules that are used to target other nucleic acid molecules for modification. It is understood that mutants with more than one altered nucleotide can be constructed using techniques that practitioners skilled in the art are familiar with such as isolating restriction fragments and ligating such fragments into an expression vector (see, for example, Sambrook et al., Molecular Cloning: A Laboratory Manual, Cold Spring Harbor Press (1989)).

[0176] Sequence-specific DNA-binding proteins play a role in the regulation of transcription. The isolation of recombinant cDNAs encoding these proteins facilitates the biochemical analysis of their structural and functional properties. Genes encoding such DNA-binding proteins have been isolated using classical genetics (Vollbrecht et al., Nature 350: 241-243 (1991), the entirety of which is herein incorporated by reference) and molecular biochemical approaches, including the screening of recombinant cDNA libraries with antibodies (Landschulz et al., Genes Dev. 2: 786-800 (1988), the entirety of which is herein incorporated by reference) or DNA probes (Bodner et al., Cell 55: 505-518 (1988), the entirety of which is herein incorporated by reference). In addition, an in situ screening procedure has been used and has facilitated the isolation of sequence-specific DNA-binding proteins from various plant species (Gilmartin et al., Plant Cell 4: 839-849 (1992), the entirety of which is herein incorporated by reference; Schindler et al., EMBO J. 11: 1261-1273 (1992) the entirety of which is herein incorporated by reference). An in situ screening protocol does not require the purification of the protein of interest (Vinson et al., Genes Dev. 2: 801-806 (1988), the entirety of which is herein incorporated by reference; Singh et al., Cell 52: 415-423 (1988), the entirety of which is herein incorporated by reference).

[0177] Steps may be employed to characterize DNA-protein interactions. The first is to identify promoter fragments that interact with DNA-binding proteins, to titrate binding activity, to determine the specificity of binding, and to determine whether a given DNA-binding activity can interact with related DNA sequences (Sambrook et al., Molecular Cloning: A Laboratory Manual, 2^{nd} edition. Cold Spring Harbor Laboratory Press, Cold Spring Harbor, N.Y. (1989). Electrophoretic mobility-shift assay is a widely used assay. The assay provides a simple, rapid, and sensitive method for detecting DNA-binding proteins based on the observation that the mobility of a DNA fragment through a nondenaturing, low-ionic strength polyacrylamide gel is retarded upon association with a DNA-binding protein (Fried and Crother, Nucleic Acids Res. 9: 6505-6525 (1981), the entirety of which is herein incorporated by reference). When one or more specific binding activities have been identified, the exact sequence of the DNA bound by the protein may be determined. Several procedures for characterizing protein/DNA-binding sites are used, including methylation and ethylation interference assays (Maxam and Gilbert, Methods Enzymol. 65: 499-560 (1980), the entirety of which is herein incorporated by reference; Wissman and Hillen, Methods Enzymol. 208: 365-379 (1991), the entirety of which is herein incorporated by reference) and footprinting techniques employing DNase I (Galas and Schmitz, Nucleic Acids Res. 5: 3157-3170 (1978), the entirety of which is herein incorporated by reference), 1,10-phenanthroline-copper ion methods (Sigman et al., Methods Enzymol. 208: 365-379 (1991), the entirety of which is herein incorporated by reference) or hydroxyl radical methods (Dixon et al., Methods Enzymol. 208: 380-413 (1991), the entirety of which is herein incorporated by reference). It is understood that one or more of the nucleic acid molecules of the present invention, preferably one or more of the EST nucleic acid molecules of the present invention may be utilized to identify a protein or fragment thereof that specifically binds to a nucleic acid molecule of the present invention. It is also understood that one or more of the protein molecules or fragments thereof of the present invention may be utilized to identify a nucleic acid molecule that specifically binds to it.

[0178] The two-hybrid system is based on the fact that many cellular functions are carried out by proteins that interact (physically) with one another. Two-hybrid systems have been used to probe the function of new proteins (Chien et al., Proc. Natl. Acad. Sci. (U.S.A.) 88: 9578-9582 (1991) the entirety of which is herein incorporated by reference; Durfee et al., Genes Dev. 7: 555-569 (1993) the entirety of which is herein incorporated by reference; Choi et al., Cell 78: 499-512 (1994), the entirety of which is herein incorporated by reference; Kranz et al., Genes Dev. 8: 313-327 (1994), the entirety of which is herein incorporated by reference).

[0179] Interaction mating techniques have facilitated a number of two-hybrid studies of protein-protein interaction. Interaction mating has been used to examine interactions between small sets of tens of proteins (Finley and Brent, Proc. Natl. Acad. Sci. (U.S.A.) 91: 12098-12984 (1994), the entirety of which is herein incorporated by reference), larger sets of hundreds of proteins, (Bendixen et al., Nucl. Acids Res. 22: 1778-1779 (1994), the entirety of which is herein incorporated by reference) and to comprehensively map proteins encoded by a small genome (Bartel et al., Nature Genetics 12: 72-77 (1996), the entirety of which is herein incorporated by reference). This technique utilizes proteins fused to the DNA-binding domain and proteins fused to the activation domain. They are expressed in two different haploid yeast strains of opposite mating type, and the strains are mated to determine if the two proteins interact. Mating occurs when haploid yeast strains come into contact and result in the fusion of the two haploids into a diploid yeast strain. An interaction can be determined by the activation of a two-hybrid reporter gene in the diploid strain. The primary advantage of this technique is that it reduces the number of yeast transformations needed to test individual interactions. It is understood that the protein-protein interactions of protein or fragments thereof of the present invention may be investigated using the two-hybrid system and that any of the nucleic acid molecules of the present invention that encode such proteins or fragments thereof may be used to transform yeast in the two-hybrid system.

[0180] Synechocystis 6803 is a photosynthetic Cyanobacterium capable of oxygenic photosynthesis as well as heterotrophic growth in the absence of light. The entire genome has been sequenced, and it is reported to have a circular genome size of 3.57 Mbp containing 3168 potential open reading frames. Open reading frames (ORFs) were identified based upon their homology to other reported ORFs and by using ORF identification computer programs. Sixteen hundred potential ORFs were assigned based on their homology to previously identified ORFs. Of these 1600 ORFs, 145 were identical to reported ORFs (Kaneko et al., DNA Research 3:109-36 (1996), herein incorporated by reference in its entirety).

[0181] Several prokaryote promoters have been used in Synechocystis to express heterologous genes including the tac, lac, and lambda phage promoters (Bryant (ed.), The Molecular Biology of Cyanobacteria, Kluwer Academic Publishers, (1994); Ferino and Chauvat, Gene 84:257-266 (1989), both of which are herein incorporated by reference in their entirety). Several bacterial origins of replication such as RSF1010 and ACYC are reported to replicate in Synechocystis (Mermet-Bouvier and Chauvat, Current Microbiology 28:145-148 (1994); Kuhlemeier et al., Mol. Gen. Genet. 184:249-254 (1981), both of which are herein incorporated by reference in their entirety).

[0182] Synechocystis has been used to study gene regulation by gene replacement through homologous recombination or by gene disruption using antibiotic resistance markers (Pakrasi et al., EMBO 7:325-332 (1988), herein incorporated by reference in its entirety). In such gene regulation studies, double reciprocal homologous regions of the host genome flanking the gene of interest recombine to stably integrate the gene of interest into the genome. The gene of interest can be expressed once that gene has been stably integrated into the genome. Biochemical analysis can be performed to study the effect of the replaced or deleted gene.

[0183] It is understood that the agents of the present invention may be employed in a Synechocystis system.

[0184] Exogenous genetic material may be transferred into a plant cell and the plant cell regenerated into a whole, fertile or sterile plant. Exogenous genetic material is any genetic material, whether naturally occurring or otherwise, from any source that is capable of being inserted into any organism. Such genetic material may be transferred into either monocotyledons and dicotyledons including but not limited to the crops, maize and soybean (See specifically, Chistou, Particle Bombardment for Genetic Engineering of Plants, pp 63-69 (maize), pp 50-60 (soybean), Biotechnology Intelligence Unit. Academic Press, San Diego, Calif. (1996), the entirety of which is herein incorporated by reference and generally Chistou, Particle Bombardment for Genetic Engineering of Plants, Biotechnology Intelligence Unit. Academic Press, San Diego, Calif. (1996), the entirety of which is herein incorporated by reference).

[0185] Transfer of a nucleic acid that encodes for a protein can result in overexpression of that protein in a transformed cell or transgenic plant. One or more of the proteins or fragments thereof encoded by nucleic acid molecules of the present invention may be overexpressed in a transformed cell or transformed plant. Such overexpression may be the result of transient or stable transfer of the exogenous material.

[0186] Exogenous genetic material may be transferred into a plant cell by the use of a DNA vector or construct designed for such a purpose. Design of such a vector is generally within the skill of the art (See, Plant Molecular Biology: A Laboratory Manual eds. Clark, Springer, New York (1997), the entirety of which is herein incorporated by reference).

[0187] A construct or vector may include a plant promoter to express the protein or protein fragment of choice. A number of promoters which are active in plant cells have been described in the literature. These include the nopaline synthase (NOS) promoter (Ebert et al., Proc. Natl. Acad. Sci. (U.S.A.) 84:5745-5749 (1987), the entirety of which is herein incorporated by reference), the octopine synthase (OCS) promoter (which are carried on tumor-inducing plasmids of Agrobacterium tumefaciens), the caulimovirus promoters such as the cauliflower mosaic virus (CaMV) 19S promoter (Lawton et al., Plant Mol. Biol. 9:315-324 (1987), the entirety of which is herein incorporated by reference) and the CAMV 35S promoter (Odell et al., Nature 313:810-812 (1985), the entirety of which is herein incorporated by reference), the figwort mosaic virus 35S-promoter, the light-inducible promoter from the small subunit of ribulose-1,5-bis-phosphate carboxylase (ssRUBISCO), the Adh promoter (Walker et al., Proc. Natl. Acad. Sci. (U.S.A.) 84:6624-6628 (1987), the entirety of which is herein incorporated by reference), the sucrose synthase promoter (Yang et al., Proc. Natl. Acad. Sci. (U.S.A.) 87:4144-4148 (1990), the entirety of which is herein incorporated by reference), the R gene complex promoter (Chandler et al., The Plant Cell 1:1175-1183 (1989), the entirety of which is herein incorporated by reference), and the chlorophyll a/b binding protein gene promoter, etc. These promoters have been used to create DNA constructs which have been expressed in plants; see, e.g., PCT publication WO 84/02913, herein incorporated by reference in its entirety.

[0188] Promoters which are known or are found to cause transcription of DNA in plant cells can be used in the present invention. Such promoters may be obtained from a variety of sources such as plants and plant viruses. It is preferred that the particular promoter selected should be capable of causing sufficient expression to result in the production of an effective amount of a protein to cause the desired phenotype. In addition to promoters which are known to cause transcription of DNA in plant cells, other promoters may be identified for use in the current invention by screening a plant cDNA library for genes which are selectively or preferably expressed in the target tissues or cells.

[0189] For the purpose of expression in source tissues of the plant, such as the leaf, seed, root or stem, it is preferred that the promoters utilized in the present invention have relatively high expression in these specific tissues. For this purpose, one may choose from a number of promoters for genes with tissue- or cell-specific or -enhanced expression. Examples of such promoters reported in the literature include the chloroplast glutamine synthetase GS2 promoter from pea (Edwards et al., Proc. Natl. Acad. Sci. (U.S.A.) 87:3459-3463 (1990), herein incorporated by reference in its entirety), the chloroplast fructose-1,6-biphosphatase (FBPase) promoter from wheat (Lloyd et al., Mol. Gen. Genet. 225:209-216 (1991), herein incorporated by reference in its entirety), the nuclear photosynthetic ST-LS1 promoter from potato (Stockhaus et al., EMBO J. 8:2445-2451 (1989), herein incorporated by reference in its entirety), the phenylalanine ammonia-lyase (PAL) promoter and the chalcone synthase (CHS) promoter from Arabidopsis thaliana. Also reported to be active in photosynthetically active tissues are the ribulose-1,5-bisphosphate carboxylase (RbcS) promoter from eastern larch (Larix laricina), the promoter for the cab gene, cab6, from pine (Yamamoto et al., Plant Cell Physiol. 35:773-778 (1994), herein incorporated by reference in its entirety), the promoter for the Cab-1 gene from wheat (Fejes et al., Plant Mol. Biol. 15:921-932 (1990), herein incorporated by reference in its entirety), the promoter for the CAB-1 gene from spinach (Lubberstedt et al., Plant Physiol. 104:997-1006 (1994), herein incorporated by reference in its entirety), the promoter for the cab1R gene from rice (Luan et al., Plant Cell. 4:971-981 (1992), the entirety of which is herein incorporated by reference), the pyruvate, orthophosphate dikinase (PPDK) promoter from maize (Matsuoka et al., Proc. Natl. Acad. Sci. (U.S.A.) 90: 9586-9590 (1993), herein incorporated by reference in its entirety), the promoter for the tobacco Lhcb1*2 gene (Cerdan et al., Plant Mol. Biol. 33: 245-255. (1997), herein incorporated by reference in its entirety), the Arabidopsis thaliana SUC2 sucrose-H+ symporter promoter (Truernit et al., Planta. 196: 564-570 (1995), herein incorporated by reference in its entirety), and the promoter for the thylacoid membrane proteins from spinach (psaD, psaF, psaE, PC, FNR, atpC, atpD, cab, rbcS). Other promoters for the chlorophyll a/b-binding proteins may also be utilized in the present invention, such as the promoters for LhcB gene and PsbP gene from white mustard (Sinapis alba; Kretsch et al., Plant Mol. Biol. 28: 219-229 (1995), the entirety of which is herein incorporated by reference).

[0190] For the purpose of expression in sink tissues of the plant, such as the tuber of the potato plant, the fruit of tomato, or the seed of maize, wheat, rice, and barley, it is preferred that the promoters utilized in the present invention have relatively high expression in these specific tissues. A number of promoters for genes with tuber-specific or -enhanced expression are known, including the class I patatin promoter (Bevan et al., EMBO J. 8: 1899-1906 (1986); Jefferson et al., Plant Mol. Biol. 14: 995-1006 (1990), both of which are herein incorporated by reference in its entirety), the promoter for the potato tuber ADPGPP genes, both the large and small subunits, the sucrose synthase promoter (Salanoubat and Belliard, Gene. 60: 47-56 (1987), Salanoubat and Belliard, Gene. 84: 181-185 (1989), both of which are incorporated by reference in their entirety), the promoter for the major tuber proteins including the 22 kd protein complexes and proteinase inhibitors (Hannapel, Plant Physiol. 101: 703-704 (1993), herein incorporated by reference in its entirety), the promoter for the granule bound starch synthase gene (GBSS) (Visser et al., Plant Mol. Biol. 17: 691-699 (1991), herein incorporated by reference in its entirety), and other class I and II patatins promoters (Koster-Topfer et al., Mol Gen Genet. 219: 390-396 (1989); Mignery et al., Gene. 62: 27-44 (1988), both of which are herein incorporated by reference in their entirety).

[0191] Other promoters can also be used to express a fructose 1,6 bisphosphate aldolase gene in specific tissues, such as seeds or fruits. The promoter for β-conglycinin (Chen et al., Dev. Genet. 10: 112-122 (1989), herein incorporated by reference in its entirety) or other seed-specific promoters such as the napin and phaseolin promoters, can be used. The zeins are a group of storage proteins found in maize endosperm. Genomic clones for zein genes have been isolated (Pedersen et al., Cell 29: 1015-1026 (1982), herein incorporated by reference in its entirety), and the promoters from these clones, including the 15 kD, 16 kD, 19 kD, 22 kD, 27 kD, and gamma genes, could also be used. Other promoters known to function, for example, in maize, include the promoters for the following genes: waxy, Brittle, Shrunken 2, Branching enzymes I and II, starch synthases, debranching enzymes, oleosins, glutelins, and sucrose synthases. A particularly preferred promoter for maize endosperm expression is the promoter for the glutelin gene from rice, more particularly the Osgt-1 promoter (Zheng et al., Mol. Cell. Biol. 13: 5829-5842 (1993), herein incorporated by reference in its entirety). Examples of promoters suitable for expression in wheat include those promoters for the ADPglucose pyrophosphorylase (ADPGPP) subunits, the granule bound and other starch synthases, the branching and debranching enzymes, the embryogenesis-abundant proteins, the gliadins, and the glutenins. Examples of such promoters in rice include those promoters for the ADPGPP subunits, the granule bound and other starch synthases, the branching enzymes, the debranching enzymes, sucrose synthases, and the glutelins. A particularly preferred promoter is the promoter for rice glutelin, Osgt-1. Examples of such promoters for barley include those for the ADPGPP subunits, the granule bound and other starch synthases, the branching enzymes, the debranching enzymes, sucrose synthases, the hordeins, the embryo globulins, and the aleurone specific proteins.

[0192] Root specific promoters may also be used. An example of such a promoter is the promoter for the acid chitinase gene (Samac et al., Plant Mol. Biol. 25: 587-596 (1994), the entirety of which is herein incorporated by reference). Expression in root tissue could also be accomplished by utilizing the root specific subdomains of the CaMV35S promoter that have been identified (Lam et al., Proc. Natl. Acad. Sci. (U.S.A) 86:7890-7894 (1989), herein incorporated by reference in its entirety). Other root cell specific promoters include those reported by Conkling et al. (Conkling et al., Plant Physiol. 93:1203-1211 (1990), the entirety of which is herein incorporated by reference).

[0193] Additional promoters that may be utilized are described, for example, in U.S. Pat. Nos. 5,378,619, 5,391,725, 5,428,147, 5,447,858, 5,608,144, 5,608,144, 5,614,399, 5,633,441, 5,633,435, and 4,633,436, all of which are herein incorporated in their entirety. In addition, a tissue specific enhancer may be used (Fromm et al., The Plant Cell 1:977-984 (1989), the entirety of which is herein incorporated by reference).

[0194] Constructs or vectors may also include, with the coding region of interest, a nucleic acid sequence that acts, in whole or in part, to terminate transcription of that region. For example, such sequences have been isolated including the Tr7 3′ sequence and the nos 3′ sequence (Ingelbrecht et al., The Plant Cell 1:671-680 (1989), the entirety of which is herein incorporated by reference; Bevan et al., Nucleic Acids Res. 11:369-385 (1983), the entirety of which is herein incorporated by reference), or the like.

[0195] A vector or construct may also include regulatory elements. Examples of such include the Adh intron 1 (Callis et al., Genes and Develop. 1:1183-1200 (1987), the entirety of which is herein incorporated by reference), the sucrose synthase intron (Vasil et al., Plant Physiol. 91:1575-1579 (1989), the entirety of which is herein incorporated by reference) and the TMV omega element (Gallie et al., The Plant Cell 1:301-311 (1989), the entirety of which is herein incorporated by reference). These and other regulatory elements may be included when appropriate.

[0196] A vector or construct may also include a selectable marker. Selectable markers may also be used to select for plants or plant cells that contain the exogenous genetic material. Examples of such include, but are not limited to, a neo gene (Potrykus et al., Mol. Gen. Genet. 199:183-188 (1985), the entirety of which is herein incorporated by reference) which codes for kanamycin resistance and can be selected for using kanamycin, G418, etc.; a bar gene which codes for bialaphos resistance; a mutant EPSP synthase gene (Hinchee et al., Bio/Technology 6:915-922 (1988), the entirety of which is herein incorporated by reference) which encodes glyphosate resistance; a nitrilase gene which confers resistance to bromoxynil (Stalker et al., J. Biol. Chem. 263:6310-6314 (1988), the entirety of which is herein incorporated by reference); a mutant acetolactate synthase gene (ALS) which confers imidazolinone or sulphonylurea resistance (European Patent Application 154,204 (Sep. 11, 1985), the entirety of which is herein incorporated by reference); and a methotrexate resistant DHFR gene (Thillet et al., J. Biol. Chem. 263:12500-12508 (1988), the entirety of which is herein incorporated by reference).

[0197] A vector or construct may also include a transit peptide. Incorporation of a suitable chloroplast transit peptide may also be employed (European Patent Application Publication Number 0218571, the entirety of which is herein incorporated by reference). Translational enhancers may also be incorporated as part of the vector DNA. DNA constructs could contain one or more 5′ non-translated leader sequences which may serve to enhance expression of the gene products from the resulting mRNA transcripts. Such sequences may be derived from the promoter selected to express the gene or can be specifically modified to increase translation of the mRNA. Such regions may also be obtained from viral RNAs, from suitable eukaryotic genes, or from a synthetic gene sequence. For a review of optimizing expression of transgenes, see Koziel et al., Plant Mol. Biol. 32:393-405 (1996), the entirety of which is herein incorporated by reference.

[0198] A vector or construct may also include a screenable marker. Screenable markers may be used to monitor expression. Exemplary screenable markers include a β-glucuronidase or uidA gene (GUS) which encodes an enzyme for which various chromogenic substrates are known (Jefferson, Plant Mol. Biol, Rep. 5: 387-405 (1987), the entirety of which is herein incorporated by reference; Jefferson et al., EMBO J. 6: 3901-3907 (1987), the entirety of which is herein incorporated by reference); an R-locus gene, which encodes a product that regulates the production of anthocyanin pigments (red color) in plant tissues ((Dellaporta et al., Stadler Symposium 11:263-282 (1988), the entirety of which is herein incorporated by reference); a β-lactamase gene (Sutcliffe et al., Proc. Natl. Acad. Sci. (U.S.A.) 75: 3737-3741 (1978), the entirety of which is herein incorporated by reference), a gene which encodes an enzyme for which various chromogenic substrates are known (e.g., PADAC, a chromogenic cephalosporin); a luciferase gene (Ow et al., Science 234: 856-859 (1986), the entirety of which is herein incorporated by reference) a xylE gene (Zukowsky et al., Proc. Natl. Acad. Sci. (U.S.A.) 80:1101-1105 (1983), the entirety of which is herein incorporated by reference) which encodes a catechol diozygenase that can convert chromogenic catechols; an α-amylase gene (Ikatu et al., Bio/Technol. 8:241-242 (1990), the entirety of which is herein incorporated by reference); a tyrosinase gene (Katz et al., J. Gen. Microbiol. 129:2703-2714 (1983), the entirety of which is herein incorporated by reference) which encodes an enzyme capable of oxidizing tyrosine to DOPA and dopaquinone which in turn condenses to melanin; an α-galactosidase, which will turn a chromogenic α-galactose substrate.

[0199] Included within the terms “selectable or screenable marker genes” are also genes which encode a scriptable marker whose secretion can be detected as a means of identifying or selecting for transformed cells. Examples include markers which encode a secretable antigen that can be identified by antibody interaction, or even secretable enzymes which can be detected catalytically. Secretable proteins fall into a number of classes, including small, diffusible proteins detectable, e.g., by ELISA, small active enzymes detectable in extracellular solution (e.g., α-amylase, β-lactamase, phosphinothricin transferase), or proteins which are inserted or trapped in the cell wall (such as proteins which include a leader sequence such as that found in the expression unit of extension or tobacco PR-S). Other possible selectable and/or screenable marker genes will be apparent to those of skill in the art.

[0200] Methods and compositions for transforming a bacteria and other microorganisms are known in the art (see for example Sambrook et al., Molecular Cloning: A Laboratory Manual, Second Edition, Cold Spring Harbor Laboratory Press, Cold Spring Harbor, N.Y., (1989), the entirety of which is herein incorporated by reference).

[0201] There are many methods for introducing transforming nucleic acid molecules into plant cells. Suitable methods are believed to include virtually any method by which nucleic acid molecules may be introduced into a cell, such as by Agrobacterium infection or direct delivery of nucleic acid molecules such as, for example, by PEG-mediated transformation, by electroporation or by acceleration of DNA coated particles, etc. (Pottykus, Ann. Rev. Plant Physiol. Plant Mol. Biol. 42:205-225 (1991), the entirety of which is herein incorporated by reference; Vasil, Plant Mol. Biol. 25: 925-937 (1994), the entirety of which is herein incorporated by reference. For example, electroporation has been used to transform maize protoplasts (Fromm et al., Nature 312:791-793 (1986), the entirety of which is herein incorporated by reference).

[0202] Other vector systems suitable for introducing transforming DNA into a host plant cell includes but is not limited to binary artificial chromosome (BIBAC) vectors (Hamilton et al., Gene 200:107-116, (1997), the entirety of which is herein incorporated by reference, and transfection with RNA viral vectors (Della-Cioppa et al., Ann. N.Y. Acad. Sci. (1996), 792 (Engineering Plants for Commercial Products and Applications), 57-61, the entirety of which is herein incorporated by reference.

[0203] Technology for introduction of DNA into cells is well known to those of skill in the art. Four general methods for delivering a gene into cells have been described: (1) chemical methods (Graham and van der Eb, Virology, 54:536-539 (1973), the entirety of which is herein incorporated by reference); (2) physical methods such as microinjection (Capecchi, Cell 22:479-488 (1980), electroporation (Wong and Neumann, Biochem. Biophys. Res. Commun., 107:584-587 (1982); Fromm et al., Proc. Natl. Acad. Sci. USA, 82:5824-5828 (1985); U.S. Pat. No. 5,384,253; and the gene gun (Johnston and Tang, Methods Cell Biol. 43:353-365 (1994), all of which the entirety is herein incorporated by reference; (3) viral vectors (Clapp, Clin. Perinatol., 20:155-168 (1993); Lu et al., J. Exp. Med., 178:2089-2096 (1993); Eglitis and Anderson, Biotechniques, 6:608-614 (1988), all of which the entirety is herein incorporated by reference); and (4) receptor-mediated mechanisms (Curiel et al., Hum. Gen. Ther., 3:147-154 (1992); Wagner et al., Proc. Natl. Acad. Sci. USA, 89:6099-6103 (1992), all of which the entirety is herein incorporated by reference).

[0204] Acceleration methods that may be used include, for example, microprojectile bombardment and the like. One example of a method for delivering transforming nucleic acid molecules to plant cells is microprojectile bombardment. This method has been reviewed by Yang and Christou, eds., Particle Bombardment Technology for Gene Transfer, Oxford Press, Oxford, England (1994), the entirety of which is herein incorporated by reference). Non-biological particles (microprojectiles) that may be coated with nucleic acids and delivered into cells by a propelling force. Exemplary particles include those comprised of tungsten, gold, platinum, and the like.

[0205] A particular advantage of microprojectile bombardment, in addition to it being an effective means of reproducibly, and stably transforming monocotyledons, is that neither the isolation of protoplasts (Cristou et al., Plant Physiol. 87:671-674 (1988), the entirety of which is herein incorporated by reference) nor the susceptibility of Agrobacterium infection is required. An illustrative embodiment of a method for delivering DNA into maize cells by acceleration is a biolistics g-particle delivery system, which can be used to propel particles coated with DNA through a screen, such as a stainless steel or Nytex screen, onto a filter surface covered with corn cells cultured in suspension. Gordon-Kamm et al., describes the basic procedure for coating tungsten particles with DNA (Gordon-Kamm et al., Plant Cell 2: 603-618 (1990), the entirety of which is herein incorporated by reference). The screen disperses the tungsten nucleic acid particles so that they are not delivered to the recipient cells in large aggregates. A particle delivery system suitable for use with the present invention is the helium acceleration PDS-1000/He gun which is available from Bio-Rad Laboratories (Bio-Rad, Hercules, Calif.) (Sanford et al., Technique 3:3-16 (1991), the entirety of which is herein incorporated by reference).

[0206] For the bombardment, cells in suspension may be concentrated on filters. Filters containing the cells to be bombarded are positioned at an appropriate distance below the microprojectile stopping plate. If desired, one or more screens are also positioned between the gun and the cells to be bombarded.

[0207] Alternatively, immature embryos or other target cells may be arranged on solid culture medium. The cells to be bombarded are positioned at an appropriate distance below the macroprojectile stopping plate. If desired, one or more screens are also positioned between the acceleration device and the cells to be bombarded. Through the use of techniques set forth herein one may obtain up to 1000 or more foci of cells transiently expressing a marker gene. The number of cells in a focus which express the exogenous gene product 48 hours post-bombardment often range from one to ten and average one to three.

[0208] In bombardment transformation, one may optimize the prebombardment culturing conditions and the bombardment parameters to yield the maximum numbers of stable transformants. Both the physical and biological parameters for bombardment are important in this technology. Physical factors are those that involve manipulating the DNA/microprojectile precipitate or those that affect the flight and velocity of either the macro- or microprojectiles. Biological factors include all steps involved in manipulation of cells before and immediately after bombardment, the osmotic adjustment of target cells to help alleviate the trauma associated with bombardment, and also the nature of the transforming DNA, such as linearized DNA or intact supercoiled plasmids. It is believed that pre-bombardment manipulations are especially important for successful transformation of immature embryos. In another alternative embodiment, plastids can be stably transformed. Methods disclosed for plastid transformation in higher plants include the particle gun delivery of DNA containing a selectable marker and targeting of the DNA to the plastid genome through homologous recombination (Svab et al., Proc. Natl. Acad. Sci. (U.S.A.) 87:8526-8530 (1990); Svab and Maliga, Proc. Natl. Acad. Sci. (U.S.A.) 90:913-917 (1993); Staub and Maliga, EMBO J. 12:601-606 (1993); U.S. Pat. Nos. 5,451,513 and 5,545,818, all of which are herein incorporated by reference in their entirety).

[0209] Accordingly, it is contemplated that one may wish to adjust various aspects of the bombardment parameters in small scale studies to fully optimize the conditions. One may particularly wish to adjust physical parameters such as gap distance, flight distance, tissue distance, and helium pressure. One may also minimize the trauma reduction factors by modifying conditions which influence the physiological state of the recipient cells and which may therefore influence transformation and integration efficiencies. For example, the osmotic state, tissue hydration and the subculture stage or cell cycle of the recipient cells may be adjusted for optimum transformation. The execution of other routine adjustments will be known to those of skill in the art in light of the present disclosure.

[0210] Agrobacterium-mediated transfer is a widely applicable system for introducing genes into plant cells because the DNA can be introduced into whole plant tissues, thereby bypassing the need for regeneration of an intact plant from a protoplast. The use of Agrobacterium-mediated plant integrating vectors to introduce DNA into plant cells is well known in the art. See, for example the methods described (Fraley et al., Biotechnology 3:629-635 (1985); Rogers et al., Meth. In Enzymol, 153:253-277 (1987), both of which are herein incorporated by reference in their entirety. Further, the integration of the Ti-DNA is a relatively precise process resulting in few rearrangements. The region of DNA to be transferred is defined by the border sequences, and intervening DNA is usually inserted into the plant genome as described (Spielmann et al., Mol. Gen. Genet., 205:34 (1986), the entirety of which is herein incorporated by reference).

[0211] Modern Agrobacterium transformation vectors are capable of replication in E. coli as well as Agrobacterium, allowing for convenient manipulations as described (Klee et al., In: Plant DNA Infectious Agents, T. Hohn and J. Schell, eds., Springer-Verlag, New York, pp. 179-203 (1985), the entirety of which is herein incorporated by reference. Moreover, recent technological advances in vectors for Agrobacterium-mediated gene transfer have improved the arrangement of genes and restriction sites in the vectors to facilitate construction of vectors capable of expressing various polypeptide coding genes. The vectors described have convenient multi-linker regions flanked by a promoter and a polyadenylation site for direct expression of inserted polypeptide coding genes and are suitable for present purposes (Rogers et al., Meth. In Enzymol., 153:253-277 (1987), the entirety of which is herein incorporated by reference). In addition, Agrobacterium containing both armed and disarmed Ti genes can be used for the transformations. In those plant strains where Agrobacterium-mediated transformation is efficient, it is the method of choice because of the facile and defined nature of the gene transfer.

[0212] A transgenic plant formed using Agrobacterium transformation methods typically contains a single gene on one chromosome. Such transgenic plants can be referred to as being heterozygous for the added gene. More preferred is a transgenic plant that is homozygous for the added structural gene; i.e., a transgenic plant that contains two added genes, one gene at the same locus on each chromosome of a chromosome pair. A homozygous transgenic plant can be obtained by sexually mating (selfing) an independent segregant transgenic plant that contains a single added gene, germinating some of the seed produced and analyzing the resulting plants produced for the gene of interest.

[0213] It is also to be understood that two different transgenic plants can also be mated to produce offspring that contain two independently segregating added, exogenous genes. Selfing of appropriate progeny can produce plants that are homozygous for both added, exogenous genes that encode a polypeptide of interest. Back-crossing to a parental plant and out-crossing with a non-transgenic plant are also contemplated, as is vegetative propagation.

[0214] Transformation of plant protoplasts can be achieved using methods based on calcium phosphate precipitation, polyethylene glycol treatment, electroporation, and combinations of these treatments. See for example (Potrykus et al., Mol. Gen. Genet., 205:193-200 (1986); Lorz et al., Mol. Gen. Genet., 199:178, (1985); Fromm et al., Nature, 319:791, (1986); Uchimiya et al., Mol. Gen. Genet.: 204:204, (1986); Callis et al., Genes and Development, 1183, (1987); Marcotte et al., Nature, 335:454, (1988), all of which the entirety is herein incorporated by reference).

[0215] Application of these systems to different plant strains depends upon the ability to regenerate that particular plant strain from protoplasts. Illustrative methods for the regeneration of cereals from protoplasts are described (Fujimura et al., Plant Tissue Culture Letters, 2:74, (1985); Toriyama et al., Theor Appl. Genet. 205:34. (1986); Yamada et al., Plant Cell Rep., 4:85, (1986); Abdullah et al., Biotechnology, 4:1087, (1986), all of which the entirety is herein incorporated by reference).

[0216] To transform plant strains that cannot be successfully regenerated from protoplasts, other ways to introduce DNA into intact cells or tissues can be utilized. For example, regeneration of cereals from immature embryos or explants can be effected as described (Vasil, Biotechnology, 6:397, (1988), the entirety of which is herein incorporated by reference). In addition, “particle gun” or high-velocity microprojectile technology can be utilized (Vasil et al., Bio/Technology 10:667, (1992), the entirety of which is herein incorporated by reference).

[0217] Using the latter technology, DNA is carried through the cell wall and into the cytoplasm on the surface of small metal particles as described (Klein et al., Nature, 328:70, (1987); Klein et al., Proc. Natl. Acad. Sci. USA, 85:8502-8505, (1988); McCabe et al., Biotechnology, 6:923, (1988), all of which the entirety is herein incorporated by reference). The metal particles penetrate through several layers of cells and thus allow the transformation of cells within tissue explants.

[0218] Other methods of cell transformation can also be used and include but are not limited to introduction of DNA into plants by direct DNA transfer into pollen (Hess et al., Intern Rev. Cytol., 107:367, (1987); Luo et al., Plant Mol. Biol. Reporter, 6:165, (1988), all of which the entirety is herein incorporated by reference), by direct injection of DNA into reproductive organs of a plant (Pena et al., Nature, 325:274, (1987), the entirety of which is herein incorporated by reference), or by direct injection of DNA into the cells of immature embryos followed by the rehydration of desiccated embryos (Neuhaus et al., Theor. Appl. Genet., 75:30, (1987), the entirety of which is herein incorporated by reference).

[0219] The regeneration, development, and cultivation of plants from single plant protoplast transformants or from various transformed explants is well known in the art (Weissbach and Weissbach, In: Methods for Plant Molecular Biology, (Eds.), Academic Press, Inc. San Diego, Calif., (1988), the entirety of which is herein incorporated by reference). This regeneration and growth process typically includes the steps of selection of transformed cells, culturing those individualized cells through the usual stages of embryonic development through the rooted plantlet stage. Transgenic embryos and seeds are similarly regenerated. The resulting transgenic rooted shoots are thereafter planted in an appropriate plant growth medium such as soil.

[0220] The development or regeneration of plants containing the foreign, exogenous gene that encodes a protein of interest is well known in the art. Preferably, the regenerated plants are self-pollinated to provide homozygous transgenic plants, as discussed before. Otherwise, pollen obtained from the regenerated plants is crossed to seed-grown plants of agronomically important lines. Conversely, pollen from plants of these important lines is used to pollinate regenerated plants. A transgenic plant of the present invention containing a desired polypeptide is cultivated using methods well known to one skilled in the art.

[0221] There are a variety of methods for the regeneration of plants from plant tissue. The particular method of regeneration will depend on the starting plant tissue and the particular plant species to be regenerated.

[0222] Methods for transforming dicots, primarily by use of Agrobacterium tumefaciens, and obtaining transgenic plants have been published for cotton (U.S. Pat. No. 5,004,863, U.S. Pat. No. 5,159,135, U.S. Pat. No. 5,518,908, all of which the entirety is herein incorporated by reference); soybean (U.S. Pat. No. 5,569,834, U.S. Pat. No. 5,416,011, McCabe et al., Biotechnology 6:923, (1988), Christou et al., Plant Physiol., 87:671-674 (1988), all of which the entirety is herein incorporated by reference); Brassica (U.S. Pat. No. 5,463,174, the entirety of which is herein incorporated by reference); peanut (Cheng et al., Plant Cell Rep. 15: 653-657 (1996), McKently et al., Plant Cell Rep. 14:699-703 (1995), all of which the entirety is herein incorporated by reference); papaya (Yang et al., (1996), the entirety of which is herein incorporated by reference); pea (Grant et al., Plant Cell Rep. 15:254-258, (1995), the entirety of which is herein incorporated by reference).

[0223] Transformation of monocotyledons using electroporation, particle bombardment, and Agrobacterium have also been reported. Transformation and plant regeneration have been achieved in asparagus (Bytebier et al., Proc. Natl. Acad. Sci. USA 84:5345, (1987), the entirety of which is herein incorporated by reference); barley (Wan and Lemaux, Plant Physiol 104:37, (1994), the entirety of which is herein incorporated by reference); maize (Rhodes et al., Science 240: 204, (1988), Gordon-Kamm et al., Plant Cell, 2:603, (1990), Fromm et al., Bio/Technology 8:833, (1990), Koziel et al., Bio/Technology 11:194, (1993), Armstrong et al., Crop Science 35:550-557, (1995), all of which the entirety is herein incorporated by reference); oat (Somers et al., Bio/Technology, 10:1589, (1992), the entirety of which is herein incorporated by reference); orchard grass (Horn et al., Plant Cell Rep. 7:469, (1988), the entirety of which is herein incorporated by reference); rice (Toriyama et al., Theor Appl. Genet. 205:34, (1986); Park et al., Plant Mol. Biol., 32: 1135-1148, (1996); Abedinia et al., Aust. J. Plant Physiol. 24:133-141, (1997); Zhang and Wu, Theor. Appl. Genet. 76:835, (1988); Zhang et al. Plant Cell Rep. 7:379, (1988); Battraw and Hall, Plant Sci. 86:191-202, (1992); Christou et al., Bio/Technology 9:957, (1991), all of which the entirety is herein incorporated by reference); sugarcane (Bower and Birch, Plant J. 2:409, (1992), the entirety of which is herein incorporated by reference); tall fescue (Wang et al., Bio/Technology 10:691, (1992), the entirety of which is herein incorporated by reference), and wheat (Vasil et al., Bio/Technology 10:667, (1992), the entirety of which is herein incorporated by reference; U.S. Pat. No. 5,631,152, the entirety of which is herein incorporated by reference.

[0224] Assays for gene expression based on the transient expression of cloned nucleic acid constructs have been developed by introducing the nucleic acid molecules into plant cells by polyethylene glycol treatment, electroporation, or particle bombardment (Marcotte, et al., Nature, 335: 454-457 (1988), the entirety of which is herein incorporated by reference; Marcotte, et al., Plant Cell, 1: 523-532 (1989), the entirety of which is herein incorporated by reference; McCarty, et al., Cell 66: 895-905 (1991), the entirety of which is herein incorporated by reference; Hattori, et al., Genes Dev. 6: 609-618 (1992), the entirety of which is herein incorporated by reference; Goff, et al., EMBO J. 9: 2517-2522 (1990), the entirety of which is herein incorporated by reference). Transient expression systems may be used to functionally dissect gene constructs (See generally, Mailga et al., Methods in Plant Molecular Biology, Cold Spring Harbor Press (1995)).

[0225] Any of the nucleic acid molecules of the present invention may be introduced into a plant cell in a permanent or transient manner in combination with other genetic elements such as vectors, promoters enhancers etc. Further any of the nucleic acid molecules of the present invention may be introduced into a plant cell in a manner that allows for over expression of the protein or fragment thereof encoded by the nucleic acid molecule.

[0226] Cosuppression is the reduction in expression levels, usually at the level of RNA, of a particular endogenous gene or gene family by the expression of a homologous sense construct that is capable of transcribing mRNA of the same strandedness as the transcript of the endogenous gene (Napoli et al., Plant Cell 2: 279-289 (1990), the entirety of which is herein incorporated by reference; van der Krol et al., Plant Cell 2: 291-299 (1990), the entirety of which is herein incorporated by reference). Cosuppression may result from stable transformation with a single copy nucleic acid molecule that is homologous to a nucleic acid sequence found with the cell (Prolls and Meyer, Plant J. 2:465-475 (1992), the entirety of which is herein incorporated by reference) or with multiple copies of a nucleic acid molecule that is homologous to a nucleic acid sequence found with the cell (Mittlesten et al., Mol. Gen. Genet. 244: 325-330 (1994), the entirety of which is herein incorporated by reference). Genes, even though different, linked to homologous promoters may result in the cosuppression of the linked genes (Vaucheret, C. R. Acad. Sci. III 316: 1471-1483 (1993), the entirety of which is herein incorporated by reference).

[0227] This technique has, for example been applied to generate white flowers from red petunia and tomatoes that do not ripen on the vine. Up to 50% of petunia transformants that contained a sense copy of the chalcone synthase (CHS) gene produced white flowers or floral sectors; this was as a result of the post-transcriptional loss of mRNA encoding CHS (Flavell, Proc. Natl. Acad. Sci. (U.S.A.) 91:3490-3496 (1994)), the entirety of which is herein incorporated by reference). Cosuppression may require the coordinate transcription of the transgene and the endogenous gene, and can be reset by a developmental control mechanism (Jorgensen, Trends Biotechnol, 8:340344 (1990), the entirety of which is herein incorporated by reference; Meins and Kunz, In: Gene Inactivation and Homologous Recombination in Plants (Paszkowski, J., ed.), pp. 335-348. Kluwer Academic, Netherlands (1994), the entirety of which is herein incorporated by reference).

[0228] It is understood that one or more of the nucleic acids of the present invention including those comprising SEQ ID NO: 1 through SEQ ID NO: 18831 or complement thereof or fragments of either or other nucleic acid molecules of the present invention may be introduced into a plant cell and transcribed using an appropriate promoter with such transcription resulting in the co-suppression of an endogenous protein.

[0229] Antisense approaches are a way of preventing or reducing gene function by targeting the genetic material (Mol et al., FEBS Lett. 268: 427-430 (1990), the entirety of which is herein incorporated by reference). The objective of the antisense approach is to use a sequence complementary to the target gene to block its expression and create a mutant cell line or organism in which the level of a single chosen protein is selectively reduced or abolished. Antisense techniques have several advantages over other ‘reverse genetic’ approaches. The site of inactivation and its developmental effect can be manipulated by the choice of promoter for antisense genes or by the timing of external application or microinjection. Antisense can manipulate its specificity by selecting either unique regions of the target gene or regions where it shares homology to other related genes (Hiatt et al., In Genetic Engineering, Setlow (ed.), Vol. 11, New York: Plenum 49-63 (1989), the entirety of which is herein incorporated by reference).

[0230] The principle of regulation by antisense RNA is that RNA that is complementary to the target mRNA is introduced into cells, resulting in specific RNA:RNA duplexes being formed by base pairing between the antisense substrate and the target mRNA (Green et al., Annu. Rev. Biochem. 55: 569-597 (1986), the entirety of which is herein incorporated by reference). Under one embodiment, the process involves the introduction and expression of an antisense gene sequence. Such a sequence is one in which part or all of the normal gene sequences are placed under a promoter in inverted orientation so that the ‘wrong’ or complementary strand is transcribed into a noncoding antisense RNA that hybridizes with the target mRNA and interferes with its expression (Takayama and Inouye, Crit. Rev. Biochem. Mol. Biol. 25: 155-184 (1990), the entirety of which is herein incorporated by reference). An antisense vector is constructed by standard procedures and introduced into cells by transformation, transfection, electroporation, microinjection, or by infection, etc. The type of transformation and choice of vector will determine whether expression is transient or stable. The promoter used for the antisense gene may influence the level, timing, tissue, specificity, or inducibility of the antisense inhibition.

[0231] It is understood that protein synthesis activity in a plant cell may be reduced or depressed by growing a transformed plant cell containing a nucleic acid molecule whose non-transcribed strand encodes a protein or fragment thereof.

[0232] Antibodies have been expressed in plants (Hiatt et al., Nature 342:76-78 (1989), the entirety of which is herein incorporated by reference; Conrad and Fielder, Plant Mol. Biol. 26: 1023-1030 (1994), the entirety of which is herein incorporated by reference). Cytoplamic expression of a scFv (single-chain Fv antibodies) has been reported to delay infection by artichoke mottled crinkle virus. Transgenic plants that express antibodies directed against endogenous proteins may exhibit a physiological effect (Philips et al., EMBO J. 16: 4489-4496 (1997), the entirety of which is herein incorporated by reference; Marion-Poll, Trends in Plant Science 2: 447-448 (1997), the entirety of which is herein incorporated by reference). For example, expressed anti-abscisic antibodies reportedly result in a general perturbation of seed development (Philips et al., EMBO J. 16: 4489-4496 (1997)).

[0233] Antibodies that are catalytic may also be expressed in plants (abzymes). The principle behind abzymes is that since antibodies may be raised against many molecules, this recognition ability can be directed toward generating antibodies that bind transition states to force a chemical reaction forward (Persidas, Nature Biotechnology 15:1313-1315 (1997), the entirety of which is herein incorporated by reference; Baca et al., Ann. Rev. Biophys. Biomol. Struct. 26:461-493 (1997), the entirety of which is herein incorporated by reference). The catalytic abilities of abzymes may be enhanced by site directed mutagenesis. Examples of abzymes are, for example, set forth in U.S. Pat. No. 5,658,753; U.S. Pat. No. 5,632,990; U.S. Pat. No. 5,631,137; U.S. Pat. No. 5,602,015; U.S. Pat. No. 5,559,538; U.S. Pat. No. 5,576,174; U.S. Pat. No. 5,500,358; U.S. Pat. No. 5,318,897; U.S. Pat. No. 5,298,409; U.S. Pat. No. 5,258,289 and U.S. Pat. No. 5,194,585, all of which are herein incorporated in their entirety.

[0234] It is understood that any of the antibodies of the present invention may be expressed in plants and that such expression can result in a physiological effect. It is also understood that any of the expressed antibodies may be catalytic.

[0235] In addition to the above discussed procedures, practitioners are familiar with the standard resource materials which describe specific conditions and procedures for the construction, manipulation and isolation of macromolecules (e.g., DNA molecules, plasmids, etc.), generation of recombinant organisms and the screening and isolating of clones, (see for example, Sambrook et al., Molecular Cloning: A Laboratory Manual, Cold Spring Harbor Press (1989); Mailga et al., Methods in Plant Molecular Biology, Cold Spring Harbor Press (1995), the entirety of which is herein incorporated by reference; Birren et al., Genome Analysis: Analyzing DNA, 1, Cold Spring Harbor, N.Y., the entirety of which is herein incorporated by reference).

[0236] The nucleotide sequence provided in SEQ ID NO: 1, through SEQ ID NO: 18831 or fragment thereof, or complement thereof, or a nucleotide sequence at least 90% identical, preferably 95%, identical even more preferably 99% or 100% identical to the sequence provided in SEQ ID NO: 1 through SEQ ID NO: 18831 or fragment thereof, or complement thereof, can be “provided” in a variety of mediums to facilitate use fragment thereof. Such a medium can also provide a subset thereof in a form that allows a skilled artisan to examine the sequences.

[0237] In one application of this embodiment, a nucleotide sequence of the present invention can be recorded on computer readable media. As used herein, “computer readable media” refers to any medium that can be read and accessed directly by a computer. Such media include, but are not limited to: magnetic storage media, such as floppy discs, hard disc, storage medium, and magnetic tape: optical storage media such as CD-ROM; electrical storage media such as RAM and ROM; and hybrids of these categories such as magnetic/optical storage media. A skilled artisan can readily appreciate how any of the presently known computer readable mediums can be used to create a manufacture comprising computer readable medium having recorded thereon a nucleotide sequence of the present invention.

[0238] As used herein, “recorded” refers to a process for storing information on computer readable medium. A skilled artisan can readily adopt any of the presently known methods for recording information on computer readable medium to generate media comprising the nucleotide sequence information of the present invention. A variety of data storage structures are available to a skilled artisan for creating a computer readable medium having recorded thereon a nucleotide sequence of the present invention. The choice of the data storage structure will generally be based on the means chosen to access the stored information. In addition, a variety of data processor programs and formats can be used to store the nucleotide sequence information of the present invention on computer readable medium. The sequence information can be represented in a word processing text file, formatted in commercially-available software such as WordPerfect and Microsoft Word, or represented in the form of an ASCII file, stored in a database application, such as DB2, Sybase, Oracle, or the like. A skilled artisan can readily adapt any number of data processor structuring formats (e.g. text file or database) in order to obtain computer readable medium having recorded thereon the nucleotide sequence information of the present invention.

[0239] By providing one or more of nucleotide sequences of the present invention, a skilled artisan can routinely access the sequence information for a variety of purposes. Computer software is publicly available which allows a skilled artisan to access sequence information provided in a computer readable medium. The examples which follow demonstrate how software which implements the BLAST (Altschul et al., J. Mol. Biol. 215:403-410 (1990)) and BLAZE (Brutlag et al., Comp. Chem. 17:203-207 (1993), the entirety of which is herein incorporated by reference) search algorithms on a Sybase system can be used to identify open reading frames (ORFs) within the genome that contain homology to ORFs or proteins from other organisms. Such ORFs are protein-encoding fragments within the sequences of the present invention and are useful in producing commercially important proteins such as enzymes used in amino acid biosynthesis, metabolism, transcription, translation, RNA processing, nucleic acid and a protein degradation, protein modification, and DNA replication, restriction, modification, recombination, and repair.

[0240] The present invention further provides systems, particularly computer-based systems, which contain the sequence information described herein. Such systems are designed to identify commercially important fragments of the nucleic acid molecule of the present invention. As used herein, “a computer-based system” refers to the hardware means, software means, and data storage means used to analyze the nucleotide sequence information of the present invention. The minimum hardware means of the computer-based systems of the present invention comprises a central processing unit (CPU), input means, output means, and data storage means. A skilled artisan can readily appreciate that any one of the currently available computer-based system are suitable for use in the present invention.

[0241] As indicated above, the computer-based systems of the present invention comprise a data storage means having stored therein a nucleotide sequence of the present invention and the necessary hardware means and software means for supporting and implementing a search means. As used herein, “data storage means” refers to memory that can store nucleotide sequence information of the present invention, or a memory access means which can access manufactures having recorded thereon the nucleotide sequence information of the present invention. As used herein, “search means” refers to one or more programs which are implemented on the computer-based system to compare a target sequence or target structural motif with the sequence information stored within the data storage means. Search means are used to identify fragments or regions of the sequence of the present invention that match a particular target sequence or target motif. A variety of known algorithms are disclosed publicly and a variety of commercially available software for conducting search means are available and can be used in the computer-based systems of the present invention. Examples of such software include, but are not limited to, MacPattern (EMBL), BLASTIN and BLASTIX (NCBIA). One of the available algorithms or implementing software packages for conducting homology searches can be adapted for use in the present computer-based systems.

[0242] The most preferred sequence length of a target sequence is from about 10 to 100 amino acids or from about 30 to 300 nucleotide residues. However, it is well recognized that during searches for commercially important fragments of the nucleic acid molecules of the present invention, such as sequence fragments involved in gene expression and protein processing, may be of shorter length.

[0243] As used herein, “a target structural motif,” or “target motif,” refers to any rationally selected sequence or combination of sequences in which the sequences or sequence(s) are chosen based on a three-dimensional configuration which is formed upon the folding of the target motif. There are a variety of target motifs known in the art. Protein target motifs include, but are not limited to, enzymatic active sites and signal sequences. Nucleic acid target motifs include, but are not limited to, promoter sequences, cis elements, hairpin structures and inducible expression elements (protein binding sequences).

[0244] Thus, the present invention further provides an input means for receiving a target sequence, a data storage means for storing the target sequences of the present invention sequence identified using a search means as described above, and an output means for outputting the identified homologous sequences. A variety of structural formats for the input and output means can be used to input and output information in the computer-based systems of the present invention. A preferred format for an output means ranks fragments of the sequence of the present invention by varying degrees of homology to the target sequence or target motif. Such presentation provides a skilled artisan with a ranking of sequences which contain various amounts of the target sequence or target motif and identifies the degree of homology contained in the identified fragment.

[0245] A variety of comparing means can be used to compare a target sequence or target motif with the data storage means to identify sequence fragments sequence of the present invention. For example, implementing software which implement the BLAST and BLAZE algorithms (Altschul et al., J. Mol. Biol. 215:403-410 (1990)) can be used to identify open frames within the nucleic acid molecules of the present invention. A skilled artisan can readily recognize that any one of the publicly available homology search programs can be used as the search means for the computer-based systems of the present invention. Having now generally described the invention, the same will be more readily understood through reference to the following examples which are provided by way of illustration, and are not intended to be limiting of the present invention, unless specified.

### EXAMPLE 1

[0246] The cDNA library of the present invention designated Lib3061, is prepared from maize (DK604, Dekalb Genetics, Dekalb, Ill. U.S.A.) endosperm tissue from plants at 32 days after pollination. Seeds are planted at a depth of approximately 3 cm into 2-3 inch peat pots containing Metro 200 growing medium. After 2-3 weeks growth they are transplanted into 10 inch pots containing the same growing medium. Plants are watered daily before transplantation and three times a week after transplantation. Peters 15-16-17 fertilizer is applied three times per week after transplanting at a strength of 150 ppm N. Two to three times during the lifetime of the plant, from transplanting to flowering, a total of 900 mg Fe is added to each pot. Maize plants are grown in a greenhouse in 15 hr day/9 hr night cycles. The daytime temperature is approximately 80° F. and the nighttime temperature is approximately 70° F. Supplemental lighting is provided by 1000 W sodium vapor lamps. Tissue is collected from V10+ stage plants. The corn plant is beyond the V10 stage and the ear shoots, which are ready for fertilization, are enclosed in a paper bag prior to silk emergence to withhold pollen. Thirty-two days after pollination, the ears are pulled out and the kernels are removed from the cob. Each kernel is dissected into the embryo and the endosperm and the aleurone layer is removed. After dissection, the endosperms are immediately transferred to liquid nitrogen. The harvested tissue is then stored at 80° C. until RNA preparation. The RNA is purified from the stored tissue and the cDNA library is constructed as described in Example 2. SEQ ID NO: 1 through SEQ ID NO: 13524 are from LIB3061.

[0247] The cDNA library of the present invention designated LIB3077, is prepared from Zea mays 4 cm ears. The Zea mays H99 is used for collection. Seeds are planted at a depth of approximately 3 cm in soil into 2″-3″ peat pots containing Metro 200 growing medium. After 2-3 weeks growth, they are transplanted into 10″ pots containing the same. Plants are watered daily before transplantation and ˜3 times a week after transplantation. Peters 15-16-17 fertilizer is applied ˜3× per week after transplanting, at a strength of 150 ppm N. 2-3 times during the life time of the plant, from transplanting to flowering, a total of ˜900 mg Fe is added to each pot. Corn plants are grown in the green house in 15 hr day/9 hr night cycles. The daytime temperature is 80° F. and the nigh time temperature is 70° F. Lighting is provided by 1000 W sodium vapor lamps. Immature 4 cm ears are harvested from 8 week old plants and are approximately 3.5-4.5 cm long. Kernels are dissected away from cob, frozen in liquid nitrogen and stored at −80° C. until preparation of RNA. Total RNA generated from 4 cm ears is used for constructing a target cDNA library. The cDNA library is constructed as described in Example 2. SEQ ID NO: 13525 through SEQ ID NO: 13565 are from LIB3077.

[0248] The cDNA library of the present invention designated LIB36, is a normalized library prepared from maize (DK604, Dekalb Genetics, Dekalb, Ill. U.S.A) leaves harvested from V8 stage plants. Seeds are planted at a depth of approximately 3 cm in soil into 2″-3″ peat pots containing Metro 200 growing medium. After 2-3 weeks growth, they are transplanted into 10″ pots containing the same. Plants are watered daily before transplantation and three times a week after transplantation. Peters 15-16-17 fertilizer is applied three times per week after transplanting at a strength of 150 ppm N. Two to three times during the lifetime of the plant, from transplanting to flowering, a total of 900 mg Fe is added to each pot. Maize plants are grown in a greenhouse in 15 hr day/9 hr night cycles. The daytime temperature is 80° F. and the nighttime temperature is 70° F. Lighting is provided by 1000 W sodium vapor lamps. Tissue is collected from V8 stage plants. The older more juvenile leaves which are in a basal position as well as the younger more adult leaves which are more apical were all cut at the base of the leaves. The leaves are then pooled and then immediately transferred to liquid nitrogen containers in which the pooled leaves are then crushed. The harvested tissue is then stored at −80° C. until RNA preparation.

[0249] For the construction of a cDNA library, the Superscript™ Plasmid System for cDNA synthesis and Plasmid Cloning (Gibco BRL, Life Technologies, Gaithersburg, Md.) or similar system, following the conditions suggested by the manufacturer, is used. Poly A+ mRNA is purified from the total RNA preparation using Dynabeads® Oligo (dT)₂₅ (Dynal Inc., Lake Success, N.Y.), or equivalent methods. Clones are selected and the plasmid DNA is isolated using a commercially available kit for normalizing the cDNA library. This library is normalized at a cot value of 10.

[0250] Approximately 1 million clones from the cDNA library are used for the generation of double and single stranded plasmid DNA. Double stranded plasmid DNA is used as a template for preparation of biotinylated RNA transcripts. Single stranded plasmid DNA from the cDNA library is hybridized with biotinylated RNA transcripts from the same library. Hybridized molecules are removed with Streptavidin beads (Dynal Inc. Lake Success, N.Y.). Remaining single stranded molecules are partially repaired with “Klenow” before transforming E. coli for the generation of a normalized cDNA library. SEQ ID NO: 13566 through SEQ ID NO: 15515 are from LIB36.

[0251] The cDNA library of the present invention designated LIB83, is a normalized library prepared from maize leaves harvested from V8 stage plants. Maize DK604 (Dekalb Genetics, Dekalb, Ill. U.S.A) is used. Seeds are planted at a depth of approximately 3 cm in soil into 2″-3″ peat pots containing Metro 200 growing medium. After 2-3 weeks growth, they are transplanted into 10″ pots containing the same. Plants are watered daily before transplantation and ˜3 times a week after transplantation. Peters 15-16-17 fertilizer is applied ˜3× per week after transplanting, at a strength of 150 ppm N. 2-3 times during the life time of the plant, from transplanting to flowering, a total of ˜900 mg Fe is added to each pot. Plants are grown in a green house in 15 hr day/9 hr night cycles. The daytime temperature is 80° F. and the night time temperature was 70° F. Lighting was provided by 1000 W sodium vapor lamps. Tissue is collected from V8 stage plants. The older more juvenile leaves which are in a basal position as well as the younger more adult leaves which are more apical were all cut at the base of the leaves. The leaves are then pooled and then immediately transferred to liquid nitrogen containers in which the pooled leaves are then crushed. The harvested tissue is then stored at −80° C. until RNA preparation. For the construction of a cDNA library, the Superscript™ Plasmid System for cDNA synthesis and Plasmid Cloning (Gibco BRL, Life Technologies, Gaithersburg, Md.) or similar system, following the conditions suggested by the manufacturer, is used. Poly A+ mRNA is purified from the total RNA preparation using Dynabeads® Oligo (dT)₂₅ (Dynal Inc., Lake Success, N.Y.), or equivalent methods. Clones are selected and the plasmid DNA is isolated using a commercially available kit for normalizing the cDNA library. This library is normalized at a ratio of 1:50.

[0252] Approximately 1 million clones from the cDNA library are used for the generation of double and single stranded plasmid DNA. Double stranded plasmid DNA is used as a template for preparation of biotinylated RNA transcripts. Single stranded plasmid DNA from the cDNA library is hybridized with biotinylated RNA transcripts from the same library. Hybridized molecules are removed with Streptavidin beads (Dynal Inc. Lake Success, N.Y.). Remaining single stranded molecules are partially repaired with “Klenow” before transforming E. coli for the generation of a normalized cDNA library. SEQ ID NO: 15516 through SEQ ID NO: 17001 are from LIB83.

[0253] The cDNA library of the present invention designated LIB84, is a normalized library prepared from maize (DK604, Dekalb Genetics, Dekalb, Ill. U.S.A) leaves harvested from V8 stage plants. Seeds are planted at a depth of approximately 3 cm in soil into 2″-3″ peat pots containing Metro 200 growing medium. After 2-3 weeks growth, they are transplanted into 10″ pots containing the same. Plants are watered daily before transplantation and three times a week after transplantation. Peters 15-16-17 fertilizer is applied three times per week after transplanting at a strength of 150 ppm N. Two to three times during the lifetime of the plant, from transplanting to flowering, a total of 900 mg Fe is added to each pot. Plants were grown in a greenhouse in 15 hr day/9 hr night cycles. The daytime temperature was 80° F. and the nighttime temperature was 70° F. Lighting was provided by 1000 W sodium vapor lamps. Tissue was collected from V8 stage plants. The older more juvenile leaves which are in a basal position as well as the younger more adult leaves which are more apical were all cut at the base of the leaves. The leaves are then pooled and then immediately transferred to liquid nitrogen containers in which the pooled leaves are then crushed. The harvested tissue is then stored at −80° C. until RNA preparation. SEQ ID NO: 17002 through SEQ ID NO: 18831 are from LIB84.

[0254] For the construction of a cDNA library, the Superscript™ Plasmid System for cDNA synthesis and Plasmid Cloning (Gibco BRL, Life Technologies, Gaithersburg, Md.) or similar system, following the conditions suggested by the manufacturer, is used. Poly A+ mRNA is purified from the total RNA preparation using Dynabeads® Oligo (dT)₂₅ (Dynal Inc., Lake Success, N.Y.), or equivalent methods. Clones are selected and the plasmid DNA is isolated using a commercially available kit for normalizing the cDNA library. This library is normalized at a ratio of 1:10.

[0255] Approximately 1 million clones from the cDNA library are used for the generation of single stranded plasmid DNA. Appropriate Oligonucleotide from 3′ end of single stranded circle are used for primer extension in the presence of biotinylated dideoxynucleotides. The reaction is controlled to give 200-300 bp extension products. Single stranded circle cDNA library with primer extension products is denatured and hybridized under appropriate conditions. Hybridized molecules are removed with Streptavidin beads (Dynal Inc. Lake Success, N.Y.). Remaining single stranded molecules are partially repaired with “Klenow” before transforming E. coli for the generation of a normalized cDNA library.

### EXAMPLE 2

[0256] The stored RNA is purified using Trizol reagent from Life Technologies (Gibco BRL, Life Technologies, Gaithersburg, Md. U.S.A.), essentially as recommended by the manufacturer. Poly A+ RNA (mRNA) is purified using magnetic oligo dT beads essentially as recommended by the manufacturer (Dynabeads, Dynal Corporation, Lake Success, N.Y. U.S.A.).

[0257] Construction of plant cDNA libraries is well-known in the art and a number of cloning strategies exist. A number of cDNA library construction kits are commercially available. The Superscript™ Plasmid System for cDNA synthesis and Plasmid Cloning (Gibco BRL, Life Technologies, Gaithersburg, Md. U.S.A.) is used, following the conditions suggested by the manufacturer.

### EXAMPLE 3

[0258] The cDNA libraries are plated on LB agar containing the appropriate antibiotics for selection and incubated at 37° for a sufficient time to allow the growth of individual colonies. Single selective media colonies are individually placed in each well of a 96-well microtiter plates containing LB liquid including the selective antibiotics. The plates are incubated overnight at approximately 37° C. with gentle shaking to promote growth of the cultures. The plasmid DNA is isolated from each clone using Qiaprep plasmid isolation kits, using the conditions recommended by the manufacturer (Qiagen Inc., Santa Clara, Calif. U.S.A.).

[0259] Template plasmid DNA clones are used for subsequent sequencing. For sequencing, the ABI PRISM dRhodamine Terminator Cycle Sequencing Ready Reaction Kit with AmpliTaq® DNA Polymerase, FS, is used (PE Applied Biosystems, Foster City, Calif. U.S.A.).

The application's sequence listing, which the Patent Office published only in electronic form, follows.

SEQUENCE LISTING (18831 sequences)

SEQ ID NO: 1 - DNA, 341 bp, Zea mays
  Clone ID: LIB3061-001-Q1-K2-H1
gtctctgctactcacctagccgccagtcatgggcatgatcaagatcggaatcaacgggttcggaaggatcggctggctcgtggtcagggtcgtcctgcagagcgaggatgtcgagctcgtctgcgtcaacgaccgcttcatcaccacggattacatgacctacatgttcaagtacgacaccgtgcacggtcaatggaagcacatgcgacattaccctcaaggactccaagacgcttcttgttggcgagaagccggtcaccgtctttggcatcaagaacctccgagagattccgtgatgtgaggctggtgctgtatatgtcgtgcagtccatcggtgtcttc

SEQ ID NO: 2 - DNA, 371 bp, Zea mays
  Clone ID: LIB3061-005-Q1-K1-B3
ctcccagttcgatccccatttgaaaacaacccatccttcgttcctccgtctagcagccgctcaccctcatggccaagatcaagatcgggatcaatgggtttggcaggatcggaaggctggtggccagggtggccctgcagagcgacgacgtcgagctcgtcgccgtgaacgaccccttcatcagcaccgattacatgacctacatgttcaagtatgacactgtgcacggacagtggaagcaccatgaggtcaaggtgaaggactccaagacccttctctttggtgagaaagaggttgctgtgtttggctgcaggaaccctgaggagatcccatggggttcggttggcgctgaatatgttgttgagtctact

SEQ ID NO: 3 - DNA, 328 bp, Zea mays
  Clone ID: LIB3061-056-Q1-K1-F11
acgccgtcatcgatctcgtttcaaatccatccatcctcgtttcctccgtcccgcagcatctcaacccgatggggaagatcaagatcgggatcaatgggttcggcaggatcggaaggctggtggccagggtggccctgcagagtgacgatgtcgagctcgtcgccgtgaacgaccccttcatcagcaccgactacatgacctacatgttcaagtacgacactgtgcacggacagtggaagcaccatgaagtcaaggtgaaggactccaaaacccttctctttggtgagaaggaagttgctgtgtttggctgcaggaaccctgaggagat

SEQ ID NO: 4 - DNA, 408 bp, Zea mays
  Clone ID: LIB3061-013-Q1-K1-D10
cacagatcacacacactcgagatctccatttcgatcccatttgaaatcaacccatcgtcgtgtcctccgtctagcagcctctcaccctcatggccaagatcaagatcgggatcaatgggttcggcaggatcggaaggctggtggccagggtggccctgcagagcgacgacgtcgagctcgtcgccgtgaacgaccccttcatcagcaccgattacatgacctacatgttcaagtatgacactgtgcacggacagtggaagcaccatgaggtcaaggtgaaggactccaagacccttctctttggtgagaaggaggtcgctgtgtttggctgcaggaaccctgaggagatcccatggtgctcggttggcgctgaatatgctgtcgagtctactggtgttttcactgacc

SEQ ID NO: 5 - DNA, 417 bp, Zea mays
  Clone ID: LIB3061-011-Q1-K1-H1
cacactcgagaactccatttcgatcccatttgaaatcaacccatcctcgtttcctccgtctagcagcctctcaccctcatggccaagatcaagatcgggatcaatgggtttggcaggatcggaaggctggtggccagggtggccctgcagagcgacgacgtcgagctcgtcgccgtgaacgaccccttcatcagcaccgattacatgacctacatgttcaagtatgacactgtgcacggacagtggaagcaccatgaggtcaaggtgaaggactccaagacccttctctttggtgagaaggaagttgctgtgtttggctgcaggaaccctgaggagatcccatggggttcggttggcgctgaatatgttgctgagtctactggtgttttcactgaccaggagaaggctgcagctcac

SEQ ID NO: 6 - DNA, 422 bp, Zea mays
  Clone ID: LIB3061-034-Q1-K1-H6
acacactcgagaactccatttcgatctcatttgaaatcaacccatcctcgtggcctgggtctagcagcctctcaccctcatggccaagatcaagatcgggatcaatgggtttggcaggatcggaaggctggtggccagggtggccctgcagagcgacgacgtcgagctcgtcgccgtgaacgaccccttcatcagcaccgattacatgacctacatgttcaagtatgacactgtgcacggacagtggaagcaccatgaggtcaaggtgaaggactccaagacccttctctttggtgagaaggaggttgctgtgtttggctgcaggaaccctgaggagatcccatggggttcggttggcgctgaatatgttgttgagtctactggtgttttcactgaccaggagaaggctgcagctcacttga

SEQ ID NO: 7 - DNA, 420 bp, Zea mays
  Clone ID: LIB3061-011-Q1-K1-D5
tcggaatcaacggcttcggaaggatcggcaggctcgtggccagggtcgccctccagagcgaggatgtcgagctcgtcgccgtcaacgaccccttcatcaccacggactacatgacctacatgttcaagtacgacaccgtccacggccactggaagcacagcgacatcacactcaaggactccaagacccttctcttcggtgacaagccggtcaccgtctttggcatcaggaaccctgaggaaatcccgtggggtgaggctggcgctgagtatgtcgtggagtccaccggcgtcttcactgacaaggacaaggctgctgcacatctcaagggtggtgccaagcaagctgatatctctgccccaagcaaagacgcacccatgtttgcagttggtgtcaatgaggacaagtacacctcggatg

SEQ ID NO: 8 - DNA, 403 bp, Zea mays
  unsure (1)..(403): unsure at all n locations; Clone ID: LIB3061-034-Q1-K1-A7
ctcatttgaaatcaacccatcctcgtttcctccgtctagcagcctctcacccgcatggccaagatcaagatcgggatcaatgggtttggcaggatcggaaggctggtggccagggtggccctgcagagcgacgacgtcgagctcgtcgccgtgaacgaccccttcatcagcaccgattacatgacctacatgttcaagtatgacactgtgcacggacagtggaagcaccatgaggtcaaggtgaaggactccaagacccttctctttggtgagaaggaggttgctgtgtttggctgcaggaaccctgaggagatcccatggggttcggttggcgctgaatatgttgctgagtctactggtgttttcactgaccaggagaaggctgcagctcacttgaanggtg

SEQ ID NO: 9 - DNA, 334 bp, Zea mays
  unsure (1)..(334): unsure at all n locations; Clone ID: LIB3061-037-Q1-K1-C8
gcaaaaaaaacttcctgaacaggaagaccgaaatgtangtcgaatgcatgcattgctgtaggaggaatagtccactggaggtacatgagcctaaaataatttgtggagtggtggttgacttcagtggtaagtgcctttcagagtgtaccggcatgcccaaaactgaaatttccggtttagatagaattgggggcgcggaagaaggtgccatgtgtgtgtttgtgtgtgttgcctgtggatggaggaattgatgggagtatgtgaactgatgtagctagtctatgtttgttaccattgagggcttgttcggttagctttcaatccatgtggattg

SEQ ID NO: 10 - DNA, 370 bp, Zea mays
  Clone ID: LIB3061-049-Q1-K1-G5
atcccgtcgcatcccatcccagtaccacccatctcgtcgtccgccgattcgatccggttcttccaacccaggggctgtgggggcgacgaagaggagcgtgggcaccctcggcgaggcggatctgaaggtgaagaaggtgttcgtgcgcgccgacctcaacgtccctctcgacgacgcccagaagatcaccgacgacacccgcatccgcgcctacgtccccaccatcaagttcctcctcgagaagggcgccaaggtcatcctcggcagccacctgtgtcgtgcaaaaggtgtcaccctaaagtacagcttgaagcctcttgatccacgcttgtctgagctccttggagttgaagtcgtgatggccaatgat

SEQ ID NO: 11 - DNA, 435 bp, Zea mays
  Clone ID: LIB3061-006-Q1-K1-B5
ccttcaagctggtcaccaagcccgcggcggcgtcgcccgctgctgctcactggggagagctcgcccgggggccgcagggtaccagccgcgttggctcttgacacaagcccacaaacacagggcgctccgcacggacaaaatctccgaaacgcccatggctaaggaagagagggttgatcgaagtgaaatattgacatgggatagcatcagacaagttttgattagactagaagacagcatcatatttggacttttggagagagcacagttttgttacaacgctgacacatatgatagcaatgctttccacatggatggttttggagggtctttggttgaatatatggttagagaaactgaaaagctccatgcacaggttgggaggtacaagagcccagatgagcaccctttcttttccaaggatctgcctgagcc

SEQ ID NO: 12 - DNA, 379 bp, Zea mays
  Clone ID: LIB3061-035-Q1-K1-B12
cctcccacttcgtgcgagcgtcccgaactaagttgctcgtggtggaggtggtttgtggcgatggccttcaagctggtcaccaagcccgcggcggcgtcgcccgctgctgctcactggggagatctcgcccggtggccgcagggtacgagccgcgttgccttcggaccagcgcccaggaacaaggggctccgcacgggcaacaactccgcaacgcccatggctaaggaagagagggttgatcgaagtgaaatattgacattggatagcatcagacaagttttgattagactagaagacagcatcatatttggacttttggagagagcacagttttgttacaacgctgacacatatgatagcaatgctatccacatggatg

SEQ ID NO: 13 - DNA, 392 bp, Zea mays
  Clone ID: LIB3061-034-Q1-K1-D8
caaattcatactttcaatcagagccagtatcctcgcattgttaccgaggacttcttgccacttcccagcaaagggaaatctgggaaggatggctggtatcctcctggtcatggtgatgtgtttccctctttgaataacagcggaaaacttgacatcttattggctcagggcaaagagtatgtctttgttgcaaactcagacaacttgggtgctatagtcgacatcaagatcctaaaccatctgatcaataaccagaacgagtactgcatggaagttactccaaagacgctggctgacgttaaaggtggcactctcatctcttacgaaaggaagagttcagctttttggagattgcccaagtacccgatgagcatgtgaatgaatttaaatca

SEQ ID NO: 14 - DNA, 369 bp, Zea mays
  unsure (1)..(369): unsure at all n locations; Clone ID: LIB3061-040-Q1-K1-B8
ctggctgaagtgcgtgccttcttcgatgtgcatgaccaagaaggaagccaccctgggggcgtccaccttgaaatgactgggcagaacgtgaccgagtgcatcggtggatcacggaccgtgaccttcgacgatctgagcgaccgctaccacacccactgcgacccaaggctgaatgcctcccagtccctggagctcgcctttatcatcgcagagaggctgaggaagaggaggatgcgatcggggctcaacagcagcctgccactgccgncactggctttctgagtagccggagccaaacacaaagggaggtaggaatagctgtggtgacctcggaggagaagagacagtcgacgccttgtttggtgatgc

SEQ ID NO: 15 - DNA, 362 bp, Zea mays
  Clone ID: LIB3061-002-Q1-K1-D12
gctaggcctaacttgaaggtgggctaaagtggacaacatggtggagagccttgagcggttgttatattcgccaagactgggctggattacgtttcttgctcccctttcagggtcccgatcgctaggctagctgcagctcaggtgcttgtctgagggtgcctctgctcgttggcagccggatcgcctgctgttggtgcatctggtgattaataatactactatgacagagccatgctctgtgaagagtattagtagcagcgctcataaaagctacagttccgtctctattctcagctatgtaaaacttccaaactgttcatgcttaaaactgaaggttttcttggtgtgaggtgtgcatgtcg

SEQ ID NO: 16 - DNA, 419 bp, Zea mays
  Clone ID: LIB3061-049-Q1-K1-C8
cacctcctcgcttgcactccgctcgtctgacatctcgtcccgtcctttcgtttcgaagggtcgggagccccgacgatggccaccaccgcggtgtcggtcgacgagaagctcgataagcttcgcgccgaggtcgccaagctcgaccagatcagcgagaacgagaagtccgggttcatcagcctcgtgtcacggtacctcagtggggaggcggagcagatcgagtggagcaagatccagacccctacggatgaagtggtggtgccctacgataccgtcgcgtcgcctcccgaagatctcgaggagacgaagaagctgctggataagctcgttgtgctcaagcttaacggagggctcgggacgaccatgggctgcactgggcccaagtctgtcattgaagtccgcaatgggttcacattcct

SEQ ID NO: 17 - DNA, 431 bp, Zea mays
  Clone ID: LIB3061-026-Q1-K1-D7
ctggcagtgactattcgacttctggaccctcccctccacgagttccttccagaagggggcgtcgaggaaatcgtgcgtgaactgtgttctgagacgggagccaaccaggaggatgccctcgcacggatcgaaaagctttcggaagtaaacccgatgcttggcttccgtggctgcaggcttggtatatcgtaccctgagctaacagaaatgcaagcccgtgccatctttgaagctgctatagcgatgaccaaccagggcgttcaagtctttccagagataatggttcctcttgttggaacaccgcaggaattgggacatcaggtggcccttatccgtcaagtcgctaacaaagttttcaccagtatggggaaaactattgggtacaagatcggaacgatgattgagattcccagggcagctctagtggctga

SEQ ID NO: 18 - DNA, 319 bp, Zea mays
  Clone ID: LIB3061-009-Q1-K1-F12
cagacgcggatacccctgaggatgcattggctgcgcggaacaacggggcagaaggaatgcgggttgtgccggacagagcacatgttcttcgcttcggatgagaggattaaggctgtgaggcagatgattatggctcccacagttgagctgaggcagcaagcgctggatcgccttctgccttaccagaggtctgacttcgaaggcatcttccgtgctatggatggactttcagtgactattcgacttctggaccctccactacacgagttcctttcagaagggaacgtcgaggaaatcgtgcgtgaactgtgttctgaga

SEQ ID NO: 19 - DNA, 329 bp, Zea mays
  Clone ID: LIB3061-041-Q1-K1-C5
ggtggcccttatccgtcaagtcgctaacaaagttttcaccagtatgggtaaaactatggggtacaagatcgggacgatgattgagattcccagggcagctctagtggctgacgagatcgcggagcaggctgaattcttctcctttggaacgaacgacctcacgcagatgacctttggctacagcagggatgatgtggggaagttcatccccatttatctggctcagggcatcctccagcatgaccccttcgaggttctcgaccagagaggagtgggcgagctggttaagcttgctacagagaggggccgcaaagctaggcctaacttga

SEQ ID NO: 20 - DNA, 422 bp, Zea mays
  unsure (1)..(422): unsure at all n locations; Clone ID: LIB3061-007-Q1-K1-A1
gatgattatggctcccacagttgagcctaggtagcaggcgctggatcgccttctgccgtaccagaggtctgacttcgaaggcatcttccgtgctatggatggactttcagtgactattcgacttctggaccctcccctccacgagttccttccagaagggaacgtcgaggaaatcgtgcgtgaactgtgttctgagacgggagccaaccaggaggatgccctcgcacggatcgaaaagctttcggaagtaaacccgatgcttggcttccgtggctgcaggcttggtatatcgtaccctgagctaacagaaatgcaaggccgtgccatctttgaagctgctataacgatgaccaaccagggcgttcaagtctttccagagataatggttcctcttgttggaacaccgcangaattgggacatc

SEQ ID NO: 21 - DNA, 330 bp, Zea mays
  Clone ID: LIB3061-002-Q1-K2-D12
gctaggcctaacttgaacgtgggcatctgaggagaacatggtcgagagccttcatcggttgctctcttcgtcaagtactgtgctggattacgtgtgttgctcccctttcaaggtcccgatcgctatgctagctgcagctcacgtgcttgtctgagggtgcctttgctcgatggcagtcggatctgctgctgacggtgcatgtggtgatttacaatactactatgacagagccatgctctgtgaaaagtattagtagcatggctcataaaagctacagttccgtatattttctcagctatgtaaaactttcaaactgctcatgcttaaaac

SEQ ID NO: 22 - DNA, 368 bp, Zea mays
  Clone ID: LIB3061-002-Q1-K2-H10
ccgcaagaagatttggttggtggactcaaagggtttgattgttgactctcgtaaaaacgccgttcagtcattcaaaaaaccttgggcacatgagcatgagcccttgacaaccttgtacgatgctgttcagtccatcaaacctacagttctgattgggacgtctggagttggaagaacattcacaaaagaagttgttgaggccatggcttccttcaatgagaggcctatcatcttttcactgtcaaatccaacctctcattctgaatgtactgctgaagaagcatataactggactcagggtcgtgcaatatttgccagtggcagtccatttgaccctgtggagtaccaagggaaagtttttggacctg

SEQ ID NO: 23 - DNA, 213 bp, Zea mays
  Clone ID: LIB3061-002-Q1-K1-H10
cggcaagaagattttgttggtggataaaaagggcttgattgttgactctcgggaagactcttttcaagcattcaaagccccttctagcacatgagcatgagcccttgacaaccttgtacgatgctgttcagtccatcaaacctacagttctgattgggacgtctggaattggaagaacattcacaaaagaagttgttgaagccatggcttcct

SEQ ID NO: 24 - DNA, 308 bp, Zea mays
  Clone ID: LIB3061-041-Q1-K1-B2
gtttcgctgccccgattcgccacgaagccgcactgtgagagagggacgcggtccgttgtcctcggcttgtacgcaatccttccgtcgctgcgaagctgatccctcgtgttcgccatggcccccagcgtcgccgtggaaaacctcaaccccaaggtcttgaaatgtgagtatgcagtccgtggcgagattgtcatccatgctcagcgcttgcagcaacaactacaaacacaaccagggtctcttccttttgatgagatcctgttctgcaacattgggaatcctcaatcccttggtcagcaacctgtgac

SEQ ID NO: 25 - DNA, 294 bp, Zea mays
  Clone ID: LIB3061-048-Q1-K1-D7
atacacgctgcagttactcaactgaaatgaggatagtatcgcagctttcgtgaataaaacctgaatcacccacaagaatgttctaagtactcagccagtggtatttactggttgacctactgtagtttgcgtcggaatagatatgtttttttactcttcgtggggcagttttgtactggtggattcataaggactctgattatggtgcgttcggaacttataataataagcacatgaaattttgcttcaaaaaaaaactatatcaccctcaatactacaacaacagtcagccac

SEQ ID NO: 26 - DNA, 387 bp, Zea mays
  Clone ID: LIB3061-017-Q1-K1-E11
cacgcaccttgccatcctgtcccagacgccggacaccatcaacgggtccatgcgtgtgacggtgcagggcgaggtcatcgagttctgcttcggggaggagcacctgtgcttccagactctgcagcgcttcacggccgccacgctggagcacggcatgcacccgccggtctctcccaagcccgagtggcgcaagctcatggacgagatggcggtcgtggccacggaggagtaccgctccgtcgtcgtcaaggagccgcgcttcgtcgagtacttcagatcggctacaccggagaccgagtacgggaggatgaacatcggcagccggccagccaagaggaggcccggcggcggcatcacgaccctgcgcgccatgccctggatcttctc

SEQ ID NO: 27 - DNA, 375 bp, Zea mays
  Clone ID: LIB3061-002-Q1-K2-G5
atcgatgttttcgatcccaagttcaacattgtctcccctggagcagacatgagtgtggactacccgtatacggaaaccgacaagagactcactgccttccatcctgaaatcgaggagctcatcaacagcgacgtcgagaactccgagcacaagttcgtgctgaaggacaagaagaagccgatcatcttctcgatggcgcgtctcgaccgcgtgaagaacatgacaggcctggtggagatgtacggcaagaacgcgcgcctgagggagctggcgaacctcgtgatcgtcgccggtgaccacggcaaggagtccaaggacagggaggagcatgcggagttcaagaagatgtacagcctcatcgacgagtacaagttg

SEQ ID NO: 28 - DNA, 424 bp, Zea mays
  Clone ID: LIB3061-024-Q1-K1-A12
gcgacaaggccgcggatatcctggtcaacttctttgacaaatgcaaggcagatccgagctagtgggacaagatctcacagggcggcctgcagagaatctatgagaagtacacctggaagctctactccgagaggctgatgaccctgaccggcgtgtacgggttctggaagtacgtgagcaacctggagaggcgcgagacccgccgctacatcgagatgttctacgccctgaagtaccgtagcctggcaagccaggttccgctgtccttcgattagtacggggaaagaagaagaagaagaagcccaggccggagaaccatcgcctgcatttcgatctgtttcaccgcaattcgcattgttagtcgtgtattggagttatgtgtacttggtttccaagaactttggttccttctcgtatattttcc

SEQ ID NO: 29 - DNA, 337 bp, Zea mays
  Clone ID: LIB3061-026-Q1-K1-D3
gtcgcattcgtgcagcctgcgttctacgaagcgttcggcctgactgtgatcgagtccatgacgtgcggtctgccaacgatcgcgacctgccatggtggccctgctgagatcatcgtggacggggtatctggcctgcacattgacccttaccacagctgacaaggccgctgatatcctggtcaacttctttgacaaatgcaaggcagatccgagctactgcgacaagatctcacagggcggcctgcagagaatctatgacaagtgcacctggaagctctactccgagaggctgatgaccctgaccggcgtgtacgggttctggaagtacgtgagcaac

SEQ ID NO: 30 - DNA, 384 bp, Zea mays
  Clone ID: LIB3061-056-Q1-K1-D8
atcaacagcgacgtcgagaacttcgagcacaagttcgtgctgaaggacaagaagaaggcgatcatcttctcgatggcgcgtctcgaccgcgtgaagaacatgacaggcctggtggagatgtacggcaagaacgcgcgcctgagggagctggcgaacctcgtgatcgtcgccggagaccacggcaaggagttcaaggacagggaggagcaggcggagttcaagaagatgtacagcctcatcgacgagtacaagttgaagggccatatccggtggatctcggcgcagatgaaccgcgtgcgcaacggtgagctgtaccgttacatttgcgataccaagggcgcattcgtgcagcctgcgttctacgaaacgttcggcctgactgtg

SEQ ID NO: 31 - DNA, 379 bp, Zea mays
  Clone ID: LIB3061-014-Q1-K1-D4
ggacaccgtggggcagtacgagttcctgattgtgtttactcttcctgggctctagcgcgtggtccatggcatcgatgttttcgatcccaagttcaacattgtctcccctggagcagacatcactgtttactacccgtatacggaaaccgacaagagactcactgccttgcatcctgaaatcgaggagctcatctacagcgacttcgataactccgagcacaatttcatgctgaaggactacatgatgccgatcatcttctcgatggcgcgtctataccgcgtgaagaacatgactggcctgatcgagatgtacggcatgatcgcgcgcctgagggagctgtcgaacctcgtgatcgttgccggtgaccactgcaaggag

SEQ ID NO: 32 - DNA, 439 bp, Zea mays
  Clone ID: LIB3061-015-Q1-K1-A12
agaacgcgcgcctgagggagctggcgaacctcgtgatcgttgccggtgaccacggggaggagtccaaggacagggaggagcaggcggagttcaagaagatgtacagcctcatcgacgagtacaagttgaagggccatatccggtggatctcggcgcagatgaaccgcgtccgcaacggggagctgtaccgctacatttgcgatacgaagggcgcattcgtgcagcctgcgttctacgaagcgttcggcctgactgtgatcgagtccatgacgtgcggtctgccaacgatcgcgacctgccatggtggccctgctgagatcatcgtggacggggtatctggcctgcacattgacccttaccacagcgacaaggccgcggatatcctggtcaacttctttgacaaatgcaaggcagatccgagctactgggacaagatctc

SEQ ID NO: 33 - DNA, 352 bp, Zea mays
  Clone ID: LIB3061-005-Q1-K1-C9
gcgcagatgaaccgcgtccgcaacggggagctgtaccgctacatttgcgatacgaagggcgcattcgtgcagcctgcgttctacgaagcgttcggcctgactgtgatcgagtccatgacgtgcggtctgccaacgatcgcgacctgccatggtggccctgctgagatcatcgtggacggggtatctggcctgcacattgacccttaccacagcgacaaggccgcggatatcctggtcaacttctttgacaaatgcaaggcagatccgagctactgggacaagatctcacagggcggcctgcagagaatctatgagaagtacacctggaagctctactccgagaggctgatga

SEQ ID NO: 34 - DNA, 326 bp, Zea mays
  Clone ID: LIB3061-016-Q1-K1-G2
gaaatcgaggagctcatcaacagcgacgtcgagaactccgagcacaagttcgtgctgaaggacaagaagaagccgatcatcttctcgatggcgcgtctcgaccgcgtgaagaacatgacaggcctggtggagatgtacggcaagaacgcgcgcctgagggagctggcgaacctcgtgatcgtcgccggtgaccacggcaaggagtccaaggacagggaggagcaggccgagttcaagaagatgtacaggctcatcgacgagtacaagttggagggccatatccggtggatctaggcgcagatgaaccgggttccgcacggggagct

SEQ ID NO: 35 - DNA, 451 bp, Zea mays
  Clone ID: LIB3061-028-Q1-K1-A9
agcagacatgagtgtgtactacccgtatacggaaaccgactagagactcactgccttccatcctgaaatcgaggagctcatctacagcgacgtcgagaactccgagcacaagttcgtgctgaaggacaagaagaagccgatcatcttctcgatggcgcgtctcgaccgcgtgaagaacatgacaggcctggtcgagatgtacggcatgaacgcgcgcctgagggagctggcgaacctcgtgatcgttgccggtgaccactgcaaggagtccaaggacagggaggagcaggcggagttcaagaagatgtacagcctcatcgacgagtacaagttgaagggccatatccggtggatctcggcgcagatgaaccgcgtccgcaacggggagctgtaccgctacatttgcgatacgaagggcgcattcgtgcagcctgcgttctacgaagcgttc

SEQ ID NO: 36 - DNA, 419 bp, Zea mays
  unsure (1)..(419): unsure at all n locations; Clone ID: LIB3061-004-Q1-K1-F9
ggcgaggatgacgagctcctttctgaactaaaagataagtgggatgcaatggagaacaggtcctctcttgccttgtatggtgctggagcaatcctcgctgtctggatatccttggttgtagtgagatctctcgactctgtcccgttgctcccaggcatattggagctagtcgggctcagctactctggatggtttgtgtaccgatacctgctttttcaggaaaaccggaaagaattggccggtgttatcgatgatataaagagaaggattgttggcgatgatgaatagctgtttcctggtttgtaattctatttatctcgccctgtttggttctgaggaattgaaaaataatccaatggtgaagtgagaaagcactntctagttattggttntaattcatggngtccaaacaggctcct

SEQ ID NO: 37 - DNA, 420 bp, Zea mays
  Clone ID: LIB3061-028-Q1-K1-C1
ggttctgtagcttccggtacgcttgttaagtggacaaaggcattttccattaatgatgctgtaggcgaagatgtggtggctgaactgcaaacagccatggagaagcaaggtctggacatgcatgtagctgcattgattaatgatgctgttgggacgctggcgggagcaaggtactacgacaaagatgttgtcgctggtgtaatatttggcactggcacaaacgcagcatatgttgagaaggcaaatgctattgcaaaatgggagggtgagctgccccattcaggagacatggtcatcaacatggaatggggtaacttcttctcatctcatcttcccatcactgaatatgatcaagaattagataaggagagcttaaatccaggagaacagatttacgagaagttaacgtcaggaatgtat

SEQ ID NO: 38 - DNA, 418 bp, Zea mays
  Clone ID: LIB3061-030-Q1-K1-G12
cgacgagctcaacgtcgagctcatcaagagggctgcggtcttccactacggatcagggagcttgattgctgagccttgccggacagcacatctccgtgccatggagattgccaaagaggcaggtgcactgctctcttatgacccaaacctgagggaggcactatggccatcccgtgaggaggcccgcacccagatcttgaacatctgggaccaggcagacattgtcaaggtcagcgaagtcgagctcgagttcttgacaagcatcgactcggtggaggacgatgttgtcatgaagctgtggcggcctaccatgaagctgctcctagtgactcttggagatcaagggtgcaagtactatgccagggatttccatggcgctgtgccttccttcaaagtacaacaagttgatacaactggc

SEQ ID NO: 39 - DNA, 295 bp, Zea mays
  Clone ID: LIB3061-030-Q1-K1-G11
cgacgagctcaacgtcgagctcatcaagagggctgcggtcttccactacggatcaataagcttgattgctgagccttgccggacagcacatctccgtgccatggagattgccaaagaggcaggtgcactgctctcttatgacccaaacctgagggaggcactatggccatcccgtgaggaggcccgcacccagatcttgagcatctgggaccaggcagacattgtcaaggtcagcgaagtcgagctcgagttcttgacaggcatcgactcggtggaagacgatgttgtcatgaag

SEQ ID NO: 40 - DNA, 406 bp, Zea mays
  Clone ID: LIB3061-030-Q1-K1-A12
ctcatctcttacgaaggaagagttcagcttttggagattgcccaagtacccggtgagcatgtgaatgaatttaaatcaatcgagaagtttaagatattcaacactaacaacttgtgggtgaaccttaaagctatcaagagactcgtagaggctgaggcacttaagatggaaattattccaaaccccaaggaagttgatggtgtgaaagtccttcaactcgaaaccgcagctggtgcagctattcggttcttcgacaaagcgattggaattaatgttccccgctcaaggtttctcccagtgaaggctacatctgatctgttgcttgtgcagtctgatctttacaccttggttgatggctttgtcatccgcaacccatccagagcgaatccagctaacccttcaattg

SEQ ID NO: 41 - DNA, 412 bp, Zea mays
  Clone ID: LIB3061-023-Q1-K1-A1
ctgacgttaagggtggcactctcatctcttacgaaggaagagttcagctgttggagagtgcccaagtacccgatgagcatgtgaatgaatttaaatcaatcgagaagtttaagatattcaacactaacaacttgtgggtgaaccttaaagctatcaagagactcgtagaggctgaggcacttaagatggaaattattccaaaccccaaggaagttgatggtgtgaaagtccttcaactcgaaaccgcagctggtgcagctattcggttcttcgacaaagcgattggaattaatgttccccgctcaaggtttctcccagtgaaggctacatctgatctgttgcttgtgcagtctgatctttacaccttggttgatggctttgtcatccgcaacccatccagagcgaatccagc

SEQ ID NO: 42 - DNA, 319 bp, Zea mays
  Clone ID: LIB3061-016-Q1-K1-G11
atccttccggtaaacctcgccatctaattggctcatggcatggagtatgtcttcgttgctaactcggacagcttggttgctatagtcgacatcaagatcctgaaccatctgatcaataaccagaatgaatactgcatggaggttactccaaaaacattggctgatgttaaaggcggtactctcatctcttacgaaggaagagttcagcttttggagattgcccaagtacctgatgagcatgtgaatgagtttaaatcaatcgagaagtttaagatattcaacactaacaacttgtgggtgaacctttaagctgtcaaga

SEQ ID NO: 43 - DNA, 444 bp, Zea mays
  Clone ID: LIB3061-029-Q1-K1-G11
ctgaaggacaagaagaagccgatcatcttctcgatggcgcgtctcgaccgcgtgaagaacatgacaggcctggtcgagatgtacggcaagaacgcgcgcctgagggagctggcgaacctcgtgatcgttgccggtgaccacggcaaggagtccaaggacagggaggagcaggcggagttcaagaagatgtacagcctcatcgacgagtacaagttgaagggccatatccggtggatctcggcgcagatgaaccgcgtccgcaacggggagctgtaccgctacatttgcgatacgaagggcgcattcgtgcagcctgcgttctacgaagcgttcggcctgactgtgatcgagtccatgacgtgcggtctgccaacgatcgcgacctgccatggtggccctgctgagatcatcgtggacggggtatctggcctgcacattgaccct

SEQ ID NO: 44 - DNA, 419 bp, Zea mays
  Clone ID: LIB3061-011-Q1-K1-D9
cactgccttccatcctgaaatcgaggagctcatctacagcgacgtcgagaactccgagcacaagttcgtgctgaaggacaagaagaagccgatcatcttctcgatggcgcgtctcgaccgcgtgaagaacatgacaggcctggtcgagatgtacggcaagaacgcgcgcctgagggagctggcgaacctcgtgatcgttgccggtgaccacggcaaggagtccaaggacagggaggagcaggcggagttcaagaagatgtacagcctcatcgacgagtacaagttgaagggccatatccggtggatctcggcgcagatgaaccgcgtccgcaacggggagctgtaccgctacatttgcgatacgaagggcgcattcgtgcagcctgcgttctacgaagcgttcggcctgactgtgatcg

SEQ ID NO: 45 - DNA, 229 bp, Zea mays
  Clone ID: LIB3061-024-Q1-K1-H5
tctttgacaaatgcaaggcagatccgtgctactggtacaagatctcacagggcggcgtgcacagaatctatgagacgtacacctggaagctctacttcgagaggctgatgaccctgaccggcgtgtacggcttctggaagtacgtgagcatactgtagaggcacgagaccctccgctacatcgagatgtactacgccctgaagcaccggatcctggcaagccaggttcc

SEQ ID NO: 46 - DNA, 379 bp, Zea mays
  unsure (1)..(379): unsure at all n locations; Clone ID: LIB3061-020-Q1-K1-F2
ggcgcattcgtgcagcctgcgttctacgaagcgttcggcctgactgtgatcgagtccatgacgtgcggtctgccaacgatcgcgacctgccatggtggccctgctgagatcatcgtggacggggtatctggcctgcacattgacccttaccacagcgacaaggccgcggatatcctggtcaacttctttgacaaatgcaaggcagatccgagctactgggacaagatctcacagggcggcctgcagagaatttatgagaagtacacctggaagctctactccgagaggctgatgaccctgaccggcgtgtacgggttctggaagtacgtgagcaacctggagaggcgcgagacccgncgctacatcgagatgttctacg

SEQ ID NO: 47 - DNA, 424 bp, Zea mays
  Clone ID: LIB3061-022-Q1-K1-C2
ctcattgttaccaggctgttgcctgatgctgctgggactacgtgcggtcagcggctggagaaggtcattggtactgagcacacagacatcattcgcgttccgttcagaaatgagaatggcatcctccgcaagtggatctctcgttttgatgtctggccatacctggagacatacactgaggatgtttccagtgaaataatgaaagaaatgcaggccaagcctgaccttatcattggcaactacagcgatggcaacctagtcgccactctgctcgcacacaagttgggagtcactcagtgtaccatcgctcatgccttggagaaaaccaaataccccaactcggacatctacttggacaagttcgacagccagtaccacttctcttgccagttcacagctgaccttattgccatgaaccacactg

SEQ ID NO: 48 - DNA, 409 bp, Zea mays
  unsure (1)..(409): unsure at all n locations; Clone ID: LIB3061-008-Q1-K1-H11
gtgcaacattgtctccctttagcatactgagtgtttactacccgtatacggaaaccgacaagagactcactgccttccatcctgaaatcgaggagctcatctacagcgacgtcgagaactccgagcacaagttcgtgctgaaggacaagaagaagccgatcatcttctcgatggcgcgtctcgaccgcgtgaagaacatgacaggcctggtcgagatgtacggcaagaacgcgcgcctgagggagctggcgaacctcgtgatcgttgccggtgaccacggcaaggagtccaaggacagggaggagcaagcggagttcaagaagatgtacagcctcatcgacgagtacaagttgaaaggccatatccggtggatctcggcgcagatgaaccgcgtncgcaacggggagct

SEQ ID NO: 49 - DNA, 392 bp, Zea mays
  Clone ID: LIB3061-025-Q1-K1-B1
ctccgaagatcctcattgttaccaggctgttgcctgatgctgctgggactacgtgcgggcagcggctggagaaggtcattggtactgagcacacagacatcattcgcgttcccttcagaaatgagaatggcatcctccgcaagtggatctctcgttttgatgtctggccatacctggagacatacactgaggatgtttccagtgaaataatgaaagaaatgcaggccaagcctgaccttatcattggcaactacagcgatggcaacctagtcgccactctgctcgcgcacaagttgggagtcactcagtgtaccatcgctcatgccttggagaaaaccaaataccccaactcggacatatacttggacaaattcgacagccagtaccacttc

SEQ ID NO: 50 - DNA, 418 bp, Zea mays
  Clone ID: LIB3061-028-Q1-K1-C4
cgcgtctcgaccgcgtgaagaacatgacaggcctggtggagatgtacggcaagaacgcgcgcctgagggagctggcgaacctcgtgatcgtcgccggtgaccacggcaaggagtccaaggacagggaggagcatgcggagttcaagaagatgtacagcctcatcgacgagtacaagttgaagggccatatccggtggatctcggcgcagatgaaccgcgtccgcaacggggagctgtaccgctacatttgcgataccaagggcgcattcgtgcagcctgcgttctacgaagcgttcggcctgactgtgatcgagtccatgacgtgcggtctgccaacgatcgcgacctgccatggtggccctgctgagatcatcgtggacggggtatctggcctgcacattgacccttaccacagcga

SEQ ID NO: 51 - DNA, 376 bp, Zea mays
  Clone ID: LIB3061-021-Q1-K1-A8
gtttgtaccccttgctgaacttcctcaaggctcataactacaagggcacgacgatgatgttgaatgacagaatccaaagccttcgtggtctccaatcatccctgagaaaggcagaggagtatctactgagtgttcctcaagacactccctactcggagttcaaccataggttccaagagcttggcttggagaagggttggggtgacactgcgaagcgtgtactcgacacactccacttgcttctcgaccttctggaggcccctgatcctgccaacttggagaagttccttggaactataccaatgatgttcaacgttgttatcctgtctcctcatggctacttcgcccagtccaatgtgcttggataccctgacac

SEQ ID NO: 52 - DNA, 412 bp, Zea mays
  Clone ID: LIB3061-025-Q1-K1-B5
ctccgaagatcctcattgttaccaggctgttgcctgatgctgctgggactacgtgcggggatcggctggagaaggtcattggtactgagcacacagacatcattcgcgttcccttcagaaatgagaatggcatcctccgcaagtggatctctcgttttgatgtctggccatacctggagacatacactgaggatgtttccagtgaaataatgaaagaaatgcaggccaagcctgaccttatcattggcaactacagcgatggcaacctagtcgccactctgctcgcgcacaagttgggagtcactcagtgtaccatcgctcatgccttggagaaaaccaaataccccaactcggacatatacttggacaaattcgacagccagtaccacttctcttgccagttcacagctga

SEQ ID NO: 53 - DNA, 424 bp, Zea mays
  Clone ID: LIB3061-008-Q1-K1-C7
ggcaactacagcgatggcttcctagttctcactctgctcgcacacaagttgggagtgactcagtgtaccatcgctcatgccttggagaaaaccaaataccccaactcggacatctacttggacaagttcgacagccagtaccacttctcttgccagttcacagctgaccttattgccatgaaccacactgatttcatcatcaccagcacattccaagaaatcgcgggaagcaaggacaccgtggggcagtacgagtcccacatcgcgttcactcttcctgggctctaccgtgtcgtccatggcatcgatgttttcgatcccaagttcaacattgtctcccctggagcagacatgagtgtttactacccgtatacggaaaccgacaagagactcactgcctttcatcctgaaatcgaggagctca

SEQ ID NO: 54 - DNA, 447 bp, Zea mays
  unsure (1)..(447): unsure at all n locations; Clone ID: LIB3061-049-Q1-K1-E5
ctgatcctgccaacttggagaagttccttggaactataccaatgatgttcaatgttgtgatccgttctcctcatggctacttcgctcagtccaatgtgcttggataccctgacactggcggtcaggttgtgtacattctggatcaagtccgtgctttggagaatgagatgcttctgaggattaagcagcaaggccttgatatcactccgaagatcctcattgttaccaggctgttgcctgatgctgctgggactacgtgcggtcagcggctggagaaggtcattggtactgagcacacagacatcattcgcgttccgttcagaaatgagaatggcatcctccgcaagtggatctctcgttntgatgtctggccatacctggagacatacactgaggatgtttccagtgaaataatgaaagaaatgcaggccaagcctgaccttatca

SEQ ID NO: 55 - DNA, 278 bp, Zea mays
  Clone ID: LIB3061-021-Q1-K1-G6
gtgtgggtagcctgcgttctacgaagcgttcggcctgactgtgatcgagtccatgacgtgcggtctgccaacgatcgcgacctgccatggtggccctgctgagatcatcgtggacggggtatctggcctgcacattgacccttaccacagcgacaaggccgcggatatcctggtcaacttctttgacaaatgcaaggcagatccgagctactgggacaagatctcacagggcggcctgcagagaatctatgagaagtacacctggaagctctactccg

SEQ ID NO: 56 - DNA, 408 bp, Zea mays
  Clone ID: LIB3061-039-Q1-K1-D2
aagatgtacagcctcatcgacgagtacaagttgaagggccatatccggtggatctcggcgcagatgaaccgcgtccgcaacggggagctgtaccgctacatttgcgatacgaagggcgcattcgtgcagcctgcgttctacgaagcgttcggcctgactgtgatcgagtccatgacgtgcggtctgccaacgatcgcgacctgccatggtggccctgctgagatcatcgtggacggggtatctggcctgcacattgacccttaccacagcgacaaggccgcggatatcctggtcaacttctttgacaaatgcaaggcagatccgagctactgggacaagatctcacagggcggcctgcagagaatctatgagaagtacacctggaagctctactccgagaggctgatg

SEQ ID NO: 57 - DNA, 434 bp, Zea mays
  Clone ID: LIB3061-051-Q1-K1-G8
ccagttcacagctgaccttattgccatgaaccacaccgatttcatcatcaccagcagattccaagaaatcgcgggaagcaaggacaccgtggggcagtacgagtcccacatcgcgttcactcttcctgggctctaccgtgtcgtccatggcatcgatgttttcgatcccaagttcaacattgtctcccctggagcagacatgagtgtttactacccgtatacggaaaccgacaagagactcactgccttccatcctgaaatcgaggagctcatctacagcgacgtcgagaactccgagcacaagttcgtgctgaaggacaagaagaagccgatcatcttctcgatggcgcgtctcgaccgcgtgaagaacatgacaggcctggtcgagatgtacgggaagaacgcgcgcctgagggagctggcgaacctcgtga

SEQ ID NO: 58 - DNA, 285 bp, Zea mays
  Clone ID: LIB3061-043-Q1-K1-B10
cagacagcttccacagtcaccagagcactagagcagagcaacaaccgacaagagcagagggagagcgtcgtcagcgagcccagcagatacgagagagaggatggcggacatcgcgttgctggtggcggagcagttcgagaagacggcaaggcgaggcgcccccggcggggacagcggtagcgacagcgggaccggcggcgagacgaggaacttcggggccgtggccaaggtgtggagctcttgggtggagtccgccttcgccgccgcgtccggggtcagattcac

SEQ ID NO: 59 - DNA, 415 bp, Zea mays
  unsure (1)..(415): unsure at all n locations; Clone ID: LIB3061-035-Q1-K1-A12
cgcagttttcacagacagcttccacagtcaccagagcactagagcagagcaacaaccgacaagagcagagtgagatcgtcgtcagcgagcccagcagatacgagagagaggatggcggacatcgcgttgctggtggcggagcagttcgagaagacggcaaggcgaggcgcccccggcggggacagcggtagcgacagcgggaccggcggcgagacgaggaacttcggggccgtggccaaggtgtggagctcttgggtggagtccgcctccgccgccgcgtccggggtcagattcaccgtcgcggtgcagctggagcccaagaccgggctcgcgctggccgncgncgacggcctcttctccgcctagcgtcctgcttccatgtcttcctcctgagcagtgccagtggtcgagcgag

SEQ ID NO: 60 - DNA, 334 bp, Zea mays
  unsure (1)..(334): unsure at all n locations; Clone ID: LIB3061-037-Q1-K1-G8
ctgcacgcagctatagctcgcataattaactcatgggtgcatagagatatgccgccgacgacccatatctatgggtccgtccccttgcactgcatcttcttcttcctcctnctcgacctccttcaattattcctagcgtttgcttctcccttccttgacctttgcttggaaccatcgatagttacttattgggcatggagcacgtcatctcaatgcaggagatcctcgggcccttctgggagctgctgccagcgccagcgccagatccagagccggagcagcctccggtaaccggcatcgtcgtcggcagtgtcatagacgttgctgctgctgg

SEQ ID NO: 61 - DNA, 398 bp, Zea mays
  unsure (1)..(398): unsure at all n locations; Clone ID: LIB3061-045-Q1-K1-H8
caacaacaacaaccgcagcaccaccaccaacaacaacaacaacagcaccaacaacagcatcaatgtgaaggccaacaacaacatcaccaacaatcacaaggccatgtgcaacaacacgaacagagccatgagcaacaccaaggacagagccatgagcaacaacatcaacaacaattccagggtcatgacaagcagcaacaaccacaacagcctcagcaatatcagcagggccaggaaaaatcacaacagcaacaatgtcattgccaggagcagcaacagactacaaggtgcagctataactactatagcagtagctcaaatctaaaaaattgtcatgaattcctaaggcagcagtgcagccctttggtaatgccttttctncaatcacgtttgataca

SEQ ID NO: 62 - DNA, 417 bp, Zea mays
  Clone ID: LIB3061-046-Q1-K1-F6
ctgcccatgacacataaagaccggttccagaagttgggtattcgtcctccaaaaggggttcttttgtacggaccaccaggaactggcaagacactcatggctcgtgcatgtgctgcacagacgaatgcaacgtttcttaaattagctggtccacaacttgtgcagatgtttattggtgatggagcaaagcttgtccgggatgcattccagcttgccaaagagaaagctccttgtattatatttattgatgagatagatgccattggcaccaaacgttttgatagtgaagttagcggtgatagagaagttcagcggacaatgttggaattattgaatcaactggatggattcagcagcgatgagagaataaggtcatagctgcaactaaccgtgctgacatccttgaccctgctctga

SEQ ID NO: 63 - DNA, 438 bp, Zea mays
  Clone ID: LIB3061-021-Q1-K1-D2
cagaggcatcttctgaccaatgaaaatggtgaaaccaggtagagtatctgactcaaagataacaacgtttacatgcagatacaagacaacaatatcattgttctctgaacacacatgacctccattgtgacccagcctgtgatgtcttctcgtggtcattctcaagctggctgaagttccccttctccttgatcagctggatgtggtggtgcttgcagtacagcttcccctcgtgcgcaatgtagttagaagggctgatggtgcaccctccatggcagcacttgaagcagctcttgtggtacatagtgttgttaacagtgacctggatgcttaaccggttgtcaagtgaagaaggctcaaactaccggaagaatgattgagatggttgaacacagaatcttaccctctcagttggatagactgtcttgctgcatccaa

SEQ ID NO: 64 - DNA, 412 bp, Zea mays
  Clone ID: LIB3061-034-Q1-K1-B7
cccacgcgtccgattctacctatgatatgattggaggccttgaccagcaaatgaaagggatcaaagaggtcattgagcttccaatcaaacatccggaactgtttgagagccttggaattgcacaaccaaagggtgtccttctttatggaccttcgggcacaggaaagacattgttggcacgtgcggttgctcatcacactgactgcaccttcatcagggtgtctggttctgagttggttcacaagtatattggtgagggctcccggatggttagggaactctttgttatggccagggaacatgcaccatccattatatttatggatgaaattgactgtatcggatctgctagaatggagtctggaactggcaacggtgacagtgaaattcagcgtactatgcttgaacttct

SEQ ID NO: 65 - DNA, 437 bp, Zea mays
  Clone ID: LIB3061-045-Q1-K1-A8
atcgatcggtgcttttaatctctgagcaagcgatcgagctcaccaacggccaccgcgctcaagagtagcagccggccggagccgaaaacgacgaggcggtggcatggggaggccgccgtgctgcgacaaggtgggagtgaagaaagggccgtggacccccgaggaggacctcatgctcgtctcctatgtccaggagcacggccccgggaactggcgcgccgtgccgaccaacaccgggctgatgcgctgcagcaagagctgcaggttgcggtggacaaactacctccggccgggaatcaagcgcggcaactttaccgaccaggaggagaagctcatcatccaccttcaggctctccttggcaaccggtgggcggcgatagcgtcctactttgccgagaggacggacaacgatatcaagaactactggaacacgcacc

SEQ ID NO: 66 - DNA, 396 bp, Zea mays
  unsure (1)..(396): unsure at all n locations; Clone ID: LIB3061-020-Q1-K1-G7
ggtgatagtaaatgatcaatggggagacagccggctgtgacaggagggggtgaagcgagggccatggacagcggagaggacaagaagctcattagcttatcctgacacatggccggtgctgctggcggcagtgcctaaactcgcagggctgcttcgttgcggcaagagctgccgtctgcggtggactaactatcttcgccctgacctcaagcgtggcctcctcagcactgccgaggagcagcttgtcattgacctccatgccaagctcggaaatagatggtcccagattgctgccaagttgcctgngagaacagacaacgagatcaagaaccactggaacacgcacatcaagaagaagcttgtcaagatgggtgtcgacccggccacacacgagcc

SEQ ID NO: 67 - DNA, 365 bp, Zea mays
  Clone ID: LIB3061-005-Q1-K1-G1
cttttccccactcccgggtctccagcattcctatcctctccccgcccgcccgtgccgccgccgcggcttccgttggtctcccgagccaagatgaatgttgaaaagctcaagaagatggcaggtgctgtgcgcaccggggggaagggtagcgtgcgcaggaagaagaaggcagtccacaagactacaaccacagatgacaaacggcttcaaagcaccttgaaaagaataggagtgaacagcattcctggtattgaagaggtcaacatctttaaggatgatgttgttattcagtttgtaaatcctaaagtgcaagcgtcaattggtgctaatacatgggtggtcagtggaactccacagacaaagaa

SEQ ID NO: 68 - DNA, 399 bp, Zea mays
  unsure (1)..(399): unsure at all n locations; Clone ID: LIB3061-001-Q1-K2-F2
ggtggctggagttcctggtgtcacagaggctctgtttctggctaggcaagctgctttggcggaggggagcaagcctgctagcaccccaatgctttacagctgtgctctttgtggaaaggagtacagaagctcgaaagctcacgagcagcatcttaactcgcgatcacatcttttgaaagcctctcaggagcccaatgcctctattgctggtatcacgatagtcaagccacttcctgaacgagtctcacgaagagctccatctgcagtagaggaggatcaagacgacgatgaggaagaagagtgggttgaagttgacccaagtgagatggagttggctgatgagtctacttcaaacatgcangaagatgagcactcctcaaaatcagatgatgacatgga

SEQ ID NO: 69 - DNA, 442 bp, Zea mays
  unsure (1)..(442): unsure at all n locations; Clone ID: LIB3061-022-Q1-K1-A3
gccgccgtatcaaacgcactctcctccgccgtcgcccgaggcaagatggttctccagaacgacatcgaccttctgaacccgccggcagagctcgagaaactcaagcacaagaagaagcgcctcgtccaatcccccaactccttcttcatggatgtcaagtgccagggatgcttcagcataaccacggttttcagccactcccagactgttgttgtgtgcccaggctgccaaactgttctctgccagcccacgggaggaaaggcgaggctcacggagggatgctctttccgccggaagggagactagagtggagtctgttattagtactggatcggttgtcaatctccagtatgtggattcaaattttgctctgtgcccagacgttaaggtcatgaactaccttagctaaggctntccgcatgtntgtctggtgctgctatgt

SEQ ID NO: 70 - DNA, 455 bp, Zea mays
  unsure (1)..(455): unsure at all n locations; Clone ID: LIB3061-048-Q1-K1-C1
gctgcagcgcctccgccgccgccgccgcatctaacgcagttccctccgccgcagcccgaggcaagatggttctcgagaacgacattgatctgctcaacccgccggcagaactcgagaagctcaagcacaagaaaaagagactcgtccagtcgcccaactccttcttcatggatgttaagtgccaggggtgcttcagcataaccactgttttcagccactcccagactgttgttgtgtgccctggctgccaaactgtcctctgccaacccacaggaggaaaggcaaggctcactgagggctgctctttccgcaggaagggagactagagcggatgtggtcttcaagttttgctctatgccagatactagcgtcatgaactgcctttagctaagattttccataagttggtctcgagcagctatgtgttgcatgttggctacttncaaacttatatc

SEQ ID NO: 71 - DNA, 323 bp, Zea mays
  Clone ID: LIB3061-013-Q1-K1-F7
gcgaagctcaaggagaagattgagaagatgtttaaaggtgaaaagataaatagcacagagaacaggtcagtgcttcatgtagctctgagggctccaagagatgcagtcataaacagtgatggggtgaatgtggtccctgaggttcggagtgttaaagataaaatcaagcagttttcagagacttttagaagtggatcatgggttggagcaactggaaaaccgttgacaaatgttgtgtcggttggaataggtggtagctttcttggccctctatttgtgcatactgcactccagaccgatccagaagcagcagaatgtgcaaa

SEQ ID NO: 72 - DNA, 355 bp, Zea mays
  Clone ID: LIB3061-025-Q1-K1-C9
attcactataaccttgatacctggtagatagccatgctttatgcatatcgtattgcagatgagctcatcaagaatgctgactacattggcacccctgacaagggtatccttgctgctgatgagtccactggcaccattggcaagcgcctttccagcatcaatgtctagaacgttgacgagaaccgccgtgccctccgtgagctcctattctgctgccctggtgctctccagtacatcagcggtgtgatcctcttcgaggagaccctgtaccagaagaccaaggatggctagccttctgtcgatgtcctgaacgagggaggcgttctccatagcatcaaggttgacaagggcacca

SEQ ID NO: 73 - DNA, 454 bp, Zea mays
  Clone ID: LIB3061-021-Q1-K1-G9
gacctttacagcagctaaacttacaagatatctccgatggttaggtcatgaaacaaaacacttcaatgttggaaagtaccgccggctcaagcatggaactaatcagactgctgatttctttcgtggagataacagggagggtgtggaggcacgtaacgaggtggctgcattagcaatggaagatatgctatcttggatgcaggagggtggtcaggttggtattttcgatgccacaaacagcacaagaatacggaggaacatgctgatgaaaatggctgaaggaaaatgtaagatcatctttttggaaacattatgtaatgaccaagatgttcttgagagaaatatacgattgaaagttcaacaaagtcctgattatgcagagcaaacagattttgaagctggtgtacaagatttcaaagagcgattgacctattatgaaaaggtctatgaaccg

SEQ ID NO: 74 - DNA, 423 bp, Zea mays
  unsure (1)..(423): unsure at all n locations; Clone ID: LIB3061-027-Q1-K1-A8
aagctccgacccaatctaatcgacacctcaccgagatgggccgcaagttcttcgtcggtggcaactggaaatgcaatggaaccacagatcaggtcgagaagattgtcaaaaccctgaatgaaggacaggttcccccttcagatgttgtcgaggtcgttgtcagccctccttatgtcttccttcctgtggtcaagagccagctgcgccaagagttccatgttgctgctcagaactgctgggtgaagaagggaggtgctttcactggtgaagtcagtgctgagatgctcgtcaaccttggtgttccctgggtcattcttggacactctgaaaggagagctctgctaggagaatcanatgaatctgttggagacaaggttgcgtatgccctgtcttaaggactaaaggtcattgcatgttgtggtg

SEQ ID NO: 75 - DNA, 338 bp, Zea mays
  Clone ID: LIB3061-006-Q1-K1-B7
gccaaatacaatttagaagcgcccctcctcctctcccccatccgtacccaatcgaatcgacacccggccgagatgggccgcaagttcttcgttggtggcaactggaaatgcaatggaaccgcagatcaggttgagaagattgtcaaaaccctgaatgaaggaaatgttccctcttcagatgttgttgaggtcgttgtcagtcctccttatgtgttcctcccggtggtcaagagccagctgcgccaagagttccaagttgctgctcagaactgctgggtgaagaagggaggtgcattcactggtgaaattagtgctgaaatgctcgtcaaccttggcgt

SEQ ID NO: 76 - DNA, 390 bp, Zea mays
  Clone ID: LIB3061-032-Q1-K1-A12
ccgcagtgcaggactgaggatgagtgaagaggataaggctgctgcttctgctgagcggcctaagagggcccctaagctcaatgaaaggatcctctcctctctgtccaggaggtccgtagctgctcatccatggcatgatctcgagatcggtcctggtgctcctgctgtattcaatgttgttgttgagatcacaaagggaagcaaagtcaaatacgagcttgacaagaaaactggactgattaaggttgatcgagtcctttactcatcagttgtataccctcacaattatggtttcattccaaggactctttgtgaagacaatgacccaatggatgtgttggtcctgatgcaggagcctgttgttcctggttcgttcctgagagctagagc

SEQ ID NO: 77 - DNA, 241 bp, Zea mays
  Clone ID: LIB3061-049-Q1-K1-H2
tcgtgctcactctacaaggagagctctgctgggagaatcaaatgaatttgttggaaacaaggttgcgtatgccctgtcttagggactaaaggtcattgcatgtgttggtgagacccttgagcagaaggaggctgggtctaccatggatgttggtgctgcacaaacgaaagcaattgctgagaagatcaaggactggagcaacgtagtttgtgcctatgaaccatgttgggctatcggaact

SEQ ID NO: 78 - DNA, 399 bp, Zea mays
  Clone ID: LIB3061-035-Q1-K1-C9
cggcccacctggaagccggagagaatcgagcatagccaccgatcgctcctctccactgggcagattccagttccactccgcctccgctgccggtcgccgactccgaaactccgacagtccgaccacaatgatccacatatagatgagtggagaggataaggctgctgcttctgctgagcagccgaagagggcccctaagctcaatgaaaggatcctctcttctctgtccaggaggtccgtagctgctcatacgtggcatgatcttgagatcggtcctgatgctcctgctgttttcaatgttgatgttgagatcacaaagggaagcaaagttaaatatgagctcgacaagaaaactggactgattaaggttgatcgagtcctgtactcatcagttgtata

SEQ ID NO: 79 - DNA, 453 bp, Zea mays
  Clone ID: LIB3061-048-Q1-K1-A7
cacgcggccgacagtgctcacttgctcctagtgccattattccacagttcctcccaccagttacttcaatgggcttcgaacacctagctgtgcaagccaacatgcaacaacaagcgcttgtggcgagcgtcttacaacaaccaattgcccaattgcaacaacaatccttgccacatctaacaatacaagccatcacaacgcaacagcaacaacagttcctaccagcactgatccacctatccatggtgaaccctgccgcctacttgcaagagcagctgcttgcatccaacccacttgctctggcgaacgtagttgcaaaccagcaacaacaacagctacaacagtttctgccaacgctcagtcaactagccatggtgaaccctgccgtctacgtacaacatcatcaactgctttcatctagcccgctcgctgtgggcaatgcacctacatacc

SEQ ID NO: 80 - DNA, 428 bp, Zea mays
  unsure (1)..(428): unsure at all n locations; Clone ID: LIB3061-048-Q1-K1-A8
cttagcaccaatggcagccaagatttttgccatccttgccctccttgctctttcagcaagcgttgctaccgcgactattattccacaatgctcacaacaatacctgtctgcggtgacagccgcgagatttgaatacccaactatacaatcctacaggctacaagaggccatcgcagcaagcatcttacggtcgttagcattgaccgtccaacaaccatatgccctattgcaacaaccatccttaatgaatctatatctccaaagaatcgcagcacaacaactacaacaacagttgcttccaacaatcaatcaagtagttgcagcgaaccttgctgcttacctncagcaacaacaatttcttccattcaatcaactagctggngtgaaccctgctgcttacttgcaggcacaacagctactaccattca

SEQ ID NO: 81 - DNA, 355 bp, Zea mays
  Clone ID: LIB3061-048-Q1-K1-A9
catagaaagcacaatagtgtaccaacaatggcagctaaaatattttgcctccttatgctgcttggtctttctgcaagtgctgctacggcgaccattttaccacaatgctcacaagctcctatagctacccttattcccccgtacctatcaccaacggtgtcttcagtatgtgaaaacccaattcttaaaccctacaggatccaacaggcaatcgcagctggcatcttacctttatcacccttgttcctccaacaatcatcagccctattacagcagttacctttggtgcatttattggcacaaaacatcagggcacatcaactacaacaacttgggctagcaaaccttgctgcct

SEQ ID NO: 82 - DNA, 365 bp, Zea mays
  Clone ID: LIB3061-048-Q1-K1-B1
accggttccggagattcgacgccacgcgtccggctgactggagctggaaaggccgcagcggtgcagaaggcgctctcagacaagcaaacctcgtcagacctgctgcctgttgagatggctgtgctgcaagatggagaattcacctggttcactgataaggcagcggtgtccttgctgcagaacaagtagagtcccatggtaaccttggctcgaagccattttagctcataaaataaaagatccaggggcctgcgtgcatagctgcattcgtcctccaggatttcgtgtaacggagactcgatccttttatgtagtgtgtgttgttcggagtaatgttcaaaaactctattggcttccggcttttc

SEQ ID NO: 83 - DNA, 424 bp, Zea mays
  Clone ID: LIB3061-048-Q1-K1-B10
attttgagcattcagaaacacaccaagcgaagcacattagcaacaacctaacaacaatgggtaccaagatattatccctccttgcgcttcttgcgctttttgcgagcgcaacaaatgcgttcattattccacaatgctcacttgctccaagttccattattacacagttcctcccaccagttacttcaatgggcttcgaacacccagctgtgcaagcctataggctacaacaagcaattgcggcgagcgtcttacaacaaccaatttcccagttgcaacaacaatccttggcacatctaacaatacaaaccatcgcaacgcaacagcaacaacaattcctaccagcactgagccacctagccatggtgaaccctgccgcctacttgcaacagcagttgcttgcatcatacccacttgctctggc

SEQ ID NO: 84 - DNA, 364 bp, Zea mays
  unsure (1)..(364): unsure at all n locations; Clone ID: LIB3061-048-Q1-K1-B11
cccacgcgtccgcagaaacacaccaagcgaagcacattagcaacaacctaacagcaatggctaccaagatattatccctccttgcgcttcttgcgctntttgcgagcgcaacaaatgcgttcattattccacaatgctcacttgctccaaggtccattattacacagttccttccaccagttacttcaatgggcttcgaacacccagctgtgcaagcctataggctacaacaagcaattgcggcgagcgtcttacaacaaccaatttcccagttgcaacaacaatccttggcacatctaacaatacaaaccatcgcaacgcaacagcaacaacaattcctaccagcactgagccacctatccat

SEQ ID NO: 85 - DNA, 294 bp, Zea mays
  Clone ID: LIB3061-048-Q1-K1-B12
aacaactactaccattcagccagctagctggtgtgagccctgctaccttcttgatacagccacagttgttgccgttctaccagcacgctgcgcctaacgctggcaccctcttacaactgcaacaattgctgccattcaaccaacttgctttgacaaacccagcagcgttctaccaacaacccatcattggtggtgccctcttttagatttcttatgagttatagttcaataataaagttttttgtctgatgtttgtggcttcccagaaataagaaagtacatttctagattctt

SEQ ID NO: 86 - DNA, 447 bp, Zea mays
  unsure (1)..(447): unsure at all n locations; Clone ID: LIB3061-048-Q1-K1-B2
ggccacctccctcgtcctccccctcctacgccgcccccgtcctcggcccccacgcgctcgcgcggcgcacgaggcgacgaacccgacctcctcctccgcgcccgtccctgccaccggtcgccgatattggaaggagctcggagggctggggcgctgacctgagttttatggagagaggatgccagagctgcgaagcagtactcgccaagcatgcctaaggtcgaagaagcttgaagatctgcagccaggagagccgcctgcgaaaccggtgtcacctgctccgccgagggcaggaaagcgtgctcctacacgtgctgctaggggcagaaagggtgccactgggaaaggagtgccccccgcacctaagactagaagaaagcggngtaatattgtcgacttggaagctgatccagcttgtgaagaccctnctaaagctgtcaagggacc

SEQ ID NO: 87 - DNA, 446 bp, Zea mays
  Clone ID: LIB3061-048-Q1-K1-B4
attcagaaacacaccaagcgaagctcactagcaacgacctaacaacaatggctaccaagatattagccctccttgcgcttcttgccctttttgtgagcgcaacaaatgcgttcattattccacaatgctcacttgctcctagtgccattattccacagttcctcccaccagttacttcaatgggcttcgaacacctagctgtgcaagcctacatgctacaacaagcgcttgcggcgagcgtcttacaacaaccaattgaccaattgcaacaacaatccttggcacatctaaccatacaaaccatcgcaacgcaacagcaacaacagttcctaccagcactgagccaactagctgtggtgaaccctatcgcctacttgcaatagcagatgcttgcatccaacccacttgctctggcaaatgtagctacataccaacaacaacaattg

SEQ ID NO: 88 - DNA, 356 bp, Zea mays
  Clone ID: LIB3061-048-Q1-K1-B5
gggccgacccacgcgtgcgggtgactggagctggaaaggccgcagcgttgcacattgcgctctcagacaagctaacctgatcagagctgctgcctgtcgagatggctgtgctgcaagatggagaattcacctggttcactgataaggcagcggtgtccttgctgcacaacaagtagagtcccatggtaaccttggctcgaagccattttagctcataaaatataagatccaagggcctgcgtgcatagctgcattcgtactccaggatttcctgtaacggaaactcgatccttttatgtagtgtgtgttgttcggagtaatgatcaaaaactctatcggcttccggcttttcaaaa

SEQ ID NO: 89 - DNA, 437 bp, Zea mays
  Clone ID: LIB3061-048-Q1-K1-B7
cccacgcgtccggtgattttcctcttttcttttgcaagttgattgcttcgtcgggcaggaattctgcgttcctcaagtaagcacagcacgattcgtgtaagcggatttttttttcctatcgatttcttgagcgcggtaattagttgttacgattagctagctccagctgtcgctgccttgctaggagcggaattctttcgttcttcctctagggctattcgcagttcgcgagggtttcttgatatgggtacagataagctttattttgtcagtttagttgagtagttagcctgtgagcgccgaccagtatgtaatcgttgtcctcctgactgatatccctctgttcttgttggaaggcgcaggttcatatacgagtttaatatacgttggtaggaaatttcgattacatcacatttaaatattcattgatggattga

SEQ ID NO: 90 - DNA, 445 bp, Zea mays
  Clone ID: LIB3061-048-Q1-K1-B9
gaccaactagcatcatagaaagcacaatagtgtaccaacaatggcagccaaaatattttgcctccttatgctccttggtctttctgcaagtgctgctacggcgaccattttcccacaatgctcacaagctcctatagcttcccttcttcccccgtacctctcaccagcggtgtcttcggtatgtgaaaacccaattcttcaaccctataggatccaacaggcaatcgcagctggcatcttacctttatcacccttgttcctccaacaatcatcagccctattacagcagttacctttggtgcatttattggcacaaaacatcagggcacaacaactacaacaacttgtgctagcaaaccttgctgcctactctcagcaacaacagtttcttccattcaaccaactagctgcattgaactctgcttcttatttgcaacaacaacaa

SEQ ID NO: 91 - DNA, 431 bp, Zea mays
  Clone ID: LIB3061-048-Q1-K1-C10
ccgcagctcccatcctctcgctcgccaggagaagcagccgccgttgctgctgccgcgtcgacagaatggggggtttcgtgaagacccataagaccaatgcgtatttcaaacgtttccaagtgaaattcaagagaaggcgggctggcaagacagactacagggccaggataaggctgattaaccaagacaaaaacaagtacaacacacccaaatacagatttgttgtgcgatttaccaacaaggacatcactgcacaaatcatatctgctagtatagcgggtgatatggttcttgcttctgcctactctcatgagttgccacgatatggtcttgaagttggtctgaccaactatgcagctgcctactgcactggacttctgttggctcgccgtgtgctaaagatccgtggtttggataaggagtatgacggc

SEQ ID NO: 92 - DNA, 426 bp, Zea mays
  Clone ID: LIB3061-048-Q1-K1-C11
gtccatcactggatgtgggattctcgcctatttaactatgggaactgggaagtgctaagagttcttctctccaatgctagatggtggctcgaggaatataagtttgatggtttccgttttgatggtgtgacctccatgatgtacactcatcacggattacaagtaacatttacggggaacttcaatgagtattttggctttgccaccgatgtagatgcagtggtttacttgatgctggtaaatgatctaattcatggactttatcctgaggctgtaaccattggtgaagatgttagtggaatgcctacatttgcccttcctgttcacgatggtggggtaggtcttgactatcggatgcatatggctgtggctgacaatatgactgaccctcttaaaccaaagtgatgaaacttggaagatgggtga

SEQ ID NO: 93 - DNA, 422 bp, Zea mays
  Clone ID: LIB3061-048-Q1-K1-A6
gtcgctggaaccctttgcaacaaagccgtcttcacctgaccacctcccttgagctcttaccgttcctcgtgggttgcgcgagccctctaccggcgcgcagtacaggggctgattgggtgatcaaacccgcaagatttgggtttgtgatttaggagcaggaggcggcggcaatatggaatataaggcgagatctactggaacttcaggaacttcgtctaaaagtttccgtgatctgtacaatatgaagtactcgagctacttaaacgacgaaccaatgccggatgctacatcggaaaaggagcagggaaatgagtatttcaaacagaagaagttcactgatgctattgaatgctactgcagaagtattgggctgtctgctacagcagtcacatttgcaaatagagctatggcatatcttaaac

SEQ ID NO: 94 - DNA, 205 bp, Zea mays
  Clone ID: LIB3061-047-Q1-K1-H2
atccaatccagatcagcagaccgacactgcgtacagcggatcgctgaacagaacagcaggaagatggtcatcgttctcttcgtgtgcctggctctgtcagctgccagcgcctctgcaatgcagatgccctgcccctgtgcggcgctgcagggcttgcacggacctggcgccggcctgacgacgatgatgtgcgccggtgcgctgt

SEQ ID NO: 95 - DNA, 436 bp, Zea mays
  Clone ID: LIB3061-047-Q1-K1-H3
aatgaatccaaagatcacgttacaacaacgtacgacaacgcgtgctagcaatcatagatggctactcgtactagcagaggcccatgcattgaaccaactagttgcattgaacttatgatcatattggcaacagcaacaactaccatgaagacgactacctggtgcctacctgcagcgattgctttcatgcagccaagtgtacatgtataactgatctgcttattgacagcagcaacaactattaccatacagtcaggtagctgaagcgagccgtgctacctcattgatgcaagcacagctgttgccgcactaccagaacgctgggcctaacgctggaatcttattacaactgcaacaattgctgccattcaaccaacttgctttgacaaacccagcagcgttctaccaacaacccatcattggtggtgccctcttt

SEQ ID NO: 96 - DNA, 426 bp, Zea mays
  Clone ID: LIB3061-047-Q1-K1-H4
ctgaggttgccaaagaggcgtctgacatggtgttggctgacgacaattttagcaccatggtttctgcagtcggtgaaggaagatcgatctacaacaacatgtaagctttcataagatacatgatttcgtcaaacattggtgaagtcgcttctatattcctaacttccgccctgggcattcatgagggtttgattcccgtccaacttctatgggtcaatctagttaccgacaggcccaccgcaactgctctaggtttcaatccgcctgacaaggacatcatgaacaagccacctatgacgagcgacgactcactgatcactccctggatcttgttccactacctggtgattggcctttacgttgggatggcgaccgatggcatcttcggcatatggtacacacatgggtctttcatgggccatgacc

SEQ ID NO: 97 - DNA, 407 bp, Zea mays
  Clone ID: LIB3061-047-Q1-K1-H5
gtgccacatgtgcaaccggaggaacgatttctggtgggtcgcattggtccaaaagagtataggctatacagggtgattgtcagatatggttatcgcgatgtgcagaatgatgacctgtagttcgagaaggagctagtcagcaacattgcagagttcatccgcagcagtggggaatatgacaagaatggcttcgtcgaggacgcacataagcccttcgagaagctgtccaccatcagtactggaatcaatatgttggaagaggatggagaagttgatgcacatgtatcccctcataaggagatagacccacacaatgcggcacccaagcgaaagaaagccaggttcatgataccaaagagtgctcatgtggacagtgaggtgcgccgcgagctgcaggagctcatgga

SEQ ID NO: 98 - DNA, 272 bp, Zea mays
  Clone ID: LIB3061-047-Q1-K1-H6
acgctcggcacgcaggcagaggcagcatagctgcagccaactccatccatcctcggtcccctcctcgctgcgcttgctcggcggattcctcctccctctaccgtccccgttcccgtgcacttgcggcgcgcgtgctcgcccgagatggcatacgccagatctggtgtcgctgtgaatgacgagagcatgctcaagttcgtcgagctgcactcgaagaggctgcaccggttcctaactttcaagattgacgacaagttcatggtgatcgttgt

SEQ ID NO: 99 - DNA, 363 bp, Zea mays
  Clone ID: LIB3061-047-Q1-K1-H7
cgcaaattgcaccaagaaatccatcgagaggccgtcgacaggggaattaatggcgtcggcgtctagcagcagccaccgccgcctcatcctcgcagccgccgtcctgctctccgtgctcgcggctgccagcgccagcgccgggacctcctgcgtgccggggtgggccatcccgcacaacccgctcccgagctgccgctggtacgtgaccagccggacctgcggcatcgggccgcgcctcccgtggccggagctgaagaggagatgctgccgggagctggcggacatcccggcgtactgccggtgcacggcgctgagcatcctcatggacggcgcgatcccgccgggcccggacgcgcagctgga

SEQ ID NO: 100 - DNA, 440 bp, Zea mays
  Clone ID: LIB3061-047-Q1-K1-H8
aaaatattttgcctccttatgctccttggtctttctgcaagtgctgctacggggaccattttcccgcaatgctcgcaagctcctatagcttcccttcttcccccgtacctctcaccagcggtgtcttcggtatgtgaaaacccaattcttcaaccctacaggatccaacaggcaatcacagctggcatcttacctttatcacccttgttcctccaacaatcatcagccctattacatcagttacctttggtgcatttattggcacaaaacatcagggcacaacaactacaacaacttgtgctagcaaaccttgctgcctactctcagcaacagcagtttcttccattcaaccaactagctgcattgaactctgcttcttatttgcaacaacaacaactaccattcagccaggtacctgctgcctacccccagcaatttct

SEQ ID NO: 101 - DNA, 407 bp, Zea mays
  Clone ID: LIB3061-047-Q1-K1-H9
gcgaaatgctcgcaagctagtatagcttctcttatttcaccgcacctgtcaccatcgggggcttgggcatgtgaatacttgagcttgtagcgctaccggatccagcaggcaataacacgcggcatcttatctgtatcaccgtcgttactccaacaatcatcagccctattacttcattgaccttaggtgcatttattggcacagcagatctgggcccaccaacgacatcagcttgtgctagaaaacgtcgctgcctactatcagcaacagaagccttttcaattctaccaattagctgcattgaactatgcttactatttgcgacagcaccaactatgattcagccagctatatgctggctacccccatcaatgactgacattcaaccaactgtcatcattgaactc

SEQ ID NO: 102 - DNA, 442 bp, Zea mays
  Clone ID: LIB3061-048-Q1-K1-A1
atatcttggtagccattggtgttagccctccttgcgcttcttgcccttttagtgagcgcaacaaatgcgttcattattccacagtgctcacttgctcctagtgccagtattccacagttcctcccaccagttacttcaatgggcttcgaacatccagccgtgcaagcctacaggctacaactagcgcttgcggcgagcgccttacaacaaccaattgcccaattgcaacaacaatccttggcacatctaaccctacaaaccattgcaacgcaacaacaacaacaacagtttctgccatcactgagccacctagccgtggtgaaccctgtcacctacttgcaacagcagctgcttgcatccaacccacttgctctggcgaacgtagctgcataccagcaacaacaacagctgcaacagtttatgccagtgctcagtcaactag

SEQ ID NO: 103 - DNA, 362 bp, Zea mays
  Clone ID: LIB3061-048-Q1-K1-A10
cttcaacatcaattatctaactccaaaatccatgaagctggtgcttgcggttctagcctggattgctttagtgtcaagtgtgccacggacacaaacaggccactgtgctcacaagctactacagattcatgagctccaacatacttcacaacaacagcgtccacagtatctgcaacctcaattattaacacatcatggatagcagctgcaacacgcaactgcgacagtatctatagcaccactgatacttcaacaataaccagaagtacatgtgcaactacctctgcgacatccattgcaccacaaccatcaacgctcaccacctacaacacctcgtcctagctgtgcttgctgactactct

SEQ ID NO: 104 - DNA, 422 bp, Zea mays
  Clone ID: LIB3061-048-Q1-K1-A11
gaagtacactagcaacatcttagcaccaatgggagccaagatttttgccctccttgcccgccttgctctttcagcaagcgctgctacctcgacttttattccacaatgctcacaacaatacctctctccggtgacagccgcgggatttcaatacccaactatacaatcctacatggtacaagaggccatccaagcaagcatcttacggtcattagcattaaccctccaacaaccatatgctctattgcaacagccatccttagtgcatctgtatctccaaagaatcgcggcacaacaactacaacaacagttgctaccaacaatcaatcaagtagttgcagcgaaccttgctgcttacctccagcaacaacagtttcttccattcaatcaactagctggggtgaaccctgctatctacttgc

SEQ ID NO: 105 - DNA, 422 bp, Zea mays
  Clone ID: LIB3061-048-Q1-K1-A12
caactagcatcatacatagtgaagtacactagcaacatcttagcaccaatgggagccaagatttttgccctccttgccctccttgctctttcagcaagcgctgctacctcgacttttattccacaatgctcacaacaatacctctctccggtgacagccgcgggatttcaatacccaactatacaatcctacatggtacaagaggccatccaagcaagcatcttacggtcattagcattaaccctccaacaaccatatgctctattgcaacagccatccttagtgcatctgtatctccaaagaatcgcggcacatcaactacaacaacagttgctaccaacaatcaatcaagtagttgcagcgaaccttgctgcttacctccagcaacaacagtttcttccattcaatcaactagctggggt

SEQ ID NO: 106 - DNA, 456 bp, Zea mays
  Clone ID: LIB3061-048-Q1-K1-A3
gacggcacgcatcagacgacaacgcaacagcaacaacagttcctaccagcactgagccacctagccatggtgaaccctgccgcctacttgcaagagcagctgcttgcatccaacccacttgctctggcgaacgtagttgcaaaccagcaacaacaacagctacaacagtttctgccaacgctcagtcaactagccatggtgaaccctgccgcctacgtacaacaacaacaactgctttcatctagcccgctcgctgtgggcaatgcacctacatacctgcaacaacaattgttgcaacagattgtaccagctctgactcaactagctgtggcaaaccctgttgcctacttgcaacagctgcttccattcaaccaactgactctgtcgaactctgctgcgtacctacaacagcgacaacagttacttaatccattggtagtggctaacccattggtc

SEQ ID NO: 107 - DNA, 452 bp, Zea mays
  Clone ID: LIB3061-048-Q1-K1-A5
cactcgtccggccggcgcctccacttcgcgttctcgcctcatctcctcccgctcaggatccggcggcgaaggtaaggcaagatgtacaccgcgaggaagaagatccagaaggataagggccttgagccctccgagttcgaggactccgtcgcccaggctttcttcgacctggagaacggtaaccaggagctcaagagcgacctcaaggacctttacatcaacggtgctatccagctggatgttgccgggagcaggaaggctgttgtgatccacgtcccataccgcttgcgtaaggccttcaggaagatccatgtcaggatcgtcagggagctggagaagaaattcagcggcaaggatgtggtaattgttgccacaaggaggatcgtgaggccgcccaagaagggttcagctgttcagcgccctcgcaccaggactctgactgctgtccatga

SEQ ID NO: 108 - DNA, 447 bp, Zea mays
  Clone ID: LIB3061-047-Q1-K1-H12
gacggcatgcatccagacgacaaggacgcgtaggagacgctgcgtgcgctgcgcgacatcgggtccgagacgggcgcgcgcgagccgatggccctgaccggcgacctcgggtactaggccaactgccgggaggtggtggagcgggtggcgtcagcgtacggcgggcgcatcgacgtggaggtgaacaacgctggggatcagtacgagcgggagagcatcggggacgtgactgaggcggacctacagcgcgtgttccgcaccaacatcttctcctacttactggtgtacaagcacgcggtgccgcgcatggagccaggcgcctgcatcatcaacaccatattcgtcaacgcgtacaagggcaacatgacgctgatggactacacggtcaccaatggcgccatcgaggccttcacgcgcgcgctctcgctgcagctggccgacaggggc

SEQ ID NO: 109 - DNA, 477 bp, Zea mays
  Clone ID: LIB3061-047-Q1-K1-F8
cagaaacacaccaagcgacgctacctagcgacgacttaacaacaatggctaccaagatattagccctgcgtgcgcttgttgccctttctgtgagcgcaacatatgcgtgcattattccacaatgctcacttgctcgtagtgccattataccacagttcctccgaccagttacttcaatgggcttcgaacacctagctgtgcaagcctacaggctacaacaagcgcttgcggcgagcgtcttacaacatccaattaaccaattgcaacaacaatccttggcacatctaaccatacaaaccatcgcaacacaacagcaacaacagttcctaccagcactgagccaactagatgtcgtgaaccctgtcgcctacttgcaacagcaggtgcttgcatgcaacccacttgctctggcaaacgtagctgcataccaacaacaacaacaattgcaacagtatctgccagcgctcagtcaactag

SEQ ID NO: 110 - DNA, 342 bp, Zea mays
  Clone ID: LIB3061-047-Q1-K1-F9
ccaactagcaacatagaaagcacaatagtgtaccaacaatggcagccaaaatattttgcgtccttatgctccttggtctttctgcaagtgctgctacggcgaccattttcccgcaatgctcgcaagctcctatagcttcccttctttccccgtacctctcaccagcggtgtcttcggcatgtgaaaacccaattcttcaaccctacaggatccaacaggcaatcgcagctggcatcttacctttatcacccttgcttctgcaacaatcatcagccctattacaacacgtacctttggtgcatttattggcacaaaacatcatggcacaacaactaccacaac

SEQ ID NO: 111 - DNA, 387 bp, Zea mays
  Clone ID: LIB3061-047-Q1-K1-G1
tgaagattgtcatcaagacctgtggcactaccaagctcctgctcacaattccaaggatcgtagagcttgctgaagagctgtctatgcctcttgctgctgtgaagtactcccgcgggacgttcatctttcctggcgcacagccagccccccaccggagcttctccgaggaagttgctgtacttaaccgatactttgggggcctgaagtctggtggcaatgcttatgtgattggagatgcagcaagaccaggacagaagtggcacatctactacgccactgagtacccagagcaaccaatggtcaaccttgagatgtgcatgactggtctggacacgaagaaagcttcagtcttcttcaagactaatgctgatggcaacacaacatgtg

SEQ ID NO: 112 - DNA, 389 bp, Zea mays
  Clone ID: LIB3061-047-Q1-K1-G10
gaagatcctcgtgatgctgaggaggcaattgctggacgggatggatacaactttgatggacaccgtctaagagtggaggctgctcatggtggtagaggtaatgcttactcgcatgatcgttcaagtggctctggtggcggtggtggagcacgtcgtggtgtgtcgagacactcagagtatcgtgttcttgtcactggactgccttcttatgcatcatggcaggatttaaaggatcatatgcggaaggctggtgatgttcgtttctctgaagtgtatcgcgaaggcggcggcaccgtaggaattgtggactacacaaattatgatgatatgaaatatgctataaagaagctggatgatactgaattcacgaacgcctttgggcgaaccta

SEQ ID NO: 113 - DNA, 421 bp, Zea mays
  Clone ID: LIB3061-047-Q1-K1-G11
caactagcatcatagaaagcacaatagtgtaccaacaatggcagccaaaatattttgctgccttatgctccttggtctttctgcaagtgttgctaccgcaaccattttcccacaatgctcacaagctcctatagcttcccttcttcccccatacctctcaccagcggtgtcttcaatgtgtgaaaccccaattgttcaaccctacaggatccaacaggcaatcgcaacaggcatcttaccattatcacccttgttccttcaacaaccgtcagccctattacagcagttacctttggtccatttggtggcacaaaacatcagggcacaacaactacaacaacttgtgctagcaaaccttgctgcatactctcagcaacatcagtttcttccattcaaccaactggctgcattgaactctgct

SEQ ID NO: 114 - DNA, 451 bp, Zea mays
  Clone ID: LIB3061-047-Q1-K1-G2
ccaactagcaacatagaaagcacaatagtgtaccaacaatggcagccaaaatattttgcgctccttatgctccttggtctttctgcaagtgctgctacggcgaccattttcccgcaatgctcgcaagctcctatagcttcccttcttcccccgtacctctcaccagcggtgtcttcggtatgtgaaaacccaattcttcaaccctacaggatccaacaggcaatcacagctggcatcttacctttatcacccttgttcctccaacaatcatcagccctattacatcagttacctttggtgcatttattggcacaaaacatcagggcacaacaactacaacaacttgtgctagcaaaccttgctgcctactctcagcaacagcagtttcttccattcaaccaactagctgcattgaactctgcttcttatttgcaacaacaacaacttccat

SEQ ID NO: 115 - DNA, 242 bp, Zea mays
  Clone ID: LIB3061-047-Q1-K1-G3
ggtggaccagcagctaaggcccttcggcccaaattcaacgtgtttgtcaaaaatgtatgtgctcatctgggagtagctgtgccacacattgagttgaagcatgtgattgctgctacaattggtcttaagggtcttggaagcctcctttttattttgagcagctctctcggtgcttatctcctgctgctgtaccttgctttgatcactcctatcatccatgacttctacaactacgatatgga

SEQ ID NO: 116 - DNA, 456 bp, Zea mays
  unsure (1)..(456): unsure at all n locations; Clone ID: LIB3061-047-Q1-K1-G4
acaaaaaggaggggcgaggaggacagggagccgagcgcaagagctgaggcttcgccgcgaaaccgcagacctcgcgccgccccttcccctccgcggcgtcgtcctcgcacgctctccgatccaagatgtataagctggggagaggaaaccgcgacaaggtgcagcagttcatgaccattaccggcgccagtgagaaggttgcccttcaggcactgaaagctagtgattggcacttggaaggagcttttgacttcttctatagccaacctcaggtttctgtggtcaatactcggcatcttgaagatattttcaacagatataaagaacctgatgctgatatgataatggtggaaggaatatctcaattttgcaatgatctgcaggttgatcctcaggatattgtcatgcttgtcatatcatggcacatgaaagccgccacaatgtgtgaatntactc

SEQ ID NO: 117 - DNA, 358 bp, Zea mays
  Clone ID: LIB3061-047-Q1-K1-G5
attagctttatctactccagagcgcagaagaacccgatcgacaccatgagggtgttgctcgttgccctcgctctcctggctctcgctgcgagcgccacctccacgcatacaagcggcggctgcggctgccagccaccgccgccggttcatctaccgccgccggtgcatctgccacctccggttcacctgccacctccggtgcatctcccaccgccggtccacctgccgccgccggtccacctgccaccgccggtccatgtgccgccgccggttcatctgccgccgccaccatgccactaccctactcaaccgccccggcctcagcctcatccccagccacacccatgcccgtgccaac

SEQ ID NO: 118 - DNA, 389 bp, Zea mays
  Clone ID: LIB3061-047-Q1-K1-G6
ctcctccgcgcgcgtgttcgcggcatggccaggcttccaatggcgctctcccgggccggcatttcccccttcagcaccctccccctgtactattcttcgcgtcctcaccgccgcctcctcgcccgcttcttctccgtcgcttcggcaccgggcggagcgaaagggcaccgaccggcggcctccgacgttgaggtgggcggcgtcaagatcgcgcgcgaggatgttgcgaaggaggatgatccgacaaacaacgtgcccgacaatatcttttcgaagatcggcctgcagctgcacaggagggataaccatccccttgggattttgaagaacacaatctatgattactttgacaagaacttcactgggcagtttgacaagtttgatgacct

SEQ ID NO: 119 - DNA, 101 bp, Zea mays
  Clone ID: LIB3061-047-Q1-K1-G7
attggtggtgccctcttttagatttcttatgagttatagttcaataataaagttttttgtctgatgtttgtggcttcccagaaataagaaagtacatttct

SEQ ID NO: 120 - DNA, 459 bp, Zea mays
  unsure (1)..(459): unsure at all n locations; Clone ID: LIB3061-047-Q1-K1-G8
tgctgatcgttgcccttgctctcctggcgctcgctgcgagcgccgcctccagtacaagcggcggctgtggctgccagacaccaccgtttcatctaccgcctccgttctatatgccgcctccgttctatctgccgccgcagcagcagccgcagccatggcaataccccactcaaccaccgcagctaagcccgtgccagcagttcggatcctgcggcgtcggcagcgtcggcagcccgttcctgggccagtgcgtcgagttcctgaggcaccagtgcagcccggcggcgacgccctacggctcgccacagtgccaggcgctgcagcagcagtgctgccaccagatcaggcaggtggagccgctgcaccggtaccaggcgacatacggtgtggtcctgcagtccttcctgcagcagcagccgcagggcgagctcgcggcgctgatggcggnccaagtagcgc

SEQ ID NO: 121 - DNA, 285 bp, Zea mays
  Clone ID: LIB3061-047-Q1-K1-G9
caacatagatagcacaatagcgtaccatcaaaggcaaccaacatattgtgcctcattatgctccttggtctctgcgccagcgctgataccgggaccattttccccgctatgctcggaagctccaatactttcctttattaccccgtacctttaacaaccaacgacttcgtgttgcgaaaacccaattcttaatccctccaggacccatcgggcaatttaaactggcatcttaccttgatcaccctagctcatccaacaatcacaacccttattgcaccatttacc

SEQ ID NO: 122 - DNA, 424 bp, Zea mays
  unsure (1)..(424): unsure at all n locations; Clone ID: LIB3061-047-Q1-K1-H1
attgataccaactagcaacatacatagtgaagtacactagcaacatcttagcaccaatgggagccaagatttttgccctccttgccctccttgctctttcagcaagcgctgctacctcgacttttattccacaatgctcacaacaatacctctctccggtgacagccgcgggatttcaatacccaactatacaatcctacatggtacaagaggccatccaagcaagcatcttacggtcattagcattaaccctccaacaaccatatgctctattgcaacagccatccttagtgcatctgtatctccaaagaatcgcggcacaacaactacaacaacagttgctaccaacaatcaatcaagtagttgcagcgaaccttgctgcttacctncagcaacaacagtttcttccattcaatcaactaac

SEQ ID NO: 123 - DNA, 400 bp, Zea mays
  Clone ID: LIB3061-047-Q1-K1-H10
ccccgtccgaggtccgagtccgaccgaaggagagaggcagcagccatggctaagggcgggctgagcaaactccggtgcatggtcaagaggaggtggcactcgtcgagccgcatcgtctcccgcgccccgtcgtcaccggctcacgccgacgccgtcgccgccacctccggcaacgcgcgcggcgcgtcgttccacggcgcggacgaggcgcccaagggcctgcacgcggtgtacgtcggcaggtcgcgccgccggtacctcgtcgcgcatgagctcgtgggccacccgctgttccagaccctcgtccaccgcgccggcggcgccgggggtcccgcgggtaccgtcatcgtcggctgcgaggtcgtcctcttcgagcaccttctctggatgctggaacacg

SEQ ID NO: 124 - DNA, 325 bp, Zea mays
  Clone ID: LIB3061-047-Q1-K1-H11
accattgaacagaagctattggacacgcaccatggactgtgtatttgtaacgggcctatgggagtgttagactttgacaagtttgcagctgtaactgatgcgactgccactaagctagctgtagcttacaaccatcgacggcgtcactatgatcatctacggggagtactttaggcatgctgatcgcaaggctgtgctggcggacaagttgtaccacatttgtgaccggacgagcgcgatgctcggaactgtacgaaggcatgactgtacatgaggtgataggactatatgacgcctagatccgctgctagctgctgctgatgat

SEQ ID NO: 125 - DNA, 389 bp, Zea mays
  Clone ID: LIB3061-047-Q1-K1-F7
agcaacatagaaagcacaatagtgtaccaacaatggcagccaaaatattttgcctccttatgctccttggtctttctgcaagtgctgctacggcgaccattttcccgcaatgctcgcaagctcctatagcttcccttcttcccccgtacctctcaccagcggtgtcttcggtatgtgaaaacccaattcttcaaccctacaggatccaacaggcaatcgcagctggcatcttacctttatcacccttgttcctccaacaatcatcagccctattacaacagttacctttggtgcatttattggcacaaaacatcagggcacaacaactacaacaacttgtgctagcaaaccttgctgcctactctcagcaacagcagtttcttccattc

SEQ ID NO: 126 - DNA, 354 bp, Zea mays
  Clone ID: LIB3061-049-Q1-K1-B5
caaccaagtagctgccaggtattgcagcaacaatgttgtcatgatcttaggcagattgagccagaatacattcaccaagcaatctacaacatggttcaatccataatccaggaggagcaacaacaacaaccatgtgagttatgtggatctcaacaagctactcaaagtgcggtggcaatcttgacagcagcacaatacctaccatcaatgtgcggcttgtaccactcatactaccaaaataatccatgcagcagcaatgacattagtggtgtttgcaattgaagaattgtgtctacctagccgttatactcctataacggtgttaagcaataaagtaccatacattatgatgtt

SEQ ID NO: 127 - DNA, 457 bp, Zea mays
  Clone ID: LIB3061-049-Q1-K1-B6
cggacgcgtgggtgagaccaactagcaacatagaaagcacaatagtgtaccaacaatggcagccaaaatattttgcttccttatgctccttggtctttctgcaagtgttgctaccgcaaccattttcccacaatgctcacaagctcctatagcttcccttcttcccccatacctctcaccagcggtgtcttcaatgtgtgaaaccccaattgttcaaccctacaggatccaacaggcaatcgcaacaggcatcttaccattatcacccttgttcctccaacaaccgtcagccctattacagcagttacctttggtccatttggtggcacaaaacatcagggcacaacaactacaacaacttgtgctagcaaaccttgctgcatactctcagcaacatcaggttcttccattcaaccaactggctgcattgaactctgctgcttatttgcaacaacaa

SEQ ID NO: 128 - DNA, 425 bp, Zea mays
  Clone ID: LIB3061-049-Q1-K1-B7
gtcccctgctccattctcagccgccgccaatcccttcccgtgctccgcaaccgctgagggagaagaagagatggccggcaagggcgatggcccggctatcggcatcgatctcggcacgacgtactcttgcgtcggcgtgtggcagcacgaccgcgtcgagatcattgccaacgaccagggtaaccgcaatgagaaggtgcaggacctgcttctgctggacgtcacccctctgtccctgggtctggagactgctggaggagttatgacagtgctgatcccgaggaacaccaccatccccaccaagaaggagcaggtattctccacctactcggacaaccagcccggtgtcctgatccaggtctacgagggtgagaggacccggacacgcgacaacaacctgctgggcaagttcgagctctgcggca

SEQ ID NO: 129 - DNA, 405 bp, Zea mays
  Clone ID: LIB3061-049-Q1-K1-B8
cccacgcgttcggcagcaggaagtgcaaattcttatcctgcctggggaaaccaacaagctggaggcatgaaccaaaatgttggctggagtgctcctgtgcagggaaatccaggtcaggcaaataacaacatgaactggaacgcaccaaatggtaatcctaattggaataatcaacagagagagaatgggggcaggcactctggacaccgtggtgcttttagtggtggtgactcaagcggaaggtcatggaagtcacgctcttgtggccatggtgggtcaaggggacataaccaattctaccattcaacaaacacagatggatatccattcaggactgatcggcattacgataggcagaatttaggcaactagaggcgatatgagaatcacaatgagagaaatggt

SEQ ID NO: 130 - DNA, 436 bp, Zea mays
  Clone ID: LIB3061-049-Q1-K1-B9
tcgaacaggcaatcgcaacaggcatcttaccattatcacccttgttgctacaacaaccgtcagccctgggacggcagttacctttggtccatttggtggcacaaaacatcagggcacaacaactacaacaacttgtgctagcaaaccttgctgcatactctcagcaacatcagtttcttccattcaaccaactggctgcattgaactctgctgcttatttgcaacaacaattaccattcagccagctagttgctgcctacccccagcaatttcttccattcaaccaactagcagcattgaactctgctgcttatttacagcagcaacaactactaccattcagccagctagctgatgtgagccctgctgccttcttgacacaacaacagttgttgccgttctacctgcacgctatgcctaacgctggcaccctctt

SEQ ID NO: 131 - DNA, 234 bp, Zea mays
  Clone ID: LIB3061-049-Q1-K1-C1
ctacttccactccacaaactctcaagataagttttaaattctaacctaccccatccacatctatatcttaatccatattcactctctaacccatttctccctaccttcactcaccaaccacaaccatcccccctacacaacccatcctctcccatcaaccctaccttacaacaaccacaacactctacctcccatttactacatcaccaactacaaccactctaccaattaaca

SEQ ID NO: 132 - DNA, 398 bp, Zea mays
  Clone ID: LIB3061-049-Q1-K1-C10
ctccccgttccccagtccccacgccgaccggctggtcctcctcctttccccgcgccatcctcgaggcatcgccggctccgcatcttcgttcaggaggaagcccgcacccggccccgatccgatggccaacagctacctcccgcgtcgtatcatcaaggatacgcagcgactgctcatcgagccagcgccggggatcagcgcgtcgctctcggaggagaacatgcgctacttctacgttatgatccttgtgccggcgcattctccctatgaaggtggagttattacgcttgaactctttttacctgaggaatatcccatggctgccccaacggttacgtctctgaccaagatctatcatccctacattgacaagctaggtacgatatgcctcgacattc

SEQ ID NO: 133 - DNA, 356 bp, Zea mays
  Clone ID: LIB3061-049-Q1-K1-C11
cttgaggttgagggtttcttctcctcgtgcgcactcgcgtttcctcttcaaccgccgtcacaatcgttgcggcgccctcacacaccaccgccgccggctagagcctagggccgtaatcgtaacagccacccctgagactgagatggatacagcggaggaggctgggcaggaagtagtcagcgctgttggggaggatagtatcccggaagctgccgcctgcagcagggaggagaggaaggaggaagaggaggaagaagtggaggtgagcttcgatgaacttggcctggacgagcagctgaagagggcgttgaggaagaagggcatcctcaaggccaccccgatacagcgggaagcca

SEQ ID NO: 134 - DNA, 407 bp, Zea mays
  Clone ID: LIB3061-049-Q1-K1-C12
gcagcagcagctgctcctcctcctttctctcatgtttctcgttgctgtgacagcagccgctgttgctggcgatccacatccacagcaggtgcaggtgcagcagcagcagcaagcacagatgaggattaacagggccaccagatcccttcttcctcagccgccgtcgaaactagactgcccgtccacctgctccgtgcgctgcggcaacaactggaagaaccagatgtgcaacaagatgtgcaacgtctgctgcaacaagtgcagctgcgtgccgtcggggaccggccaggacacccgtcacctctgcccctgctacgacaccatgctcaatccacacaccggcaagcttaagtgcccctaggccttcgccactcatgttatgtacaatgtactatcatcactttaat

SEQ ID NO: 135 - DNA, 246 bp, Zea mays
  unsure (1)..(246): unsure at all n locations; Clone ID: LIB3061-049-Q1-K1-C2
cactatatcccaactttacatttaaaacttacctcataatactacttaggctagtttcaaatacaacattagcattcccaaatcaatacaacacttataaantctacaattcaacacaatacccttaactcacacaaattttcataccaatcatcattactattccatacaacaacttacctttcattacataaatcttttaaacaaacttccttataaactcattcatatcattccaaaattcat

SEQ ID NO: 136 - DNA, 455 bp, Zea mays
  Clone ID: LIB3061-049-Q1-K1-C3
ctagcaacatagaaagcacaatagtgtaccaacaatggcagccaaaatattttgcctccttatgctccggggtctttctgcaagtgctgctacggcgaccattttcccgcaatgctcgcaagctcctatagcttcccttcttcccccgtacctctcaccagcggtgtcttcggtatgtgaaaacccaattcttcaaccctacaggatccaacaggcaatcgcagctggcatcttacctttatcacccttgttcctccaacaatcatcagccctattacaacagttacctttggtgcatttattggcacaaaacatcagggcacaacaactacaacaacttgtgctagcaaaccttgctgcctactctcagcaacagcagtttcttccattcaaccaactaggttcattgaactctgcttcttatttgcaacaacaacaactaccattcagccagc

SEQ ID NO: 137 - DNA, 351 bp, Zea mays
  Clone ID: LIB3061-049-Q1-K1-C4
cccacgcgtccggaccaactagcaacatagaaagcacaatagtgtaccaacaatggcagctaaggtatgttgcctccttatgctccttggtctttctgcaagtgctgctacggcgaccattttcccacaatgctcacaagctcctatagcttcccttcttcccccgtacctctcaccaacggtgtcttcggtatgtgaaaacccaattcttcaaccctacaggatccaacaggcaatcgcagctggcatcttacctttatcacccttgttcctccaacaatcatcagccctattacagcagttacctttggtgcatttattggcacaaaacatcagggcacaacaactaca

SEQ ID NO: 138 - DNA, 360 bp, Zea mays
  Clone ID: LIB3061-049-Q1-K1-C5
gctgtggcaaaccctgctgcctacttacaacaggtgcttccattcaaccaactggctgggtcgggctctgctgcgtacctacaacagcgacaacagttacttaatccattggcagtggctaacccattggtcgctaccttcctgcagcagcaacaacaattgctgccatacaaccagttctctttgatgaaccctgccttgcagcaacccatcgttgaaggtgccatcttttagattacatatgagatgtactcgacaatggtgcccttataccgacatgtgtttcctagaaataatcaatatatcgattgagatttatctcgatataatacacacaccgataaacttaaatgcccttaa

SEQ ID NO: 139 - DNA, 453 bp, Zea mays
  Clone ID: LIB3061-049-Q1-K1-C6
agaagctgatcacaagatcccatcaacagaagtaaaacttgcctcagagtactacttctacatggaaacacagacagcactagcagttccagatgaagataacactttggtagtctacagttcgtcacagtaccctgaacttgcacaaagtgtcatagcaaggtgcttaggtattccattcagcaacgtgcgtgtcattacaagaagggttggaggaggctttcgtggaaaggcattcagatcattccaagttgcaacggcagctgcactttgtgcgtacaagttacggcgtcctgttcgaatgtaccttaatcgcaccaccgatatggtcatggttggtggtaggcacccagtgaaagctaattatactgtcggattcaagaacgatgggaacgttacggccttgcatctagatttattgattaacgctgggatatctccagatgcgagccc

SEQ ID NO: 140 - DNA, 453 bp, Zea mays
  Clone ID: LIB3061-049-Q1-K1-C7
tgagcattcagaaacacacctagcgaagcgcactagcaacgacctaacaacaatggctaccaagatattatccctctttgcgcttcttgccctttttgtgagcgcaacaaatgcgttcattattccacaatgctcacttgctcctagtgccattattccacagttcctacctccagttacttcaatgggcttcgaacacccagctgtgcaagcctacaggctacaacaagcgcttgcggcgagcgtcttacaacaaccaattgcccaattacaacaacaatccttggcacatctaaccatacaaaccatcgcaacgcaacagcaacaacaatttctaccagcactgagccaactagctgtggtgaaccctgtcgcctacttgcaacagcagttgcttgcatccaacccacttgctctggcaaacatagttgcataccaacaacaacaacaatt

SEQ ID NO: 141 - DNA, 390 bp, Zea mays
  Clone ID: LIB3061-049-Q1-K1-C9
agaccaactagcaacatagaaagcacaatagtgtaccaacaatggcagccaaaatattttgcctggttatgctccttggtctttctgcaagtgctgctactgcgaccattttcccgcaatgctcgcaagctcctatagcttcccttcttcccccgtacctctcaccagcggcgtcttcggtatgtgaaaacccaattcttcaaccctacaggatccaacaggcaatcgcagctggcatcttacctttatcacccttgttactacaacaatcatcagccctattacaacagttacctttggtgcatttattggcacaaaacatcagggcacaacaactacaacaacttgtgctagcaaaccttgctgcctactctcagcaacagcagtttc

SEQ ID NO: 142 - DNA, 455 bp, Zea mays
  Clone ID: LIB3061-049-Q1-K1-B4
cggttttggacaacgaagatgaccaacatgtgcttgtgcctcttgtaattggaaatatagaatgcagtgttgtggaagaaggaaagttcaggtactacaaattttcagttgaaggaaatgtgagtgagaaagtagcttctgggcatgcaaatatcgagattaaaatagatacggacgcgagcggtggtgacactgatatctatgtttcaagacatcctttagtatttccaactcagcaccgacatgagtggtcttctcatgaaatgggatcgaaggttcttatactcaaaccacgggatgctacattggtcagtggtgtttacagtattggagtttatggtttcaaagggacttttaagtaccagctctctgtagctatcaaggatgttagtggccaaaggattggtgaatatgctagtgcctcgggaagtgttgattttgattctgtgctgtgt

SEQ ID NO: 143 - DNA, 309 bp, Zea mays
  Clone ID: LIB3061-049-Q1-K1-A10
tcgcgttctaccagcacggcaacaattgtggccattgaaccaacttgctatgacataccctacataatgctggccacaaccgattattgtgggtcactgcttacacattactgattacatattcacatatacttgagcaccctgtctgatgattataactatgccattataagatagtacacttctagatagattgacttccttaatgtgcgctacatataacatacacaggatgtgctacacgtacatgcaatgctgtcaaaattgtacgatctaagctagactatgatacttgccaaaattgataat

SEQ ID NO: 144 - DNA, 402 bp, Zea mays
  Clone ID: LIB3061-049-Q1-K1-A11
agaaagtggaatccagtagcaacaatagagcatcaatggcgaccaagatactttccctccttatgctccttgctctttctgcatgtgttgctaacgcgacaattttccctcaatgctcacaagctcctatagcttcccttcttcccccataccttccatcaatgatagcttcagtatgtgaaaacccagctcttcaaccctataggctccaacaagcaatcgcagcaagcaacatacctttatcacccttgtttcaacaatcgccagccctatctttggtgcagtcattggtacaaaccatcaaggcacagcagctgcagcaactcgtgctacctgtgatcaaccaagtagctctggcaaacctttctccctactatcagcaacaacaatttcttccattca

SEQ ID NO: 145 - DNA, 434 bp, Zea mays
  Clone ID: LIB3061-049-Q1-K1-A12
caaacagagacaaacctatactgctacatgcataatggttggtacatggtaaaactatagcaagcgaaggtcgatcgctcgtctatagctagaccactaccacctccatggtttcttgactgatagatagacggacgagaatgaagaagctagctagctactagatatatcatcagtagagtgttcagttgttgatgatggcctcctccttgcccctggtcaccactgggctgcgccatcctcctcctccgcagcagtcgccgagggtggtcctgcagagcgaggacccgaccgagtggtgcgcgtgggcgcaccaagggcaccgtctgtgggtggccatgccggactccttctgggtgtacacgtacaaagtggaccggtgcccgttccggggcaaccacgtgtggacgacgtgcccctacgcgcactggggg

SEQ ID NO: 146 - DNA, 325 bp, Zea mays
  Clone ID: LIB3061-049-Q1-K1-A2
ctactccagagcgcagaagaacccgatcgacaccatgagggtgttgctcgttgccctcgctctcctggctctcgctgcgagcgccacctccacgcatacaagcggcggctgcggctgccagccaccgacggcggatcatctaccgacgccggtgcatctgccaccttcggttcacctgccacctccggtgcatctcccaccgccggtccacctgccgacgccggtccacctgccagcgccggtccatgtgccgccgccggttcatctgccgccgccaccatgccactaccctactaaaccgccccggactaagcctaatccccag

SEQ ID NO: 147 - DNA, 332 bp, Zea mays
  Clone ID: LIB3061-049-Q1-K1-A4
agcggatcgagatggcggcgtcggatgttgagtaccgctgcttcgtcggcggcctcgcctgggcgcacggacgaccactccctccacaacgccttcagcacctacggcgaggtcctcgagtccaagatcatcctcgatcgggagacgcagaggtcccgcggcttcggcttcgtcaccttctccacggaggaggcgatgcggaacgccatcgagggcatgaacggcaaggagctggacggccgcaacatcaccgtcaacgaggcccagtcccgcggcggccgtggaggcggctgcggcggcgggtacggtggtggccgtggaggcggcggcta

SEQ ID NO: 148 - DNA, 359 bp, Zea mays
  Clone ID: LIB3061-049-Q1-K1-A5
ccgagccctgcgctacacgcccgcgccgcctactcccgagcgtcgtctcctcccgagccccgcgatacacgcccgcgccgtcttctcccgagcgtagtaagcccgcctgcgtcgagcgccggccgagcgcctgcctgcgtctagcgcctgcctgcggtggacggatgagctgtacccgcgatatgatagactgtacgtgcagtaatggtatacggagaggagaccatgagagactggagactacagagaatgtggtggactgctaggtttttgtttattggaaaaatcagaaccctaatgggtacagacacaagacagtgtaatatggggactcgatcaacttggggttcgtaaaggat

SEQ ID NO: 149 - DNA, 348 bp, Zea mays
  Clone ID: LIB3061-049-Q1-K1-A6
aacatagaaagcacaatagtgtaccaacaatggcagccaaaatattttgcttccttatgctccggggtctttctgcacgtgttgctaccgaaaccattatgccacaatgctcacaagctcctataacttcccttcttcctccatacctttcaccagcggtgtctacaatgtgtgaaaccccaattgttcaatcctacagcatccatcaggcaatcacaacaggcattttaccattataaacttcgatcctgcaacaacagtgagtcctattacagcaatgacctttggtccattcgttggcacacagaatcaggacacaccaacttcagcacttggtcatatcaaact

SEQ ID NO: 150 - DNA, 417 bp, Zea mays
  unsure (1)..(417): unsure at all n locations; Clone ID: LIB3061-049-Q1-K1-A8
ggtcttcagaccattagctttatctactccagagcgcagaagaacccgatcgacaccatgagggtgttgctcgttgccctcgctctcctggctctcgctgcgagcgccacctccacgcatacaagcggcggctgcggctgccagccaccgccgccggttcatctaccgccgccggtgcatctgccacctccggttcacctgccacctccggtgcatctcccaccgccggtccacctgccgncgccggtccacctgccaccgccggtccatgtgccagccgccgttcatctgccgccgccaccatgccactaccctactcaaaccgcccggcctcagcctcatccccagccacacccatgcccgtgccaacagccgcatncaagcccgtgccagctgcagggaacctgcggcgttggc

SEQ ID NO: 151 - DNA, 306 bp, Zea mays
  Clone ID: LIB3061-049-Q1-K1-A9
atacttgttcactggcagtgagaccacctcagtttggttggaggtttctgaagtgaaaggagatgatgtggtgtgtataagcaagatcacagccaccttggcttggtcacttggtaagcttgattggttccaaattcacattgacttggccaacctgtctgatgaagattagggtgtcattagaaaatggggtactcccaattagattgacttcctttctctggcctacacaagacatgcagaggatgtgcgccaggcaccggaattcctgtcaaaattgggccatctaagccagactctgatttt

SEQ ID NO: 152 - DNA, 419 bp, Zea mays
  Clone ID: LIB3061-049-Q1-K1-B1
acctagcgaagcgcactagcaacgacctaacaacaatggcttccaagacattatccctccttgcgcttcttgccctttttgtgagtgcaacaaatgcgttcattattccacaatgctcacttgctccgagtgccattattccacagttcctccctccagttacttcaatgggcttcgaacacccagctgtgcaagcctataggctacaacaagcgcttggggcgagcgtcttaaaacaaccaattgcccaattacaacaacaatccttagcacatctaaccatacaaaccatcggaacgcaacagcaacaagcactgagccacctaacccgggtgaaccctatcggctacttggaacaaccggtggttgcattcaacccaattgctttggcaaacctaacttgataccaaccaccacca

SEQ ID NO: 153 - DNA, 328 bp, Zea mays
  Clone ID: LIB3061-049-Q1-K1-B10
gcagcagccgcaaagcgggcaggtcgcggggctgatggcggcgcatatagcgcaccaactgacggggatgtgcggcctgcagcagccgactccatgcccatacgctgctgccggcggtgttccccactgaagaaactatgtgctgtagtatatccgctggctagctagctagttgagccatctagcggcgatgatcgagtaataatgcgtcacgcatgaccatgggtggcacatgtcagtgtgagcaatgacctgaatgaacaattgaaatgaaatgaaaccaactagcaacaattgaactctgctgcttatttacagcagctacaac

SEQ ID NO: 154 - DNA, 302 bp, Zea mays
  Clone ID: LIB3061-049-Q1-K1-B11
gcttatttacagcagcaacaactactaccattcagccagctagctggtgtgagccctgctaccttcttgacacatccacagttgttgccgttctaccagcacgttgcgcctaacgctggcaccctcttacaactgcaacaattgctgccattcaaccaacttgctttgacaaacccagcagtgttctaccaacaacccatcattggtggtgccctcttttagatttcttatgagttatagttcaataataaagttttttatctgatgtttgtggcttcccagaaataagaaagtacatttct

SEQ ID NO: 155 - DNA, 313 bp, Zea mays
  Clone ID: LIB3061-049-Q1-K1-B12
acgcgttctttccgatcttccacttagcgtatctttgtccgccgtaacaccttcggtatcaatatcgtgtcagactgtcacacccctgacctctctcctatcgcaataaatgtgttcattatacaacaaatccctctaaaaacaactgcgattataactcacggaagatgacgatacaattgatgcagcctaggatacacattctttcatcgctacgacgaaccataaggtagcgatgcccgatgccatatcctctacgtaggctaatggaactaacaatcttcaccgatagtaaaccttctaatactacatc

SEQ ID NO: 156 - DNA, 419 bp, Zea mays
  Clone ID: LIB3061-049-Q1-K1-B2
ctgctatgctgcacacgtattgcaagaggctccgtatcattcagctgtcattatcgatcattgcgggtatggccacaaaggaaataatctgattctaggcgactggaccggttgctctgcttgaaacccggtctgggttaagctgtgaagctcctgcagccgcttgctcctgcagttatgcgtcaagtgtctaccaactctagcatatgtagtgctgcgtaagatgtcggcacctcagatagacagaggcgccatatatcttgctcatgtaaagttatatcgtgtatgctcgttagtatgtactgcatgaagcattgtaaaattgagcaacagcaaccagagctcgagaatcttaagcgcaaccaaccaaccccgtatcgatgaattgacaataaagctgaatattttaggtgtttaaa

SEQ ID NO: 157 - DNA, 162 bp, Zea mays
  Clone ID: LIB3061-049-Q1-K1-B3
ctgcagcgcagcaaacaacacgaaccatgctacaactaatttaaagtactttattgatcaccggggatgggaaactcgccgagaatactggaccttaggctactagacctcctgttctctttcaaacgcccggccgactaacacaactacttcttgcagcca

SEQ ID NO: 158 - DNA, 456 bp, Zea mays
  Clone ID: LIB3061-049-Q1-K1-A1
tcagcattcaaaaacacaccaagcgaagcgcactagcaacgacctaacaccaatggctaccaagatattagccctccttgcgcttcttgcccttttagtgagcgcaacaaatgcgttcattattccacagtgctcacttgctcctagtgccattattccacagttcctcccaccagttacttcaatgggcttcgaacatccagccgtgcaagcctacaggctacaactagcgcttgcggcgagcgccttacaacaaccaattgcccaattgcaacaacaatccttggcacatctaaccctacaaaccattgcaacgcaacaacaacaacaacaacagtttctgccatcactgagccacctagccgtggtgaaccctgtcacctacttgcaacagcagctgcttgcatccaacccacttgctctggcgaacgtagctgcataccagcaacaacaaca

SEQ ID NO: 159 - DNA, 432 bp, Zea mays
  Clone ID: LIB3061-048-Q1-K1-G5
tgctgatcgttgcccttgctctcctggctctcgctgcgagcgccgcctccagggcaaggggcggctgtggctgccagacaccaccgtttcatctaccgcctccgttctatatgccgcctccgttctatctgccgccgcagcagcagccgcagccatggcaataccccactcaaccaccgcagctaagcccgtgccagcagttcggatcctgcggcgtcggcagcgtcggcagcccgttcctgggccagtgcgtcgagttcctgaggcaccagtgcagcccggcggcgactccctacggctcgccacagtgccaggcgctgcagcagcagtgctgccaccagatcaggcaggtggagccgctgcaccggtaccaggcgacatacggcgtggtcctgcagtccttcctgcaacagcaaccgcaaggcgagctcg

SEQ ID NO: 160 - DNA, 402 bp, Zea mays
  Clone ID: LIB3061-048-Q1-K1-G6
caattagctcatcgactccagattggagaactcgacaccatgaaggtgctgatcgttgcccttgctctcctggcgctagctgcgagcgccgtctacagtacaagcggcagctgtggctgccagacaccaccgtttcatctaccgactccgttctatatgccgactccgctctatctgccgacgtaacagcagccgcagccatggcaataccccactcaaccaccgcagctaagcccgtgccagcagttcggatcctgcggcgtcggcagcgtcggcagcccgttcctgggccagtgcgttgagttcctgaggcaccagtgcagcccggcggctacgccctaaggatcgacacagtgccaggcgctgcatcagcagtgctgtcaccagatcaagcacgtggag

SEQ ID NO: 161 - DNA, 284 bp, Zea mays
  Clone ID: LIB3061-048-Q1-K1-G7
agagaacgaaagaaggaaggtacaagggaaggaagttcagttcagtatgtcatttctgtggatatcaggctcgaggatctacaccatcaaatttcgactgcgactatgcttatgctcttggacgtatctccctgcatatgattacagttggattgactggctacatggcaactgcggctaatctgaaagaccctgttgagaaatggagatgtgctgctgctcctttaactgcgatgatgagtgtgaagaggcatttacgtggccctggagcaatccctataggg

SEQ ID NO: 162 - DNA, 408 bp, Zea mays
  Clone ID: LIB3061-048-Q1-K1-G8
cggacgcgtgggcgctagcgccttccctccggaaacggaaggctctcgtgaccaccgggatgtccgccatggagaccgacatcaacgcgccgtcgccgtccgccccagctggcgagggatcctctgcggccggtccgttctcctcccgcaagcccaacaagcgcttcgagatcaagaagtggaacgccgacgcgctctgggcatgggatatcgtcgtcgacaactgcgctatctgccgcaaccacatcatggatctatgcatcgagtgccaggcgaaccatgccagcgcgaccagcgaggagtgcactgatgcttggggagtctgtaatcatgcttttcacttgcactgcatcagcaggtggcttaagactcgtcaagtgtgcccattagataacagtgagtgggagt

SEQ ID NO: 163 - DNA, 426 bp, Zea mays
  Clone ID: LIB3061-048-Q1-K1-G9
gcccaagttgccccagagcttgtagtttactcggagctacttagtacaaagaggctatacatgcacggtgtaacgaccgtaaagccagggtggcttttgaagtatgccagttccctctgcaccttctctgcgcctctggaagatccgaaaccgtactatgacccactgaacgaccaagtctactgctacgttagcccggtcttctctcgtcataactggcagcttccgttgcacagtttacctatcaaagacggtgcgagccggctgcaggtgtttgcatgcgcgttgcttaaaggggacgtcctgccatgtctacgggacgccaaggatttcctcgcgctgtcaccatccgctgtgttggggcctggcatgccacgtaaagtgggagaccttcttagcaggatgaagatcggtccgaagttagtc

SEQ ID NO: 164 - DNA, 442 bp, Zea mays
  Clone ID: LIB3061-048-Q1-K1-H1
ggacgtcagcctagcaattagctcatcgactccagattggagaactcgacaccatgaaggtgctgatcgttgcccttgctctcctggcgctcgctgcgagcgccgcctccagtacaagcggcggctgtggctgccagacaccaccgtttcatctaccgcctccgttctatatgccgcctccgttctatctgccgccgcagcagcagccgcagccatggcaataccccactcaaccaccgcagctaagcccgtgccagcagttcggatcctgcggcgtcggcagcgtcggcagcccgttcctgggccagtgcgtcgagttcctgaagcaccagtgcagcccggcggcgacgccctacggctcgccacagtgccaggcgctgcagcagcagtgctgccaccagatcaggcaggtggagccgctgcaccggtaccaggcgacata

SEQ ID NO: 165 - DNA, 447 bp, Zea mays; identical to SEQ ID NO: 108
  Clone ID: LIB3061-048-Q1-K1-H10

SEQ ID NO: 166 - DNA, 371 bp, Zea mays
  Clone ID: LIB3061-048-Q1-K1-H11
cgcaggcaagtacaagtcgaacgcattagcaacgtacagccacaattgagggcaggatattctaactccttatgctggttgatatgactacatgcgttgctaacccgacaatcttccgtgaatgcgtcacaagctgctatcgcttacgttgttgccgcatactttggatacattataggttcagtatgtgaaaacccagatcttgaaccatatgggctgcaaccagcaatcgtaggaagcaacatacctttatcgctcttgttgcatgaacaatcaccagacctatttttgctgaagctattggtccaaaccatcagggcacaacatctgcaggaacccgtgctacctgggatcaaccaagtacttttgga

SEQ ID NO: 167 - DNA, 280 bp, Zea mays
  Clone ID: LIB3061-048-Q1-K1-H12
gtcactcataaacatgagtggcagtgtcagagtgagcaatgacctgaatgaacaatcgggatgaaaagaataaagaacataataaataaaaataaaaaaatagataaaacaaataaaataacataaaagataaaaaaactgactaaagcttacgtagttactaaatacctataataaaattatagattcaatatataaaaaaggcggaccattaaacatatatcaattatacgtgcgttcgcatgcaacttcatacgtctataattggtgaagcaaaatc

SEQ ID NO: 168 - DNA, 443 bp, Zea mays
  Clone ID: LIB3061-048-Q1-K1-H2
gcaacatagaaagcacaatagtgtaccaacaatggcagctaaaatattttgcctccttatgctccttggtctttctgcaagtgctgctaccgcgaccattttcccacaatgctcacaagctcctatagcttcccttcttcccccgtacctctcaccaacggtgtcttcggtatgtgaaaacccaattcttcaaccctacaggatccaacaggcaatcgcagctggcatcttacctttatcacccttgttccttcaacaatcatcagccctattacagcagttacctttggtgcatttattggcacaaaacatcagggcacaacaactacaacaacttgtgctagcaaaccttgctgcctactctcagcaacagcagtttcttccattcaaccaactagctgcattgaactctgcttcttatttgcaacaacaacaactaccat

SEQ ID NO: 169 - DNA, 440 bp, Zea mays
  Clone ID: LIB3061-048-Q1-K1-H3
gagaccagcaagcaacatagaaagtagaatccattagcaacaatagagcaacaatggcgagcaagatattttccctccttatgctccttgctctttctacatgtgttgctaacgcgacaattttccctcaatgctcacaagctcctatagcttcccttcttcccccataccttccatcaattatagcttcagtatgtgaaaacccagctcttcaaccatataggcttcaacaagcaatcgcagcaagcaacatacctttatcgcccttgttgtttcaacaatcaccagccctatctttggtgcagtcattggtacaaaccatcaaggcacaacagctgcagcaactcgtgctacctgtgatcaaccaagtagctctggcaaacctttctccctactctcagcatcaacaatttcttccattcaaccaactgtctacactg

SEQ ID NO: 170 - DNA, 452 bp, Zea mays
  Clone ID: LIB3061-048-Q1-K1-H4
cagaaacacaccaagcgaagcgcactatcaacgacctaacaacaatggctaccaagatattagccgtccttgcgcttcttgccctttttgtgagcgcaacaaatgcgttcattattccacaatgctcacttgctcctagtgccattattccacagttcctcccaccagttacttcaatgggcttcgaacacctagctgtgcaagccaacatgcaacaacaagcgcttgcggcgagcgtcttacaacaaccaattgcccaattgcaacaacaatccttgccacatctaacaatacaagccatcacaacgcaacagcaacaacagttcctaccagcactgagccacctagccatggtgaaccctgccgcctacttgcaagagcagctgcttgcatacaacccacttgctctggcgaacgtagttgcaaaccagcatcaactacagctacaacag

SEQ ID NO: 171 - DNA, 331 bp, Zea mays
  Clone ID: LIB3061-048-Q1-K1-H6
ccgacccactcgtacgaacaacaatcattggcacatgtaaccatataaaccatagcgacgcaacaacgggaacatgagttgctgatattactgagcgacctagccgagcataaccctgtcatatacttgaaacagtaagctgcttgcatatgacccacttgctctggcaaacgtacctgattactcgcgacaacaacaactgcaacatattatggccaagatgagtcaactagccatggtgaaccatgtcgtataactaccacttgtcgcatttattcagctatacgagggcaatgcaactacgcacgtacttcgacagtagctgcaacaa

SEQ ID NO: 172 - DNA, 438 bp, Zea mays
  Clone ID: LIB3061-048-Q1-K1-H7
ctcatggtgtcaaggagttttcgattacaagcatgaaaggtggttaccgtcgagtgttccagcggcctattggttttgagtgggaactcataacttacacagatgatacttcatctttagcagaaactgatttggatgttctgtccagaaccaagcctaaagaagcaaacgagcttatttctaagcaggaatcgcaggataagttggaaaaggctcctgatacctctgtgccaactaatgggaatagctcccaagaaaagcttattggcagcccagatatactaccaaagaaattggccttaaaattagcatttactttaccaacatcatgctacgctacaatggctatccgggagcttctgaagacttccacctcagttgcatatcagaaaacactcagctgctagattctgtttggaagacattccttcataagag

SEQ ID NO: 173 - DNA, 412 bp, Zea mays
  Clone ID: LIB3061-048-Q1-K1-H8
ctagttctagcccggtcgctgtggccaatgcacctacatacctgcaacaacaattgttgcaacagattgtaccagctctgactcaactagttgcggcaaaccctgctgcctacttgcaacagctgcttgcattcaaccaactgactatgtcgaactctgctgcgtacctacaacagcgacaacagttacttaatccactagcagtggctaacccattggtcgctgccttgctacagcagcaacaattgctgccatacaaccagatctctttgataaaccctgtattgtcgaggcagcaacccatcgttggaggtgccatcttttagattacatatgagatgtactcgataatggtgccctcattccggcatgtgtttcctagaaataatcaatatattgattgagatttatc

SEQ ID NO: 174 - DNA, 237 bp, Zea mays
  Clone ID: LIB3061-048-Q1-K1-H9
ctcatcctaacctagtcactgtggacagtgaacatacagacctacatctacaagtgtaggtacagacagtacctgctatgagttacctagtctagcgctactgttctgcgtaatcttaatcgctgcctgcattaaacagcctgactatgccgaactctactacatgactgcagcagtgacagaatgtaactgatgcagtagctacggctaacacattggtcgctgccgttgtacata

SEQ ID NO: 175 - DNA, 381 bp, Zea mays
  Clone ID: LIB3061-048-Q1-K1-G4
ctgccttcttactgcagcaacagttgcttccattccatctacaagttgtggcaaacattgctgctttcttgcaacaacaacaacaattgctgccattttacccacaggttgtgggaaacattaacgccttcttgcaacagcaacagttgctaccattctacccacaggatgtggcaaacaatgtcgccttcttacaacaacaacaattgctgccatttaaccaacttgctttgacgaatcctaccaccttattgcagcagcccaccattggtggtgccatcttctagatttttttatgctttatactgtaataataaagttctcatactgatatgtgcaacttctcagtaataaaagattagagatctatattttaagttc

SEQ ID NO: 176 - DNA, 435 bp, Zea mays
  Clone ID: LIB3061-048-Q1-K1-F12
gaccaacaagcaacatagaaagtggaatccagtagcaacaatagagcaacaatggcgaccaagatattttccctccttatgctccttgctctttctacatgtgttgctaacgcgacaattttccctcaatgctcacaagctcctatagcttcccttcttcccccataccttccatcaattatagcttcaatatgtgaaaacccagctcttcaaccatataggcttcaacaagcaatcgcagcaagcaacatacctttatcgcccttgttgtttcaacaatcgccagccctatctttggtgcagtcattggtacaaaccatcagggcacaacagctgcagcaactcgtgctacctctgatcaaccaagtagctctggcaaacctttcttcctactctcagcaacaacaatttcttccattcaaccaactgtctaca

SEQ ID NO: 177 - DNA, 448 bp, Zea mays
  Clone ID: LIB3061-048-Q1-K1-F2
cccacgcgtccgcttcccttcttcccccatacctctcaccagcggtgtcttcaatgtgtgaaaccgcaattgttcaaccctacaggatccaacaggcaatcgcaacaggcatcttaccattatcacccttgttcctccaacaaccgtcagccctattacagcagttacctttggtccatttggtggcacaaaacatcagggcacaacaactacaacaacttgtgctagcaaaccttgctgcatactctcagcaacatcagtttcttccattcaaccaactggctgcattgaactctgctgcttatttgcaacaacaattaccattcagccagctagttgctgcctacccccagcaatttcttccattcaaccaactagcagcattgaactctgctgcttatttacagcagcaacaactactaccattcagccagctagctgatgtgag

SEQ ID NO: 178 - DNA, 444 bp, Zea mays
  Clone ID: LIB3061-048-Q1-K1-F3
gttggcttctcctccccctccggttcgggttcgggttcgtgaggttctccggggttcgggttcgtgggtgagcggatcgagatggcggcgtcggatgttgagtaccgctgcttcgtcggcggcctcgcctgggccacggacgaccactccctccacaacgccttcagcacctacggcgaggtcctcgagtccaagatcatcctcgatcgtgagacgcagaggtcccgcggcttcggcttcgtcaccttctccacggaggaggcgatgcggaacgccatcgagggcatgaacggcaaggagctggacggccgcaacatcaccgtcaacgaggcccagtcccgcggcggccgtggaggcggcggctgctgcgggtacggtggtggccgtggaggcggcggctacggcggtggcgggcgccgtgatggcggcggcggctactgcggt

SEQ ID NO: 179 - DNA, 444 bp, Zea mays
  unsure (1)..(444): unsure at all n locations; Clone ID: LIB3061-048-Q1-K1-F4
gccacctccggttcacctgccacctccggtgcatctcccaccgccggtccacctgccggcgccggtccacctgccaccgccggtccatgtgccgccgccggttcatctgccgccgccaccatgccactaccctactcaaccgccccggcctcagcctcatccccagccacacccatgcccgtgccaacagccgcatccaagcccgtgccagctgcagggaacctgcggcgttggcagcaccccgatcctgggccagtgcgtcgagttcctgaggcatcagtgcagcccgacggcgacgccctactgctcgcctcagtgccagtcgttgcggcagcagtgttgccagcagctcaggcaggtggagccgcagcaccggtaccaggcgatcttcggcttggtcctncagtccatcctgcagcagcagccgcaaagcggccaggtcgc

SEQ ID NO: 180 - DNA, 437 bp, Zea mays
  Clone ID: LIB3061-048-Q1-K1-F5
gacgctacctaacatctacttatctactttgcctaccaagctactaaccctgggttcgcgtgttgccctttctgtgtgcgcgacctatgcgtatgtgattccacaatgatcactcgctcttactgatatcacacttcaatccctcctacctgttacttcaacggtcttcgaccacttacatgtgcatgcgtaaaccctacagcatccgctagcgcctagcagtctgacatcttccaattacccatttccaacatcaatcactgacacatgcaaatataaacattatcaccacagcacagcaacagcaacaactactagtaccaacactgctacatctagatgtccttaacccttacttctacctgcaacagcatgcgcttagattaatcgcacttgctatggcaaacgtaactgcattaccaacaacaactgcaatt

SEQ ID NO: 181 - DNA, 458 bp, Zea mays
  Clone ID: LIB3061-048-Q1-K1-F6
ccggtttcggaatccgggccgacccactcgtaccgacgatacctagcactacttatcaaccttggctaccaagatattaaccctgcttgcgcgtgctgctttatcagtctgcgcgtcatatgcctccatcaatccacaatgaacacttgctcacagtgatattataccaaaattcctccgacctgttactacaacggtcttcgaacaccgagctgcccaagcttacaggctacaacatacgacatcgactagcatcttacatcatccaattatcccactgcaacatcaatctttgacacatcttactatacaaaccaactacacacaatatctagaaccaacactaccagccatgacacctctagatgtggtaaaccctgaatattacttgcaacatcaagtgctagcattcaaccaacagtgatctatctaacgtaactgcataccatcaactacat

SEQ ID NO: 182 - DNA, 441 bp, Zea mays
  Clone ID: LIB3061-048-Q1-K1-F7
cccacgcgtccgcatagaaagcacaatagtgtaccaacaatggcagccaaaatattttggctccttatgctccttggtctttctgcaagtgctgctacggcgaccattttcccgcaatgctcgcaagctcctatagcttcccttcttcccccgtacctctcaccagcggtgtcttcggtatgtgaaaacccaattcttcaaccctacaggatccaacaggcaatcacagctggcatcttacctttatcacccttgttcctccaacaatcatcagccctattacatcagttacctttggtgcatttattggcacaaaacatcagggcacaacaactacaacaacttgtgctagcaaaccttgctgcctactctcagcaacagcagtttcttccattcaaccaactagctgcattgaactctgcttcttatttgcaacaacac

SEQ ID NO: 183 - DNA, 442 bp, Zea mays
  Clone ID: LIB3061-048-Q1-K1-F8
gcgcgctgatcgccggccggatctgcctcgtccgctccctcatctactgggccgcgcaggtgctcggcgccgtcgccgccgcgctcgtgctcaggctcgccaccggagggatgcatctgccggagtacgcgctggccgggggcgtgagcggatggaacgcggcggtgctggaggcggccatggcgttcgggctcatgtacgcctactttgcgacggtgatggacaaagcgcggagggtccgcgccggcgccggagcgctggcggcgccgctcgccgtggggctcctggcgggggccaacgtgctggcctgcggcgcgctggagggcgccgtgatgaatccggcgcgcgcgttcgggcccgccgtcgtgggctcccgtcgctggagacaccaatgggtgtactgggtggggcccatggtcggcgccggcctctccggcatcgt

SEQ ID NO: 184 - DNA, 361 bp, Zea mays
  Clone ID: LIB3061-048-Q1-K1-F9
cgagttcctgagggggttcaaggccattcaatgcaagctggtactaaatctcagcgacaggaccctcgatgcggtgataagagtcaaactaggaaaagctcttctaatccttcttattctaaggcacccattgcacgggtccctgatccctatctacttgattgctctttgaacaatggttatgctggctccaataagaaaaaagccgaaaagagcaggttccgaccatttgccatggaaaccccatcactctgaggactcaaatgagaagaaaaaaactcagaatgcatcaaaccaacattctgtcaaaacggatattgacgaagaatcacatgaacgtgtgcaacctcaaagggttggc

SEQ ID NO: 185 - DNA, 391 bp, Zea mays
  Clone ID: LIB3061-048-Q1-K1-G10
acccgatcgacaccatgagggcgttgctcgacgccctcggtctcctggctctcgctgcgagcgccgcctccacggcatacaagcgggggctgctgctgccagccaccgccgacggttcatataccgtcgtaggtgcatctgtcacctccggtacacctgcacacctgcggtgcatcttgcaccgacggtccaactgccgacgcctgcacgactgacaacgccggtgcatgtgccgtcgcacggatcatctgccgtcgtcaccatgccactaccatacttaacacggccggcctcagtctgatacccagccacacacatgctcatgccaacagacgtataccaacccgtgccagctgcacggaacctgcagtgtcagcagcaccccgatcct

SEQ ID NO: 186 - DNA, 425 bp, Zea mays
  Clone ID: LIB3061-048-Q1-K1-G11
gcaacatataaagcacaatagtgtaccaacaatggcagccaaaatattttgcctccttatgctccttggtctttctgcaagtgctgctacggcgaccattttcccgcaatgctcgcaagctcctatagcttcccttcttcccccgtacctctcaccagcggtgtcttcagtatgtgaaaacccaattcttcaaccctacaggatccaacaggcaatcgcagctggcatcttacctttatcacccttgttcctccaacaatcatcagccctattacaacagttacctttggtgcatttattggcacaaaacatcagggcacatcaactacaacaacttgtgctagcaaaccttgctgcctactctcagcaacagcagtttcttccattcaaccaactaggttcattgaactctgcttcttatttgc

SEQ ID NO: 187 - DNA, 402 bp, Zea mays
  Clone ID: LIB3061-048-Q1-K1-G12
cccacgcgtccgatccagatcagcaaagcggcagtgcgtagagaggatcgtccaacagagcagcgtgaagatggccatcgttctcgtcgtgtgcctggctctgtcagctgccagcgcctctgcaatgcagatgccctgcccctgcgcggggctgcagggcttgtacggcgctggcgccggcctgacgacgatgatgggcgccggcgggctgtacccctacgcggagtacctgaggcagccgcagtgcagcccgctggcggcggcgccctactacgccgggtgtgggcagacgagcgccatgtaccagccgctccggcaacagtgctgccagcagcagatgaagatgatggacgtgcagtccgtcgcgcagcagctgcagatgatgatgcagcttgagcgtgc

SEQ ID NO: 188 - DNA, 426 bp, Zea mays
  Clone ID: LIB3061-048-Q1-K1-G2
ggagaaagctttgagaaataggtgctttggtggtagagttgctgcaactacacaatgtattcttacctcagatgcttgtcctgaaactcttcattctcaaacacagtcctctaggaaaaattatgctgatgcaaaccgtgtatctgctatcattttgggcggaggcactggatctcagctctttcctctgacaagcacaagagctacgcctgctgtacctgttggaggatgttacaggcttattgatatccctatgagtaactgcttcaacagtggtataaataagatatttgtgatgagtcagttcaattctacttcgcttaaccgccatattcatcgtacataccttgaaggcgggatcaactttgctgatggatctgtacaggtattagcggctacacaaatgcctgaagagccagctggatg

SEQ ID NO: 189 - DNA, 417 bp, Zea mays
  Clone ID: LIB3061-048-Q1-K1-F11
gctcatatactacagcaccatctactaccactcagccagatagctactgcctagtctcaggagcaaccatgccttccattgaaccaatggggcgcactgtaccgatctgcttatttacagtagcagatactactaccatttggccagatagctacgtcatgcaccacttccactatgaaacaacaacattcgattacgttctaccatcagtctgtggctaacaccgcaacagtattacaactgctacaactgctgccctttgtccaacttgctttgacatagcccgcatgcttgtaccaacatcacatgatcgtcggcgtcatctttcaaatggattataacctggaattcaataatgaaggagctcggctgctgaatgtggcctacttaaaataacaactatcagatgcatatgct

SEQ ID NO: 190 - DNA, 422 bp, Zea mays
  Clone ID: LIB3061-048-Q1-K1-D8
gtggggtgacgtaaggaggtgctcgggatgatccgttcgcgcccgtaggaccgggatcgggcgcctcgtcgtcctcgacgcccatgtcgggccacctcgatcgattcgcgcgggcatgttttgaagggtgctcatgtcacgatgaacgtacagaccataagtcagactttgatgtctctgatgatgataagacgacaagaataagctctttgaagaaaaaagcaatagatgcatcaacgaagattaggcactcattaaaaaagactagacggaagagcggtagtagggtcctttctgcgtctattgaggatgtgcgcgatctacaggagctgcaagctgttgaagcatttatacaagcattactcttggatgagctgttgcctgcaaggcatgacgactatcatatgacgctgagatttctg

SEQ ID NO: 191 - DNA, 414 bp, Zea mays
  Clone ID: LIB3061-048-Q1-K1-D9
ctgctgcgtacctacaacagcgacaacagttacttaatccattggcagtggctaacccggtggtcgctaccttcctgcagcagcaacaacaattgctgccatacaaccagttctctttgatgaaccctgccttgcagcaacccatcgttggaggtgccatcttttagattacatatgagatgtactcgacaatggtgccctcataccgacatgtgtttcctagaaataatcaatatattgattgagattcatctcgaaaaactaatacagcaattaccttagaaggataaattggcacaaaacaataaggcacaacaactacaacaacttgtgctagcaaaccttgctgactactctcaagaaacagcaaattaataaatggggggcccttttaaggaatcaaactttacttcc

SEQ ID NO: 192 - DNA, 408 bp, Zea mays
  Clone ID: LIB3061-048-Q1-K1-E10
gatgtgagcaactgaacacaccaagcgaaacgaactagaaacgacttacatcattggataccagatttagcccttctggctaattgcactttatgcgagcccatcatagcgtacacttattgaacaatgctgaattgtcctaaagccagattgccaaatgcttgaccagggacttaaggatatgaagacctattgccaagccatcatgcagcaaaagcgcttgtgagagcgtcttacaacaacaattgcccaattgacacacaatgattgccacatataacaatacaaaggataacgacgtaacaataacaacctttcgtacatcattgagccacctaggcatggtgaaccctgatccctactcgcgagagctgctgctagcatgcaacgcacttgctctggagaacg

SEQ ID NO: 193 - DNA, 321 bp, Zea mays
  Clone ID: LIB3061-048-Q1-K1-E11
cggacgcgtgggcaactagcaacatagatagcacaatagtgtaccaacaatggcggccgagatattttgcctccttatgctccttggtctttctgaaagtgctgctacggtgaccattttcccacaatgctcacatgcttctatagcttcccttattaccccgttcctctcaccagcggtgtcttcggtatgtgaaatcccaattcttcaaccctataggatccaacatggtaactacacaagcattgaaccttattcaatcctgcaggctatcacatctggcatcttacctccataactcgtgttgctgcatcaatcgtc

SEQ ID NO: 194 - DNA, 322 bp, Zea mays
  Clone ID: LIB3061-048-Q1-K1-E12
cacacccccagcgcagcagccctgcccagccgcgctagctagaggccgaccagacctaccgacaggagctcgctcgctcgcaaatccgcaatggcgtccatcatcgtgcaggcggtggtgatcctcctggacgtgatcgccttcggcctgggcgtcgccgccgagcagcgccggagccggtccaccgtcaccccggacgccgccaaggagtacgactactgcgtctacgactccgacatcgccacggggtacggcgtcggcgcgctgctcctcctcgccgccgcgcaggtggtgctcatggtcgccagccgctgcttctgct

SEQ ID NO: 195 - DNA, 436 bp, Zea mays
  Clone ID: LIB3061-048-Q1-K1-E2
ggcgaacgtagctgcataccagcaacaacaacagctgcaacagtttatgccagtgctcagtcaacgagccatggtgaaccctgccgtctacctacaactactttcatctagcccgctcgcggtgggcaatgcacctacgtacctacaacaacagctgctgcaacaaattgtaccagctctgactcaactagctggggcaaaccctgctgcctacttacaacagttgctttcattcaaccaactggctgtgtcaaactctgctgcgtacctacgacatgcgacacagttacttaatccattggcagcggctaacccattgatcgctaccttcctgcagcagcaacatcaattgctgccatacaaccagttctctttgatgaaccctgccgtgcagcaacccatcgttggaggtgccatcttttagattacatatgag

SEQ ID NO: 196 - DNA, 442 bp, Zea mays
  Clone ID: LIB3061-048-Q1-K1-E3
attgagaccaactagcaacatagaaagcacaatagtgtaccaacaatggcagccaaaatgttttgcttccttatgctccttggtctttctgcaagtgctgctaccgcaaccattttcccacaatgctcacaagctcctatagcttcctttcttcccccatacctctcaccagcggtgtcttcagtatgtgaaaacccaattcttcaaccctacaggatccaacaggcaatcgcagcaggcatcttacctttatcacccttgttcctacaacaaccgtcagccctattacagcagttacctttggtgcatttgttggcacaaaacatcaaagcacaacaactacaacaacttgtgctaggaaaccttgctgcctactctcagcaacagcagtttcttccattcaaccaactggctgcattgaactctgctgcttatttgcaac

SEQ ID NO: 197 - DNA, 445 bp, Zea mays
  Clone ID: LIB3061-048-Q1-K1-E4
caaaaacacaccaagcgaagcgcactagcaacgacctaacaccaatggctaccaagatagtgagccctccttgcgcttcttgcccttttagtgagcgcaacaaatgcgttcattattccacagtgctcacttgctcctagtgccattattccacagttcctcccaccagttacttcaatgggcttcgaacatccagccgtgcaagcctacaggctacaactagcgcttgcggcgagcgccttacaacaaccaattgcccaattgcaacaacaatccttggcacatctaaccctacaaaccattgcaacgcaacaacaacaacaacaacagtttctgccatcactgagccacctagccgtggtgaaccctgtcacctacttgcaacagcagctgcttgcatccaacccacttgctctggcgaacgtagctgcataccagcaacaac

SEQ ID NO: 198 - DNA, 442 bp, Zea mays
  Clone ID: LIB3061-048-Q1-K1-E5
gtcgctagcctatggtgaagggctgaaatatgagccttctaatccagtgctatactgcggccgggcagcttgctggtcaaagctgggtcggtgggcaaaagctgttgaggactgcagcgaggccctaagagtccagcctaactacacaaaggctctgctaaggcgtgcggcgtcatatgcaaagcttgagcgctgggcggactgtgtgcgggactacgaggtgcttcgcaaggatcttcctggtgacactgaggttgcagagtccttgttccatgcccaagttgcattaaagacagcccgtggagaggtggtatctaatatgaagtttggaggggtagttgaagaaattatcagcttagagcaactccaagatgttatccgttcacctggtgtatccgttctttacttcatggctacaatgaacaagcaatgtgcacaaatt

SEQ ID NO: 199 - DNA, 430 bp, Zea mays
  Clone ID: LIB3061-048-Q1-K1-E6
agttttagaaaaaatcgctgtctatcagcgggcaaacaaagaggttgccatcatctgtaaccatcagcgtagtgtgtggaaatcacatgagtgccagatgactagaatgaacgaaaagattgatgagttgaagtcccagatggaggagctgaaagcagacttgaacaaagcaaagaaagggaagcctctatgctatgattcataggggaagccaaagaggaacttggctcctgaagcgattcaaaagaaggttgcaacacttgaaggcaagatagagaagatggagatggataagaggataaaagaggatctgaagacagttgcgctgggaacgtcaaagatcaactatcttgatcctagaataaccgtggcatggtgcaaacgccatgaagtccctattgagaagattttcaacatatctgtcctcgcg

SEQ ID NO: 200 - DNA, 437 bp, Zea mays
  Clone ID: LIB3061-048-Q1-K1-E7
accaacttccattccctaccgcccgcccaccccactccactccgctcctcccactcgagccatcatggccctcgcctcccgcgccgccgcagccgccgtggcgtgcgtcctcctggcgctcgccgcctccgccgcgggggcgggctccaactcccctgcaccggcgccggcggtggactgtatctcccaggccgccagcctgatcgactgcatcgactacgtccagaaggggagcagcgcgcgccgtccgtccgctgcctgctgcggcgaggtcaagaccgcagtggccagccccgtcatcgtgggctgcctctgctccctcgccggctccaactccagtaacctgggctttcccatcgacatgaagcgcgtgctggcgctccccggcgcgtgcggcgcgtccaacgccgtcttcagcaagtgcaacattttcgcgc

SEQ ID NO: 201 - DNA, 406 bp, Zea mays
  Clone ID: LIB3061-048-Q1-K1-E9
aacatagaaagtggaatccagtagcaacaatagagcaacaatggcgaccaagagactttgcctccttatgctccttgctctttctgcatgtgttgctaacgcgacaattttccctcaatgctcacaagctcctatagcttcccttcttcccccataccttccatcaatgatagcttcagtatgtgaaaacccagctcttcaaccctataggctccaacaagcaatcgcagcaagcaacatacctttatcaccctagtttcaacaatcgccagccctatctttggtgcagtcattggtacaaaccatcaaggcacagcagctgcagcaactcgtgctacctgtgatcaaccaagtagctctggcaaacctttctccttactatcagcaacaacaatttcttccattc

SEQ ID NO: 202 - DNA, 454 bp, Zea mays
  Clone ID: LIB3061-048-Q1-K1-F1
attttgagcattcagaaacacaccaagcgaagctacctagcaacgacttaacaacaatggctaccaagatattaggcctccttgcgcttcttgccctttttgtgagcgcaacaaatgcgttcattattccacaatgctcacttgctcctagtgccattataccacagttcctccgaccagttacttcaatgggcttcgaacacctagctgtgcaagcctacaggctacaacaagcgcttgcggcgagcgtcttacaacaaccaattaaccaattgcaacaacaatccttggcacatctaaccatacaaaccatcgcaacacaacagcaacaacagttcctaccagcactgagccaactagatgtggtgaaccctgtcgcctacttgcaacagcaggtgcttgcattcaacccacttgctctggcaaacgtagctgcataccaacaacaacaaca

SEQ ID NO: 203 - DNA, 435 bp, Zea mays
  Clone ID: LIB3061-048-Q1-K1-F10
ggaaataaacttgcctgctgaagaggtccctcctgaactgccagagccagctcttggaattaattctgctcgtgaggggatggatgaaaaagattggctatcacttgttgcagtccatagtgatcctgggctaaggtctgttgcatttaattttgaaccaaggttggaatccaataaagattccaggaaccgtcttttaaccatgaccattaaccttcccagcttatatgaggttgtcacaggaacagccaagaaagagcccaaagaaaaaactcctaaaagcaacattaagactaacaaatctggctcaaagccctcgcgccatgcggaacccaactcaagggtcccaaagatgccacctccaaaggacgaggagagtgaagaggaggaaggggaaccacaggaagaccaggagagtgcgctgtgtggcgcatg

SEQ ID NO: 204 - DNA, 437 bp, Zea mays
  Clone ID: LIB3061-048-Q1-K1-D6
gaccaactagcaacatagaaagcacaatattgtaccaacaatggcagccaaaatatttggcttccttatgctccttggtctttctgcaagtgctgctaccgcaaccattttcccacaatgctcacaagctcctatagctctctttcttcccccatacctctcaccagcggagtcttcagtatgtgaaaacccaattcttcaaccctacaggatccaacaggcaatcgcagcacgcatcttacctttatcacccttgttcctccaacaaccgtcagccctattacagcagttacctttggtgcatttgttggcacacaacatcaaggctcaacaactacaacaacttgtgctacgaaaccttgctgcctactctcagcaacagcagattcttccattcaaccaactggctgcattgaactctgctgcttatttgcaac

SEQ ID NO: 205 - DNA, 443 bp, Zea mays
  Clone ID: LIB3061-048-Q1-K1-C2
attgagaccaactagcaacatagaaagcacaatagtgtaccaacaatggcagccaaaatattttgcttccttatgctccttggtctttctgcaagtgttgctaccgcaaccattttcccacaatgctcacaagctcctatagcttcccttcttcccccatacctctcaccagcggtgtcttcaatgtgtgaaaccccaattgttcaaccctacaggatccaacaggcaatcgcaacaggcatcttaccattatcacccttgttcctccaacaaccgtcagccctattacagcagttacctttggtccatttggtggcacaaaacatcagggcacaacatctacaacaacttgtgctagcaaaccttgctgcatactctcagcaacatcagtttcttccattcaaccaactggctgcattgaactctgctgcttatttgcaaca

SEQ ID NO: 206 - DNA, 411 bp, Zea mays
  Clone ID: LIB3061-048-Q1-K1-C3
aagaaacagaggccaaggctaactcaggaactagaagcattctggacaatggatgagcgagctacgagactcaagttagggatcacatctgatgctcatgcagataaattgagacacctgatagatctcttctaccagtgtaccagaggacatgcatccaggcggcccaaagctgtgcaaatttacaactcactgtgctccttgcccacatgttacgacatgaggtgaacgttctgatactgtatgaacgcgaaacttgatgcagaagtgcaggggaagaaggtcaaggcaggacatctagccagcctcagagggtttggtgctctaacccgaacatttcaccgtgagttggccttcaggtgctgccaggcagaacatgagaagtgggaccaaggctagcggctgtggtcg

SEQ ID NO: 207 - DNA, 417 bp, Zea mays
  Clone ID: LIB3061-048-Q1-K1-C4
ggcatgccagaaacagagatagacctgatcgcagtgtatgggcacctcgccgctatgacaaatctgcgcctgggggtgtttcacatgccttgtcgtcagatttttctcaaatgcagtcacattctggagataatgtctcacaactaacagatggtcatggagacagaaagacagacacaaggggtcatggaggtagccgtggtgttcctgttgaaaatggacataggcatgccaaccgtcgtggtaccccatgtgatccaaaggaaaccaaaatatctgctagcgtgcctgatggaaagaattcaaagaggggctctgctagctatggtgctcatgagagacaagtatgggttcagaagtcaagttcaggctcgtgagtttgtccattgatgatactcccataaaaaacaggtattg

SEQ ID NO: 208 - DNA, 408 bp, Zea mays
  Clone ID: LIB3061-048-Q1-K1-C5
ccggcggacccactcgtccggagatcaaaggcctttgcatgaagttatatttgcatgtgacgataagccaaaggttatgggacagttaacctgtgtcctgggggagcttggtcttaatatccaagaagcacatgcatattcgacgagtgatggctattccttggacatgtttgttgttgacggctgtgagtatgaggctgacattctccaaagcgcattgacagaaggcgttgataaaataaagtacagagcatggccgttggtaccgtcgatgactgctaagatggatcaccaaccattggaggtttatccttcatctagactttggccagataccagctgatgcagctgatgttcgggaagtcgatctcaggattgtcaaattcgaacaatatttatcggctggat

SEQ ID NO: 209 - DNA, 432 bp, Zea mays
  Clone ID: LIB3061-048-Q1-K1-C6
gcaacatagaaagtggaatacagtagcaacaatagagcaacaatggcggccaagatatggtccatccttatgctccttgctctttctgcatgtgttgctaacgcgaccatttttcctcaatactcacaagctcctatagctgcccttcttcccccataccttccatcaatgaccgcttcagtttgtgaaaacccagcccttcaaccctacaggctccaacaagcaatcgcaacaagcaacttacctttatcacccctgttctttcaacaatcgccagccctatctttggtgcagtcattggtacaaaccatcatggcacaacagctgcaacaactcgtgctaccagtgatcagccaagtagctctggcaaacctttctccctactctcagcaacaacaatttcttccattcaaccaactgtctacactgaac

SEQ ID NO: 210 - DNA, 404 bp, Zea mays
  Clone ID: LIB3061-048-Q1-K1-C7
aacatagaaagcgcaatagtgtaccaacactggcagccaacatattttgcctgcttatgctccatggtatttctgcaagcgctgctacggcgaccattttaccgcaatgctcacaagctcctatagcttgccttcatccctcgtacctctcaccagcggtgtctatggtatgcgaaaacccaattcttcaaccctacaggatccaactggcaattgcagctggcatcttacctttatcaccctcgttcatccaacaatcatcagccctattacagcagttacctttggtgcatttattggcacaaaacattaaggcacaacaactacaacaacttgtgctagcaaaccttgatgcctactctcagcaacagcagtttcttccattcaaccaactagctgcattg

SEQ ID NO: 211 - DNA, 429 bp, Zea mays
  Clone ID: LIB3061-048-Q1-K1-C8
cccacgcgtccgcaacaagcaacatagaaagtggaatacagtagcaacaatagagcaacggtggcggccaagatattttccatccttatgctccttgctctttctgcatgtgttgctaacgcgaccatttttcctcaatactcacaagctcctatagctgcccttcttcccccataccttccatcaatgaccgcttcagtttgtgaaaacccagcccttcaaccctacaggctccaacaagcaatcgcaacaagcaacttacctttatcacccctgttctttcaacaatcgccagccctatctttggtgcagtcattggtacaaaccatcagggcacaacagctgcaacaactcgtgctaccagtgatcagccaagtagctctggcaaacctttctccctactctcagcaacaacaatttcttccattc

SEQ ID NO: 212 - DNA, 362 bp, Zea mays
  Clone ID: LIB3061-048-Q1-K1-C9
aacacacaaacaaaacaagcaacataacataaaaaaaacaaaaaacaacaacagggtttcgggccaaactcaagctaccagccctagcttacgctaccagctaactctgcagctctccctctctcatccctaactcctttatactggccctctcatactcaatgaccttcctgcgacatcccctccattactgacctctaccgtctgccacaacctaccccttctgccatccaggctacttccctcacttccatcacgcatcgaacttccatattccctggccttccatctgtcgactgcaccacaccctgcactgccataccaacagtccatcaacgtgcagcatctggcgctcctccctc

SEQ ID NO: 213 - DNA, 445 bp, Zea mays
  Clone ID: LIB3061-048-Q1-K1-D1
attgagaccaactagcaacatagaaagcacaatagtgtaccaacaatggcagccaaaagagttttggttccttatgctccttggtctttctgcaagtgttgctaccgcaaccattttcccacaatgctcacaagctcctatagcttcccttcttcccccatacctctcaccagcggtgtcttcaatgtgtgaaaccccaattgttcaaccctacaggatccaacaggcaatcgcaacaggcatcttaccattatcacccttgttcctccaacaaccgtcagccctattacagcagttacctttggtccatttggtggcacaaaacatcagggcacaacaactacaacaacttgtgctagcaaaccttgctgcatactctcagcaacatcagtttcttccattcaaccaactggctgcattgaactctgctgcttatttgcaacaa

SEQ ID NO: 214 - DNA, 418 bp, Zea mays
  Clone ID: LIB3061-048-Q1-K1-D10
cagaaacacaccaagcgaagcgcactagcaacaacctaacaacaatggctaccaagataggatcccgccttgcgcttcttgcgctttttgcgagcgcaacaaatgcgtccattattccacaatgctcacttgctcctagttccattattccacagttcctcccaccagttacttcaatggccttcgaacacccagctgtgcaagcctataggctacaacaagcgattgcggcgagcgtcttacaacaaccaattgcccaattgcaacaacaatccttggcacatctaacaatacaaaccatcgcaacgcaacagcaacaacagttcctaccagcactgagccacctagccatggtgaaccctgtcgcctacttgcaacagcagctgcttgcatgcaacccacttgctctagcaaacgt

SEQ ID NO: 215 - DNA, 425 bp, Zea mays
  Clone ID: LIB3061-048-Q1-K1-D11
gtgaaaacccagctcttcagccctataggctccaacaagcaatcgcagcaagcggcatagctttatcacccttgttgtttcaacaatcgccagccctatctttggtgcagtcattggtacaaaccatcagggcacagcatctgcagcaactcgtgctacctgtgatcaaccaagtagctctggcaaacctttctccctactctcagcaacaacaatttcttccattcaaccaactgtctacactgaaccctgctgcttatttgcagcaacaactattaccattcagccagctagctactgcctactctcagcaacaacaacttcttacatttaaccaattggccgcactgaaccccgctgcttatttgcagcagcaaatactactaccatttagccagctagctgcagcaaaccgtgcttccttc

SEQ ID NO: 216 - DNA, 399 bp, Zea mays
  Clone ID: LIB3061-048-Q1-K1-D12
cgcacagtagtgtgtcccccctccccctgctagggctctgattctttttattgacgatcaagtacggaggttctatcggtgcccacaagctcgacccgcgaccgaaggtacaagagacgctgatgttcaggctcttcatccgcgcgtagaaaggatggcggcagcggcagacctactcggcgtcagttgcgttgtctactgcgaatttttgtctggtgatccatactttcgagtgcattcccgtgccggaagcggtcccctctaacgacttcgtcacgccgactgaggccgacctgttagatccctccatcgaggctcctactgagatgactccggtcgcgaagaggagcccagttgagctccttcgcgtgttctacgtcaaattcaagaaggatctgt

SEQ ID NO: 217 - DNA, 447 bp, Zea mays
  Clone ID: LIB3061-048-Q1-K1-D2
attgagaccaactagcatcatagaaagcacaatagtgtaccaacaatggcagccaaaagattttggttccttatgctccttggtctttctgcaagtgttgctaccgcaaccattttcccacaatgctcacaagctcctatagcttcccttcttcccccatacctctcaccagcggtgtcttcaatgtgtgaaaccccaattgttcaaccctacaggatccaacaggcaatcgcaacaggcatcttaccattatcacccttgttcctccaacaaccgtcagccctattacagcagttacctttggtccatttggtggcacaaaacatcagggcacaacaactacaacaacttgtgctagcaaaccttgctgcatactctcagcaacatcagtttcttccattcaaccaactggctgcattgaactctgctgcttatttgcaacaacaa

SEQ ID NO: 218 - DNA, 447 bp, Zea mays
  Clone ID: LIB3061-048-Q1-K1-D3
catgaatcatcattcatcttagtagtatatgcaccaaatcaaatctgcaacatcaattagctaactgcaaaaaccatgaagctggtgcttgtggttcttgctttcattgctttagtatcaagtgtttcttgtacacagacaggcggctgcagctgtggtcaacaacaaagccatgagcagcaacatcatccacaacaacatcatccacaaaaacaacaacatcaaccaccaccacaacatcaccagcagcagcaacaccaacaacatcaagttcacatgcaaccacaaaaacatcagcaacaacaagaagttcatgttcaacaacatcaacaacaaccgcagcaccaccaccaacaacaacaacaacagcaccaacaacaacatcaatgtgaaggccaacatcaacatcaccaacaatcacaaggccatgtgcaacatcacgaacag

SEQ ID NO: 219 - DNA, 408 bp, Zea mays
  unsure (1)..(408): unsure at all n locations; Clone ID: LIB3061-048-Q1-K1-D4
ggaaattaaggtggacgagtacattacgcacaacatgaacctggctgacatcaacgacgccttccacctgctgcacgaaggtggctgtctgcgttgtgtgctggcgatgcagatctgaaattcctaagctaagcagtttttggatgtgtcggcatagactgtcttttgttttggaactagaattcctttttgcctcgttaggcctggacccactgtataatgctatgttgctttggatggctgacgatggttaccgctgtgttgctagccatgtggtacttgatctgtatcacggttgcaaataagtgctgtttctaaaaaaaaaaacnncaacaacataaacaacaatagcttcaacaacaacaactcctactacaacatcactgtataagcccacatcatcataac

SEQ ID NO: 220 - DNA, 434 bp, Zea mays
  Clone ID: LIB3061-048-Q1-K1-C12
gaaagcacaatagtgtaccaacaatggcagccaaaatattttgcctccttatgctccttggtctttctgcaagtgctgctacggcgaccattttcccgcaatgctcgcaagctcctatagcttcccttcttcccccgtacctctcaccagcggtgtcttcggtatgtgaaaacccaattcttcaaccctacaggatccaacaggcaatcacagctggcatcttacctttatcacccttgttcctccaacaatcatcagccctattacatcagttacctttggtgcatttattggcacaaaacatcagggcacaacaactacaacaacttgtgctagcaaaccttgctgcctactctcagcaacagcagtttcttccattcaaccaactagctgcattgaactctgcttcttatttgcaacaacaacaactacca

SEQ ID NO: 221 - DNA, 389 bp, Zea mays
  Clone ID: LIB3061-044-Q1-K1-G4
cccacgcgtccggcaaagcggcagtgcgtagagaggatcgtcgaacagaacagcatgaagatggtcatcgttctcgtcgtgtgcctggctctgtcagctgccagcgcctctgcaatgcagatgccctgcccctgcgcggggctgcagggcttgtacggcgctggcgccggcctgacgacgatgatgggcgccggcgggctgtacccctacgcggagtacctgaggcagccgcagtgcagcccgctggcggcggcgccctactacgccgggtgtgggcagccgagcgccatgttccagccgctccggcaacagtgctgccagcagcagatgaggatgatggacgtgcagtccgtcgcgcagcagctgcagatgatgatgcagcttgagcg

SEQ ID NO: 222 - DNA, 342 bp, Zea mays
  Clone ID: LIB3061-044-Q1-K1-G5
gcattcagaaacacaccaagcgaagcgcactatcaacgacctaacaacaatggctaccgggatattagccctccttgcgcttcttgccctttctgtgagcgcaacaaatgcgttcattattccacaatgctcacttgctcctagtgccattattccacagttcctcccaccagttacttcaatgggcttcgaacacctagctgtgcaagccaacatgcaacaacaagcgcttgcggcgagcgtcttacaacaaccaattgcccaattgcaacagcaatccttgccacatctaacaatacaagccatcacaacgcaacagcaacaacagtttctaccagcact

SEQ ID NO: 223 - DNA, 283 bp, Zea mays
  Clone ID: LIB3061-044-Q1-K1-G6
tgttactgtggtgaaggggcttgaattgtttggtgtaaagcttagtgatgcttcgaagaagcttgggaagaagtttgcaaccggagcttctgttgttaagggccctacggagaaggagcaaatcgacgtacaaggggacatctcatatgatattgtggagttcattacagatacatggcctgatgtacctgagtcggccattttcttcattgaagatggaaggaaggttcctgctgcttgatgccatatgttttataaggcacgagaccaatggatttacaaa

SEQ ID NO: 224 - DNA, 135 bp, Zea mays
  unsure (1)..(135): unsure at all n locations; Clone ID: LIB3061-044-Q1-K1-G7
cccacgcgtccgatttgcaacaacaacaactaccattcagccagctacctgctgcctacgccccagcaatttcttccattcaaccaaatggtagtaagttgttgnntgctgtnnataagcaggagagtgcagtgc

SEQ ID NO: 225 - DNA, 389 bp, Zea mays
  unsure (1)..(389): unsure at all n locations; Clone ID: LIB3061-044-Q1-K1-G8
gaccattagctttatctactccagagcgcagaagaacccgatcgacaccatgagggtggtgctcgttgccctcgctctcctggctctcgctgcgagcgccacctccacgcatacaagcggcggctgcggctgccagccaccgccgccggttcatctaccgccgccggtgcatctgccacctccggttcacctgccacctccggtgcatctcccaccgccggtccacctgccgccgccggtccacctgccaccgccggtccatgtgccgtcgccggttcatctgccgtcgtcaccatgccactaccctactcaaccgccccggcctcagcctcatccccagccacacccatgcncgtgccaacagccgcatccaagcccgtgccagctgc

SEQ ID NO: 226 - DNA, 417 bp, Zea mays
  Clone ID: LIB3061-044-Q1-K1-G9
gctctttctgcatgtgttgctaacgcgacaattttccctcaatgctcacaagctcctatagcttgcgttcttcccccataccttccatcaatgatagcttcagtatgtgaaaacccagctcttcagccctataggctccaacaagcaatcgcagcaagcaacatacctttatcacccttgttgtttcaacaatcgccagccctatctttggtgcagtcattggtacaaaccatcagggcacagcagctgcagcaactcgtgctacctgtgatcaaccaagtagctctggcaaacctttctccctactctcagcaacaacaatttcttccattcaaccaactgtctacactgaaccctgctgcttatttgcagcaacaactattaccattcagccagctagctactgcctactctcag

SEQ ID NO: 227 - DNA, 338 bp, Zea mays
  Clone ID: LIB3061-044-Q1-K1-H1
atggagagcattcacaaccacagagcgccaatgtcgaccacgacactttacctacttaggctactagcacattatgcatgcgtggccaacgcgacatttttgcgtgcgcgctcactgcctccaatagctcacattgctcactcacacctagcatcaatgttcgatacagtatgtgaaaacctacttctataaccctataagatccaactagcaatggctacatgctacataccgcgatcaccgttggcgcaacaatcgatagacctatctaaggtgcactccttggcacagaccatctaggcacaccaactgtagcaactcatgctacacgagatcaa

SEQ ID NO: 228 - DNA, 426 bp, Zea mays
  Clone ID: LIB3061-044-Q1-K1-H10
cgcgtacgctgatagccgagaccaagaccatatccttccacttgctatggcggcggcggcggcgacggcgaccgcgacctctccggcgagggcttcgtggcggcctacggttcccgcgacctcggcatcggcagcaggagtctgcttccgtgttggagcgaagcgctttccagggctccgaacggcaagcacctgtcggcaccgacaccgaggcagaacaaggctcacaacagctcacgtcaagagcggggaagccgaggggcgtccaagcacggaggagagcgcaactggcatcggcggcccggacgaggactccttgcggcgcgagctcgaaaccgcgatcgaggaggaggactacgcgcgcgccgcggcgctccgggacgagctgcgcgtgctccaggaggactgccgggcccgcgtgctggc

SEQ ID NO: 229 - DNA, 412 bp, Zea mays
  Clone ID: LIB3061-044-Q1-K1-H11
cgcaaattgcaccaagatatccatcgagagggcgtcgacgggggaataatggcgtcgtcgtctagcagcagccaccgtcgcctcatcctcgcagccgtcgtcctgctctccgtgctcgcggctgccagcgccagcgccgggacctcctgcgtgccggggtgggccatcccgcacaacccgctcccgagctgccgctggtacgtgaccagccggacctgcggcatcgggccgcgcctcccgtggccggagctgaagaggagatgctgccgggagctggcggacatcccggcgtactgccggtgcacggcgctgagcatcctcatggacggcgcgatcccgccgggcccggacgcgcagctggagggccgcctagaggacctgccgggctgcccgcgggaggtgcagaggggat

SEQ ID NO: 230 - DNA, 343 bp, Zea mays
  Clone ID: LIB3061-044-Q1-K1-H12
gctcacaactaaccaattactccatcgatacttcgcacacataacaattcataccataggtgcatatgaacatctacaacctctacatgctctcatccaactacctgctctgaaccctctctcctaccagcaacagcacttgcacctattacatccacttgctctaccattcataacatccatactcaacaacatcacactattacaacaatcatctaccacctctaacatatctcctcatcttcatcgctcacagctaactacaacatgctcaactgatctcatctacatctctccctactgtcaatgcacctacatacctataacaacagacggtgctaca

SEQ ID NO: 231 - DNA, 443 bp, Zea mays
  Clone ID: LIB3061-044-Q1-K1-H2
caactagcaacatagaaagcacaatagtgtaccaacaatggcagccaaaatattttgcctccttatgctccttggtctttctgcaagtgctgctacggcgaccattttcccgcaatgctcgcaagctcctatagcttcccttcttcccccgtacctctcaccagcggtgtcttcggtatgtgaaaacccaattcttcaaccctacaggatccaacaggcaatcgcagctggcatcttacctttatcacccttgttcctccaacaatcatcagccctattacaacagttacctttggtgcatttattggcacataacatcagggcacaacaactacaacaacttgtgctagcaaaccttgctgcctactctcagcaacagcagtttcttccattcaaccaactaggttcattgaactctgcttcttatttgcaacaacaacaac

SEQ ID NO: 232 - DNA, 432 bp, Zea mays
  Clone ID: LIB3061-044-Q1-K1-H3
ctttggtgcagtcattggtacaaaccatcagggcacaacagctgcagcaactcgtgctacctctgatcaaccaagtagctctggcaaacctttctccctactctcagcaacaacaatttcttccattcaaccaactgtctacactgaaccctgctgcttatttgcagcaacaactattaccatttagccagctagctactgcctactctcagcaacaacaacttcttccatttaaccaattggccgcactgaaccccgctgcttatttgcagcagcaaatactactaccatttagccagctagctgcagcaaaccgtgcttccttcttgacacagcaacagttgctgcctttctaccagcagtttgcggctaaccccgcaaccctcttacaactacaacaattgttgccctttgtccaacttgctttgacag

SEQ ID NO: 233 - DNA, 443 bp, Zea mays
  Clone ID: LIB3061-044-Q1-K1-H4
attttgagcattcagaaacacacctagcgaagcgcactagcaacgacctaacaacaatggcttccaagacattatgcctccttgcgcttcttgccctttttgtgagtgcaacaaatgcgttcattattccacaatgctcacttgctccgagtgccattattccacagttcctccctccagttacttcaatgggcttcgaacacccagctgtgcaagcctataggctacaacaagcgcttgcggcgagcgtcttagaacaaccaattgcccaattacaacaacaatccttagcacatctaaccatacaaaccatcgcaacgcagcagcaacaagcactgagccacctagccgtggtgaaccctatcgcctacttgcaacaacagctgcttgcatccaacccacttgctttggcaaacgtagctgcataccaacaacaacaacag

SEQ ID NO: 234 - DNA, 392 bp, Zea mays
  unsure (1)..(392): unsure at all n locations; Clone ID: LIB3061-044-Q1-K1-H5
aattcccgggctttttgttgagtacatacatatatggtatgttgatttgatatagtgatggacacatgctttgaccatgaatatgtcaaatcagttgtacttgcacgaagcaaaacataatataagtttaggagtaaacttataactgtgtccaaacatgctcacacaaattcataccacattataattttttggtaaatattccacacatgtattttttacaagaaactaaattttgcacacaaatgtagcattgtagacatgtataattctatgaacccgtgaacttaacaacaccaaggtcattaaatcaactggaccctatgagtaacaatttcgatatggcanacaccaaattattgaaactattggctgaaaatatgaccaacgta

SEQ ID NO: 235 - DNA, 424 bp, Zea mays
  Clone ID: LIB3061-044-Q1-K1-H6
gtttgctgagaaaccgaaaggagagcagttgaaagcaatgatggttgacaccaccatacttggccttgatgacgtgagggcaaaggaaatgccttatattgctagcatgggtatctatgttttcagcaaagatgtaatgcttcagctcctccgtgaacaatttcctgaagccaatgactttggaagtgaggttattccaggtgcaaccagcattggaaagagggttcaggcttatctgtatgatggttactgggaagatatcggtaccattgcggcattttataatgcaaacttgggaataaccaagaagccaataccagatttcagcttctatgaccgttttgctccaatttatacacaacctcgacacctgccacctttcaaggttcttgatgctgatgtgacagacagtgttaatggtgaa

SEQ ID NO: 236 - DNA, 354 bp, Zea mays
  unsure (1)..(354): unsure at all n locations; Clone ID: LIB3061-044-Q1-K1-H7
ctggcaaagggcactgacggccgcggcggtgtcgatggagtggtggcagaaggcggtggtggtgccggtgaagcgcgcgtggatcgccgccgccgcccggctgacgacgcgacataagaaagaagacggcggccacggcgtcctggtgaagctccacgacgacgttcaaacgtgcgcgtacgaggacgtgcatgtgatggtgggaaatgctgaaccggcccaagccgaatagcttgcccgcgagcccttgcaaaaggcgcgcgcgcgctcgtctggctgcgccgtcaccacaagatggacccgcgccggcgctgctgangaggaggacgacgacgacaccctgatgcttttcct

SEQ ID NO: 237 - DNA, 429 bp, Zea mays
  unsure (1)..(429): unsure at all n locations; Clone ID: LIB3061-044-Q1-K1-G3
gttttgggaccccatggaatgcagctatcatataccctttcttgcaacaactggaggacaacttgatggacaaggactgcaaggacaaagggtggtctgctgctgccgccgccggcggcggcggcggtcggaagcttgttgccgaagatgacagggaggatgagtgtggcatttgcctggagacctgcaccaagatggtccttccgaattgcaaccatgccatgtgcatcaactgttaccgagactggtacacaaggtcccagtcatgcccgttctgccgcgggagcctgaagagggtccggtccagagacctgtgggtgctcaccggcgacgacgacgtgatcgacacggtgacgctggagaaggagaacgtgaagcacttnctcagcttcatcgacagcctgcccctgatcgtccccgacaacatgc

SEQ ID NO: 238 - DNA, 397 bp, Zea mays
  Clone ID: LIB3061-044-Q1-K1-F1
attttgagcattcagaaacacaccaagcgaagcacattagcaacaacctaacaacaagggctaccaagatattatccctacttgcgcttcttgcgctttttgcgagcgcaacaaatgcgttcattattccacaatgctcacttgctccaagttccattattacacagttcctcccaccagttacttcaatgggcttcgaacacccagctgtgcaagcctataggctacaacaagcaattgcggcgagcgtcttacaacaaccaatttcccagttgcaacaacaatccttggcacatctaacaatacaaaccatcgcaacgcaacagcaacaacaattcctaccagcactgagccacctagccatggtgaaccctgccgcctacttgcaacagcagtt

SEQ ID NO: 239 - DNA, 385 bp, Zea mays
  Clone ID: LIB3061-044-Q1-K1-F10
ctccactcccacgcgaaccctagcagtggttctcccttggggccccggtaaacagctgggttccaggctgtataagcatctccgatcccatccgcggcgggttgaagccatcagctccggtttctgcagccggatttgggatccgcgagatgtcttggtccgcgcccgacgacatcctcctatacacctccctcgccggcttcttggacacaaatgttgttcttcagggtgcttgtgaacgagtgattgtgggggaacaatattgtgatgttcctcttgggctgtacgtaatccggggagagaacgttgttttaatcggagaattggatcgcgaaaaggatgaactccctgctcacatgacctgtgtttcagaagcagaaataag

SEQ ID NO: 240 - DNA, 410 bp, Zea mays
  unsure (1)..(410): unsure at all n locations; Clone ID: LIB3061-044-Q1-K1-F11
ggtttctccccggctccagctcgccagctcgcgcccttcctgctcgcccagccatctcggcgcctaggtggccgctgcaccagccgagtccctccccatgtcagctgcaagcacgccgtgctttcttcccatggccgtctgcagcttctcccatggtgagctccctccagtgccctaggtttccatggccgtccctccctcatcttgctacccaagctgagctcgcccagcccctctctgctacctgagttctccccacgccagcagccatggcacctncttgccctgctcagcctccctctgtgcccagcctcctatctgatcttccgtggagcagtagccctactctaattctgcagcaacagctgccccttattcttatgatctccatgaatgaaagcccaagcgcc

SEQ ID NO: 241 - DNA, 408 bp, Zea mays
  unsure (1)..(408): unsure at all n locations; Clone ID: LIB3061-044-Q1-K1-F12
aaatattntgctgtcttagcctctggtcttttgcaatgctggttcccgaaccaggttccacgatgctcacaagctcctatagcttcctttcttcccccatacctctcaccagcggtgtcttcagtatgtgaaaacccaattcttcaaccctacaggatccaacaggcaatcgcagcaggcatcttacctttatcacccttgttcctccaacaaccgtcagccctattacagcagttacctttggtgcatttgttggcacaaaacatcaaggcacaacaactacaacaacttgtgctaggaaaccttgctgcctactctcagcaacagcagtttcttccattcaaccaactggctgcattgaactctgctgcttatttgcaacaacaactaccattcagtcagctagct

SEQ ID NO: 242 - DNA, 373 bp, Zea mays
  Clone ID: LIB3061-044-Q1-K1-F2
gaactggagttggagtcaaaaatgaaaggcagaagtaaagatcatggtgattttagaggtgagaagcacaaaagtgaaagaatccatagctccagctcaaggattgaacaagaagggaccacttatgatacttcatactcagaccaggaggatggtctcagggatgatgaaattgaaagatttctttattcaagggcgaagcgaggacttggggctgttggttccaggatggacgagcctggtccataccttgattctctgtcccatcatcaggacaatggacctagcccggacatacgtgtggaagaaaaatgggaacgcatagtacaaggcccatataagcctgcattttgcggatgcaagtctctcgatg

SEQ ID NO: 243 - DNA, 446 bp, Zea mays
  Clone ID: LIB3061-044-Q1-K1-F3
caacaagcaacatagaaagtggaatacagtagcaaaaatagagcaacaatggcggccaagatattttccatccttatgctccttgctctttctgcatgtgttgctaacgcgaccatttttcctcaatactcacaagctcctatagctgcccttcttcccccataccttccatcaatgaccgctttagtatgtgaaaacccagcccttcaaccctacaggatccagcaagcaatcgcaacaagcaacttacctttatcacacctgttctttcaacaatcgccagccctatctttggtgcagtcattggtacaaaccatcagggcagaacagttgcagcaactcgtgctaccagtgatcagccaagtagctctggcaaacctttccccctactctcagcaacaacaatttcttccattcaaccaactgtctatactgaaccctgctgt

SEQ ID NO: 244 - DNA, 395 bp, Zea mays
  Clone ID: LIB3061-044-Q1-K1-F4
cccactcgtccgtccacgcgtccggaccaacaagcaacatagaaagtggaatccagtagcaacaatagagcaacaatggcgaccaagatattttccctccttatgctccttgctctttctacatgtgttgctaacgcgacaattttccctcaatgctcacaagctcctatagcttcccttcttcccccataccttccatcaattatagcttcaatatgtgaaaacccagctcttcaaccatataggcttcaacaagcaatcgcagcaagcaacatacctttatcgcccttgttgtttcaacaatcgccagccctatctttggtgcagtcattggtacaaaccatcagggcacaacagctgcagcaactcgtgctacctctgatcaaccaagtagc

SEQ ID NO: 245 - DNA, 419 bp, Zea mays
  Clone ID: LIB3061-044-Q1-K1-F5
cccactcgtccggctagcgaaagcgactgcgagaacggtgccgccacggggggagaagcagactgtgagactggatggaagaatggtggccgccaggaagatttctgtgagaaaagctgagcaacaggtccggactgtttacgtgctattacgcgaatacctttgcgacaagaaacgctagtcctcttcgaaaagatagtttcagccactgacagttccttttctctttgcaagatcctttgctgtttatgtttcatatttttgcatgtaacatcccttagcaatctgttttttttttgtttcttcctgtgcagccaaatgtgtattcagagtctcaaactgagctgctacagaagcagatgctgggccttctgcggtcggcacactatgaagcatcaaatctttctaacgaaacgatc

SEQ ID NO: 246 - DNA, 338 bp, Zea mays
  Clone ID: LIB3061-044-Q1-K1-F6
cagctacctacatataaagcacaatagtgtaccaacaatggcagcccaaatatctagggttcttatgctccttggtatatctgcaagtgctgctaccgcgaccattttcccgcaatgctcacaagctcctatagcttcccttattcctcagtacctcttaccagcggtgtcttagatatgtgaaaacccaattcttcaaccctacaggatccaacaggcaatcgcagctgccatcttacctttatgacccttgttagtgcaacactcatcagacctattacagcacttacctttggtgcatttattgtcacaatacataagggcacaacaactacaac

SEQ ID NO: 247 - DNA, 403 bp, Zea mays
  Clone ID: LIB3061-044-Q1-K1-F7
gaaatgctagtaaatctgaaatcaagagcgcctatcggaagcttgctaggagctatcatccagatgtaaacaaagatcctggtgctgaacaaaagttcaaggatatcagtaatgcttatgaggttctgtctgatgatgagaagcgatcgatctatgataaatatggagaagcaggtctgaagggtgctggcatgggcacaggagattactcaaacccgtttgatctctttgagtccctgtttgaagggtttggtggaatgggtggaattggggtggccgtgctgctcggaacagaccaatgcaaggtgatgatgagagctacaatctggtactcaatttcaagggaagctgtgtttggtgtgggagaaagagattgagataaccagattggaaagctgtaaca

SEQ ID NO: 248 - DNA, 431 bp, Zea mays
  Clone ID: LIB3061-044-Q1-K1-F8
tcggtttctgggttggctctttgacattggagctgggattggtgaacgggtgacaacatggtggattgggctgctgcttgttctgttggtgggttggttgtgttctattataaatgggggagctttatacagaagaaagagagtgagcatgctgatggccctgtccagctttccaagtttcttggacgggacaaagaaaaggaagaaggtactcaacggagtgcaatctctggtaaaaagataatgatgaagcttgagaagacaaaggaagacaaggcagcagagagcatgcgaaacgaactgttgaagtttctgaatgccagttacgattgatgtgttcgaatcgctggcgcataaagtgcagaattgccctttttatcgtctttgcactggtgcttttggtgatacttaagtataaacgttttgttctt

SEQ ID NO: 249 - DNA, 121 bp, Zea mays
  Clone ID: LIB3061-044-Q1-K1-G1
caacaacccatcattggtggtgccctcttttagatttcttatgagttatagttcaatagtaaagttttttatctgatgtttgtggcttcccagaaataagaaagtacatttctagattctt

SEQ ID NO: 250 - DNA, 362 bp, Zea mays
  Clone ID: LIB3061-044-Q1-K1-G10
aaaaaaaaagaataagaagaaaggaatccctcctacgcgggagcgaagagattcgtcggctcagccgcctctctgctcagatctgcggcggagcctcgccggcggcctgcgccccgcggcgccgccgatccaagatgccttcgtgcgtgcagggatgctgctgctgctcgtccctgcgccttctcccccgcgacgacgcgctctcgtccccctccgcctgcgcgcaccgcctgaagccttggtcttggcgtgcccaatcccccacctcgtcctcctaacgcttgtccccgcccgctccccaccctgatctacctgtctctacccttcccttctccatttctacatctccccgttgctgctct

SEQ ID NO: 251 - DNA, 419 bp, Zea mays
  Clone ID: LIB3061-044-Q1-K1-G11
gttacttcaatgtgccttcgaaacacccagctgtgcaagcctataggctacaacaagcgattgcggcgagcgtcttacaacaaccaattgcccaattgcaacaacaatccttggcacatctaacaatacaaaccatcgcaacgcatcagcaacaacagttcctaccagcactgagccacctagccatggtgaaccctgtcgcctacttgcaacagcagctgcttgcatccaacccacttgctctagcaaacgtagttgcaaaccagcatcaacaacaactgcaacagtttctgccagcgcttagtcaactagccatggtgaaccctgccgcctacctacaacagcaacaactgctttcatctagcccgctcgctgtggccaatgcacctacatacctgcaacaagaattgttgcaacag

SEQ ID NO: 252 - DNA, 420 bp, Zea mays
  Clone ID: LIB3061-044-Q1-K1-G12
caaccaattgcccaattacaacaacaatccttggcacatctaaccatacaaaccatcggaacgcagcagcaacaacaatttctaccagcactgagccaactagctgtggtgaaccctgtcgcctacttgcaacagcagttgcttgcatccaacccacttgctctggcaaacatagttgcataccaacaacaacaacaattgcaacagtttctaccagcgctcagtcaactagccatggtgaaccctgccgcctacctacaacagcaacaactgatttcatctagccctctcgctgtggttaatgcacctacatacctgcaacaacagttgctgcaacagattgtaccagctctgactcagctagctgtggcaaaccctgctgcctacttgcaacagctgcttccattcaaccaactgact

SEQ ID NO: 253 - DNA, 412 bp, Zea mays
  Clone ID: LIB3061-044-Q1-K1-E9
gctgcctactctcagcaacagcagtttcttccattcaaccaactagctgcattgaacgctgcttcttatttgcaacaacaacaactaccattcagccagctacctgctgcctacccccagcaatttcttccattcaaccaactggcagcattgaactctcctgcttatttacagcagcaacaactactaccattcagccagctagctggtgtgagccctgctaccttcttgatacaaccacagttgttgccgttctaccagcacgctgcgcctaacgctggcaccctcttacaactgcgacaattgctgccattcaaccaacttgctctgacaaacccagcagcgttctaccaacaacccatcattgggggtgccctcttttagatatcttatgagttatagatcaataata

SEQ ID NO: 254 - DNA, 399 bp, Zea mays
  Clone ID: LIB3061-044-Q1-K1-D2
cccacgcgtccgccaactagcaacatagaaagcacaatagtgtaccaacaatggcagcgaaaatattttgcttccttatgctccttggtctttctgcaagtgttgctaccgcaaccattttcccacaatgctcacaagctcctatagcttcccttcttcccccatacctctcaccagcggtgtcttcaatgtgtgaaaccccaattgttcaaccctacaggatccaacaggcaatcgcaacaggcatcttaccattatcacccttgttccttcaacaaccgtcagccctattacagcagttacctttggtccatttggtggcacaaaacatcagggcacaacaactacaacaacttgtgctagcaaaccttgctgcatactctcagcaacatcagtttc

SEQ ID NO: 255 - DNA, 398 bp, Zea mays
  Clone ID: LIB3061-044-Q1-K1-D3
ctcggcctcgtgtacgccgtcgttaccccgcttctcctgccgtttataatcgtcttcggcgcctttgctttcctcgtctacagacaccagatcatcaacgtgtacaatcaggagtacgagagtgctgctgcgttctggcctcaggtgcactcccggataatagctagcctactcatctctcatgtaactctgtttgggttgatgagcacaaaggaagctgcgtactccacccctctgctcatcttcctgcctctgctgacgatctggttccacaaatactgcaagagccggttcgaaccagctttcagaaagtatcctcttgaggaagcaatggcgaaggacaccatggagcacgcatcggagcctaacctgaacctggaatccttcctggctaacgc

SEQ ID NO: 256 - DNA, 400 bp, Zea mays
  Clone ID: LIB3061-044-Q1-K1-D4
tttcagcattcaaaaacacaccaagcgaagcgcactagcaacgacctaacaccaatgggtaccaagatattagccctccttgcgcttcttgcccttttagtgagcgcaacaaatgcgttcattattccacagtgctcacttgctcctagtgccattattccacagttcctcccaccagttacttcaatgggcttcgaacatccagccgtgcaagcctacaggctacaactagcgcttgcggcgagcgccttacaacaaccaattgcccaattgcaacaacaatccttggcacatctaaccctacaaaccattgcaacgcatcaacaacatcaacaacagtttctgccatcactgagccacctagccgtggtgaaccctgtcacctacttgcaacagcagc

SEQ ID NO: 257 - DNA, 394 bp, Zea mays
  Clone ID: LIB3061-044-Q1-K1-D6
cactcgtccgtagcaacatcttagcaccaatggcagctttgattttttcgctccttgccctccttgctgtttcatcagatatttctaccgcgactattattccacaatgctcacaacaatacctctctccagtgatagccgctagatttgaatacccatctatacaatcctacaggctacaagaggccatcacagcaagcatcttacggtcgttagcattgaccgtccaacaaccatatgccctattgcaacaaccatccttagtgaatctgtatctccaaagaatcacagcacaacaactacaacaactgttgctttcaacaattaatcaattatttgcagcgaaccttgctgcttaccttcagcatcaacaatttcttccatttaatcaact

SEQ ID NO: 258 - DNA, 345 bp, Zea mays
  Clone ID: LIB3061-044-Q1-K1-D7
cctctccctcctccaacccaagctaagctaaacagcttacacagcttgctccgccatcaccgtatcgagagagacagagacaggctagcgagggaatggagaggatgctggccaggctgatgcggcggcggagctccgtccccctgtccggcctcctccaccacggaggagcgcccgccccgctgcaggccgccggcgccactggggcctccccgctgatcttgtcgcaccagcagcagcagcagcacacggccgccttcgccgtcctgccggtgctcaagatcagggactccgcgtcccagctgatcgggaggaccccgatggtgtacctgaacaaggtgaccg

SEQ ID NO: 259 - DNA, 420 bp, Zea mays
  Clone ID: LIB3061-044-Q1-K1-D9
attgagaccaactagcaacatagaaagcacaatagtgtaccaacaatggcagccaaaagattttgggtccttatgctccttggtctttctgcaagtgctgctaccgcaaccattttcccacaatgctcacaagctcctatagcttcctttcttcccccatacctctcaccagcggtgtcttcagtatgtgaaaacccaattcttcaaccctacaggatccaacaggcaatcgcagcaggcatcttacctttatcacccttgttcctccaacaaccgtcagccctattacagcagttacctttggtgcatttgttggcacaaaacatcaaagcacaacaactacaacaacttgtgctaagaaaccttgctgcctactctcagcaacagcagtttcttccattcaaccaactggctgcattg

SEQ ID NO: 260 - DNA, 417 bp, Zea mays
  unsure (1)..(417): unsure at all n locations; Clone ID: LIB3061-044-Q1-K1-E11
attgataccaactagcaacatacatagtgaagtacactagcaacatcttagcaccaatgggagccaagatttttgccctccttgccctccttgctctttcagcaagcgctgctacctcgacttttattccacaatgctcacaacaatacctctctccggtgacagccgcgggatttcaatacccaactatacaatcctacatggtacaagaggccatccaagcaagcatcttacggtcattagcattaacccttcaacaaccatatgctctattgcaacagccatccttagtgcatctgtatctccaaagaatcgcggcacaacaactacaacaacagttgctaccaacaatcaatcaagtagttgcagcgaaccttgctgcttacctncagcaacaacagtttcttccattcaatc

SEQ ID NO: 261 - DNA, 332 bp, Zea mays
  Clone ID: LIB3061-044-Q1-K1-E2
caactagcagcattgaactctgctgcttatttacagcagcaacaactactaccattcggccagctagctgatgtgagccctgctgccttcttgacacaacaacagttgttgccgttctacctgcacgctatgcctaacgctggcaccctcttacaactgcaacaattgctgccattcaaccaacttgctttgacaaactcaacagtgttctaccaacaacccatcattggtggtgccctcttttagattgcttatgagttatagttcaataatgaagttttttggatgatgtttgtggcgtcccagaaataagaaagtacatttctagattc

SEQ ID NO: 262 - DNA, 404 bp, Zea mays
  Clone ID: LIB3061-044-Q1-K1-E3
cgttgggcatggcccacctgccattgttagaggcggaagcccacaggcggacccgaatccagaattcctgaatcctgtcactgctcgaaaatcgaaatcgatccgatctccgcttgcgctgaagcctgatctccaccgggttcgcagcaggggcgcaggacctcgatcacgaggaggcaggggagcagcatccacaaccacaagccatggcggggagggccaacatccccactaacaactccgccctcatcgcaatcatcgccgacgaggacaccgtcactggcttcttgatggccggcgttggcaatgttgatctgcgcaagaaaaccaactacctcctcgtcgacaacaagacgacagttaaacaaatcgaggatgcgttcaaagaatttactacgagggag

SEQ ID NO: 263 - DNA, 439 bp, Zea mays
  unsure (1)..(439): unsure at all n locations; Clone ID: LIB3061-044-Q1-K1-E4
gccaaaccctacttgccaccgccaaacttccgccttcgtccgcgccggcgccgctctatcgctctaaaataacctttccagttccaccgggactagctgaaaggagagggaacggagggggatggcgtcgccggacgacgagataagccggctcttccgcatccgccgcacggtgtatgagatgctgcgcgaccgcggatacggtgtccgcgacgaacaaatcaagctcgaaaggcacaagttcatcgaacgctacggcaaccccgtccgccgtgacgagctcaccttcaacgccacaaagttgaacggcccatcggaccagatctacgtgttctttcctaatgaggcaaagcccggngtgaagacaatcaggaactacgtcgagaagatgaagaacgagaacgtcttcggccgcatactcgtcgtgcaacaggcgctc

SEQ ID NO: 264 - DNA, 393 bp, Zea mays
  unsure (1)..(393): unsure at all n locations; Clone ID: LIB3061-044-Q1-K1-E5
attgagaccaactagcatcatagaaagcacaatattgtaccaataatggcagccaaaagattttgcctcattatgctccttggtctttctgcaagtgctgctacggcgagcattttcccgcaatgctcacaagctcctatagcttcccttcttcccccatacctctcaccagcgatgtcttcagtatgtgaaaatccaattcttctaccctacaggatccaacaggcaatcgcagcaggcatcttacctttatcacccttgttcctccaacaatcatcagccctattacagcagttacctttggtgcatttattggcacanaacatcatggcacatcaactacaacatctcgtgctagcaaaccttgctgcctactctcagcatcagcagtta

SEQ ID NO: 265 - DNA, 438 bp, Zea mays
  Clone ID: LIB3061-044-Q1-K1-E6
gaccaacaagcaacatagaaagtggaatccagtagcaacaacagagcaacaatggcgaccaagatatgttccctccttatgctccttgctctttctgcatgtgttgctaacgcgacaattttccctcaatgctcacaagctcctatagcttcccttcttcccccataccttccatcaatgatagcttcagtatgtgaaaacccagctcttcagccctataggctccaacaagcaatcgcagcaagcaacatacctttatcacccttgttgtttcaacaatcgccagccctatctttggtgcagtcattggtacaaaccatcagggcacagcagctgcagcaactcgtgctacctgtgatcaaccaagtagctctggcaaaaccttctccctactctcagcaacaacaatttcttccattcaaccaactgtctacactg

SEQ ID NO: 266 - DNA, 408 bp, Zea mays
  Clone ID: LIB3061-044-Q1-K1-E7
gcaggagatgcgcatcgcgcacttcgtggtgaaggagccgatggtgatcgggcacgagtgcgcgggcgtggtcgaggaggtgggcgccggcgtgacgcacctgtccgtgggcgaccgcgtggcgctggagccgggcgtcagctgctggcgctgccgccactgcaagggcgggcggtacaacctgtgcgaggacatgaagttcttcgccaccccgccggtgcacggctcgctggcgaaccaggtggtgcacccggccgacctgtgcttcaagctccccgacggggtgagcctggaggagggcgccatgtgcgagccgctgagcgtgggcgtgcacgcgtgccgtcgcgctggggtggggcccgagacgggcgtgctcgtggtgggcgccggccccatcggcctggtgtc

SEQ ID NO: 267 - DNA, 412 bp, Zea mays
  Clone ID: LIB3061-044-Q1-K1-E8
gaaagcacaatagtgtaccaacaatggcagccaaaatattttgcttccttatgctccttggtctttctgcaagtgttgctaccgcaaccattttcccacaatgctcacaagctcctatagcttcccttcttcccccatacctctcaccagcggtgtcttcaatgtgtgaaaccccaattgttcaaccctacaggatccaacaggcaatcgcaacaggcatcttaccattatcacccttgttcctccaacaaccgtcagccctattacagcagttacctttggtccatttggtggcacaaaacatcagggcacaacaactacaacaacttgtgctagcaaaccttgctgcatactctcagccacatcagtttcttccattcaaccaactggctgcattgaactctgctgctta

SEQ ID NO: 268 - DNA, 412 bp, Zea mays
  Clone ID: LIB3061-044-Q1-K1-D12
cggacgcgtgggtttcaacattcaaaaacacaccaagcgaagcgcactaacaacgacctgacaccagtggctaccaagatattaacccttcttgggcttcttggccttttagtgagcgcaacaaatgcgttcattattccacagtgctcacttgctcctaatgccattattccacagttccttccaccagttacttcaatgggcttcgaacatccagccgtgcaagcctacaggctacaactagcgcttgcggcgagcgccttacaacaaccaattgcccaattgcaacaacaatccttggcacatctaaccctacaaaccattgcaacgcaacaacaacaacaacaacagtttctgccatcactgagccacctagccgtggtgaaccctgtcacctacttgcaacagcagc

SEQ ID NO: 269 - DNA, 400 bp, Zea mays
  Clone ID: LIB3061-046-Q1-K1-D5
cccacgcatcctagcaaacaataatccacactcaacaatttaccaacaatcactaccaatatgagaatgctacttatacaccttactctctcttcatatatttataactcaacaatcttccctcaatgctcacaaactcctatatcttcccttcttcccccataccttccatcaatcatatctacaatatgtgaaaacccacctcttcatccctatatactccaacaagcaatcactacaaacaacatacctctatcacccttactgattcaacaatcaccagccatatctttcttacattcattgctacaaaccatcaattcacatacactacaacaactgcacctacctacgatcaatcaattcactcctctcaacctacctctctactttcactaac

SEQ ID NO: 270 - DNA, 305 bp, Zea mays
  Clone ID: LIB3061-046-Q1-K1-D6
gttgcgcctaacgctggcaccctcttacaactgcaacaattgctgccatggaaccaacttgctttgacaaacccagcagtgttctaccaacaacccatcattggtggtgccctcttttagatttcttatgagttatagttcaataataaagttttttatctgatgtttgtggcttcccagaaataagaaagtacatttctagaaaaaaaaataaacaaagaaaaaattgaacatgtagactctggcaagtcgaccaccactggacacctgatctacaagctaggcttaattgacaagcgtgtgat

SEQ ID NO: 271 - DNA, 438 bp, Zea mays
  unsure (1)..(438): unsure at all n locations; Clone ID: LIB3061-046-Q1-K1-D7
attattgagaccaactagcaacatagaaagcacaatagtgtaccaacaatggcagcgaaaatattttgcctccttatgctccttggtctttctgcaagtgctgctacggcgaccattttcccgcaatgctcgcaagctcctatagcttcccttcttcccccgtacctctcaccagcggtgtcttcggtatgtgaaaacccaattcttcaaccctacaggatccaacaggcaatcacagctggcatcttacctttatcacccttgttcctccaacaatcatcagccctattacatcagttacctttgggtgcatttattggcacanaacatcagggcacaacaactacaacaacttgtgctagcaaaccttgctgcctactctcagcaacagcagtttcttccattcaaccaactagctgcattgaactctgcttctta

SEQ ID NO: 272 - DNA, 436 bp, Zea mays
  unsure (1)..(436): unsure at all n locations; Clone ID: LIB3061-046-Q1-K1-D9
gatctatgaaagaatgcatgtaacaagatctccagtctggtactgatgaagagacaggaagagaacacatagccaccatcaatcaagacaaagggaaaactaccattacctcaattggatttctggtttttgggctatcattggatttttggttaactgaaatgtgtaccttgcagtagctctatgtctctatatggcattatggtgtctgaaactggatcattatattttcatttgagtgaaattcttatcaaatgttgaaccttcaggctccagcttgatctgattcatgtttttttctagattaccatagttgatgaagcaaagaaattatacatgttatttgtccttggggctaatgtttccattatcttttctgggctacaatgaagtatttctcaaatttgcgcaagacattgngtcctggaattgatgg

SEQ ID NO: 273 - DNA, 312 bp, Zea mays
  Clone ID: LIB3061-046-Q1-K1-E1
cggacgcgtgggcgaagtcattccctcttcaagagggcatcatcagattgggcttattgattccggattacttcaggcaaggatcggagttgctctgaattgactgaaccatggcggcgacaatggcagtgaccaccatggtgaccaagaaccaggagagctggtcgtcattgcaagtcccggccgtggcattcccttggaagccaccaagccgtggcaagaaccgcgggcttgaatttccttggcgggccaaggtcggcaacgttcggcttaaccgggggcccggcgttcccggcgggccccaacccgcgg

SEQ ID NO: 274 - DNA, 389 bp, Zea mays
  unsure (1)..(389): unsure at all n locations; Clone ID: LIB3061-046-Q1-K1-E10
tgaaagtgctgatcgttgcccttgctctcctggcgctcgctgcgagcgccgcctacagtacaggcggcggctgtggctgccagacaccaccgtttcatctaccgcctccgttctatatgccgcctccgttctatctgccgccgcagcagcagccgcagccatggcaataccccactcaaccaccgcagctaagcccgtgccagcagttcggatcctgccggcgtcggcagcgtcggcagcccgttcctgggccagtgcgtcgagttcctgaggcaccagtgcagcccggcggcgacgccctacggctcgccacagtgccaggcgctgcagcagcagtgctgccaccagatcangcaagtggagccgctgcaccggtaccaggcgacata

SEQ ID NO: 275 - DNA, 197 bp, Zea mays
  Clone ID: LIB3061-046-Q1-K1-E11
tggactcctaacactcaacacatcaattctatattctactataaacacttgtggccgttaacttataacgactatttgacctactacaataacaaccctttgtacatctaactataccaaccatatcatctctctaccaacactaactcatccatctagccttctttaacattaactattacttgcaacaacatctt

SEQ ID NO: 276 - DNA, 321 bp, Zea mays
  Clone ID: LIB3061-046-Q1-K1-E12
cttagcaccaatggcagccaagattttggccatcctggccctcctggctctttcagcaagcgttgctaccgcgagtatgattccacaatgctcacaacaatacctctctccggtgacagccgcgagatttgaatacccaactatacaatcctacaggctacaagaggccatcgcagcaagcatcttacggtcgttagcattgaccgtccaacaaccatatgccctattgcaacaaccattcctattgaatctatatctccaaagaatcgcagcacaacaactacaacaacagttgctttcaacaatcaatcaagtagttgc

SEQ ID NO: 277 - DNA, 250 bp, Zea mays
  unsure (1)..(250): unsure at all n locations; Clone ID: LIB3061-046-Q1-K1-E2
ggggtctgcatgtccgaccacaactgcgcgcaggtgtgcttgcaggaaggctacgggggcngcaactgcgacggcatcatgcgccagtgcaagtgcatcagggagtgctagctagctaggctctaggatctagcaagctagctatatcggcctttaattaaattaataaggatcgacgtcgtggccggtcgctaaatatgtactactatacgtctacactacatgcaataatgcaaccacatgtacgcgt

SEQ ID NO: 278 - DNA, 242 bp, Zea mays
  Clone ID: LIB3061-046-Q1-K1-E3
cccacacgtacgtccagcgacatatacagtagaatccattagccaccattgagcaacagtatccgccaacatatttttcctccttatgcttcttgctctttctacatgtgttgctaacgcgacaaatgttcatcaatgcttacaagctcctatagcttcccatatttccccatacctttcatcaattattggctaaatatgtgaaaaccccactttttaaccctataagctttaacaagcaa

SEQ ID NO: 279 - DNA, 423 bp, Zea mays
  Clone ID: LIB3061-046-Q1-K1-E4
tgggcttcgaacacccagctgtgcaagcctataggctacaacaagcgcttgcggcgagcgtcttagaacaaccaattgcccaattacaacaacaatccttggcacatctaaccatacaaaccatcgcaacgcagcagcaacaagcactgagccacctagccgtggtgaaccctatcgcctacttgcaacaacagctgcttgcatccaacccacttgctttggcaaacgtagctgcataccaacaacaacaacagttgcaacagtttctaccagcgctcagtcaactagccatggtgaaccctatcgcctacctacaacagcaacaacttctttcatctagcccgctcgctatgggcaatgcacctacatacctgcaacaacagttgttgcaacaacagttgctgcaacaaattgtaccagctc

SEQ ID NO: 280 - DNA, 434 bp, Zea mays
  unsure (1)..(434): unsure at all n locations; Clone ID: LIB3061-046-Q1-K1-E5
gaagagcaccctgatttttgtatcatggacccatttaaaaacatttacccgttgctggaccgtcttcaaatccaaaaaatccttgtccggttgcaagaacttggcactgaaggaaagccaaaacttcgagcaccgtattcttgcaaggttgacagttttcataatggtgaattggataagcatctagtagaagctaatttatccttcccactcattgtgaagccacaagtcgcttgtggagtcgctgatgcccacaatatggcactggtttttcagattgaagaatttagcaacctcagtgtgccccttcctgctgtgctacaggaatacgtggatcacggatccaagattttcaagttctatgtgatcggagacaaggttttctacgccgttagagactcaatgcccaacgcgcgcttnctgaagccgtcgtc

SEQ ID NO: 281 - DNA, 430 bp, Zea mays
  Clone ID: LIB3061-046-Q1-K1-E7
gcaacatagaaagtggaatacagtagcaacaatagagcaacaatggcgggcaagatggtgttccatccttatgctccttgctctttctgcatgtgttgctaacgcgaccatttttcctcaatactcacaagctcctatagctgcccttcttcccccataccttccatcaatgaccgcttcagtttgtgaaaacccagcccttcaaccctacaggctccaacaagcaatcgcaacaagcaacttacctttatcacccctgttctttcaacaatcgccagccctatctttggtgcagtcattggtacaaaccatcagggcacaacagctgcaacaactcgtgctaccagtgatcagccaagtagctctggcaaacctttctccctactctcagcaacaacaatttcttccattcaaccaactgtctacactg

SEQ ID NO: 282 - DNA, 443 bp, Zea mays
  Clone ID: LIB3061-046-Q1-K1-E8
ggaattcccgcagccagccacacatccgacaacatacaatgttgaattcagcattttcaatatagcaacaatgaccgcgaaaatgttctccatcctaatgctgctggctctttctacatctgttgctaacccgaccatttttcctcaatactcacattctcctatatctgtcctacttcccccataccttccatcaatgacctctacagatttcgaaaacccatccctacaaccctacattctccaacaatcaatcgcaacatgcatcttacctttatcacccctgatatctcaacatttcacaaccctatctttaatgcaatcattggtacaaaccatcacggcacatcagcttcaacaacttgatctaccattgatcagccaacttatctatacaaacctttctccctactctcaacaacatcaatttacttcattcaacc

SEQ ID NO: 283 - DNA, 439 bp, Zea mays
  Clone ID: LIB3061-046-Q1-K1-E9
gaagctggtgcttgtggttcttgctttcattgctttagtatcaagtgtttcgggtaggcagacaggcggctgcagctgtggtcaacaacaaagccatgagcagcaacatcatccacaacaacatcatccacaaaaacaacaacatcaaccaccaccacaacatcaccagcagcagcaacaccaacaacaacaagttcacatgcaaccacaaaaacatcagcaacaacaagaagttcatgttcaacaacaacaacaacaaccgcagcaccaacaacaacaacaacaacaacagcaccaacaacaacatcaatgtgaaggccaacaacaacatcaccaacaatcacaaggccatgtgcaacaacacgaacagagccatgagcaacaccaaggacagagccatgagcaacaacatcaacaacaattccagggtcatgacaag

SEQ ID NO: 284 - DNA, 396 bp, Zea mays
  unsure (1)..(396): unsure at all n locations; Clone ID: LIB3061-046-Q1-K1-F1
gggtcttcagaccattagctttatctactccagagcgcagaagaacccgatcgacacgatgagggtgttgctcgttgccctcgctctcctggctctcgctgcgagcgccacctccacgcatacaagcggcggctgcggctgccagccaccgccgccggttcatctaccgccgccggtgcatctgccacctccggttcacctgccacctccggtgcatctcccaccgccggtccacctgccgncgccggtccacctgccaccgccggtccatgtgccgncgccggttcatctgccgncgncaccatgccactnaccctactcaaccgcccggcctcagcctcatccncagccacacccatgcccgtgccaacagccgcatccaagcccgtgccagct

SEQ ID NO: 285 - DNA, 443 bp, Zea mays
  unsure (1)..(443): unsure at all n locations; Clone ID: LIB3061-046-Q1-K1-D4
ccatcgcaacgcaacagcaacaacagttcctaccagcactgagccacctagccatggtgaaccctgtcgcctagttgcaagagcagctgcttgcatccaacccacttgctctagcaaacgtagttgcaaaccagcaacaacaacaactgcaacagtttctgccagcgcttagtcaactagccatggtgaaccctgccgcctacctacaacagcaacaactgctttcatctagcccgctcgctgtggccaatgcacctacataccttgcacangaattgttgcaacagattgtaccagctctaactcagctagctgtggcaaaccctgttgcctacttgcaacagctgcttccattcaaccaactaactatgtcgaactctgttgcgtacctacaacagcgacaacagttacttaatccattggcagtggctaacccattggtc

SEQ ID NO: 286 - DNA, 345 bp, Zea mays
  Clone ID: LIB3061-046-Q1-K1-C10
tgagcattcagaaacacacctagcgaagcgcactagcaacgacctaacaacaatggctaccaggatattatccctctttgcgcttcttgccctttttgtgagcgcaacaaatgcgttcattattccacaatgctcacttgctcctagtgccattattccacagttcctcccttcagttacttcaatgggcttcgaacacccagctgtgcaagcctacaggctacaacaagcgcttggcggcgagcgtcttacaacaaccaattgcccaattacaacaacaatccttggcacatctaaccatacaaaccatcgcaacgcaacagcaacaacaatttctaccagcac

SEQ ID NO: 287 - DNA, 438 bp, Zea mays
  Clone ID: LIB3061-046-Q1-K1-C11
catatgccctattgcaacaaccatccttagtgaatctgtatctccaaagaatgacaggacaacaactacaacaacggttgcttccaacaattaatcaagtagttgcagcgaaccttgctgcttaccttcagcaacaacaatttcttccattcaatcaactagctggggtgaaccctgctgcttacttgcaggcacaacagctactaccattcaaccaacttgtcgggagccctgctgccatcttattgcagcaacagttgctgccattccgtctacaagttgttgcaaacattgctgctttcttgcaacaacaacaattgctgccattttacccacaggttgtgggaaacattaacgccttcttgcaacaacaacaattgctgccattctacccacaggatgtggcaaacattgtcgccttcttacaacaacagcaat

SEQ ID NO: 288 - DNA, 450 bp, Zea mays
  Clone ID: LIB3061-046-Q1-K1-C12
ctccaatttatacacaacctcgacacctgccaccttcaaaggttcttgatgctgatgtgacagacagtgttattggtgaaggatgtgttattaaaaactgcaagataaaccattctgtagttggactccgatcttgcatatctgaaggtgctatcatagaggacagtttactaatgggtgccgactactattagacaaaagcttgttaaaaacttctttgcgaaaaaagtggcattcctattggtattgggaaaaattcatgccttaagagaaccatcattgaccagaatggctcaattggagacaatgttaagatacctcatgctgacaatgttcaagaagctgcaagggagaccaaacggtaccttattcaaaggtggaattgtcacagtgatcaaggatgctttactccctagtggaacagttatatgaagtgaacgtgcgacatgc

SEQ ID NO: 289 - DNA, 260 bp, Zea mays
  Clone ID: LIB3061-046-Q1-K1-C2
aaaaaaaaaaaaaaaaaaaataaaaaattcaaaaataaaaaaaaaaataaaaaaaataggataaagaaaaaattaagggtggaaaattttattaaattaatattaaaaaaatcatacttattaaatcatatatcttttatatattacactgaaattattttaaatgttctttattttataacatatcaattttcaaaacttttactttatccaatttaatctcataaatccaatttgatttttatcaatattgtttttta

SEQ ID NO: 290 - DNA, 416 bp, Zea mays
  Clone ID: LIB3061-046-Q1-K1-C4
gtctcccacaaccgccgcgcgcaagccctagcccgatctcgccggcgacagacaccagatctcggcgcccgttgcgcgccgatacgcgccccgccggattcaccgctcctcgcgctgcagcacgcccgggcctggaaaaagaggcaactctgggggaataacggatttcaccttgtttacaggttactgcgtgacatgtagtattgtataattggaggttgtcaccatcaccacaaagcatatgttgtgatttgtcgatggcgaggagatgaaacaggtgtaggggcggagcagcaaggacatgacagccatgccgcatccgcgccaccgaggcgctgctaagaagcccatgtggatcatagtgctattgtctttggtttgtgttgcacttatgggggcctatgtctacccaccac

SEQ ID NO: 291 - DNA, 435 bp, Zea mays
  Clone ID: LIB3061-046-Q1-K1-C5
gcaacagcagtttcttccattcaaccaactagctgcattgaactctgctgcttattggcaacaacaacaactaccattcagccagctacctgctgcctacccccagcaatttcttccattcaaccaactggcagcattgaactctcctgcttatttacagcagcaacaactactaccattcagccagctagctggtgtgagccctgctaccttcttgatacaaccacagttgttgccgttctaccagcacgctgcgcctaacgctggcaccctcttacaactgcaacaattgctgccattcaaccaacttgctttgacaaacccagcagcgttctaccaacaacccatcattggtggtgccctcttttagatttcttatgagttatagttcaataataaagttttttgactgatgtttgtggcttcccagaaata

SEQ ID NO: 292 - DNA, 318 bp, Zea mays
  Clone ID: LIB3061-046-Q1-K1-C6
ggcgatgagattcccccctaattctcataaggaaaaggagagcgctgagaagcgccgggagaggcttcaacaggaggaagaactggctaagcacatggctgaggaggaggatgacgacttctaaattagctgccttttgagcaaccacttgcaattgtggacttgttcgaacgcctggttaaaccctgcctctagctactcgagtcatgcaaaaacactgaactttgaaattcatccactgtaatgttttgttgatcaggggtttctttaaattcaatacttgagttttaaaaaaaaatacaaccaacaagctaagac

SEQ ID NO: 293 - DNA, 441 bp, Zea mays
  Clone ID: LIB3061-046-Q1-K1-C7
gctgttcgaagctttcagccgagcaccatcgtcacagtcagtagccaagcatatttgtttctccgagtgatttgcgctgagcgatcagttcatccagagcgagcggagctgagctgagctgagctgagcgagcttgcgttgcttgagagaccctgctgccatggcttcccaccaggacaaggctagctaccaggccggcgagaccaaggcccgcaccgaggagaagaccgggcaggcggtgggggcgaccaaggacacggcgcagcacgccaaggaccgggcggcggacgcggcggggcacgcggcgggcaagggccaggacgccaaggaggccaccaagcagaaagcgtccgacaccggcggctacctgggaaagaagaccgacgaggccaagcacaaggccggcgagacgacggaggccaccaagcagaaggccagcga

SEQ ID NO: 294 - DNA, 422 bp, Zea mays
  Clone ID: LIB3061-046-Q1-K1-C8
gttttccgcatccacggtgccaggcgaccgccgccgcttccctactcacccttggccggcgacgacgagcgcccactacggcaggatgacgacgctcaggaacctcaagatcaagacgtcgacgtgcaagaggatcgtgaaggagctgcgctcgtacgagaaggaggtggagaaggaggctgccaagaccgccgacatgaaggagaagggcgccgatccctacgacctcaaacagcaggagaatgttttggctgagtcaaggatgatggtcccagactgccacaaacgacttgaaactgcactggctgacttgaaagcaacactggctgaactgaaggagtcaaatgagcaaggtgccgagattggagaagctgagagtacaatcgcagaagttgaagcagttgtcaagccagcaggagatt

SEQ ID NO: 295 - DNA, 435 bp, Zea mays
  Clone ID: LIB3061-046-Q1-K1-C9
attgagaccaactagcaacatagaaagcacaatagtgtaccaacaatggcagctaagatattttgcctccttatgctccttggtctttctgcaagtgctgctacggcgaccattttcccacaatgctcacaagctcctatagcttcccttcttcccccgtacctctcaccaacggtgtcttcggtatgtgaaaacccaattcttcaaccctacaggatccaacaggcaatcgcagctggcatcttacctttatcacccttgttcctccaacaatcatcagccctattacagcagttacctttggtgcatttattggcacaaaacatcagggcacaacaactacaacaacttgtgctagcaaaccttgctgcctactctcagcaacagcagtttcttccattcaaccaactagctgcattgaactctgcttcttat

SEQ ID NO: 296 - DNA, 443 bp, Zea mays
  Clone ID: LIB3061-046-Q1-K1-D1
caacaagcaacatagaaagtggaatccagtagcaacaacagagcaacaatggcgaccgggatatgttccctccttatgctccttgctctttctgcatgtgttgctaacgcgacaattttccctcaatgctcacaagctcctatagcttcccttcttcccccataccttccatcaatgatagcttcagtatgtgaaaacccagctcttcagccctataggctccaacaagcaatcgcagcaagcaacatacctttatcacccttggtggttcaacaatcggcagccctatctttggtgcaatcattggtaccaaccattagggcacagcaacttgaacaacttgggctacccggtgatcaaccaagtagcttctgccaaaccttcttccctactctcagcaacaacaatttcttccattcaacccactgtctacacttgaccct

SEQ ID NO: 297 - DNA, 444 bp, Zea mays
  Clone ID: LIB3061-046-Q1-K1-D10
atcacagctggcatcttacgcttatcaaccctggtccttccacaatcatcagccctattacatcagttaccttgggtgcatttattggcacaaaacatcaaggcacaacaactacaacaacttgtgctagcaaaccttgctgcctactctcagcaacagcagtttcttccattcaaccaactagctgcattgaactctgcttcttatttgcaacaacaacaactaccattcagccagctacctgctgcctacccccagcaatttcttccattcaaccaactggcagcattgaaactctcctgcttatttacagcagcaacaactactaccattcagccagctagctggtgtgagccctgctaccttcttgatacaaccacagttgttgccgttctaccagcacgctgcgcctaacgctggcaccctcttacaactgcaacaatt

SEQ ID NO: 298 - DNA, 435 bp, Zea mays
  Clone ID: LIB3061-046-Q1-K1-D11
caagtagcgacagctcgacaaagatttgtgagagtgatccggcgctgagaagagatggctaagatcgccgcagccgccgcggcggcggcggcgctgtgcttcgcggccctggtggccgtggccgtctgccaaggcgaggtcgagcggcagaggctcagggacctgcagtgctggcaggaggtccaggagagcccgctcgacgcgtgccgccaggtcctcgaccggcagctaaccggcggcggcgtcggcggcccgttccggtggggcaccgggctccggatgcggtgctgccagcagctccaggacgtgagccgcgagtgccgctgcgccgccatccggagcatggtcaggggctacgaggaggccatgccgcctctggagaaaggctggtggccacatgggcggcagcagcagccgccgccgcagggaggagga

SEQ ID NO: 299 - DNA, 355 bp, Zea mays
  Clone ID: LIB3061-046-Q1-K1-D12
tcacgcgcggctcgttcaccgggcccaattcggagatccacccccccaccgaatacgcgcgcctgcgcctgcgcctgctacctgcgatccatctctcatggcgaccaccagcgccaggaggccgagcggcccggtgctctcggacgcgcactaccagctccgcctcgccgacgcgcgttttcgctcggcgggcagcccgtcagcgtcagcgtgtactcgtcgtcgcaggggcggacgacctgcatgtgctcgccgaccaaccacccgggctcgttccggtgcatcctgcacaaggagcgcgtcaagccggcggcggagccccacgggcacatgcacgggcgacggcacgggaagc

SEQ ID NO: 300 - DNA, 367 bp, Zea mays
  unsure (1)..(367): unsure at all n locations; Clone ID: LIB3061-046-Q1-K1-D2
cagcctcagtcacccattcacatctctaccctagtgcgcttcccttataaaacctaggtcctcagagctccagacgcagtcggccgccgcagaccgggagtagccgacgcgccgtcactgaatcctcagatcacggctagccgtaatcacgacactctggtgactcccggcgagcagtgtaacatttttcttcaaccatgggccaagagaaaaactcacatcaacattgtggtcattggacatgtcgactctggcaagtcgaccaccactggncacctgatctacaagctcggcggtattgacaagcgtgtgattgagaggttcgagaaagaggccgcggagatgaacaagcggtcattcaagtatg

SEQ ID NO: 301 - DNA, 440 bp, Zea mays
  unsure (1)..(440): unsure at all n locations; Clone ID: LIB3061-046-Q1-K1-A8
gaccaactagcaacatagaaagcacaatagtgtaccaacaatggcagccagaatattgtgcctacttatgctccttggtctttctgcaagtgctgctacggcgaccattttcccgcaatgctcgcaagctcctatagcttcccttcttcccccgtacctctcaccagcggtgtcttcggtatgtgaaaacccaattcttcaaccctacaggatccaacaggcaatcacagctggcatcttacctttatcacccttgttcctacaacaatcatcagccctattacatcagctacctttggtgcatttattggcacaaaacatcatggcacaacaactacaacaacttgtgctagcaaaccttgctgcctactctcagcaacagcagnttcttccattcaaccaactagctgcattgaactctgcttcttatttgcaacaac

SEQ ID NO: 302 - DNA, 341 bp, Zea mays
  Clone ID: LIB3061-046-Q1-K1-A9
aatgattcagttcttgcaagaatgacattattttgttactaaatagtgttcctttttggagatatgaccaagacagtgcgaagtgcttaatgaagcaagctggcaggaaacatttaaagctctttggatttccacccttcgtcttgtacaacgggctagagaacctcttgaaggaccgattcctcatctagatgcaaggttatgcatgttgttagctcttataccattatcaattgctgcgaatcttcaagaggaaagtgatatgtttggagttgaatggaacaaaattcttccacatagacaagggcttatatcatctctccagaatctgatcccatttt

SEQ ID NO: 303 - DNA, 418 bp, Zea mays
  Clone ID: LIB3061-046-Q1-K1-B1
acgcgtccgcagctactaccattcagccagctagctactgcctactctcagcagcaacaatttcttgcatttagccaattggccgcactgaacccctctgcttatttccagcagcaaatactactaccatttggccagctagctacaacaagccccactttctttttgaaacaacaacaattgcttccgttctaccagcagtttgtggctaaccccgcaaccctcttacaactgcaacagttgctgccctttgtccaacttgctttgacaaacccagcagccttctaccaacaacacatcattggcggtgccatcttttagattgcttattagttgtaattcaataatgaagttttttggctgatgtatgtggcctcctagaaataagaagttacatttccaaattctaatgtgctat

SEQ ID NO: 304 - DNA, 431 bp, Zea mays
  unsure (1)..(431): unsure at all n locations; Clone ID: LIB3061-046-Q1-K1-B10
ctcaagctcgctccgtggcctggtggccctgaccccgctggccctcccttccgctcgcgcgagcggggccgcggcggcggccccggcaccacgcgcgcggggtcggacggggagaggggcgggggtcgtggcgctggcggcggctctgccgtcggacgcgcagtggctggagcggctgccggagaagaagaagccgctgtacacgcacagcctgccgtgcatcgaggcgtggctgcgcagcctcgggttcacgcagtcccgcgaggacccccgccgtctgggtcgccgagaagccgctctggcacgcgcgtctcaggcctcgatgtcaccgaccttcacatcaggtacttgaaaaagcggcctggganatctgacaaggatatggagaagaagggttagctacgccctaagcagagaagacatcgagaacg

SEQ ID NO: 305 - DNA, 442 bp, Zea mays
  Clone ID: LIB3061-046-Q1-K1-B11
cggaatcaaaactgcaacatcaatgatttaactacaaaaaccatgaagctggggctggtggttatcgctggcattggttgattatcaagtgtaacttgtacacagacacgcagcttcatgtgtagctaacaccacaaccatgagcagcatcatcactacacaacaacatcgtacactgatacatccacgtcaacacactatacataactatcacttagacagcaagtaactaccaacaacatacatgccacactatgctgcctcaacagcatcagccattacaagaaagacatgttcaacaactacatcgtcaaccgcagcatcaacaactacatgcactactacagaaacaacatcatcatcattgtcaacgccatcatcaacattaccatcaatcacaatgtactgtgcagcagcacgaacagtaccatgagcaatacca

SEQ ID NO: 306 - DNA, 380 bp, Zea mays
  Clone ID: LIB3061-046-Q1-K1-B12
gaaacctcactgacagccccgtatttgacggccgtggccctgacgccagcctcgtgggtcgcgtacagggagtcgctacccagatgggcgacgtgcgccagttgtacaccgtcgtgttccaggagaggccgctcaagggctccacgctcgtcaccgaaggcgcgatgacagaagggtcagacgagtgggcgatctacggtggaactggagtgttcgcgatggcgagaggcgtcataaggagaacgtttcttgccgacacgagcggcgggaactccgacgagcttgccgtggaggttctctgcccggtgttccgcccggcggcgtttggctcatcgtcgtcacagccagcagcaaaggacatcagctccaccgtcgtcgtc

SEQ ID NO: 307 - DNA, 365 bp, Zea mays
  unsure (1)..(365): unsure at all n locations; Clone ID: LIB3061-046-Q1-K1-B2
ggtctttgctttgtggtggatggctttccaccactcgctgaattcactgaggtgcttgctaagagctatgagaaactcaaagaagtgggagagaaatttgaagttgtagctgtatccttggacagtgaagagtcatcatttaatgagagttttgccaaagatgccttggcttgcaattcctcaaggtgacattaagtgtcagacgctggttcgttactttgagcttagttctcttccaacactagttctgattggccctgatgggaagacactgaacaacaatgtcgncgacttaattgacgaccatggttttgaggcatgggagggcttncccttcagtgctgagaagctggaaattcttgctg

SEQ ID NO: 308 - DNA, 409 bp, Zea mays
  Clone ID: LIB3061-046-Q1-K1-B4
cccacgcgtccgcaagcaacatagaaagtggaatccagtagcaacaacagagcaacagtggcgagcaagatattttccctccttatgctccttgctctttctgcatgtgttgctaacgcgacaattttccctcaatgctcacaagctcctatagcttcccttcttcccccataccttccatcaatgatagcttcagtatgtgaaaacccagctcttcagccctataggctccaacaagcaatcgcagcaagcaacatacctttatcacccttgttgtttcaacaatcgccagccctatctttggtgcagtcattggtacaaaccatcagggcacagcagctgcagcaactcgtgctacctgtgatcaaccaagtagctcttgcaaacctttctccctactctcagcaac

SEQ ID NO: 309 - DNA, 444 bp, Zea mays
  Clone ID: LIB3061-046-Q1-K1-B5
gccacgcgtccgcggacgcgtccgaaagaagatgaaggactggatgcgcttcagtgttgcgttctggcagacgttccgtggtactggcgccgatccttttggtgcgcctacaaaggtttggccttgggaggacggcacaaattcgttggccatggctaagagaagaatgagagctcactttgagttcatggagaagctgggggttgacaaatggtgcttccatgatagggatattgcccctgatgggaaaactctcgaagaaacaaatgctaacttggatgagatagttgagctggcaaagcagctccagggtgagaccaatataaagccattgtggggtactgcacagctctttatgcatcctcgttacatgcacggagctgctactagcccagaggttaaagtatatgcatatgcggctgcacaaagtaagaaagctttgga

SEQ ID NO: 310 - DNA, 439 bp, Zea mays
  Clone ID: LIB3061-046-Q1-K1-B6
caactagcaacatagaaagcacaatagtgtaccaacaatggcagctaaaatattttggctccttatgctccttggtctttctgcaagtgctgctacggcgaccattttcccacaatgctcacaagctcctatagcttcccttcttcccccgtacctctcaccaacggtgtcttcggtatgtgaaaacccaattcttcaaccctacaggatccaacaggcaatcgcagctggcatcttacctttatcacccttgttcctccaacaatcatcagccctattacagcagttacctttggtgcatttattggcacataacatcatggcacaacaactacaacaacttgtgctagcaaaccttgctgcctactctcagcaacagcagtttctttcattcaaccaactagctgcattgaactctgcttcttatttgcaacaacaa

SEQ ID NO: 311 - DNA, 450 bp, Zea mays
  Clone ID: LIB3061-046-Q1-K1-B7
cacgcatccgcagctaccaacatagaaagcacaatattttaccaacaatggcagctaagggatttcggctccttatgctccttggtctgtctgcaagtgctgctactgcgaccattttcccacaatgctcacaagctcctatagcttcccttcttcccacgtacctctcaccaacagtgtcttcggtatgtgaaaacccaattcttcaaccctacatgatccaacaggcaatctcagctggcatctaacctttatcacccttcttcctccaacaatcatcagccctattacatcacttacctttggtgcatttattggcacataacatcatggcacaacaactacaacaacttgtgctatcaaaccttgctgcctactctcagtaacagcagttactttcattcaaccaactatctgcattgaactctgcttcttatttgcaacaacaac

SEQ ID NO: 312 - DNA, 390 bp, Zea mays
  Clone ID: LIB3061-046-Q1-K1-B8
gataaatgtcaatcaatatattgattatttctaggaaacacatgccggtgtgagggcgccattatcgattacatctcatatgtaatctaaaagatggcacctccaacgatgggttgctgccacgacaaggcagggttcatcaaagagaactggctgtatggtagcaattgttgctgctgtaggaaggcagtgaccaatgggtaatgcacctacatacctgcaacaacaattgctgcaacagattgtaccagctctgactcagctagctgtggcaaaccctgctgcctacttgcaacagctgcttccattcaaccaactgactgtgtcgaactctgctgcgtacctacaacagcgacaacagctacttaatccactaccaatgcctaaccc

SEQ ID NO: 313 - DNA, 422 bp, Zea mays
  Clone ID: LIB3061-046-Q1-K1-B9
gtgttcggctcaccgcagcagccgccaaaggacgacgaggatggctccgccggcacggagattggactatggggtgggccgggaggatcggcacaggacatcacgacgacagaggcaccaaggcgtctgaacagcgtcaccattcgcgccggtattgccgacgactcgatcgagttcacttacactggcaaggacaggcagaggcgcacagctgggcgatgggatggacttggcggcaatgttcgaacgatcgatcttggcgacaacgaacacatcacggaggtgtcaggaacgtacggcacatttgaaggtgctactaccctaacctcgctcaggttcatcaccagcaccagagcctgaggcccatggggcaccgagaacgggacacgcttgtgcatcaccgcgcacatcggcagcagcgt

SEQ ID NO: 314 - DNA, 382 bp, Zea mays
  Clone ID: LIB3061-046-Q1-K1-A6
ccggaatggacgcatgcatccacgcgtccagaactacaccaatcgaaagtacctaactgcgacttaactgcaatgcctaccgtgatgtcagcttatgctggcgcgttcttgctctatgtgctagcgcaacaaatgcgttcattatttgacaatgctcacttgctcctagtgtcattataccacacttcttacgaccagttacttcaatgtgctaaaaacacctagttgagcaagcctacatgctacaacaagcgcttgcggcgagcgtcttacatcaaccaagtaactaattgcatcatcaatcctagtaacatctaaccatacagaccatctgttcacaccagccacaacagtacctaccataactgagccaactatatgt

SEQ ID NO: 315 - DNA, 431 bp, Zea mays
  unsure (1)..(431): unsure at all n locations; Clone ID: LIB3061-047-Q1-K1-A12
cccgactgttgaagattcttatcctgagcgaccaggggaaccagattgtccttatttattgaatagtagatgtaagtttaaatctaaatgcaagttcaaccatccgaaggatatggtgaatgcattaggaacaggaacaaacaatgaatctctaattgctgatagcgctgtcttaccagtgaggccttctgaacccatttgtgtgttctatgcaaaaacaggcaaatgcaaatttggtgccatttgcaagttcaatcatccaaaagatattaagacatcacctttgattgcaaaggaaaccatatatacagcaacaactgatgcagcagatgccccgaccgaggcgtgtaacgcanaggggcttcctataagacaaggtgaagtggattgctcgttttatatgaagacaggcagctgcaaatatggttcta

SEQ ID NO: 316 - DNA, 383 bp, Zea mays
  Clone ID: LIB3061-047-Q1-K1-A2
caatatggtacctaatcttacctcaaatgttgctgataataatatatcagcgtttccctctggatcaacatatctgcaaagtccaatgtatggttgtctggatgactcttctggtttattgcaaaatacaggagagaatgatccgacaactagaacttttgttaaggtttacaagtcaggatcagtggggagatccttggacatcacccggttctctaattatgctgaacttcgagaggaactgggtcagatgttcggcattaagggtcagttggacgaccctgatagatcaggctggcagcttgtatttgtcgacagggagaacgatgtgcttctccttggagacgacccgtgggagtcatttgtgaatagtgtatggtaca

SEQ ID NO: 317 - DNA, 437 bp, Zea mays
  Clone ID: LIB3061-047-Q1-K1-A3
cgacgccacgcgtccaggccacgcgattctaaaagaacaagtgaacaccacaagaatggattaggaaggtattattgggcaaccacaagaagaggattcaagattggaacaagatgaagatcctataattgaaatgactgaacagagggtacatgtaacaacaagaaggtctactgcatcaataatcaatcaagataaggaagcaaagaggatgaagaaggattctttggaaggacttgttgggagatatctagatctaaaatcaaaacaagttgaggatgaggttacacaaatggctaaaggaaaagaatctgctcaaggcaatgacttctccatcatgagatgcatttctgttcttagatccatgaacgtgacaacagatgagaagataaaagcagctgaagtgttcgacataccaaacaacagagagaccttta

SEQ ID NO: 318 - DNA, 370 bp, Zea mays
  Clone ID: LIB3061-047-Q1-K1-A4
acagttcccaccctagtaggaacaggatcacagttgatgtaaccaactcatatgagcatttccactgccatggcgtgaccgtggctgtcacatggcctggtgctgaagcccggggctcgtttggatctcgaagcagcaggcacagcgattcagatggagcagtgaactctggccgagacatcccagctgagaacagccagcacaattctgacgcaggcaccagtagacatccaggcgatagagcatccacatcctggcctgacgaaaagttaccgtcagccaagagcagccctggtcactgctcgtccgatctttgcattggagctatggatgtccagcgccggtctgcgtgggggttggtgattgtcac

SEQ ID NO: 319 - DNA, 410 bp, Zea mays
  Clone ID: LIB3061-047-Q1-K1-A5
attgtcagcattcaaaaacacaccaagcgaagcgcactagcaacgacctaacaccaatggctaccaagatattagccctccttgcgcttcttgcccttttagtgagcgcaacaaatgcgttcattattccacagtgctcacttgctcctagtgccattattccacagttcctcccaccagttacttcaatgggcttcgaacatccagccgtgcaagcctacaggctacaactagcgcttgcggcgagcgccttacaacaaccaattgcccaattgcaacaacaatccttggcacatctaaccctacaaaccattgcaacgcaacaacaacaacaacaacagtttctgccatcactgagccacctagccgtggtgaaccctgtcacctacttgcaacagcagctgcttgca

SEQ ID NO: 320 - DNA, 438 bp, Zea mays
  Clone ID: LIB3061-047-Q1-K1-A6
caagcaacatagaaagtagaatccattagcaacaatagagcaacaatggcgaccaagagattttccctccttatgctccttgctctttctacatgtgttgctaacgcgacaattttccctcaatgctcacaagctcctatagcttcccttcttcccccataccttccatcaattatagcttcagtatgtgaaaacccagctcttcaaccatataggcttcaacaagcaatcgcagcaagcaacatacctttatcgcccttgttgtttcaacaatcaccagccctatctttggtgcagtcattggtacaaaccatcagggcacaacagctgcagcaactcgtgctacctgtgatcaaccaagtagctctggcaaacctttctccctactctcagcaacaacaatttcttccattcaaccaactgtctacactgaaccct

SEQ ID NO: 321 - DNA, 61 bp, Zea mays
  Clone ID: LIB3061-047-Q1-K1-A7
gaatccggtcgaccacgcgtccgtatatctccaagaatcattaaggatggcacgcaataca

SEQ ID NO: 322 - DNA, 255 bp, Zea mays
  Clone ID: LIB3061-047-Q1-K1-A8
ctttggtccatttggtggcacaaaacatcagggcacaacaactacaacaacttgtgctagcaaaccttgctgcatactctcagcaacatcagtttcttccattcaaccaactggctgcattgaactctgctgcttatttgcaacaacaattaccattcagccagctagttgctgactacccccagcaatttcttccattcaaccaactagcagcattgaactctgctgcttatttacagcagcaacaactactac

SEQ ID NO: 323 - DNA, 431 bp, Zea mays
  Clone ID: LIB3061-047-Q1-K1-A9
gcagcatagaaagcacaatagtgtaccatcaatggcagccaaaatattttgcctacttatgctccttggtctttctgcaagtgctgctacggcgaccattttcccgcaatgctcgcaagctcctatagcttcccttcttcccccgtacctctcaccagcggtgtcttcggtatgtgaaaacccaattcttcaaccctacaggatccaacaggcaatcgcagctggcatcttacctttatcacccttgttcctccaacaatcatcagccctattacaacagttacctttggtgcatttattggcacaaaacatcagggcacaacaactacaacatcttgtgctagcaaaccttgctgcctactctcagcaacagcagcttcttccattcaaccaactaggctcattgaactctgcttcttatttgcaacaac

SEQ ID NO: 324 - DNA, 400 bp, Zea mays
  Clone ID: LIB3061-047-Q1-K1-B1
acgcgaccgcccacgcgtacgcggacgcgtgggcgagaacacggtccgctccttcaacgacgccgggcgcttccgcgtcgactacgtcgagttcgacgtccaggtcaccaaggacgggtgcccaatcatcttccatgacaacttcatcttcacacaagacgatggtaagatttcacaaaagcgtgtggccgatattcagctggaagacttcctgcagtatgggctccagaacgagcaggggaaggttggcaagcccctgcttcgcagattgaaggatggcaggatggtgaactgggacgtgcaatcagaggacgctctttgcacactcgaagaagcgttcgacaaggtcaatccaaggttgggcttcaacgtccagctgaaatttgacgacagtctttga

SEQ ID NO: 325 - DNA, 428 bp, Zea mays
  Clone ID: LIB3061-047-Q1-K1-B10
gtggaatccagtagcaacaatagagcaacaatggcgaccaagatactttccctccttatgctccttgctctttctgcatgtgttgctaacgcgacaattttccctcaatgctcacaagctcctatagcttcccttcttcccccataccttccatcaatgatagcttcagtatgtgaaaacccagctcttcaaccctataggctccaacaagcaatcgcagcaagcaacatacctttatcacccttgtttcaacaatcgccagccctatctttggtgcagtcattggtacaaaccatcaaggcacagcagctgcagcaactcgtgctacctgtgatcaaccaagtagctctggcaaacctttctccctactatcagcaacaacaatttcttccattcaaccaactatctacactgaaccctgctgctta

SEQ ID NO: 326 - DNA, 428 bp, Zea mays
  Clone ID: LIB3061-047-Q1-K1-B11
gcagcatagagagcacaatagtgtaccatcaatggcagccaaaatatattgcttccttaggctccgtggtctttctgcaagtgttgctaccggaaccattttcccacaatgctcacaagctcctatagcttcccttctttccccatacctctcaccagcggtgccttcaatgtgtgaaaccccaattgttcaaccctacaggatccaacaggcaatcgcatcaggcatcttaccattatcacccttgttcctccaacaaccgtcagccctattacagcagctacctttggtccatttggtggcacaaaacatcacggcacagcagctacaacaacttgtgctagcaaaccttgctgcatactctcagcaacatcagttgcttacattcaaccaactggctgcattgaactctgctgcttatttgcaac

SEQ ID NO: 327 - DNA, 429 bp, Zea mays
  Clone ID: LIB3061-047-Q1-K1-B12
cgggagggggagaaggagccccaggcgccccccgtcgccaagtgggagccctccgtcgaggggtacctccgattcctcgtcgacagcaagctcgtcttccagacgctcgaagccatcgtcgagcgcgccgccgtcccgtggttggtgtgtgtttcagatgcagagtttcggaatactgggctggagagatcagaggcgctgaaaaatgatctggaatggttcaggcaacagggccacacagttccagaaccatcggcccctggcaccacatacgcttctctactggaagagctgtctgaggaggacccccaggcctttatctgccatttctataacgtgtactttgctcatactgctggaggccgaatgattggcaaaaaggtttccgagaagattctgaacatcgaagagctggagttctacaagtgg

SEQ ID NO: 328 - DNA, 418 bp, Zea mays
  Clone ID: LIB3061-047-Q1-K1-B2
ccattttcccacaatgctcacaagctcctatagcttcccttcttcccccgtacctctcacgcagcggtgtcttcggtatgtgaaaacccaattcttcaaccctataggatccaacaggcaatcgcagctggcatcttacctttatcacccttgttcctccaacaatcatcagccctattacagcagttacctttggtgcatttattggcacaaaacatcagggcacaacaactacaacaacttgtgctagcaaaccttgctgcctactctcagcaacaacagtttcttccattcaaccaactagctgcattgaactctgcttcttatttgcaacaacaacaactaccattcagccagctatctgctgcctacccccagcaatttcttccattcaaccaactgacagctttgaactctt

SEQ ID NO: 329 - DNA, 426 bp, Zea mays
  Clone ID: LIB3061-047-Q1-K1-A11
gacggatggcactccacgcagactgttcagaagagcaagattctcttcattgcctggtccccatcgacattccgtatgcgtggtgagatgctgtactgcacgtcgaaggaccgcatcaagtacgagctcgacgggtttcactacgaaatccatgcgaccgacccattgtaggtggacatggatgttctccgggagcgggctcactgaagctggttctgcttttgaagggacctgtggagggccgtgaaccttcaatcagatgcgaatctaattgtcaacgatgaagcatccgccgtggtgcctgttaataagttcctgtaagcgtatcatttagtcgctatgcttgatactagctggcgaagcgctatctaagctgaaaacgaagcacgatttgcaaactcgttatatcgcggtattgatgatact

SEQ ID NO: 330 - DNA, 315 bp, Zea mays
  Clone ID: LIB3061-046-Q1-K1-G7
cccacgcgtccgggaaaatggtcgccgtagcagcacttgcagaaataccaaggagcggaaggaggcaaaatattttcccgcaatgctcacaagctcctatagcttcccttcttcccccgtacctctcaccagcggtgtcttcggtatgtgaaaacccaattcttcaaccctacaggatccaacaggcaatcgcagctggcatcttacctttatcacccttgttcctccaacaatcatcagccctattacagcagttacctttggtgcatttattggcacaaaacattcagcacaacaactacaacaacttgtgct

SEQ ID NO: 331 - DNA, 443 bp, Zea mays
  Clone ID: LIB3061-046-Q1-K1-G8
ccacgcgtccgaggccataaaaggttcttacaaaaggaacattaacatacatcccacatgtcctacagcggcaacccatgcatcacagacatcacacataagtttttctttatttggatgcattactagcactaagactctactaggtaccacatttacaggttccaaatgctatacctagtggacctgtcagagtcgtacgagtcattgtcactgggctcatacaattctggtgaggaaggggggtgaaaggattttgggccactgggttcacttgctccaatacttttatttcttcctccatcctctccttctctgggtctgaccttgctttgctctctagtgcatcctgctccatgaggtctacctcctttcagattgcaaggagagcattgagaaggtaatgctcgtcacccaaatgcatgaaagcctcttctagaaag

SEQ ID NO: 332 - DNA, 357 bp, Zea mays
  Clone ID: LIB3061-046-Q1-K1-G9
aatccctcgtccaagagaagtgtgcatgcttggatcccacatgtgaggggccggaaaaatgggacttgactacatggatgttgaagctctcaagaaaatgaacaagaacaagaagcttgttaagaggcttgccaagaaagtccatgctttcttgggatcagaggccatcatcaagcagattccccgtctccttggtcctggtctcaacaagggcaggcaagttcccgaccctggttactcaccaggaaatccctcgagtccaaagtggaacgagactaaggcaaccgtcaagttccagctcaagaagggcctttgcatgggtgttcgccgtcgcaacttggcgatggaggagaagca

SEQ ID NO: 333 - DNA, 407 bp, Zea mays
  unsure (1)..(407): unsure at all n locations; Clone ID: LIB3061-046-Q1-K1-H1
ctccgccgcctcgtctccgctccctcgcactcgcagctccggctgctattctgcagaggtcggtggattggttttcctcatgggtcgcaccatcaagaaggccaagaaggctcaatccaagaagtccaagaagaaaactgaatcgtcctcgtcgtccaaccctgcgattgcctctggtccggctaaggtctggcaaccgggtgtagatacactggaagatggggaggagctgcagtttgatcctcaggcttacaattatctccgaggttttggcattggctggtcttgcttgagttttgatgttgtgcgtgatcaacttggactcgtccgttcagagttccctcatacattctatggtgttgctggaacgcangctgagaaagcttcatggaactatattggcgttt

SEQ ID NO: 334 - DNA, 302 bp, Zea mays
  Clone ID: LIB3061-046-Q1-K1-H10
gcttatttacagcagcaacaactactaccattcagccagctagctggtgtgagccctgctacgttcttgacacaaccacaattgttgccgttctaccagcacgctgcgcctaacgctggcaccctcttacaactgcaacaattgctgccattcaaccaacttgctttgacaaacccaacagcattctaccaacaacccatcattggtggtgccctcttttagatttcttatgagttatagttcaataataaagttttttgtctgatgtttgtggcttcccagaaataagaaagtacatttct

SEQ ID NO: 335 - DNA, 347 bp, Zea mays
  Clone ID: LIB3061-046-Q1-K1-H11
cagctagcaacatagaaagcacaatagtgtaccaacaatggcagctaaaatattttggctccttatgctccttggtctttctgcaagtgctgctacggcgaccattttcccacaatgctcacaagctcctatagcttcccttcttcccccgtacctctcaccaacggtgtcttcggtatgtgaaaacccaattcttcaaccctacaggatccaacaggcaatcgcagctggcatcttacctttatcacccttgttcctccaacaatcatcagccctattacagcagttacctttggtgcatttattggcacaaaacatcagggcacaacaactacaacaacttgtgc

SEQ ID NO: 336 - DNA, 322 bp, Zea mays
  Clone ID: LIB3061-046-Q1-K1-H12
cttccttatgctccttggtctttctgcaagtgttgcttaccgcaaccattttcccacaatgctcacaagctcctatagcttcccttcttcccccatacctctcaccagcggtgtcttcaatgtgtgaaaccccaattgttcaaccctacaggatccaacaggcaatcgcaacaggcatcttaccattatcacccttgttccttcaacaaccgtcagccctattacagcaattacctttggtccatttggtggcacaaaaccataaggcacaacaactacaacaacttgtgctagcaaaccttgctgcatactctcagcaaca

SEQ ID NO: 337 - DNA, 456 bp, Zea mays
  Clone ID: LIB3061-046-Q1-K1-H2
gaccgacgcgtccggcaattagctcatcgactccagattggagaactcgacaccatgaaggtgctgatcgtggccctggctctcctggcgctcgctgcgagcgccgcctccagtacaagcggcggctgtggctgccagacaccaccgtttcatctaccgcctccgttctatatgccgcctccgttctatctgccgccgcagcagcagccgcagccatggcaataccccactcaaccaccgcagctaagcccgtgccagcagttcggatcctgcggcgtcggcagcgtcggcagcccgttcctgggccagtgcgtcgagttcctgaggcaccagtgcagcccggcggcgacgccctacggctcgccacagtgccaggcgctgcagcagcagtgctgccaccagatcaggcaggtggagccgctgcaccggtaccaggcgacatacggtgtggtcctg

SEQ ID NO: 338 - DNA, 281 bp, Zea mays
  unsure (1)..(281): unsure at all n locations; Clone ID: LIB3061-046-Q1-K1-H3
agcaacagatactgcacaccctagatccaacaatggctgattgaatacaatgcctcgggatgctggttggtctgaaatgactggctctgccgataccattaaaanacagtgctaacgggctcatatcacgtggaatggttccttgtatgtttaaccaaccatggctaaggactggcataacaacattcttaaacacatcatgatacagcacagcgtgaacaatcctgtcacaaacagatgagactctgaacagatacacttataacacggactacagaagc

SEQ ID NO: 339 - DNA, 441 bp, Zea mays
  Clone ID: LIB3061-046-Q1-K1-H4
ccaactagcaacatagaaagcacaatagtgtaccaacaatggcagccaaaatattgtgcttccttatgctccttggtctttctgcaagtgctgctaccgcaaccattttcccacaatgctcacaagctcctatagcttcctttcttcccccatacctctcaccagcggtgtcttcagtatgtgaaaacccaattcttcaaccctacaggatccaacaggcaatcgcagcaggcatcttacctttatcacccttgttcctccaacaaccgtcagccctattacagcagttacctttggtgcatttgttggcacaaaacatcaaggcacaacaactacaacaacttgtgctaggaaaccttgctgcctactctcagcaacagcagtttcttccattcaaccaactggctgcattgaactctgctgcttatttgcaacaacaac

SEQ ID NO: 340 - DNA, 391 bp, Zea mays
  unsure (1)..(391): unsure at all n locations; Clone ID: LIB3061-046-Q1-K1-H5
tgttattatgcctaattcgctaggcatggcatttcctccgcgaccagctgatggtggggcacctccaatctataatcctgcactcaatcctttgatggcccggcctccaatttggcctgctgcaccagcgcaagcttggtatccgcaacaagcagcatatccacaacaatcagctgtttcagttcctcccatagttgctgggctcccaccacaacagccactattcccaattcagaatgtgcctactcctatgacatcagcagctgctaatgtacttcaaacatcgtttcctatggcccctncaggagtaccttcacctngtgcccctcatgtttcccagcctttgtttcctgttaacactttagctgtcaatggagctgtaaattcccca

SEQ ID NO: 341 - DNA, 445 bp, Zea mays
  Clone ID: LIB3061-046-Q1-K1-H6
ccacgcgtccgagcacacctagcgaagcgcactagcaacgacctaacaacaatggcttccaagacattatccctccttgcgcttcttgccctttttgtgagtgcaacaaatgcgttcattattccacaatgctcacttgctccgagtgccattattccacagttcctccctccagttacttcaatgggcttcgaacacccagctgtgcaagcctataggctacaacaagcgcttgcggcgagcgtcttagaacaaccaattgcccaattacaacaacaatccttggcacatctaaccatacaaaccatcgcaacgcagcagcaacaagcactgagccacctagccgtggtgaaccctatcgcctacttgcaacaacagctgcttgcatccaacccacttgctttggcaaacgtagctgcataccaacaacaacaacagttgcaac

SEQ ID NO: 342 - DNA, 442 bp, Zea mays
  Clone ID: LIB3061-046-Q1-K1-H7
caactagcaacatagaaagcacaatagtgtaccaacaatggcagccaaaaggttatgcttccttatgctccttggtctttctgcaagtgctgctaccgcaaccattttcccacaatgctcacaagctcctatagcttcctttcttcccccatacctctcaccagcggcgtcttcagtatgtgaaaacccaattcttcaaccctacaggatccaacaggcaatcgcagcaagcatcttacctttatcacccttgttcctacaacaaccgtcagccctattacagcagatacctttggtgcattcgttggcacaaaacatcaaggcacaacaactacaacaacttgtgctaggaaaccttgctgactactctcagcaacagcagttacttgcattcaaccaactggctgcattgaactctgctgcttatttgcaacaacaacta

SEQ ID NO: 343 - DNA, 437 bp, Zea mays
  unsure (1)..(437): unsure at all n locations; Clone ID: LIB3061-046-Q1-K1-H8
caacgggtcaccttcttgtttgagaggtattcgttgcttctttgtatcggcatcgtgtgggcctttgcagctatccttactgctgcgggtgcatatgaccatgcttcacctaagacacaacagcactgtcgcactgataagtctttcctcatgtcatcggcaccatggattaaaattccattaccattcgaatggggtccttcaatattcactgctggtcattcatttggaatgatgggtgctgtacttgttgcagtcttcgagtcaactggagcacactttgctactgctcgtctagcgggtgctacaccacctacagcttatgtccttagtcggagcgttggcttgcaaggtattggaatgtacttggaggggatctttagtgttccagcaggttcatctgtatcagttgaaaacattggcctncttgggctgac

SEQ ID NO: 344 - DNA, 354 bp, Zea mays
  Clone ID: LIB3061-046-Q1-K1-H9
gaccaactagcaacatagaaagcacaatagtgtaccaacaatggcagccaaaatatttggctgccttatgctccttggtctttctgcaagtgctgctaccgcaaccattttcccacaatgctcacaagctcctatagcttcctttcttcccccatacctctcaccagcggtgtcttcagtatgtgaaaacccaattcttcaaccctacaggatccaacaggcaatcgcagcaggcatcttacctttatcaacccttgttcctccaacaaccgtcagcccctattacagcagttacctttggtgcatttggttggcacaaaacatcaaagcacaacaactacaacaacttgtgct

SEQ ID NO: 345 - DNA, 409 bp, Zea mays
  Clone ID: LIB3061-047-Q1-K1-A1
ctttctgcaagtgctgctacggcgaccattttcccgcaatgctcgcaagctcctatagcttcccttcttcccccgtacctctcaccagcggtgtcttcggtatgtgaaaacccaattcttcaaccctacaggatccaacaggcaatcacagctggcatcttacctttatcacccttgttcctccaacaatcatcagccctattacatcagttacctttggtgcatttattggcacaaaacatcagggcacaacaactacaacaacttgtgctagcaaaccttgctgcctactctcagcaacagcagtttcttccattcaaccaactagctgcattgaactctgcttcttatttgcaacaacaacaactaccattcagccagctacctgctgcctacccccagcaatttc

SEQ ID NO: 346 - DNA, 390 bp, Zea mays
  Clone ID: LIB3061-047-Q1-K1-A10
gcaacaacaattaccattcagccagctagttgctgcctacccccagcaatttcttccattcaaccaactagcagcagtgaactctgctgcttatttacagcagcaacaactactaccattcagccagctagctgatgtgagccctgctgccttcttgacacaacaacagttgttgccgttctacctgcacgctatgcctaacgctggcaccctcttacaactgcaacaattgctgccattcaaccaacttgctttgacaaactcaacagtgttctaccaacaacccatcattggtggtgccctcttttagattgcttatgagttatagttcaataatgaagttttttggatgatgtttgtggcgtcccagaaataagaaagtacatttct

SEQ ID NO: 347 - DNA, 104 bp, Zea mays
  Clone ID: LIB3061-046-Q1-K1-G6
tttcctttccttgccccagaacttgaaataaatatatatacgatgaaatagcgcgggcatgccgaataatggatgtgtgaattctcactaattaagtaatgcat

SEQ ID NO: 348 - DNA, 359 bp, Zea mays
  Clone ID: LIB3061-046-Q1-K1-F11
acgctaccgcagccattttcccacaatgctcacaagctcctatagcttcccttcttccccgatacgtctcaccagcggtgtcttcaatgtgtgaaaccccaattgttcaaccctacaggatccaacaggcaatcacaacacgcatcttaccattatcacccttgttcctccaacaaccgtcagccctattacagcagttacctttggtccatttggtggcacaaaacatcagggcacaacaactacaacaactcgtgctagcaaacctcgctgcatactctcagcaacatcagatgcttacattcaaccaactggctgcctggaactctgctgctcatttgcagcatcaattaccattc

SEQ ID NO: 349 - DNA, 116 bp, Zea mays
  Clone ID: LIB3061-046-Q1-K1-F12
ctagatcgcgacggccgtcctcttttagatttcttatgagttatagttcaataataaagttttttgtctgatggtagtggcttcccagaaataagaaagtacatttctagattctt

SEQ ID NO: 350 - DNA, 314 bp, Zea mays
  unsure (1)..(314): unsure at all n locations; Clone ID: LIB3061-046-Q1-K1-F2
tcggaacttgcaacctttaaagccccattgtttacccaccattgccggccaaattttttgcctccgatcctcctggccttcttcaattctgctacggcaccattttcccgaatgctcgcaagctcctatagccttccttcttcccccgtacctctcaccagcggtgtcttcggtatgtgaaaacccaattcttcaaccctacaggatccaacaggcaatcgcagctggcatcttacctttatcacccttgttcctacaacaatcatcagccctattacaacagntacctttggtgcatttattggcacaaaaca

SEQ ID NO: 351 - DNA, 293 bp, Zea mays
  Clone ID: LIB3061-046-Q1-K1-F3
cagcaagcaacatagaaagtagaatccattagcaacaatagagcaacaatggcgaccaggatatgttccctccttatgctccttgctctttctacatgtgttgctaacgcgacaattttccctcaatgctcacaagctcctatagcttcccttcttcccccataccttccatcaattatagcttcagtatgtgaaaacccagctcttcaaccatataggcttcaacaagcaatcgcagcaagcaacatacctttatcgcccttggtgtttcaacaatcaccagccctatcttt

SEQ ID NO: 352 - DNA, 425 bp, Zea mays
  Clone ID: LIB3061-046-Q1-K1-F4
gttggcttctcctccccctccggttcgggttcgggttcgtgaggttctccggggttgggtttcgggggtgggcggatcgagatggcggcgtcggatgttgagtaccgctgcttcgtcggcggcctcgcctgggccacggacgaccactccctccacaacgccttcagcacctacggcgaggtcctcgagtccaagatcatcctcgatcgggagacgcagaggtcccgcggcttcggcttcgtcaccttctccacggaggaggcgatgcggaacgccatcgagggcatgaacggcaaggagctggacggccggaacatcaccgtcaacgaggcccagtcccgcggccgccgttgaagcggcggctgcggctaccgtggtggccgtggaggcggcggctacggcggtggctggcgccgtgatggcgg

SEQ ID NO: 353 - DNA, 429 bp, Zea mays
  Clone ID: LIB3061-046-Q1-K1-F5
gctcctatagcttcccttcttcccccgtacctctcaccaacggtgtcttcggtatgggaaaacccaattcttcaaccctacaggatccaacaggcaatcgcagctggcatcttacctttatcacccttgttcctccaacaatcatcagccctattacagcagttacctttggtgcatttattggcacaaaacatcagggcacaacaactacaacaacttgtgctagcaaaccttgctgcctactctcagcaacagcagtttcttccattcaaccaactagctgcattgaactctgcttcttatttgcaacaacaacaactaccattcagccagctatctgctgcctacccccagcaatttcttccattcaaccaactgacagcattgaactctcctgcttatttacagcagcaacaactactaccattc

SEQ ID NO: 354 - DNA, 411 bp, Zea mays
  Clone ID: LIB3061-046-Q1-K1-F7
caacaagcaacatagaaagtggaatccagtagcaacaacacagcaacaatggcgaccgagatattttccctccttatgctccttgctctttctgcatgtgttgctaacgcgacaattttccctcaatgctcacaagctcctatagcttcccttcttcccccataccttccatcaatgatagcttcagtatgtgaaaacccagctcttcagccctataggctccaacaagcaatcgcagcaagcaacatacctttatcacccttgttgtttcaacaatcgccagccctatctttggtgcagtcattggtacaaaccatcagggcacagcagctgcagcaactcgtgctacctgtgatcaaccaagtagctctggcaaacctttctccctactctcagcaacaacaatttctt

SEQ ID NO: 355 - DNA, 437 bp, Zea mays
  unsure (1)..(437): unsure at all n locations; Clone ID: LIB3061-046-Q1-K1-F8
gagaccaacaagcaacatagaaagtggaatccagtagcaacaatagagcagcaatggggaccaagatactttccctccttatgctccttgctctttctgcatgtgttgctaacgcgacaattttccctcaatgctcacaagctcctatagcttcccttcttcccccataccttccatcaatgatagcttcagtatgtgaaaacccagctcttcaaccctataggctccaacaagcaatcgcagcaagcaacatacctttatcacccttgtttcaacaatcgccagccctatctttggtgcagtcattggtacaaaccatcaaggcacagcagctgcagcaactcgtgctacctgtgatcaaccaagtagctctggcaaacctttctccctactatcagcaacaacaatntcttccattcaaccaactatctacactg

SEQ ID NO: 356 - DNA, 426 bp, Zea mays
  Clone ID: LIB3061-046-Q1-K1-F9
cagaccattagctttatctactccagagcgcagaagaacccgatcgacaccatgagggtgttgctcgttgccctcgctctcctggctctcgctgcgagcgccacctccacgcatacaagcggcggctgcggctgccagccaccgccgccggttcatctaccgccgccggtgcatctgccaccttcggttcacctgccacctgcggtgcatctgccaccgccggtccacctgccgccgccagtccacctgccaccgccggtccatgtgccgccgccggttcatctgccgccgccaccatgccactaccctactcaaccgccccggcctcagcctcatccccagccacacccatgcccgtgccaacagccgcatccaagcccgagccagctgcagggaacctgcggcgttggcagcaccccgatcctg

SEQ ID NO: 357 - DNA, 437 bp, Zea mays
  unsure (1)..(437): unsure at all n locations; Clone ID: LIB3061-046-Q1-K1-G1
agcgcactagcaacgacctaacaccaatggctaccaagatattagccctccttgcgcttcttgccctttgagtgagcgcaacaaatgcgttcattattccacagtgctcacttgctcctagtgccagtattccacagttcctcccaccagttacttcaatgggcttcgaacatccagccgtgcaagcctacaggctacaactagcgcttgcggcgagcgccttacaacaaccaattgcccaattgcaacaacaatccttggcacatctaaccctacaaaccattgcaacgcaacaacaacaacaacagtttctgccatcactgagccacctagccgtggtgaacccttgtaactacttgcaacagcagctgcttgcattcaacccacttgctcntgcgaacgtagctgcataccagcaacaacaacagctgcaacag

SEQ ID NO: 358 - DNA, 412 bp, Zea mays
  unsure (1)..(412): unsure at all n locations; Clone ID: LIB3061-046-Q1-K1-G10
gtctcgccaagtcgccatgatgcagcaacccccgccgcagcagccgcagccgggcatggcgccgnctncgcctccgcaggctgctggcgggcagccaccgcagtggggtgggatcccgccgccgatggcgcagcagtacggcgcaccgnctccgcagcagcctccggcgatgtggggccagcctccgccgcaggcgcactacgggcaggcaccaacccctcagcagtactacgccgcgccgccggtgccgggtgcaggcgccagccgcccccgctgcggcggacgaggtcaggacgctctggatcggggacctgcaatactggatggacgagaactacgtcttcgggtgcttttcgaacactggggaggttcaaaatgtgaagctcatccgtgacaagaattcanggcagct

SEQ ID NO: 359 - DNA, 329 bp, Zea mays
  unsure (1)..(329): unsure at all n locations; Clone ID: LIB3061-046-Q1-K1-G11
agaaagcacaatagtggaccaacaatggcagctaaaatattttgccttcctaagctcgggggggtttctgcaagtgctggtacggcgaccattttcccacaatgctcacaagctcctatagcttaccttcttcccccgtacctctcaccaacggtgtcttccgtatgtgaaaacccaattctttaaccctacaggatccaacaggcaatcgcaactggcatcttaactttatcacccttggtccctccaacaatcattcagccctattacagcagttacctttggtgcatctattggcacanaacatcanggcacaacaactacaacaa

SEQ ID NO: 360 - DNA, 425 bp, Zea mays
  unsure (1)..(425): unsure at all n locations; Clone ID: LIB3061-046-Q1-K1-G12
cccacgcgtncgggaaggtatcaaaataacaagccaactacacctatgagatcacctgctaggaatgaagcccaagaatctttgaccattggtatagccgatgaacacattggtgctgttgtaggtcgagcaggaaggaacataacagagatcattcaggctagtggtgctcggatcaagatatcagataggggtgactatatatctgggacatctgacaggaaagtgacgattactggaacacccgaagctatccggaccgcggagtccatgatcatgcagagggtgtcagccagttcagagaggtgatgagccccttctgaaggaagggcgtaggccattgctgtgtccgagcacagcagcgtgtttgatgcangttaggaggatgtgggaactgctttccttttattttcccgccttttttc

SEQ ID NO: 361 - DNA, 429 bp, Zea mays
  Clone ID: LIB3061-046-Q1-K1-G2
cggacgcgtgggcggacgcgtgggcgcgcgcaagcagaggcgccgcatcgctcgtcagaagaaggctgtgaagatattcccacggccaactgctggccctcttcgccccattgtgcaatgccagactctcaagtacaacatgaagtcgagggctgggagaggatttacccttgaggagctgaaggctgccggcattccaaagaagcttgccccaaccattggcatttctgtggatcaccaccgcaagaacaaatatctcgagggactgcaggccaatgtccagaggcttaagacgtacaaggccaagctggttatcttcccaaggcgtgctcgcaaggccaatgccggcgactctactccggaggagcttgccacggccacccaggtccagggcgactacatgcctattactcgtggtgagaagcgctc

SEQ ID NO: 362 - DNA, 355 bp, Zea mays
  Clone ID: LIB3061-046-Q1-K1-G3
agcaagcaacatagaaagtagaatccattagcaacaatagagcaacaatggcgaccaggatattttccctccttatgctccttgctctttctacatgtgttgctaacgcgacaattttccctcaatgctcacaagctcctatagcttcccttcttcccccataccttccatcaattatagcttcagtatgtgaaaacccagctcttcaaccatataggcttcaacaagcaatcgcagcaagcaacatacctttatcgcccttgttgtttcaacaatcaccagccctatctttggtgcagtcattggtacaaaccatcagggcacaacagctgcagcaactcgtgctacctgtgat

SEQ ID NO: 363 - DNA, 255 bp, Zea mays
  Clone ID: LIB3061-046-Q1-K1-G4
gagcaacaacaacaaccatgtgagttatgtggatctcaacaagctactcaaagtgcggtggcaagcttgacagcagcacaatacctaccatcaatgtgcggcttgtaccactcatactaccaaaataatccatgcagcagcaatgacattagtggtgtttgcaattgaagaattgtgtctacctagccgttatactcatataacggtgttaagcaataaagtaccatacattatgatgtttgtactaaacaaaaa

SEQ ID NO: 364 - DNA, 427 bp, Zea mays
  Clone ID: LIB3061-046-Q1-K1-G5
cttcttttaacaacatccgaaactggattcggaacattgaacagcacgcctgtgatggcgtcaacaagattttggttggcaacaaggccgatatggacgaaagcaagagggctgtacctactgcaaaaggacaagcacttgctgatgagtacgggatcaagttttttgaaacgagtgccaagacaaacctgaatgtggagcaagtgtttttctccatcgcacgtgacatcaagcagaggcttgcggagactgattcaaagccagaggacaaggcaatcaaaattaacaagccagaccagggttccgaggcaccagctgcccagcgatctgcttgctgcggctcataagcagatgcacgatggccatagcctttggttatttgacattatttatttctcgcttggctgttataggaaggatttgaaag

SEQ ID NO: 365 - DNA, 423 bp, Zea mays
  Clone ID: LIB3061-046-Q1-K1-F10
atccctcctgcgcttctggccctttttgcaagcgcaacaaatgcgtccattattccgcaatgctcacttgctcctagttccattattccacagttcctcccaccagttacttcaatggccttcgaacacccagctgtgcaagcctataggctacaacaagcgattgcggcgagcgtcttacaacaaccaattgcccaattgcaacaacaatccttggcacatctaacaatacaaaccatcgcaacgcaacagcaacaacagttcctaccagcactgagccacctagccatggtgaaccctgtcgcctacttgcaacagcagctgcttgcatccaacccacttgctctaaccaacgtaagttgcaaccaagcaccacaacaactgcaacagtttctgccagcgcttagtcaactagccatggtg

SEQ ID NO: 366 - DNA, 435 bp, Zea mays
  Clone ID: LIB3061-045-Q1-K1-C7
gcccgtgccagctgcagggaacctgcggcgttggcagcaccccgatcctgggccagtgcgtcgagtttctgaggcatcagtgcagcccgacggcgacgccctactgctcgcctcagtgccagtcgttgcggcagcagtgttgccagcagctcaggcaggtggagccgcagcaccggtaccaggcgatcttcggcttggtcctccagtccatcctgcagcagcagccgcaaagcggccaggtcgcggggctgttggcggcgcagatagcgcagcaactgacggcgatgtgcggcctgcagcagccgactccatgcccctacgctgctgccggcggtgtcccccactgaagaaactatgtgctgtagtatagccgctggctagctagctagttgagtcatttagcggcgatgattgagtaataatgtgtcacgcatc

SEQ ID NO: 367 - DNA, 401 bp, Zea mays
  Clone ID: LIB3061-045-Q1-K1-C8
aagaaatccatcgagaggccgtcgacaggggaattaatggcgtcgtcgtctagcaggggccaccgccgcctcatcctcgcagccgccgtcctgctctccgtgctcgcggctgccagcgccagcgccgggacctcctgcgtgccggggtgggccatcccgcacaacccgctcccgagctgccgctggtacgtgaccagccggacctgcggcatcgggccgcgccttcccgtggccggagctgaagaggagatgctgccgggagctggcggacatcccggcgtactgccggtgcacggcgctgagcatcctcatggacggcgcgatcccgccgggcccggacgcgcagctggagggccgcctagaggacctgccgggctgcccgcgggaggtgcagaggggat

SEQ ID NO: 368 - DNA, 418 bp, Zea mays
  Clone ID: LIB3061-045-Q1-K1-C9
cccacgcgtccggcaacatagaaagcacaatagtgtaccaacaatggcggccaaaagagtttgcctgcttatgctccttggtatttctgcaagtgctgctacggcgaccattttcccgcaatgctcacaagctcctatagcttcccttcttcccccgtacctctcaccagcggtgtcttcggtatgtgaaaacccaattcttcaaccctacaggatccaacaggcaatcgcagctggcatcttacctttatcacccttgttcctccaacaatcatcagccctattacagcagttacctttggtgcatttattggcacaaaacatcagggcacaacaactacaacaacttgtgctagcaaaccttgctgcctactctcagcaacagcagtttcttccattcaaccaactagctgcattg

SEQ ID NO: 369 - DNA, 400 bp, Zea mays
  Clone ID: LIB3061-045-Q1-K1-D1
cgcacgtaaccagctggagacgtacgtgtacaacatgaagaacacgctgggcgacagggacaagctcgtggacaagctggaggccgaggataaggaaaaggtggaggaggccctcaaggatgctctggagtgtctggacgacaaccagtccgccgagaaggacgactaccaagagaagcttatggatgtggaggccgggtgcaaccacattgtgtctaccgtgtaccactggtctaacagtgcccctggccttgacactgacagcggtgttgacgacgaccactactagctgtagatggttgtagatggtactggtcacgtgaattgccatatgccgaaccacaattagtaacggggtttatcggatgacaatacttattactaatcttggtgctgctct

SEQ ID NO: 370 - DNA, 409 bp, Zea mays
  Clone ID: LIB3061-045-Q1-K1-D10
aaccttgctgcctactctcagcatcaacagtttctgccattcaaccaactagctgcagggaactctgctgcttatttgcagcagcaacaactactaccattcagccagctagctgctgactaccaccggcaatatcttacattcaaccaactggcagcattgaactctcatgcttatgtacaacaacaacaactactaccattcagccagctagctgctgtgagccctgctgccttcttgacacagcaacatttgttgccgttctacctgcacactgcgcctaacgttggcaccctcttacaactgcaacaattgctgccattcgaccaacttgctttgacaaacccagcagtgttctaccaacaacccatcattggtggtgccatcttttagattgcttatgagttat

SEQ ID NO: 371 - DNA, 262 bp, Zea mays
  Clone ID: LIB3061-045-Q1-K1-D11
tgagaccaactagcaacatagaaagcacaatagtgtaccaacaatggcagccaaaatattttgcgtccttatgctccttggtctttctgcaagtgttgctaccgcaaccattttcccacaatgctcacaagctcctatagcttcccttcttcccccatacctctcaccagcggtgtcttcaatgtgtgaaaacccaattgttcaaccctacaggatccaacaggcaatcgcaacaggcatcttaccattatcacccttgttc

SEQ ID NO: 372 - DNA, 411 bp, Zea mays
  Clone ID: LIB3061-045-Q1-K1-D12
gacagacagtgttattggtgaaggatgtgttattaaaaactgcaagataaaccattctgtagttggactccgatcttgcatatctgaaggtgctatcatagaggacagtttactaatgggtgcggactactatgagacagaagctgataaaaaactccttgccgaaaaaggtggcattcctattggtattgggaaaaattcatgcatcaggagagcaatcattgacaagaatgctcgaattggagacaatgttaagatactcaatgctgacaatgttcaagaagctgcaagggagacagacgggtacttcatcaaaggtggaattgtcacagtgatcaaggatgctttactccctagtggaacagttatatgaagtgaacgtgcgacatgcagctgtgtgtctcgacattc

SEQ ID NO: 373 - DNA, 368 bp, Zea mays
  Clone ID: LIB3061-045-Q1-K1-D2
caaatgtcatgtaaaaaaaaaagaaccgtaggaccctgtctttgcgcggggtcctggcgtcctgccgctgccagagcgaaggaccctgtctttgccagaaatgcccctgggcaaccaagctaatggcgactttgtttgaacaaaaagtagcagacttttttgcggggttcgatttctctctctctcttttttcttttgtaattgtaaccctttttttacctttctggactggtataaaagtaagcctggactcgtcagtttatgggtgcaatatggaggagtatctttgtgtagaatattctggctggtactgcgcttcggactttgtatataaagaagaactattattagtctggttgtttggattt

SEQ ID NO: 374 - DNA, 437 bp, Zea mays
  unsure (1)..(437): unsure at all n locations; Clone ID: LIB3061-045-Q1-K1-D3
gcaaagcggcagtgcgtagagaggatcgtcgaacagaacagcatgaagatggtcatcggtctcgtcgtgtgcctggctctgtcagctgccagcgcctctgcaatgcagatgccctgcccctgcgcggggctgcagggcttgtacggcgctggcgccggcctgacgacgatgatgggcgccggcgggctgtacccctacgcggagtacctgaggcagccgcagtgcagcccgctggcggcggcgccctactacgccgggtgtgggcagacgagcgccatgtaccagccgctccggcaacagtgctgccagcagcagatgaggatgatggacgtgcagtccgtcgcgcagcagctgcagatgatgatgcagcttgagcgtgccgctgccgncagcagcagcctgtacgagccagctctgatgcagcagcagcagcagct

SEQ ID NO: 375 - DNA, 356 bp, Zea mays
  Clone ID: LIB3061-045-Q1-K1-D4
cacgcgtccgcaaaagccacagggcataaaaagaattttacaacattacatcatcacgatgttcatgcgtcttgcgccttccctagctatataacctgccatcgcctcaaaaatccatatgcaatcaccctaatcgcgactttatttcatcaacaactctcacactcttctgacgactatgatactctctctctatctgtacccctacaattagtaccttatgcatacctatctcaacctcgttacaactacaccctaatacgcacagtttatgcatacaatcgccatgaaccactctctgcagaatcatttctatcatactgagattacgactatggacatacagaacaactatc

SEQ ID NO: 376 - DNA, 432 bp, Zea mays
  Clone ID: LIB3061-045-Q1-K1-D5
cccacgcgtccgagtagctgccaggtattgcaccaacaatgttgtcatgatcttaggcagattgagccacattacattcaccaagcaatctacaacatggttcaatccataatgcaggaggagcaacaacaacaaccatgtgagttatgtggatctcaacaagctactcaaagtgcggtggcaatcttgacagcagcacaatacctaccatcaatgtgcggcttgtaccactcatactacctaaataatgcatgcagcagcaatgacattagtggtgtttgcaattgaagaattgcgtctacctagccgatatactcatataacggagttaagcaataaagtaccatacattatgatgtatgtactaacaaaatagccgtggtgtaccttgaaacatccttgtaacttcagctgcttgcattatatgcactt

SEQ ID NO: 377 - DNA, 433 bp, Zea mays
  Clone ID: LIB3061-045-Q1-K1-D6
ggttcgtgaggttctccggggttcggtttcgtgggtgagcggatcgagatggcggcgtcggatgttgagtaccgctgcttcgtcggcggcctcgcctgggccacggacgaccactccctccacaacgccttcagcacctacggcgaggtcctcgagtccaagatcatcctcgatcgggagacgcagaggtcccgcggcttcggcttcgtcaccttctccacggaggaggcgatgcggaacgccatcgagggcatgaacggcaaggagctggacggccgcaacatcaccgtcaacgaggcccagtcccgcggcggccgtggaggcggcggcggcggcgggtacggtggtggccgtggaggcggcggctacggcggtggcgggcgccgtgatggcggcggcggctacggcggtggcggcggctacccgtggtggc

SEQ ID NO: 378 - DNA, 434 bp, Zea mays
  Clone ID: LIB3061-045-Q1-K1-D7
gcaacatagaaagcacaatagtgtaccaacaatggcagccaaaatattttgcctccggatgctccttggtctttctgcaagtgctgctacggcgaccattttcccgcaatgctcgcaagctcctatagcttcccttcttcccccgtacctctcaccagcggtgtcttcggtatgtgaaaacccaattcttcaaccctacaggatccaacaggcaatcgcagctggcatcttacctttatcacccttgttcctccaacaatcatcagccctattacaacagttacctttggtgcatttattggcacaaaacatcagggcacaacaactacaacaacttgtgctagcaaaccttgctgcctactctcagcaacagcagtttcttccattcaaccaactaggttcattgaactctgcttcttatttgcaacaacaac

SEQ ID NO: 379 - DNA, 442 bp, Zea mays
  Clone ID: LIB3061-045-Q1-K1-D8
cagaaagaccaaggagcataaggaagcaaccattttcccacaatgctcacaagctcctatagcttcctttcttcccccatacctctcaccagcggtgtcttcagtatgtgaaaacccaattcttcaaccctacaggatccaacaggcaatcgcagcaggcatcttacctttatcacccttgttcctccaacaaccgtcagccctattacagcagttacctttggtgcatttgttggcacaaaacatcaaggcacaacaactacaacaacttgtgctaggaaaccttgctgcctactctcagcaacagcagtttcttccattcaaccaactggctgcattgaactctgctgcttatttgcaacaccaactaccattcagtcagctagctgctgcctacccccagcaatttcttccattcaaccaactggcagcattgaactct

SEQ ID NO: 380 - DNA, 437 bp, Zea mays
  Clone ID: LIB3061-045-Q1-K1-E1
accaactagcaacatagaaagcacaatagtgtaccaacaatggcagccaaaatattttgcctcctgatgctccttggtctttctgcaagtgctgctacggcgaccattttcccgcaatgctcgcaagctcctatagcttcccttcttcccccgtacctctcaccagcggtgtcttcggtatgtgaaaacccaattcttcaaccctacaggatccaacaggcaatcgcagctggcatcttacctttatcacccttgttcctccaacaatcatcagccctattacaacagttacctttggtgcatttattggcacaaaacatcagggcacaacaactacaacaacttgtgctagcaaaccttgctgcctactctcagcaacagcagtttcttccattcaaccaactaggttcattgaactctgcttcttatttgcaaca

SEQ ID NO: 381 - DNA, 406 bp, Zea mays
  unsure (1)..(406): unsure at all n locations; Clone ID: LIB3061-045-Q1-K1-C6
gtcaattaccaagatccacgccctgctgccacttctgttgctcaaacagcaacatatgcacctcccccagcttcatatcccccttcaatatcttatgcacagtttgcaaccccccagtcaattcagcatagcaattctgtggcttcaccgagcaatggtcagattgcaaatcaagcacaaatgaatgtgaatcaacaaccaaaagattcttcggcagcatctagcagaccatactacatacctgataatctattcagtgatttgatcgatgcanaaagttttggcggtggaaacaagatgggcgggcccactacaatgggtagctcaaatggtggccagcctatgattggtggaaagaaatagggttatttgtctatatatatacagctgatggtgatcggtagct

SEQ ID NO: 382 - DNA, 252 bp, Zea mays
  Clone ID: LIB3061-045-Q1-K1-B2
aatacaaatccaggtaaacatgcagtttagccataacaaacattttttgcttacaacaatctgctcatttttttcctggcaaatcactcggtgtattaaaaactttaaagctatgtaattgaaagactaatcaacacgcagtttaaccatgagcaagctttgtttaattattacagtctacgagtacttattcaggcagatcactctgaggttgtgcctactgttgggcccttccagcttgaccttgttggt

SEQ ID NO: 383 - DNA, 403 bp, Zea mays
  Clone ID: LIB3061-045-Q1-K1-B3
ctgccacctccggttcacctgccacctccggtgcatctcccaccgccggtccacctggcgccgccggtccacctgccaccgccggtccatgtgccgccgccggttcatctgccgccgccaccatgccactaccctactcaaccgccccggcctcagcctcatccccagccacacccatgcccgtgccaacagccgcatccaagcccgtgccagctgcagggaacctgcggcgttggcagcaccccgatcctgggccagtgcgtcgagttcctgaggcatcagtgcagcccgacggcgacgccctactgctcgcctcagtgccagtcgttgcggcagcagtgttgccagcagctcaggcaggtggagccgcagcaccggtaccaggcgatcttcggcttggtcc

SEQ ID NO: 384 - DNA, 446 bp, Zea mays
  unsure (1)..(446): unsure at all n locations; Clone ID: LIB3061-045-Q1-K1-B4
cgaagtcattccctcttcaagagggcatcatcagattgggcttattattccttattactccaggcgaggatcggagttgctctgaattgactgaaccatggcggcgacaatggcagtgacgacgatggtgaccaggagcaaggagagctggtcgtcattgcaggtcccggcggtggcattcccttggaagccacgaggcggtggcaagaccggcggcctcgagttccctcgccgggcgatgttcgccagcgtcggcctcaacgtgtgcccgggcgtcccggcggggcgcgacccgcgggagcccgatcccaaggtcgtacgggcccgncgacaactgcgacatcgcgcgccagcttggcgccgncgttcccgggcagcaggccgnctgggaggcggaggaagaggcagcgaagaggaggaagcagaaaggcggcggcagcaagaag

SEQ ID NO: 385 - DNA, 433 bp, Zea mays
  unsure (1)..(433): unsure at all n locations; Clone ID: LIB3061-045-Q1-K1-B5
cccacgcgtccgattttgagcattcagaaacacaccaagcgaagcacagtagcaacagcctaacaacaatggctaccaagatattatccctccttgcgcttcttgcgctttttgcgagcgcaacaaatgcgttcattattccacaatgctcacttgctccaagttccattattacacagttcctcccaccagttacttcaatgggcttcgaacacccagctgtgcaagcctataggctacaacaagcaattgcggcgagcgtcttacaacaaccaatttcccagttgcaacaacaatccttggcacatctaacaatacaaaccatcgcaacgcaacagcaacaacaattcctaccagcactgagccacctagccatggtgaaccctgccgnctacttgcaacagcagttgcttgcatcaaacccacttgctct

SEQ ID NO: 386 - DNA, 422 bp, Zea mays
  Clone ID: LIB3061-045-Q1-K1-B6
gtttccccccgttccaaattcgccaacccacaccaccttcctctctctggccgccggcctcagatcagatcaaagcggaacaccaactcctcctcctcgtagggtttggtgtgttcacctcacctctcgcggcgacggcgaagccttctcttctcttcgctccgctccgctccgctcggtgtttcagccatgatgtcgcggtcgtacaccaacctgctcgacctcgcggagggcaacttcgcggcgctgggcccggccgccggcgccggcggcggcgggcggcagaggcaggggtcgttcgggctgaggcggatgtcgcgggtgatgacggtgccggggacgctctcggagctcgacggcgaggacgagtcggagccggcggccaccagcagcgtcgccttcgacgcgccctcgtccgtggc

SEQ ID NO: 387 - DNA, 434 bp, Zea mays
  Clone ID: LIB3061-045-Q1-K1-B7
aacctttctccctactatcagcaacaacaatttcttccattcaaccaactatctacactgaaccctgctgcttatttgcagcaacaactattaccattcagccagctagctactgcctactctcatcaacaacaacttcttccatttaaccaattggccgcactgaacctcgctgcttatttgcagcagcaaatattactaccatttagccagctagctgcagcaagccgtgcttccttcttgacacagcaacagttgctgcctttctaccagcagtttgcggctaaccccgcaaccctcttacaactacaacaattgttgccctttgtccaacttgctttgacaaacccagcagcctcctaccaacaacacatcattggtggtgccctcttttagattgcttattagttgtaattcaataataaagttttttg

SEQ ID NO: 388 - DNA, 429 bp, Zea mays
  unsure (1)..(429): unsure at all n locations; Clone ID: LIB3061-045-Q1-K1-B8
cccacgcgtccgcttaccaggagtaaatcttatatttgatggagccgaattacacccgtttgatattgctgcatgccttcaagcacgtcagcctctgtggcttatatctgaggcatcaactgcttcatcggcattactatgaggggttaattatgctccaatttctacaagttggccgatgaaatttcattagttggggttattcaaaagtattgtctgattcttagaagaacacaatagcgggctgatgctttgttcactataactgagttctttcacaggaattaatcagatgctcctggttaactgggatgcgcgttttgaagcttgtttactgcatcgtatgtttcttggccaatatcttactctacttttcactcgtgtgaaatttccaagtgcgtgctcctacttcaatattgngaatctttg

SEQ ID NO: 389 - DNA, 409 bp, Zea mays
  Clone ID: LIB3061-045-Q1-K1-B9
aatccattagcaacaatttagcatcaatgtcgaccaagatattttccggtgttatgcgccttgctctttctacatgagttgctaacgcgacatttttccctcaatgctcacacgctcctataactacccttgtttccccataccttacaccaattatagcttcagtatgtgaaaacccagctcttcaaccatataggctacaccaagcaatctcagcacgcaacatacctttatcgctcttgctgtttcaacattcaccagccctatcttcggagcactcattggcacaaaccatcagggcacaacagctgcaacaactcgtgctacctgtgaacaaccaagtatctctggcaaacctttctcactactctcagcaacaacaattttttacatacaaccaactgtctac

SEQ ID NO: 390 - DNA, 414 bp, Zea mays
  Clone ID: LIB3061-045-Q1-K1-C10
ggcatgcatttttacgggctattgggaggatgttggaacaatcaaatcattctttgatgcaaacttggccctcactgagcagccttccaagtttgatttttatgatccaaaaacacctttcttcactgcaccccgatgcttgcctccgacgcaattggacaagtgcaagatgaaagatgcatttatctcagatggttgcttactgagagaatgcaacatcgagcattctgtgattggagtctgctcacgtgtcagctctggatgtgaactcaaggactccgtgatgatgggagcggacacctatgaaactgaagaagaagcttcaaagctactgttagctgggaaggtcccagttggaataggaaggaacacaaagataaggaactgtatcattgacatgaatgctaagattgg

SEQ ID NO: 391 - DNA, 416 bp, Zea mays
  Clone ID: LIB3061-045-Q1-K1-C11
tgacaataatgtgaccatcaattatgaagaatttatcgctgcaactgtgcctcttagcgaaatagaacgtgaggagcacctgatggcagcttttacctacttcgacaaagatggaagtggttatatcacagttgacaagctgcaacgagcttgtggagaacatgacatggatgacactttccttgaagagataattttagaagttgaccaaaacaatgacggtcagattgactacgccgaattcgtagccatgatgcaaggcagcaaagttggacttgggtggcaacaaatggaaaccactctgaatgtaaccttgagagatgcacctcaagtacactgtcactgatgcgctcgccatgtacagattttgctctcttctcgtgttcatcgtttctccacacgacctgagagttccg

SEQ ID NO: 392 - DNA, 415 bp, Zea mays
  Clone ID: LIB3061-045-Q1-K1-C12
caacatagaaagcacaatagtgtaccaacaatggcagccaaaatattttgcttccttgtgctccttggtctttctgcaagtgctgctaccgcaaccattttcccacaatgctcacaagctcctatagcttcctttcttcccccatacctctcaccagcggtgtcttcagtatgtgaaaacccaattcttcaaccctacaggatccaacaggcaatcgcagcaggcatcttacctttatcacccttgttcctccaacaaccgtcagccctattacagcagttacctttggtgcatttgttggcacaaaacatcaaggcacaacaactacaacaacttgtgctaggaaaccttgctgcctactctcagcaacagcagtttcttccattcaaccaactggctgcattgaactctgctg

SEQ ID NO: 393 - DNA, 421 bp, Zea mays
  Clone ID: LIB3061-045-Q1-K1-C2
gcgagtggttcgagaccgacgcggtgctcagggtcagcctcggcaacttcctcttctgcaccatcgtcgccgtcatcatggccgggataaaggaccagaaggacccccgtgacaaggtccaccacggcggatggatggccaagatcttctgctgggtcgtcattgtcttcctcatgttcttcgtgcccaacggcgtcgtcagcttctatgaatctatatccaagtttggctctgggctgttccttctcgttcaggttgttctgctgttggattttgtgcacggatggaatgagaactgggtcgccaaggatgagcagttctggtacatggctctgttggttgtctcggttgtctgttacattgccacgttctgtttctcgggtcttctatttcactgggtcactccatctggacatgactg

SEQ ID NO: 394 - DNA, 433 bp, Zea mays
  Clone ID: LIB3061-045-Q1-K1-C3
gcaagttcactgcagcaacttttgcaaggaccttttctggtttacatgctagaggaatcgagcctggtgttctttatccagctgtctctgttgagcagtttcacgaaccccatgcttataagtaacttcatgcttgcatatctccttacatttaggttgaatttcctatcaatcaaccggtttgagaggaaaaagaatcttgatcttgccatttcagcatttgctttgctccgttctgctgcttggactatacctggtgatgctctacaagaagcaacattaacagtggcaggtggctatgataagcgtctcaaggaaaatgttgaataccttgaggaactcaaaagactcgcattgacggaaggggtttctggacaggttaaatttgttacatcttgctcaacatctgaaagaaacgagcttctctccaact

SEQ ID NO: 395 - DNA, 374 bp, Zea mays
  Clone ID: LIB3061-045-Q1-K1-C4
gcgagttcattgcgaccacactctgcatttaccttctttgctttacattctctattaagcaccattcgcgtctttaatacatctgtgattaatgaccagattcaccaacctcacacttatcaccaccttcattctatcatctatatctacatctaggtcgaaattgctatccttaaactcttctttacacaaaacataatcttcatctatcaatctatattcaactttgctctgatctgctccttcactataccttgttatgctgtacaataatctacactaatagaatcaaaacctctatcatccaaggattaacagatatgttacatacctctattaactgactcgactgtcttttacattaacactttctg

SEQ ID NO: 396 - DNA, 432 bp, Zea mays
  Clone ID: LIB3061-045-Q1-K1-C5
gggtcttcagaccattagctttatctactccagagcgcagaagaacccgatcgacaccatgagggtgttgctcgttgccctcgctctcctggctctcgctgcgagcgccacctccacgcatacaagcggcggctgcggctgccagccaccgccgccggttcatctaccgccgccggtgcatctgccacctccggttcacctgccacctccggtgcatctcccaccgccggtccacctgccgccgccggtccacctgccaccgccggtccatgtgccgccgccggttcatctgccgccgccaccatgccactaccctactcaaccgccccggcctcagcctcatccccagccacacccatgcccgtgccaacagccgcatccaagcccgtgccagctgcagggaacctgcggcgttggcagcaccccgatcct

SEQ ID NO: 397 - DNA, 412 bp, Zea mays
  Clone ID: LIB3061-045-Q1-K1-B12
cgcaagtgcatcagcctgaacagcgttggctttgatgtgaagcgggagatcttggtgggctctaagatgtcgtcatctgaacggcggtaccttcgaaagagattccgggcagagcttgattcggtgcgggatctcctcaagaagccagagtttgcagcccctgttcctctcaatcgggcacctgctttgtcatcctcagctgcacctcgagctaagaagccacagaagtctcagcgtggtgggaccaatgttatacgtggtgcaaagggacgattcttgcctacaaaaccgcggccggagacttccactgtgttatctgaagctgcagcgtttaagcagtgtgaagctattttgaagaagcttatgactcaaaagtatagtcatatattcaatgttccagttgatattgtga

SEQ ID NO: 398 - DNA, 419 bp, Zea mays
  unsure (1)..(419): unsure at all n locations; Clone ID: LIB3061-044-Q1-K1-H9
agcattcagaaacacaccaagcgaagctcattagcatcaacctaacaacaatggctacgaagatatgatccctccttgcgcttcttgcgctttttgcgagcgcaacaaatgcgttcattattccacaatgctcacttgctccaagttccattattacacagttcctcccaccagttacttcaatgggcttcgaacacccagctgtgcaagcctataggctacaacaagcaattgcggcgagcgtcttacaacaaccaatttcccagttgcaacaacaatccttggcacatctaacaatacaaaccatcgcaacgcaacagcaacaacaattcctaccagcactgagccacctagccatggtgaaccctgccgnctacttgcaacagcagttgcttgcatcaaacccacttgctctggca

SEQ ID NO: 399 - DNA, 431 bp, Zea mays
  Clone ID: LIB3061-045-Q1-K1-A1
attggagcgctttcttcagatgagtgatgacaacccttatgttatacctgagatggatccaacactgcggaagcaaatccagcagtgcaattggcaagtcgttaatgtaacaactcctgcaaattatttccatgttctgcgtcgccagatacaccgggactttaggaaacctttgattgtgatgtccccaaagaacctccttcgccacaaggactgcaagtcgaacttatctgaatttgatgatcttgcgggccaccctggattcgacaagcaagggacacgcttcaagcggctcattaaagaccagaataatcacaaggacctcgaggagggaattaaccgtctagttctttgctctggaaaggtgtactacgaactggatgaagaaagaaggaagacggagcgcactgatgttgctatatgtagagttg

SEQ ID NO: 400 - DNA, 414 bp, Zea mays
  Clone ID: LIB3061-045-Q1-K1-A10
ggtgatctcaagtaattaacagaaaatatattccatcattgaaaatgagttccgttgggttgggtgctactggtagggagaataagacatcatggcctgaggtggtgggcatgtccatcaaggaggcaagagagatcattcttaaagacatgcccaacgctaacattcaagttctaccggttggctcgcttgtgacccaagactttcgccctgatcgtgttcgcatcttcgttgatattgttgcccagactccaacagttggctgacaaggatatgccttatctataggccaaataaacaaagcctacttttatgtatcatggctaataaatcctacatttcttggttatccttgattggtttagcttattagctatatcgccatcaaaaggggccccaagaaattacatgtat

SEQ ID NO: 401 - DNA, 391 bp, Zea mays
  Clone ID: LIB3061-045-Q1-K1-A11
cctgtatcgattcccatcgctgcaacgtactgcttcatcaaaaagtggtaggagcagggaatatgtgggtaccaaatggtctgcaatgtttagcggagttgaaaagtacttagaggagaaaccgtggaaattcagtaaagcgaatgcaacagagaaggcgatggttgctggtttgggaggactcaatctctttggtgtcatcattcttggaaacttgttgaagcatatgacagtgacacctggtggactaatctcatttgccgcacagttatatcctttgcttcagatatacgctggctccttttttgcaatacctttgtttagatggtttctgctacgcaagaccatcaatggcattaaaaagaggaataaggccagagaacagagagct

SEQ ID NO: 402 - DNA, 396 bp, Zea mays
  Clone ID: LIB3061-045-Q1-K1-A12
gcaacaactactaccattcatccagctatctggtgtgagccctgctaccttcttgatggaaccacagttgttgccgttctaccagcacgctgcgcctaacgctggcaccctcttacaactgcaacaattgctgccattcaaccaacttgctttgacaaacccagcagcgttctaccaacaacccatcattggtggtgccctcttttagatttcttatgagttatagttcaataataaagttttttgtctgatgtttgtggcttcccagaaataagaaagtacatttctaaaaaaaaaataaaatataaaaatacatatggaaaaaaaaaaaaaagatacacaaaaacaacaataaaattaaaaaaaaataataaagacaaaaaacaaaagagctca

SEQ ID NO: 403 - DNA, 347 bp, Zea mays
  unsure (1)..(347): unsure at all n locations; Clone ID: LIB3061-045-Q1-K1-A2
cgatatggcaagaggccaagagctcttgcctacggtggagcagctgccgcagctggcgtcgtctcgccgtggcttgccgtgctcggtgtggccatgctctccgtctgggccatcacgctcgccatcttcctctgtggcgacagctcagacaacccgagaccaccaagatacaatcctgccgttagtgcggctatagcagctggtggcggagggggctgtggtggcggtggcggtggtggtggagggggctgtggtggctgatgcggtggtggagggggctgtcgcagccgcngcagcagcggatgctagagttcatcggatccgatgcaccagcgggcagcggcatc

SEQ ID NO: 404 - DNA, 434 bp, Zea mays
  Clone ID: LIB3061-045-Q1-K1-A3
gggaaagaaatcaggtggggtggagctgtaacagttcgccacggctaggctcctctcccctctcagctctcagctgcccctcctgcatgccgatcgcctccaagctcgtctacttccagcgccgcccggcgccggcgccgcctgacgacccgggtcccgagcctcccgacccccgccgcccccgccgccgccgccgcagcggctccctctcctcctctcaccagaagccggagcatgatgttccagggcaccaaagggatcacgctgctgcagccaagcctccggggccagtcggaaaggcagcagggcttcttcacacggcctccagcgcagggctttttcaccaccgcagcacgtcggagtcggaccacggccggctttccgacgccgtgcagcaggccagggaacggctccttcagaggctcggcagcgtg

SEQ ID NO: 405 - DNA, 452 bp, Zea mays
  unsure (1)..(452): unsure at all n locations; Clone ID: LIB3061-045-Q1-K1-A4
caacaagcaacatagaaagtggaatccagtagcaacaacagagcaacaatggcgaccgagatattttccctccttatgctccttgctctttctgcatgtgttgctaacgcgacaattttccctcaatgctcacaagctcctatagcttcccttcttcccccataccttccatcaatgatagcttcagtatgtgaaaacccagctcttcagccctataggctccaacaagcaatcgcagcaagcaacatacctttatcacccttgttgtttcaacaatcgccagccctatctttggtgcagtcattggtacaaaccatcagggcacagcagctgcagcaactcgtgctacctgtgatcaaccaagtagctcttggcaacctttnctcctactctcaggcaccacattttcttccattcaaccaactgtctacactgaaccctgctgcttattt

SEQ ID NO: 406 - DNA, 454 bp, Zea mays
  unsure (1)..(454): unsure at all n locations; Clone ID: LIB3061-045-Q1-K1-A5
ggtccggattcccgggctattattgtaggtgatcgtttgcttgttgcaaatgttggagattctagagctgttatttctaaaggaggacgggcgattgcggtttcaagggatcacaaacctgatcagacagatgagaggcaaagaattgaggatgcagggggctttgttatgtgggctgggacatggagagtgggtggcgttctcgctgtctctcgagcatttggtgataaactcttgaagccgtatgttgttgctgaccctgaaatcaaggaggaggtggtcgacagctccctcgaattcctcatccttgctagcgacggactctgggatgttgtcactaatgaggaagctgttgccatggtcaagcctatccaggacccccaggaagcagcaaacaagcttctcgaagaagcttcccgaaggggaagctccgataacatcacagntatcatcg

SEQ ID NO: 407 - DNA, 422 bp, Zea mays
  Clone ID: LIB3061-045-Q1-K1-A6
gtcgcgagggccgcccttttttttttttttttttttgtttttttttttggttttttggttttttttttttttttaaccgaatcaccgactttttctgggctaactgaaacgtttttttttcagggaaacgtcaagcagttgacagattaaacaaacagcaacaccacaaaccatataaaagtatggttaatgaaccagcatcagattttaaagaaacagcatcagataacgaaacggtcaggtagaaaccagacacaacggacttaacagggtaatccatgagttcaacagggcacaatggtcctcaaaagtccattcatacttgggacttgactggttatttaggtgataacgatttggggtccggcacattcaccagtttggccagcttttagccttgcttctagcccatggcaaacttc

SEQ ID NO: 408 - DNA, 429 bp, Zea mays
  Clone ID: LIB3061-045-Q1-K1-A7
cagaaacacaccaagcgaagcacattagcaacaacctaacaacaatggctaccaagagattatccctccttgcgcttcttgcgctttttgcgagcgcaacaaatgcgttcattattccacaatgctcacttgctccaagttccattattacacagttcctcccaccagttacttcaatgggcttcgaacacccagctgtgcaagcctataggctacaacaagcaattgcggcgagcgtcttacaacaaccaatttcccagttgcaacaacaatccttggcacatctaacaatacaaaccatcgcaacgcaacagcaacaacaattcctaccagcactgagccacctagccatggtgaaccctgccgcctacttgcaacagcagttgcttgcatcaaacccacttgctctggcaaacgtagttgcaaacc

SEQ ID NO: 409 - DNA, 412 bp, Zea mays
  Clone ID: LIB3061-045-Q1-K1-A9
tcggagaccaactagcaacatagaaagcacaatagtgtaccaacaatggctgccataatagtttgccttcttatgctccttggtctttctgcaagtgctgctactgcgaccattctactgtaatgctcgcaagctcctataacttaacttattgccccgtacctatcaccatcggtgtcttcagtatgtgaaaactacaattcttcaaccgatacaggatccaacaggcaatcgcagctggcatcttacctttatcaccctggttcctccaacaatcatcagccctattacaacagttacctttggtgcacttattgtcacaaaacatgatggcacagcatctacaacaacttgtgctagctaaccttgctgcctactctcagcaacagcagtttatttcattcatccaact

SEQ ID NO: 410 - DNA, 438 bp, Zea mays
  Clone ID: LIB3061-045-Q1-K1-B1
ccaacaagcaacatagaaagtggaatccagtagcaacaatagagcaacaatggcgacgaagatattgtccctccttatgctccttgctctttctacatgtgttgctaacgcgacaattttccctcaatgctcacaagctcctatagcttcccttcttcccccataccttccatcaattatagcttcaatatgtgaaaacccagctcttcaaccatataggcttcaacaagcaatcgcagcaagcaacatacctttatcgcccttgttgtttcaacaatcgccagccctatctttggtgcagtcattggtacaaaccatcagggcacaacagctgcagcaactcgtgctacctctgatcaaccaagtagctctggcaaacctttctccctactctcagcaacaacaatttcttccattcaaccaactgtctacactgaa

SEQ ID NO: 411 - DNA, 399 bp, Zea mays
  Clone ID: LIB3061-045-Q1-K1-B10
tatcaactacccacactaattttacaattttctccctacaatgactcctcgggcacatggcctacttatgctgcttgggggctctacacctgcttctactacagatcattttcccacaatgctcacaagctcctatagcttcccttcataacctcattcctctcacctaccgtatcttatatctatgaaaacccaattattcatctctataagacccatctctcaatcacagcatctatctaacctacataaccctttctcctcctacaatcatcctacctatcacagcacttacattacatgcacttattgtcacataccttcatgactaatcttctacaacaactcttgctacctcacaccgctgaactactctcagcctctgctgcttatttcatt

SEQ ID NO: 412 - DNA, 418 bp, Zea mays
  Clone ID: LIB3061-045-Q1-K1-B11
cgcgcacccggttccgcgtgcctttccccacctactctcgcggctctcgccagccaggctagggtttcggtcccggcgtgcttatccgcccccgccggccatgtcgaagcaaggagggaaggccaagccgctgaaggcgcccaaggccgacaagaaggagtacgacgagacggatcttgcatatctgcagaagaagaaagatgaggaaaaagcactgaaggagcttaaggccaaggcacagaagggcgcgattgggggctcgggtctgaagaaaagtggaaagaaatgagactggtcacccgtctccaatacctagaggatgataaggcagctgtctatctgtgttgcgcttcactaagtgtgattgtaacagtggtacctcttgtgttctgtgttccgcgatgttgcagttggttgc

SEQ ID NO: 413 - DNA, 446 bp, Zea mays
  Clone ID: LIB3061-044-Q1-K1-H8
gcgaccattttcccacaatgctcacaagctcctatagcttcccttcttgccccgtacgtctcaccagcggtgtcttcggtatgtgaaaacccaattcttcaaccctataggatccaacaggcaatcgcagctggcatcttacctttatcacccttgttcctccaacaatcatcagccctattacagcagttacctttggtgcatttattggcacaaaacatcagggcacaacaactacaacaacttgtgctagcaaaccttgctgcctactctcagcaacaacagtttcttccattcaaccaactagctgcattgaactctgcttcttatttgcaacaacaacaactaccattcagccagctatctgctgcctacccccagcaatttcttccatttaaccaactgacagctttggaactcttctgcttatttacagcagcaacaac

SEQ ID NO: 414 - DNA, 255 bp, Zea mays
  Clone ID: LIB3061-049-Q1-K1-G10
tcgcgtcaggtcaatggtccgcccaataattaaactagatggtggagtggagctttgttttgagatgatgcgggcaacttttatgtgttagaacattgtactcaactgatgcttgtggccgttgaacctattatacttacttttggatttaagttaaggatagttaaaaatatttgatgttgaatacttgtgttggatgttatatgtgtcaattctatgtggatgctagaaaagttgtgtaagaaacataccttt

SEQ ID NO: 415 - DNA, 246 bp, Zea mays
  Clone ID: LIB3061-049-Q1-K1-G11
cgtaaggtcaatggtccgcccaataattaaactacattgtggagtggatctctactttgatatggtgcaggcatcttttatgtgtcatatcattgtactcaactgatgcttgtggccgttgaacctattatacttacttatggatttaagttaatgatagttaataatatttgatgtttaatacttgtgttggatgtcatatgtgtcaatactatgtcgatgctacaaaagctgtgtaaacaacat

SEQ ID NO: 416 - DNA, 417 bp, Zea mays
  Clone ID: LIB3061-049-Q1-K1-G12
agaccattagctgtatctactccagagcgcagaagaacccgatcgacaccatgagggtgttgctcgttgccctcgctctcctggctctcgctgcgagcgccacctccacgcatacaagcggcggctgcggctgccagccaccgccgccggttcatctaccgccgccggtgcatctgccacctccggttcacctgccacctccggtgcatctcccaccgccggtccacctgccgccgccggtccacctgccaccgccggtccatgtgccgccgccggttcatctgccgccgccaccatgccactaccctactcaaccgccccggcctcagcctcatccccagccacacccatgcccgtgccaacagccgcatccaagcccgtgccagctgcaaggaacctgccgcgttggcagcaccc

SEQ ID NO: 417 - DNA, 176 bp, Zea mays
  Clone ID: LIB3061-049-Q1-K1-G2
attatggaatgcttaacaattgtccgtatatttgaaaagagtcatctgttaagcaaattgtgtccagaaaccaatggatccccaaacgatttctgctcgtctcttttctacaactccaatcaatccacagttcacttatgttgcagccccatgacccagttatttcaaaaatgtta

SEQ ID NO: 418 - DNA, 389 bp, Zea mays
  unsure (1)..(389): unsure at all n locations; Clone ID: LIB3061-049-Q1-K1-G3
attgagaccaactagcaacatagaaagcacaatagtgtaccaacaatggcagccaaaatatttggcctgcttatgctccttggtctttctgcaagtgctgctacggcgaccattttcccgcaatgctcgcaagctcctatagcttcccttcttcccccgtacctctcaccagcggtgtcttcggtatgtgaaaacccaattcttcaaccctacaggatccaacaggcaatcgcagctggcatcttacctttatcacccttgttcctccaacaatcatcagccctattacaacagttacctttggtgcatttattggcacanaacatcanggcacaacaactacaacaccttgtgctagcaaaccttgctgcctactctcagcaacagca

SEQ ID NO: 419 - DNA, 454 bp, Zea mays
  Clone ID: LIB3061-049-Q1-K1-G4
gtgatttcaggtggcgcgcctggcaagcataaaatccagggagtaggcccaaggtttctacctggaggtgtggacacctcggtcatcgacgagaccgtcaccgtgagcaccgaagaagccatggcgaatgcgaagaggcttgccaaggaagaaggcctgctcgtgggcatttctttcggagcaaacctggcagcttgtttgaaaggtcgtttcagacaagagaacaagggcaagattaatcgtactgtgtttccaaatgggggggagagatacattaacttcgaactctttgcacatatgccagaagagtgcattggcatgacattttgagctttcctttttcttttggacactttggtctgaatggtgtcagcattcttcacaccacacagacatattttcaggacatggtgttgtaaatttagagaaatatgtgacatgctttctacatatt

SEQ ID NO: 420 - DNA, 371 bp, Zea mays
  Clone ID: LIB3061-049-Q1-K1-G6
atcccactaccacccatctcgtcgttcgccgattcgatccggttcttccaacccagggggtgggggggcgacgaagaggagcgtgggcaccctcggcgaggcggatctgaacgtgaagaaggtgttcgtgcgcgccgacctcaacgtacctctcgacgacgcccagaagatcaccgacgacacccgcatccgcgcctacgtccccaccatcaagttcctcctcgagaaaggcgccaaggtcatcctcgccagccacctgggtcgtccaaaaggtgttaccccaaagtacagcttgaaacctcttggtccacgcttgtctgagcttcttggagttgaagtcgtgatggccaatgattgcattggtgaggaag

SEQ ID NO: 421 - DNA, 458 bp, Zea mays
  Clone ID: LIB3061-049-Q1-K1-G8
cgccctcgttatttacatcgctgccaccctcctctccgccgtcgccgccgccgccggggatggggggagcgcaattccccggcgacaacgacgtcgcggaagtagacgcggcccgcgacggagaggtggaccgccgtgacgtgggcaagatgaagcacgggtgcgagcattaccggcggaggtgcaagatcgtggcaccgtgctgcaaccaggtgttcccctgccgccactgccacaacgaggctacggcttccggagatcggcatacaatatgtcgtcaggatgttgaaaaagtagtttgcctactctgtgaaacaaaacagccggtgtcacaagtgtgcataagctgtggagtcaatatgggagagtacttttgtgatatatgcaaattttatgatgatgatacagacaaagggcagtaccattgcatcgattgtggcatatgcagggttggtggc

SEQ ID NO: 422 - DNA, 341 bp, Zea mays
  Clone ID: LIB3061-049-Q1-K1-G9
aacaagcaacatagaaagtggaatccagtagctacaatagagcaacaatggcgaccaagatattggccctccttatgctccttgctctttctacatgtgttgctaacgcgacaattttccctcaatgctcacaagctcctatagcttcccttcttcccccataccttccatcaattatagcttcaatatgtgaaaacccagctcttcaaccatataggcttcaacaagcaatcgcagcaagcaacatacctttatcgcccttgttgtttcaacaatcgccagccctatctttggtgcagtcattggtacaaaccatcaaggcacaacagctgcagcaactc

SEQ ID NO: 423 - DNA, 473 bp, Zea mays
  unsure (1)..(473): unsure at all n locations; Clone ID: LIB3061-049-Q1-K1-H1
ctcacacgcacgaagcatcagcagtggactggactagctctaggtgggcaacatgaagcttcagaccaccgtcaccgttgctggcctcctcctcttcctcctcctcctggcgctgccttccctccgcgtctccatggctggatcagggttctgcgacggcaagtgcgcggtgaggtgctccaaggcgagccggcacgacgactgcctcaagtactgcgggatctgctgcgccacctgcaactgcgtgccgtccgggaccgcgggcaacaaggacgagtgcccatgctaccgcgacatgaccaccggacacggcaaccgcaccaggcccaagtgcccctgatgatattcattccttcgctctgtcttgcatgcgtatgtaatgtataggctgtgcaatgcatgcatacatgatacatgccgtgactctggatcggcggatgcctatgcatgcttttcactagctnaatatacta

SEQ ID NO: 424 - DNA, 355 bp, Zea mays
  Clone ID: LIB3061-049-Q1-K1-H10
ctacatagaaagtataatccattagcaacattagatcaacaatggcgaccaagatattttcccgccttgtgctccttgctctttctacatgtgttgctaacgcgacaattttccctcaatgctcacaagctcctatagcttcccttcttcccccataccttccatcaattatagcttcagtatgtgaaaacccatctcttcaaccatatatgcttcaacaagcaatcgcagcaagcaacatacctttatcgcccttgttgtttcaacaatcaccagccctatctttggtgcagtcattggtacaaaccatcatggcacaacagctgcagcaactcatgctacctgtgatcaacca

SEQ ID NO: 425 - DNA, 356 bp, Zea mays
  Clone ID: LIB3061-049-Q1-K1-H11
cccacgcgtccgtagcaacatagaaagcacaatagtgtaccaacaatggcagccaaaatattttggctcggtatgctccttggtctttctgcaagtgctgctacggcgaccattttcccgcaatgctcgcaagctcctatagcttcccttcttcccccgtacctctcaccagcggtgtcttcggtatgtgaaaacccaattcttcaaccctacaggatccaacaggcaatcacagctggcatcttacctttatcacccttgttcctccaacaatcatcagccctattacatcagttacctttggtgcatttattggcacaaaacatcaaggcacaacaactaacacaacttgggct

SEQ ID NO: 426 - DNA, 368 bp, Zea mays
  Clone ID: LIB3061-049-Q1-K1-H12
ctcctaatgtttctccagcaaatggtgaagcatcaagccccaagaagcagagcccaaacaggagcccatgtggctcacgctctcctgatgcgaagcctgaataaaattgctatgctgttaaaggattgcagatggagtcaggagctcttcttttcttaacatttgtcctctgttctagtaccatcagtgtcttatcgcagtacgagattggatgatattaactatctgtatcagcttgtatcgatggactccaagtgttgtcactcttgttgtctagtgtgctgaaggacccatttacttttgctaaacttttccattggtgattgttggatgaaaaactacaacaacttgtgctaacaaaccttgct

SEQ ID NO: 427 - DNA, 425 bp, Zea mays
  unsure (1)..(425): unsure at all n locations; Clone ID: LIB3061-049-Q1-K1-H3
caacatgcaacattgaaagtggaatacagtagcaaaaatagagcaacaatggcggccaagataggttgcatccttatgctcctagctctttctgcatgtgttgctaacgcgaccatacttcctcaatactcacaagctcctatagctgcccttcttccgccataccttccatcaatgaccgctttaatatgtgaaaacccagcccttcaaccctacaggatccagcaagcaatcgcaacaagcaacttacctttatcacacctgttctttcaacagtcgccagccctatctttggtgcaggcattggtacaaaccatcagggcagaacagttgcagcaactcgtgctaccagtgatcagtcaagtagctctggcaaacctttccccctactctcagcaacaacaatntcttgcattcaaccaact

SEQ ID NO: 428 - DNA, 222 bp, Zea mays
  Clone ID: LIB3061-049-Q1-K1-H4
acgcagacggcgagcagaacacacctgcagctgcagaaatagggtcatgtcctgctagcttgaaagctctggtacggagtagcaaggtacggtagagagagagagagtagcaaactagctaaggcacagggcagggcatgggccggctgcattatattgggatcggatctgggggcgaccgagctagcatcagctgagagaagaaagaggggcaatatataa

SEQ ID NO: 429 - DNA, 309 bp, Zea mays
  Clone ID: LIB3061-049-Q1-K1-H5
ctcataatgttcctccaacaaatggtgaactttcaagccccaacaagcagagcccaaagaggagcccatcttgttcacgctcttctgatgccaagcctgaataaaattgctattctgttaaacgattgcatatggagtcaagagctcttcttttcttaacatttgtactctgctctactaccatcatagtctcatcgcagtacgagattgcatgatattaactatctgcatcagcttgtatcgatggactccaaatgttgcatctctcgttgactagagcactgaacgacccatttactttagctaaac

SEQ ID NO: 430 - DNA, 375 bp, Zea mays
  Clone ID: LIB3061-049-Q1-K1-G1
cccgtgcgtcgcgcagtcgcgagaggtggtggtttcaggggattatggaatgcttaacaagttttccaagaaatgttggaaaagagtacatctgttcaagcaagttggtgtccggaaaccaatggatccccaaaaggatttgctgctacgtctcttgttcgacaaactccagtcgatgccacaagttcactgatgtggcatgccccatgagcccagttattcgaaaaaggttacgctggagatgctttgctgcaagtttgaacttagaagatggccctgcaccctctgactcgacgtcatcttcatcagagcagactactgatgctgatggaactactaatggtgatgtatctgaaaatctgctttctcgaaagc

SEQ ID NO: 431 - DNA, 345 bp, Zea mays
  Clone ID: LIB3061-049-Q1-K1-E7
ttttcagcattcaaaaacacaccaagcgaagcgcactagcaacgacctaacaccaatggctacgaagatattagccctccttgcgcttcttgcccttttagtgagcgcaacaaatgcgttcattattccacagtgctcacttgctcctagtgccattattccacagttcctcccaccagttacttcaatgggcttcgaacatccagccgtgcaagcctacaggctacaactagcgcttgcggcgagcgccttacaacaaccaattgcccaattgcaacaacaatccttggcacatctaaccctacaaaccattgcaacgcaacaaccacaacaacaaccgtttct

SEQ ID NO: 432 - DNA, 447 bp, Zea mays
  Clone ID: LIB3061-049-Q1-K1-E8
cgaagcgcactagcaacgacctaacaccaatggctaccaagatattagccctccttgcgcttgttgcccttttagtgagcgcaacaaatgcgttcattattccacagtgctcacttgctcctagtgccagtattccacagttcctcccaccagttacttcaatgggcttcgaacatccagccgtgcaagcctacaggctacaactagcgcttgcggcgagcgccttacaacaaccaattgcccaattgcaacaacaatccttggcacatctaaccctacaaaccattgcaacgcaacaacaacaacaacaagttctggcatcactgaaccaacctacccgtgtgaaaccctgtcacctacttgcaacagcagctgcttgcatccaacccacttgctctggcgaacgtagctgcttaccagcaacaacaacagcttgcacagtttatg

SEQ ID NO: 433 - DNA, 316 bp, Zea mays
  Clone ID: LIB3061-049-Q1-K1-E9
ctccttatgcgcgttggtctttctgcaagtgctgctacggcgaccattttcccgcaatgctcgcaagctcctatagcttcccttcttcccccgtacctctcaccagcggtgtcttcggtatgtgaaaacccaattcttcaaccctacaggatccaacaggcaatcacagcttgcatcttacctttatcacccttgttcctccaacaatcatcagccctattacatcagttacctttggtgcatttattggcacaaaacatcagggcacaacaactaccacaacttgggctaacaaaccttggtggctaattttaac

SEQ ID NO: 434 - DNA, 407 bp, Zea mays
  Clone ID: LIB3061-049-Q1-K1-F1
agaccaactagcaacatagaaagcacaatagtgtaccaacaatggcagccaaaatattttgcctccttatgctccttggtctttctgcaagtgctgctacggcgaccattttcccacaatgctcacaagctcctatagcttcccttcttcccccgtacctctcaccagcggtgtcttcggtatgtgaaaacccaattcttcaaccctataggatccaacaggcaatcgcagctggcatcttacctttatcacccttgttcctccaacaatcatcagccctattacagcagttacctttggtgcatttattggcacaaaacatcagggcacaacaactacaacaacttgtgctagcaaaccttgctgcctactttcagcaacaacagtttcttccattcaaccaacta

SEQ ID NO: 435 - DNA, 438 bp, Zea mays
  Clone ID: LIB3061-049-Q1-K1-F10
gacctgaagaaactccgaccggccggtgggcggtggcggcagccggcaggatctgtgccgcgatggcgacgtcgaacacggcgcggatggaggacggcggcggcgacctgcggagcaccatgaagaagtggaatatcatctaccctgtctacctcaactccaagaagacggtcgccgagggccgccggatcgacgatgccaaggcctgcccggaccccacctgcatcgagatcgctgactgctgttcgcacctcatgatcccccacgccatcgagttggataacgcgtaccctcgggatttcttccaggtggggagggtcagggtgcagcttaagaaagatgacggcttcgccgtcaatcctgctattaaaacgaagaagcagctgatgatccaagtagcagagctagttcccaagcatcacggaacgacaaagaagc

SEQ ID NO: 436 - DNA, 428 bp, Zea mays
  Clone ID: LIB3061-049-Q1-K1-F11
gcaacatagaaagcacaacagtgtaccaacaatggcagccaaaatattttgcctccttatgctacgggggctttctgcaagtgctgctacggcgaccattttcccgcaatgctcgcaagctcctatagcttgccttcttccaccgtacctatcaccagcggagtcttacgtatgtgaaaacccaattcttcaaccctacaggatccaacaagcaatcgcagctggcatattacctttatcacccttgttacttcaacaatcatcaggcctattacaacagttacctttggtgcatttattggcaccaaacatcaaggctcaacaactaccacaacttgtgctaacaaaccttggtggctactgttagcaacagcaggttccttcattcgacccacttggctcattgaactccgcttcttaattgcaac

SEQ ID NO: 437 - DNA, 361 bp, Zea mays
  Clone ID: LIB3061-049-Q1-K1-F12
gcaacatagaaagcacaatagtgtaccaacaatggcttccaaaatattttgcctccttatgctaggggggctttctacaagtgctgctacggcgaccattttcccgcaatgctcacaagctcctatagcttcccttcttcccccgtacctatcaccagcggcgtcttacgtatgtgaaaacccaattcttcaaccctacatgatccaacaggcaatcgcagctggcatattacctttatcacccttgttccttcaacaatcatcagccctattacaacagttacctttggtgcatttattggcacaaaacatcaaggcacaacaactacaacaacttgtgctagcagaccttgctgcctac

SEQ ID NO: 438 - DNA, 459 bp, Zea mays
  Clone ID: LIB3061-049-Q1-K1-F2
gcaacatataaagcacaatagtgtaccaacaatggcagccaaaatattttgccttcttatgctgcttggtctttctgcaagtgctgctacggggaccattttcccgcaatgctcgcaagctcctataagttcccatctttccccgtacctctcaccagctgtgtcttcggttgggaaaacccagttcttcaaccctacaggatccaacaggcaatcacagctggcatcttacctttatcacccttgatcctccaacaatcatcagccctaatacatcagttacctttggtgcatttattggcacaaaacatcagggcacaacaactacaacaacttgtgctagcaaaccttggtgcctactcttagcaacagcagtttcttccattcaaccaactagctgcattgaactctgcttcttatttgcaacaacaacaactaccattcagccagctacctgct

SEQ ID NO: 439 - DNA, 327 bp, Zea mays
  unsure (1)..(327): unsure at all n locations; Clone ID: LIB3061-049-Q1-K1-F4
ctccgcagtgcctctgctctcgaggtggcggcgctccctcctgtcttcctcttcttcttcctgtactatatagcctccggtcgcggatcgtcactgacgagtgatgtcattccgcttgcttgattgttccacatattcgcagttgaccgggtcctcggagcacgatgaagtttgttgctgcctacttgcttgctgtcctcgctgggaacgccagcccctccgctgaagatttgactgccattctggagtcagttggctgtgaagttgacaatgaaaggatggaactcctgctgtcccaactgagncgcaatgacatcaccgagctca

SEQ ID NO: 440 - DNA, 445 bp, Zea mays
  Clone ID: LIB3061-049-Q1-K1-F5
gaccattagctttatctactccagagcgcagaagaacccgatcgacaccatgagggtgttgctggttgccctcgctctcctggctctcgctgcgagcgccacctccacgcatacaagcggcggctgcggctgccagccaccgccgccggttcatctaccgccgccggtgcatctgccacctccggttcacctgccacctccggtgcatctcccaccgccggtccacctgccgccgccggtccacctgccaccgccggtccatgtgccgccgccggttcatctgccgccgccaccatgccactaccctactcaaccgccccggcctcagcctcatccccagccacacccatgcccgtgccaacagccgcatccaagcccgtgccagctgcagggaacctgcggcgttggcagcaccccgatccctggccagtgcctcgagtttctg

SEQ ID NO: 441 - DNA, 352 bp, Zea mays
  Clone ID: LIB3061-049-Q1-K1-F6
cccacgcgtccgccgcaaccctcttacaactgcaacagttgctgccctttgtccaacttgctttgacaaacccagcagccttctaccaacaacacatcattggcggtgccctcttttagattgcttattagttgtaattcaataatgaagttttttggctgatgtatgtggcctcctagaaataagaagttatatttccaaaaaacaaatacaaacgacagtacaactgacaacgacagaacaaactgacaacgacagtccatgtgccgacgacggttcatctgccggcgacaccatgccactaccctacttaaccgacccggcctaaaaaaaaaaggggggccctttttaa

SEQ ID NO: 442 - DNA, 413 bp, Zea mays
  Clone ID: LIB3061-049-Q1-K1-F7
aacagcaacatattatagcactctgcagccgggatccatgtggctaaacatcatggcataaagttctcggcagtaagaggcagcagcaataattcctccacaaacttctaacttcagaaatataaagtaacacttaggccagcattcggccgttctccaaatcaaaaacttattcttcctcctcagcctcctcgagccatttgacaaacggctccagagctttcacgaaagattgcctgcccttctggtttgaacctttacggaaccaaagcaggacagtatcttcagctaggacatcttggtcatacagtgttcttatgatttcaggaaacagcttcatcagcttagcatcctcatagcactgtgtctgtactttgtatataagttccagttcgagtctgccactcgtgcaa

SEQ ID NO: 443 - DNA, 422 bp, Zea mays
  Clone ID: LIB3061-049-Q1-K1-F8
cactgaaccccgctgcttatttgcagcagctaatactactaccatttagccagctagctgcagcaaaccgtgctttcttcttgacacagcaacagttgctgcctttctaccagcagtttgcggctaaccccgcaaccctcttacaactacaacaattgttgccctttgtccaacttgctttgacagacccagcggcctcctaccaacaacacatcattggtggtgccctcttttagattgcttattagttgtaattcaataataaagtattttggatgatgtatgtggccaaccagatataagatgttacatttccaaaagatattatgatttcaggaaacagcttcatcagcttaacattctcatagcactgtgtctgtactttgtatataagttccatttcgagtctagcactcgtgcaa

SEQ ID NO: 444 - DNA, 420 bp, Zea mays
  Clone ID: LIB3061-049-Q1-K1-F9
cccacatcagtagtcgaccaagcacaagcagcagagccggccggaatatgtggacgatcaggaaggtggcgacgccgcatgtggccgtcctcctgctgctcctcatcgtcgttgcgcatgaggcggcgccgttggcggaggcgcgcgtgtgccggcgccggagcgcgggcttcaagggggtctgcatgttcgaccacaactgcgcgcaagtgtgcttgcaagagggctacggcggcggcaactgcgacggcatcatgcgccagttcaagtgcatcaaggagtgctaactagctaggctctaagatctaaccagctagctatatccgcctttaattaaattaataaggatcgacgtcgtggccggtcgctaaatatgtactactatacgtctacactacatgcaataatgcaccacatgta

SEQ ID NO: 445 - DNA, 408 bp, Zea mays
  Clone ID: LIB3061-049-Q1-K1-E6
caacaagcaacatagaaagtggaatccagtagcaacaatagagcaacaatggcgaccaagatagtttccctccttatgctccttgctctttctgcatgtgttgctaacgcgacaattttccctcaatgctcacaagctcctatagcttcccttcttcccccataccttccatcaatgatagcttcagtatgtgaaaacccagctcttcaaccctataggctccaacaagcaatcgcagcaagcaacatacctttatcacccttggttcaacaatcgccagccctatctttggtgcagtcattggtacaaaccatcaaggcacagcagctgcagcaactcgtgctacctgtgatcaaccaagtagctctggcaaacctttctccctactatcagcaacaacaatttctt

SEQ ID NO: 446 - DNA, 439 bp, Zea mays
  Clone ID: LIB3061-049-Q1-K1-D10
gcgaagcgcactagcaacgacctaacaacaatggctaccaagatattagccctccttgcgcttcgtgccctttttgtgagcgcaacaaatgcgttcattattccacaatgctcacttgctcctagtgccattattccacagttcctaccaccagttacttcaatgggcttcgaacacctagctgtgcaagccaacatgcaacaacaagcgcttgcggcgagcgtcttacaacaaccaattgcccaattgcaacaacaatccttgccacatctaacaatacaagccatcacaacgcaacagcaacaacagttcctaccagcactgagccacctagccatggtgaaccctgccggctacttgcaagagcagctgcttgcatccaacccacttgctctggcgaacgtagttgcaaaccagcaacatcaacagctacaacagt

SEQ ID NO: 447 - DNA, 319 bp, Zea mays
  Clone ID: LIB3061-049-Q1-K1-D11
cccacgcgtacggcggcagcagtgttgccagcagctcacgcaggtggagccgcagcaccggtacgaggcgatcttcggattggtcctccagtccatcctgcagcagcagccgcaaagcggccaggtcgcggggctgttggcggcgcagatagcgcagcaactgacggcgatgtgcggcctgcagcagccgactccatgcccctacgctgctgccggcggagtcccccactgaagaaactatgcgctgtagtatagccgctggctagctagctagctgagtcatttatcggcgatgatcgggtaataatgtgtcacgcat

SEQ ID NO: 448 - DNA, 389 bp, Zea mays
  Clone ID: LIB3061-049-Q1-K1-D12
gaccaactagcatcatagaaagcacaatagtgtaccaacaatggcagccaaaatattttgcctacttatgctccttggtcgttctgcaagtgctgctacggcgaccattttcccgcaatgctcgcaagctcctatagcttcccttcttcccccgtacctctcaccagcggcgtcttcggtatgtgaaaacccaattcttcaaccctacaggatccaacaggcaatcgcagctggcatcttacctttatcacccttgttcctccaacaatcatcagccctattacaacagttacctttggtgcatttattggcacaaaacatcagggcacaacaactacaacaacttgtgctagcaaaccttgctgcctactctcagcaacagcagtttc

SEQ ID NO: 449 - DNA, 312 bp, Zea mays
  Clone ID: LIB3061-049-Q1-K1-D2
caacagttatgacaactgtccatgaagatttgacctgtgcgatgcatactatcttaggtatcaggggatgcctgagtttgaccacgcaatgcaacattttgaccctaaatatgaatgcacgacatttgatcaccactatatctcccgctaccatgcagacgactacgtgattgctacccacagagggagacttgcattcagccgactaacttccactgcactatcatgtatattgactaccgcatcgctagctaaatgcctgcagtgtataaggtgtgatcgtactacgacgcttgactatccacaggattt

SEQ ID NO: 450 - DNA, 458 bp, Zea mays
  Clone ID: LIB3061-049-Q1-K1-D4
attttcagcattcaaaaacacaccaagcgaagcgcactagcaacgacctaacaccaatggctagcaaggtattagccctccttgcgcttcttgcccttttagtgagcgcaacaaatgcgttcattattccacagtgctcacttgctcctagtgccattattccacagttcctcccaccagttacttcaatgggcttcgaacatccagccgtgcaagcctacaggctacaactagcgcttgcggcgagcgccttacaacaaccaattgcccaattgcaacaacaatccttggcacatctaaccctacaaaccattgcaacgcaacaacaacaacaacaacagtttctgccatcactgagccacctagccgtggtgaaccctgtcacctacttgcaacagcagctgcttgcattcaacccacttgctttggcgaacgtagctgcataccagcaacaacaa

SEQ ID NO: 451 - DNA, 395 bp, Zea mays
  Clone ID: LIB3061-049-Q1-K1-D5
attatgtagaccaactagcaacatataaagcacaatagtgtaccaacaatggcagccagaatattttgcctccttatgctccttggtatttctgcaagtgctgctacggcgaccattttcccgcaatgctcacaagctcctatagcttcccttcttcctccgtacctctcaccagcggtgtcttcggtatgtgaaaacccaattcttcaaccctacaggatccaacaggcaatcgcagctggcatcttacctttatcacccttgttcctacaacaatcatcagccctattacaggaattacctttggtgcctttattggcacaaaacattagggcacaaccacttccacaacttgtgctagcaaaacttggtggctaattttaacaaccacagtt

SEQ ID NO: 452 - DNA, 453 bp, Zea mays
  Clone ID: LIB3061-049-Q1-K1-D6
gaagaacccgatcgacaccatgagggtgttgctcgttgccctcgctctcctggctctcgctgcgagcgccacctccacgcatacaagcggcggctgcggctgccagccaccgccgccggttcatctaccgccgccggtgcatctgccacctccggttcacctgccacctccggtgcatctcccaccgccggtccacctgccgccgccggtccacctgccaccgccggtccatgtgccgccgccggttcatctgccgccgccaccatgccactaccctactcaaccgccccggcctcagcctcatccccagccacacccatgcccgtgccaacagccgcatccaagcccgtgccagctgcagggaacctgcggcgttggcagcaccccgatcctgggccagtgcgtcgagtttctgaggcatcagtgcagcccgacggcgacgccctactgctc

SEQ ID NO: 453 - DNA, 347 bp, Zea mays
  Clone ID: LIB3061-049-Q1-K1-D9
aagcttcctatagtcttcaccttcttcaccccgtatcctctcatccagcggtgtacttcggtatgtgaaaatcccatattcttcaactcctacaggtatccaacatggcatatcgcatgctggcatacttatcctttatcatcccttgttcctccaacatatcatcgagccctattacaatcagttactcttttggtgcatttaattggcacataaacatcatgggcacatacaactacatacaacttgtgctagcaaacgcttgctgcctactctcatcaacagcagtttcttccattcaaccaactaggttcattgaactctgcttcttatttgcaacaacaaca

SEQ ID NO: 454 - DNA, 435 bp, Zea mays
  Clone ID: LIB3061-049-Q1-K1-E10
cggacgcgtggggcgctgaagtgcagaatttaattcaacgcctccgtgtgatggagcagaaccagcagcagatgatggcacttttggcaattgttgtccagaatccagacttcctgaaccagctcgtgcagcagcagcgcaggagtaactggtggaatgatgatggtaacaggaaaagaaggttccaagctctggaacatggtcctgtagatgaccaagagacttctggtggaggcgcacaaattattcaatatcgtcctcctgttcctgaaacttccaatcagccaataccagcaaatgaagctttctattcaacccctgcacaaccagcttcaagccctgcacttgagatgcccatggatgtagagatgacttcaaacaatgttaatacctttgattcaactggcaatgattttactgacacctctgctctat

SEQ ID NO: 455 - DNA, 387 bp, Zea mays
  Clone ID: LIB3061-049-Q1-K1-E11
gaccaactagcaacatagaaagcacaatagtgtaccaacaatggcagccaaaatattttgcttccttatgctccttggtctttctgcaagtgctgctaccgcaaccattttcccacaatgctcacaagctcctatagcttcctttcttcccccatacctctcaccagcggtgtcttcagtatgtgaaaacccaattcttcaaccctacaggatccaacaggcaatcgcagcaggcatcttaccttaataaccctggttcctccaccacccgtaagccctattacagcagttaccttggggccattggttgccccaaaccatcaaggcccaccacctccaccacctggtgctaggaaaccttgctgcctactctaaccaccagcagtt

SEQ ID NO: 456 - DNA, 435 bp, Zea mays
  Clone ID: LIB3061-049-Q1-K1-E12
caacaatggcggccaagatattttccatccttatgctccttgctctttctgcatgtgttgctaacgcgagcatttttcctcaatactcacaagctcctatagctgcccttcttcccccataccttccatcaatgaccgcttcagtttgtgaaaacccagcccttcaaccctacaggctccaacaagcaatcgcaacaagcaacttacctttatcacccctgttctttcaacaatcgccagccctatctttggtgcagtcattggtacaaaccatcagggcacaacagctgcaacaactcgtgctaccagtgatcagccaagtagctctggcaaacctttctccctactctcagcaacaacaatttcttccattcaaccaactgtctacactgaaccctgctgcttatttacaacatcaacaactactaccattca

SEQ ID NO: 457 - DNA, 463 bp, Zea mays
  Clone ID: LIB3061-049-Q1-K1-E4
gccagctcatcgccaccgccctcctccgctcccgcgtcttcttcccctcgtcgtcgtcgggttggtgggtccacctctcgccgtgccccgccgtcgacccgcctcagaatcaaagataagtcaaaggaaaggtcggtatgcgccggtggttttgctgcacgaggtttaatgcttcataccgtgaacatgaaaatgaacgtcccatcactccagaggagaaagaaggaaatggttttttctgttaaaagtgatcccatcaaggcaccaccttccattgaaagtcctggaatatcaatttgagaaattgaaggaaagaaccgccattttgggtcaatggccttgaatggtgaaggggcatattggaaaagatataatgcaatcttggacaccggaaaccaggtggttgttaaaaagcttgacgctttaacagaccctgaacttgataatgagtttttgacacagg

SEQ ID NO: 458 - DNA, 359 bp, Zea mays
  Clone ID: LIB3061-049-Q1-K1-D1
gtgcatttattggcacaaaacatcagggcacaacaactacaacaacttgtgctagcaaaccttgctgcctactctcagcaacagcagtttcttccattcaaccaactaggttcattgaactctgcttcttatttgcaacaacaacaactaccattcagccagctacctgctgcctacccccagcaatttcttccattcaaccaactagcagcattgaactctcctgcttatttacagcagcaacaactactaccattcagccagctagctggtgtgagccctgctaccttcttgacacaaccacagttgttgccgttctaccagcaccttgcgcctaacgcttgcacccttttacaact

SEQ ID NO: 459 - DNA, 406 bp, Zea mays
  Clone ID: LIB3061-047-Q1-K1-E3
tcggcgccgctggagacgatccggacgcacttgatggtcggcagcatcggcgtcgactccagggccggggtgttccagtggatcatgcagaacgaagggtggaccggcctgtttcgcggcaacgccgtcaacgtactgcgcgtcgttccgagcaaggctatcgagcatttcacctatgacacgggcaacaagttcctaacccccaagggcgacgagccgtccaagatcccgatccccactacgatggttgccggagctctagccggattcgcctgaaccttgtgcacctaccccatggagctgatcaagaccagggtcaccatcgagaaggacgtatacgacaacgtctcgcacgcgttcgagaagatcctacgcgacgagggcccgtcggagctgtaccgtgggc

SEQ ID NO: 460 - DNA, 452 bp, Zea mays
  Clone ID: LIB3061-047-Q1-K1-E4
attgagaccaactagcaacatagaaagcacaatagtgtaccaacaatggcagctaaaatgttttgcctccttatgctccttggtctttctgcaagtgctgctacggcgaccattttcccacaatgctcacaagctcctatagcttcccttcttcccccgtacctctcaccaacggtgtcttcggtatgtgaaaacccaattcttcaaccctacaggatccaacaggcaatcgcagctggcatcttacctttatcacccttgttcctccaacaatcatcagccctattacagcagttacctttggtgcatttattggcacaaaacatcagggcacaacaactacaacaacttgtgctagcaaaccttgctgcctactctcagcaacagcagtttcttccattcaaccaactagctgcattgaactctgcttcttatttgcaacaacaacaact

SEQ ID NO: 461 - DNA, 254 bp, Zea mays
  Clone ID: LIB3061-047-Q1-K1-E5
atagtgagcattcagaaacacacaaagctaaacgccctagaaacgacctaacgtcaatgggtaccactatatttgctctacttgagctaattaccctttattagagcgaatcatatacgttcattattccacaatgctcacttgatcctaatgccattattccacaaatgcatgaaccagctacttcaatggactatgaacacctaactatgcaagcacatcatgagacaacaagcgcttgctgcaagcaactt

SEQ ID NO: 462 - DNA, 399 bp, Zea mays
  Clone ID: LIB3061-047-Q1-K1-E6
ttcttcgtcgacaagcaggggagttaggtctcacatgcatgcttcatcacattgttgagtgcataacgaaacacatcgtcgtcggatcggagatgatgagttccgtcgtcgtggatgctgctgctaccagcagcagcgagaagaagacgtcgtggccggaggtggtgggcatgtccatcaaggaggcgacggagactattctcaaggacatgcccaacgcgtacatccaggtgctgcctgttgggtcgcccgtgacgctggaccttcgccccgaccgcgtccgtatcttcgttgacaccgtcgccatgactccgacagttgggtgatacataccaaatgcaatagacaaaccctactttatattttatgctttcagctaataataaaccaggccttagc

SEQ ID NO: 463 - DNA, 77 bp, Zea mays
  Clone ID: LIB3061-047-Q1-K1-E7
cgtccggattcccgggagatttatctcgatcaatatattgattatttctaggacacacatctcagattcatgcctca

SEQ ID NO: 464 - DNA, 193 bp, Zea mays
  Clone ID: LIB3061-047-Q1-K1-E8
gcaacatttgttgccgttctacctgcacactgcgcctaacgttggcaccctcgtacaactgcaacaattgctgccattcgaccaacttgctttgacaaacccagcagtgttctaccaacaacccatcattggtggtgccctcttttagattgcttatgagttatagttcaataataaagttttttttgctgat

SEQ ID NO: 465 - DNA, 402 bp, Zea mays
  Clone ID: LIB3061-047-Q1-K1-E9
gcaacatacaaagcacaatagtgtaccaacaatggcagccaaaatattttgcctacttatgctccttggtctatctgcaagtgctgctacggcgaccattttaccgcaacgctcgcaagctcctatagcttcccttctttccccgtacctctcaccagcggcgtcttcggtatgtgaaaacccaattcttcaaccctacaggatccaacaggcaataacagatggcatcttacatctatcacccttgatccttcaacaatcatcatccctattacatcagttacctttggtgcatttattggcacacaacatcagggcacaaccactacaacaactcgtgctagcaaaccttgctgcctactctcagcatcagcagtttcttccattcaaccaactagctgc

SEQ ID NO: 466 - DNA, 391 bp, Zea mays
  Clone ID: LIB3061-047-Q1-K1-F1
cccaactatacaatcctacatgctacatgaggccatcgtagcaagcatcttacggtcatgagcattaaccctccaacagccatatgccctattgcaacaaccatccttagtgcatctgtatctccaaagaatcgcgacacaacaactacaacaacagttgctaccaacaatcaatcaagtagttgcagcgaaccttgctgcttatctccagcaacaacaatttcttccattcaatcaactagctggggtgaaccctgctgtctacttgcaggcacaacaactactaccatttaaccaacttgtcgggagccctgatgccttcttactgcaacaacagcttctgccattccatctgcaagctgtggaaaacattgcttctttcttgcgacaa

SEQ ID NO: 467 - DNA, 398 bp, Zea mays
  Clone ID: LIB3061-047-Q1-K1-F10
gcgctcaggctcgtgccgctcgtgggcgtacgctgcagcatgcgatcggatcagactgggaagcgaacaggccgcccgtggacgccatggcgccggatctggtgaacggcgtgctcaactgggtggggacgccggccatggtggccagcctgctgctcttctacccgtcctactatctcttcaagacatgctactccttcctttgctggctcttgcccgaggacctcgccggcaaggtcgacctcatcactggcgcttcctccggcatcggcgagcaactggcctaccagtacgcgctgaatcgggcgttccttgtcctcgtcgcgagaagggagtcgagcctacggcacgtggccgaccgagcactcgagctcggtgcgcgcgacgtcgtcgtcctc

SEQ ID NO: 468 - DNA, 389 bp, Zea mays
  Clone ID: LIB3061-047-Q1-K1-F11
tcgggaagagccaccgcagaaggcaggccaagaatgcacctcagagaagcaaaataacgtacggagtttggccagaatgtcagggtactggaattcacgtcaacggtgatgaactcgagaagcctagcatttctttatcacagatgtttcgcttgaagatgaaagcaattgaagctcacaaagcgtggctgaagagacctgaagcgcttgagaactcgaccactgagcttcatttcccctcagaacatgtggagaactctgaggagaacgcgttgccactcatatcactccgatgctatgccgctgatgggtacacagatcgttgatggcagctactggaggatgctgcagtcgtagacgttaatgagctctcttgacagctgtggaac

SEQ ID NO: 469 - DNA, 426 bp, Zea mays
  Clone ID: LIB3061-047-Q1-K1-F12
attctccctgctcatcggcggctactacgtagcactggggtaccatgagcttgaggccgggcacgagcacgtatccgtacaccgcgcttccgctgtctgctggcgacccgtacccttccactgtcactgctgccggacatggcgctgcgagcgtcgaaattacacaacggctacatgatggcactccgatgcacgtctaccagcaacgtgctcatgcctacgaggttcagcacgcagaacctgcgaccgttgaagcgcgtgatccttccagcctgaaagatcgatacttgggactggtaacaacacatgacactgagcctcacctccatggcgcatacctaccagcctgtgagacatctagctatcacgaacggtactgtattcgtgactatgggaacgattgcgtcgaacccaattgctacggat

SEQ ID NO: 470 - DNA, 416 bp, Zea mays
  Clone ID: LIB3061-047-Q1-K1-F2
gctgctcaccgtcccgctctgggcgcccgtagcggtactggcgctgctgacgggggccgcctcgctcgtcgcctgctgcgccggcctggccgcggtcgccgcgggcacgtgggcgcaccggtacttcacggggcgctactccgtcggcgcgcaccgggtgcagtccgccgatcagtacgcccgcgggggcacggtcgcggacgtggccagccgagtgagggggtactacgacgcctacgcgcgagagtacggcgggtacccgacgcgcccgcactctcgggtcaaggacgccgcgcccggggcgtaacgtagcttgtgtgtgctgagcggtctctccctctgtctctccctctctttgctccctcgtgctcacgtgctgtacatatgtttcgtcgatctagcagtcgtgtttcgct

SEQ ID NO: 471 - DNA, 445 bp, Zea mays
  Clone ID: LIB3061-047-Q1-K1-F4
gcggagtacgcgctgaagcagttcaacaacctcgacttcttcgacatctccctcatcgggggcttcaacgtgcccatgagcttcctcccggacggcgggtccgggtgcagccgcggcccgcgctgcgccgtggacgtgaacgcgcgctgccctgccgagctgcggcaggacggcgtgtgcaacaacgcgtgccccgtgttcaagaaggacgagtactgctgcgtcggctcggcggccaacgactgccacccgaccaactactccaggtacttcaaggggcagtgccccgacgcgtacagctaccccaaggatgacgccaccagcaccttcacctgccccgccggaaccaactacaaggtcgtcttctgcccgtgaggccgctgaactagcatcagcgtgcgcgcgtcgaccaagaacaagaaataaacgaccgaggctgtgtatg

SEQ ID NO: 472 - DNA, 447 bp, Zea mays
  Clone ID: LIB3061-047-Q1-K1-F5
attgagaccaactagcaacatataaagcacaatagtgtaccaacaatggcagccaaaatattttgcttccttatgctccttggtctttctgcaagtgttgctaccgcaaccattttcccacaatgctcacaagctcctatagcttcccttcttcccccatacctctcaccagcggtgtcttcaatgtgtgaaaccccaattgttcaaccctacaggatccaacaggcaatcgcaacaggcatcttaccattatcacccttgttcctccaacaaccgtcagccctattacagcagttacctttggtccatttggtggcacaaaacatcagggcacaacaactacaacaacttgggctagcaaaccttgctgcatactctcagcaacatcaagttcttccattcaaccaactggctggcatggactcttgtgcttaattgcaaccacca

SEQ ID NO: 473 - DNA, 438 bp, Zea mays
  Clone ID: LIB3061-047-Q1-K1-F6
cacgaatcgccgacactccaacccggaagagccaacgaggtgactccgcgccccggtcatgggtgacagccaatactccttctctcttaccactttcagcccgtcgggaaagcttgtgcagatagagcacgcgctcacggctgtcggatccgggcagacctccctagggatcaaagctgccaacggtgtagtgattgccaccgagaagaaactgccttctattttagtggatgaaacatctgtgcaaaagattcaggcactaacaccaaatattggagttgtctatagtgggatgggtccagattttcgtgttctggtgagaaaaagtcgaaagcaggcacagcagtattatcggttgtacaaggagcatatacctgtaacacagcttgtgcgggagactgctgctgtgatgcaggagttcacacagtcaggtggtgc

SEQ ID NO: 474 - DNA, 452 bp, Zea mays
  unsure (1)..(452): unsure at all n locations; Clone ID: LIB3061-047-Q1-K1-E2
attttgagcattcagaaacacacctagcgaagcgcactagcaacgacctaacaacaatggcttccaagacattatccctccttgcgcttcttgccctttttgtgagtgcaacaaatgcgttcattattccacaatgctcacttgctccgagtgccattattccacagttcctccctccagttacttcaatgggcttcgaacacccagctgtgcaagcctataggctacaacaagcgcttgcggcgagcgtcttagaacaaccaattgcccaattacaacaacaatccttggcacatctaaccatacaaaccatcgcaacgcagcagcaacaagcactgagccacctagccgtggtgaaccctatcgcctacttgcaacaacagctgcttgcattcaacccacttgcnttggcaaacgtagctgcataccaacaacaacaacagttgcaacag

SEQ ID NO: 475 - DNA, 445 bp, Zea mays
  Clone ID: LIB3061-047-Q1-K1-D10
agaccaactaccaacatagaaagcacaatagtgtaccaacaatggcagccaaaatattttgcctccttatgctccgtggtctttctgcaagtgctgctacggcgaccatttttccgcaatgctcgcaagctcctatagcttcccttcttaccccgtacctctcaccagcggtgtcttcggtatgtgaaaacccaattcttcaaccctacaggatccaacaggcaatcacagctggcatcttacctttatcacccttgttcctccaacaatcatcagccctattacatcagttacctttggtgcatttattggcacaaaacatcagggcacaacaactacaacaacttgtgctagcaaaccttgctgcctactctcagcaacagcagtttcttccattcaaccaactagctgcattgaactctgcttcttatttgcaacaacaaca

SEQ ID NO: 476 - DNA, 384 bp, Zea mays
  Clone ID: LIB3061-047-Q1-K1-D11
gctggtgtgagccctgctacttcttgatacaaccacagctgttgccgttctaccagcaggctgcgcgctaacgctggcaccctcttacaactgcaacaattgctgccattcaaccaacttgcttcgacaaacccagcagcgttctaccaacaacccatcattggtggtgccctcttttagatctcttatgagccatagttcaatcatacagttttttgactgatgtttgtggcttcccagaaataagaaagtccatgcttaaaaaaaaaagataccactattaccattcatccagacaaatactgactactctaaggctcaacaaatctcgtgcattcaaccaattggtcgctactatcacaagctgcttatttgcagcattca

SEQ ID NO: 477 - DNA, 425 bp, Zea mays
  Clone ID: LIB3061-047-Q1-K1-D12
aatcgcagcaagcaacatacctttatcgcccttgttgtttcaacaatcaccagccctatgtttggtgcagtcattggtacaaaccatcagggcacaacagctgcagcaactcgtgctacctgtgatcaaccaagtagctctggcaaacctttctccctactctcagcaacaacaatttcttccattcaaccaactgtctatactgaaccctgctgcttatttgcagcaacaactattaccatttagccagctagctactgcctactctcagcaacaacaacttcttccatttaaccaattggccgcactgaaccccgctgcttatttgcagcagcaaatactactgccatttagcgagctagctgcagcaagtcgtgcttccttcttgacacagcaacagttgctgcctttctacaagcagtttg

SEQ ID NO: 478 - DNA, 457 bp, Zea mays
  Clone ID: LIB3061-047-Q1-K1-D2
gcaacatagaaagtggaatccagtagcaacaatagagcaacaatggcgaccaagatattttccctgcttatgctccttgctctttctacatgtgttgctaacgcgacaattttccctcaatgctcacaagctcctatagcttcccttcttcccccataccttccatcaattatagcttcaatatgtgaaaacccagctcttcaaccatataggcttcaacaagcaatcgcagcaagcaacatacctttatcgcccttgttgtttcaacaatcgccagccctatctttggtgcagtcattggtacaaaccatcagggcacaacagctgcagcaactcgtgctacctctgatcaaccaagtagctctggcaaacctttctccctactctcagcaacaacaatttcttccattcaaccaactgtctacactgaaccctgctgcttaattgcagcaacaac

SEQ ID NO: 479 - DNA, 391 bp, Zea mays
  Clone ID: LIB3061-047-Q1-K1-D3
aagaaatccatcgagaggccgtcgacaggggaattaatggcgtcgtcgtctagcagcaggcaccggcgcctcatcctcgcagccgccgtcctgctctccgtgctcgcggctgccagcgccagcgccgggacctcctgcgtgccggggtgggccatcccgcacaacccgctcccgagctgccgctggtacgtgaccagccggacctgcggcatcgggccgcgcctaccgtggccggagctgaagaggagatgctgccgggagctggcggacatcccggcgtactgccggtgcacggcgctgagcatcctcatggacggcgcgatcccgccgggcccggacgcgcagctggagggccgcctagaggacctgccgggctgcccgcgggaggtgc

SEQ ID NO: 480 - DNA, 417 bp, Zea mays
  Clone ID: LIB3061-047-Q1-K1-D4
gtcagaagctcagatactgatctcactgatccagtatggctatggcaaaggcaggcgcgccgagggtctcggcggcccagctggtgactctcgggctatcactcctctgcgctgtcgccggcccggccgacgcgcagaactgcggctgccagccaaacgtatgctgcagcaagtatggctactgcggcacgaccgacgagtactgcggcgacgggtgccagtcgggcccgtgccgctcgggcggcggcggcagcagtggcggcggtggtgcgaacgtggctagcgtcgtcaccggctccttcttcaacggcatcaagagccaggccgggagcggctgcgagggcaagaacttctacacccggagcgcgttcctgagcgccgtcaaggcgtacccaggcttcggccatggcgggtcgc

SEQ ID NO: 481 - DNA, 452 bp, Zea mays
  Clone ID: LIB3061-047-Q1-K1-D5
cccaactatacaatcctacatgctacatgaggccatcgtagcaagcatcttacggtcaggagcattaaccctccaacagccatatgccctattgcaacaaccatccttagtgcatctgtatctccaaagaatcgcgacacaacaactacaacaacagttgctaccaacaatcaatcaagtagttgcagcgaaccttgctgcttatctccagcaacaacaatttcttccattcaatcaactagctggggtgaaccctgctgtctacttgcaggcacaacaactactaccatttaaccaacttgtcgggagccctgatgccttcttactgcaacaacagcttctgccattccatctgcaagctgtggaaaacattgcttctttcttgcgacaacaacaattggtgccattttacccacaggttgtgggaaacattaatgccttcttgcaacagc

SEQ ID NO: 482 - DNA, 431 bp, Zea mays
  Clone ID: LIB3061-047-Q1-K1-D7
gcgctcagtcaactagccatggtgaaccctgccgcctacctacaacagcaacaactgatgtcatctagccctctcgctgaggttaatgcacctacatacctgcaacaacagttgctgcaacagattgtaccagctctgactcagctagctgtggcaaaccctgctgcctacttgcaacagctgcttccattcaaccaactgactgtgtcgaactctgctgcgtacctacaacagcgacaacagttacttaatccactagcggtggctaacccattggtcgctgccttcctacagcagcaacaattgctgccatacaaccagttctctttgatgaaccctgccttgttgtggcagcaacccatcgttggaggtgccatcttttagattacatatgagatgtactcgataatggtgccctcatagcggcatgt

SEQ ID NO: 483 - DNA, 443 bp, Zea mays
  unsure (1)..(443): unsure at all n locations; Clone ID: LIB3061-047-Q1-K1-D8
cccacgcgtccgcaccaagcgaagcacattagcaacaacctaacaacaatggctaccaagatattatccctccttgcgcttcttgcgctttttgcgagcgcaacaaatgcgttcattattccacaatgctcacttgctccaagttccattattacacagttcctcccaccagttacttcaatgggcttcgaacacccagctgtgcaagcctataggctacaacaagcaattgcggcgagcgtcttacaacaaccaatttcccagttgcaacaacaatccttggcacatctaacaatacaaaccatcgcaacgcaacagcaacaacaattcctaccagcactgagccacctagccatggtgaaccctgccgcctacttgcaacagcagttgcttgcatcanacccacttgctctggcaaacgtagttgcaaaccagccacaaca

SEQ ID NO: 484 - DNA, 428 bp, Zea mays
  Clone ID: LIB3061-047-Q1-K1-D9
gcaacatagaaagcacaatagtgtaccaacaatggcagccaaaatattttgcctccttatgctcctgggtatttctgcaagtgctgctacggcgaccattttcccgcaatgctcacaagctcctatagcttcccttcttcccccgtacctctcaccagcggtgtcttcggtatgtgaaaacccaattcttcaaccctacaggatccaacaggcaatcgcagctggcatcttacctttatcacccttgatcctccaacaatcatcagccctattacagcagttacctttggtgcatttattggcacaaaacatcagggcacaacaactacaacaacttgtgctagcaaaccttgctgcctactctcagcaacagcagtttcttccattcaaccaactagctgcattgaactctgcttcttaattgcaac

SEQ ID NO: 485 - DNA, 429 bp, Zea mays
  Clone ID: LIB3061-047-Q1-K1-E1
caacaacaactgctttcatctagcccgctcgctgtgggcaatgcacctacatacctgcaacaacaattgttgcaacagattgtaccagctctgactcaactagctgtggcaaaccctgttgcctacttgcaacagctgcttccattcaaccaactgactctgtcgaactctgctgcgtacctacaacagcgacaacagttacttaatccattggtagtggctaacccattggtcgccgccttcctacagcagcaacaattgctgccatacaaccagttctctttgatgaatcctgtcttgtcgaggcagcaacccatcgttggaggtgccatcttttagattacatatgagatgtactcgataatggtgccctcataccgacgtgtgtttcctagaaataatcaatatattgaatgaagattatctccg

SEQ ID NO: 486 - DNA, 428 bp, Zea mays
  Clone ID: LIB3061-047-Q1-K1-E10
cggctatcctgggaggcgcagcggctccgggacctccggttcatcgaccatgagctccgtgccgttgtggaggcgtcgtcggacgcggagctggacggcgtcaaggcccagatggccgacgcagaggacgctatcgcggagctggccgacgcgaacgcgaagctcctgaagaaggcggaggagttcacgtcggcgggcgacggttgcggcgacgtggacctgcggagccggagccagcgcaagatcctggagcgcgtacgcaagatgtcggagaaggccggtcggctggagctggagctgcagcggttccagcacgcgctgctgcggcacgaggaggagcgcgcggcgaggcgcgcggtcaaggcggcggcgtccaccgtcgtgcaggtgcagcggcggtcgcgggtgcatctggtggagtacctcta

SEQ ID NO: 487 - DNA, 433 bp, Zea mays
  Clone ID: LIB3061-047-Q1-K1-E11
caagtgcgcaacctcgggagcacaaaatgggatgaccacgaagtggttaaggttattctggagagcccttattttccttaaccctactcaagtacaattgattcgtggcaatcctagatatacacaaatgacccccgaggaagtcatcgggaattttgttagttttgaatgcatgattaagggctccaagaagatcatcgagcttgatgagccttccacatccgaggcgcaacccgtggccttcaaggcaacggaggaggagtctacaccaagtagacaaccaattgacgcctccaagctcgacaacgaggagatggccctaatcatcaaaagcttccggcaaatcctcaagcaacggaaggggaaggactacaaatcccgttccaagaaggtttgctacaagtgtggtaagcccggtcactttattgctaaa

SEQ ID NO: 488 - DNA, 433 bp, Zea mays
  Clone ID: LIB3061-047-Q1-K1-E12
ctagcaacatagaaagcacaatcgtgtaccgacaatggcagctaaaacatttggcctcggtatgctccttggtcttactgcaagtgctgctacggcgaccattttcccacaatgctcacaagctcctatagcttaccttcttaccccgtacctttcaccaacggtgccttcagtatgtgaaaacccaattcttgaaccctacaggatccaacaggcaatcgcagctggcatcttacctttatcacccttgatcctccaacaatcatcagccctattacagcagttacctttggtgcatttattggcacaaaacatcagggcacaacaactacaacaacttgtgctagcaaaccttgctgcctactctcagcaacagcaagttcttccattcaaccaactagctgcattgaactctgcttcttatttgcaacac

SEQ ID NO: 489 - DNA, 430 bp, Zea mays
  Clone ID: LIB3061-047-Q1-K1-D1
aacaacaacaacaattgcaacagtttctaccagcgctcagtcaactagccatggtgaaccctgccgcctacctacaacagcaacaactgatttcatctagccctctcgctgtggttaatgcacctacatacctgcaacaacagttgctgcaacagattgtaccagctctgactcagctagctgtggcaaaccctgctgcctacttgcaacagctgcttccattcaaccaactgactgtgtcgaactctgctgcgtacctacaacagcgacaacagttacttaatccactagcggtggctaacccattggtcgctgccttcctacagcagcaacaattgctgccatacaaccagttctctttgatgaaccctgccttgttgtggcagcaacccatcgttggaggtgccatcttttagattacatatgagat

SEQ ID NO: 490 - DNA, 403 bp, Zea mays
  Clone ID: LIB3061-047-Q1-K1-B6
ttcaagggtcttgatgataggagctctgccccttcattacagatggataggattagtatctacgacacttcaggactagagctctatgatttgttggatgttgtacccactgtatgtacttagtcctgaaacagtggccaatctatattatactctctctgttctttcttttttatttgtcgcggtctagttcaaaaatgaactagcgggcgacaaatattcaagaacggaggtagtatatgacttagacgtaactttagtgcaccgaatgtagtcaacctttgtttgctttggacaatgaggatttgctgttctaaagacacaacaactacagctactgtggcatcctaaccttgctgcctactctgagtaacataaaaagggtggatgctttaaaggatcc

SEQ ID NO: 491 - DNA, 412 bp, Zea mays
  Clone ID: LIB3061-047-Q1-K1-B7
gttgcggtagcaacacttgcagaaagaccaaggagcataaggaagcaaaatattttggctgccattgttggtacactattgtgctttctatgttgctaccgcaaccattttcccacaatgctcacaagctcctatagcttcccttcttcccccatacctctcaccagcggtgtcttcaatgtgtgaaaccccaattgttcaaccctacaggatccaacaggcaatcgcaacaggcatcttaccattatcacccttgttcctccaacaaccgtcagccctattacagcagttacctttggtccatttggtggcacaaaacatcagggcacaacaactacaacaacttgtgctagcaaaccttgctgcatactctcagcaacatcagtttcttccattcaaccaactggctgca

SEQ ID NO: 492 - DNA, 458 bp, Zea mays
  Clone ID: LIB3061-047-Q1-K1-B8
aaaacacaccaagcgaagcgcactagcaacaacctaacaccaatggctaccaagatatgagccctccttgcgcttcttgcccttttagtgagcgcaacaaatgcgttcattattccacagtgctcacttgctcctagtgccattattccacagttcctcccaccagttacttcaatgggcttcgaacatccagccgtgcaagcctacaggctacaactagcgcttgcggcgagcgccttacaacaaccaattgcccaattgcaacaacaatccttggcacatctaaccctacaaaccattgcaacgcaacaacaacaacaacaacagtttctgccatcactgagccacctagccgtggtgaaccctgtcacctacttgcaacagcagctgcttgcatccaacccacttgctctggcgaacgtagctgcataccagcaacaacaacagctgcaacagtt

SEQ ID NO: 493 - DNA, 425 bp, Zea mays
  Clone ID: LIB3061-047-Q1-K1-B9
gaagtcctgtgaagtacgacaagaaaattttggagacaatcgggaagaagctgaaaaagagcaatggcgctcttgacattgttgactttggtgaatccgatgatgaaaagcctgagaaactggaagcattgatcgctgctgttaacagcagtgatagcagtcacattgttcatgtccctcctggtgaaaatgctctctctgatgtcctcctaagcactcctatatttactggtgaagaaggtggaagtggttttgctgcttacgcagcagctgccgtagctactggagcatctggatttgaatttggtgtggacccaaatgtagatccagagttggcactcgccctgcggttgtctatggaagaagaacgagcaaggcaagaggctattgcaaaaaaggctgcataagatacatctaataccgaa

SEQ ID NO: 494 - DNA, 377 bp, Zea mays
  Clone ID: LIB3061-047-Q1-K1-C1
gccacgggactaccaccggatcttctgcgtgggccccctcgggggcgctgccatcccggcctagtgccaccagtacatacttcgggctggcgccatcaaggccctcggctccttcaggagcaacgcgtgatgagcggcgcttggctgcggagcaatggctggcgacctacgggcggtgggccgtgcgcgaggagaatgccatcatgcatcgatcgacttgggtgcccatggatggttcgcgacgcctaatactggttaagcagctgctgcgcagcgcgcgtgcgtgagacttggtgtgtacacgggccccagcaatgaaatcatgtcgtgactctctcaggggatgattccgatatgatccaatggcctctgttttc

SEQ ID NO: 495 - DNA, 404 bp, Zea mays
  Clone ID: LIB3061-047-Q1-K1-C10
actcgcgcctgtgtgcttgcttcctggaggctcaagcattcgtgctgctccgaccccaccgacacaggctcggccgtccggcgatctcgctcaccggccggaacatgactacttcaaggcgccttgctgacaggaagaccgcaaagttccagaagaacatcaccaggaggggttctgtgcctgaaaccactgtcaagaagggaaatgactaccctgttggccctctagtgcttgggttcttcatctttgtcgtcattggatcatcgttgtttcagatcatcaggacggcaaccagcggcgaggtggcttgagagccgtgccacatgtaatgcccagtatagagagttgcttgatatacatgcatccagctaggattgggtagcagctaaaatgttgaacgtgac

SEQ ID NO: 496 - DNA, 412 bp, Zea mays
  Clone ID: LIB3061-047-Q1-K1-C11
gcagtgttgacagcagctcaagcaggtggagccgcagcaccggtaccaggcgatcttaggcttggggctacaatccatcctgcagcagcagccgcatagcggccaggtcgcggggctgttggcggcgcatatagcgcagcaactgacggcgatgtgcggcctgcagcagacgactgcatgcccctacgctgctgccggcggtgtcccccactgaagaaactatgggctgtagtatagccgctggctagctagctagttgagtcatttagcggcgaagattgagtaataatgtgtgacgcatgaccatgggtggcagtgtcagcgtgagcaatgacctgaatgaacaattgaaatgaaaagaaaaaagtattgctccaaatcaaaacgttcggtggtcaaactaaaaagggcg

SEQ ID NO: 497 - DNA, 431 bp, Zea mays
  Clone ID: LIB3061-047-Q1-K1-C12
atttataccaactagcaacatagaaagcacaatagtgtaccaacaatggcaggcaaaaggttttgcctccttatgctccttggtatttctgcaagtgctgctacggcgaccattttcccgcaatgctcacaagctcctatagcttcccttcttcccccgtacctctcaccagcggtgtcttctgtatgtgaaaacccaattcttcaaccctacaggatccaacaggcaatcgcagctggcatcttacctttatcacccttgttcctccaacaatcatcagccctattacagcagttacctttggagcatttattggcacaaaacatcagggcacaacaactacaacaacttgtgctagcaaaccttgctgcctactctcagcaacagcagtttcttccattcaaccaactagctgcattgaactctgcttc

SEQ ID NO: 498 - DNA, 428 bp, Zea mays
  Clone ID: LIB3061-047-Q1-K1-C2
caattagctcatcgactccagattggagaactcgacaccatgaaggtgctgatcgttgcccttgctctcctggcgctcgctgcgagcgccgcctccagtacaagcggcggctgtggctgccagacaccaccgtttcatctaccgcctccgttctatatgccgcctccgttctatctgccgccgcagcagcagccgcagccatggcaataccccactcaaccaccgcagctaagcccgtgccagcagttcggatcctgcggcgtcggcagcgtcggcagcccgttcctgggccagtgcgtcgagttcctgaggcaccagtgcagcccggcggcgacgccctacggctcgccacagtgccaggcgctgcagcagcagtgctgccaccagatcaggcaggtggagccgctgcaccggtaccaggcgacata

SEQ ID NO: 499 - DNA, 397 bp, Zea mays
  Clone ID: LIB3061-047-Q1-K1-C3
acaatagtgtaccaacaatggcaaccaaaatattttgcttccttatgctccttggtctttctgcaagtgctgctaccgcgaccattttcccgcaatgctcacaagctcctatagcttcccttcttcccccatacctctcaccagcggtgtcttcagtatgtgaaaacccaattcttcaaccctacaggatccaacaggcaatcgcagcaggcatcttacctttatcacccttgttcctccaacaaccgtcagccctattacagcagttacctttggtgcatttgttggcacaaaacatcagggcacaacaactacaacaacttgtgctagcaaaccttgctgcctactctcagcaacagcagtttcttccattcaaccaactggctgcattgaactc

SEQ ID NO: 500 - DNA, 426 bp, Zea mays
  Clone ID: LIB3061-047-Q1-K1-C5
cgtgatatccacatacattatcctgctggtgctgtgccaaaggatggcccttctgcaggtgtgacattggtaacggcactggtgtcgctttttagtaacagaaaagtcagagcagatactgctatgactggcgagatgactctaaggggccttgtattgccagttggtggtgttaaggacaaggtacttgcggcacatcgttatggaatcaagagagtaattttacctgaaaggaacttgaaggacttatcagaggttccattaccaattctctacgacatggagattctgcttgtgaagcgcatcgaggaagtactcgaccatgctttcgaaggccgatgcccacttagatcacgctccaagttgtagcacccaagtcgcgtatggtatggatgtttgcttgaaaggatcatcgtcacagtacca

SEQ ID NO: 501 - DNA, 446 bp, Zea mays
  Clone ID: LIB3061-047-Q1-K1-C6
gagaccaacaagcaacatagaaagtggaatccagtagcaacaatagagcaacaatggcgaccaagatactttccctccttatgctccttgctctttctgcatgtgttgctaacgcgacaattttccctcaatgctcacaagctcctatagcttcccttcttcccccataccttccatcaatgatagcttcagtatgtgaaaacccagctcttcaaccctataggctccaacaagcaatcgcagcaagcaacatacctttatcacccttgtttcaacaatcgccagccctatctttggtgcagtcattggtacaaaccatcaaggcacagcagctgcagcaactcgtgctacctgtgatcaaccaagtagctctggcaaacctttctccctactatcagcaacaacaatgtcttccattcaaccaactatctacactgaaccctgct

SEQ ID NO: 502 - DNA, 400 bp, Zea mays
  Clone ID: LIB3061-047-Q1-K1-C7
tttcagcattcaaaaacacaccaagcgaagcgcactagcaacgacctaacaccaatgggtaccaagatattagccctccttgcgcttcttgcccttttagtgagcgcaacaaatgcgttcattattccacagtgctcacttgctcctagtgccattattccacagttcctcccaccagttacttcaatgggcttcgaacatccagccgtgcaagcctacaggctacaactagcgcttgcggcgagcgccttacaacaaccaattgcccaattgcaacaacaatccttggcacatctaaccctacaaaccattgcaacgcaacaacaacaacaacaacagtttctgccatcactgagccacctagccgtggtgaaccctgtcacctacttgcaacagcagc

SEQ ID NO: 503 - DNA, 417 bp, Zea mays
  unsure (1)..(417): unsure at all n locations; Clone ID: LIB3061-047-Q1-K1-C8
gagatcaaaggcctttgcatgaagttatatttgcatgtgacgataagccaaagcttctgagtcagttaacctctctcctcggggagcttggtcttaatatccaagaagcacatgcatattcgacgagtgatggctattccttggacatctttgttgttgatggctgggagtatgaggctgacattctccaaagtgcattgagggaaggcgttgataaaataaagtacagagcatggccgttggtaccgtcgatgtctgctaggatggatcaccaaccattggaggtttctccttcatctgactttgtccagataccagctgatgcagctgatgtttgggaagtcgatctcaggcttctcaaatttgaacaaaaattagcgtctggatcatntggtgatctataccatgggacgtact

SEQ ID NO: 504 - DNA, 412 bp, Zea mays
  Clone ID: LIB3061-047-Q1-K1-C9
cgaccggccacctcttcccaattgcatcgcatccccaggacttgccggccggtccagagacgtacggcgataatgggggcttctgaggtgtggtcatcggtgccagcctggctggcgatcgccgtcggcttggcggccgtggtttcctcgtcggaggctcacgtattctacgccggtggccacgacggctgggtccttgaccccaccgagagctacaaccattgggccgggcgcagccggttccaagtgaacgacaccatcgtgttcacgcacgaggagggcgtcgactctgtgctgctggtgaccgagcaggacttcgacacgtgcaacacgcgcatacccggtccggcggctccaagccgtcggcagcagcggcagttcggagcgttcggtgttcaagctcgaccggtcc

SEQ ID NO: 505 - DNA, 425 bp, Zea mays
  Clone ID: LIB3061-047-Q1-K1-B5
aaagcacaatagtgtaccaacaatggcagccaaaatattttgcttccttatgctccttggtctttctgcaagtgttgctaccgcaaccattttcccacaatgctcacaagctcctatagcttcccttcttcccccatacctctcaccagcggtgtcttcaatgtgtgaaaacccaattgttcaaccctacaggatccaacaggcaatcgcaacaggcatcttaccattatcacccttgttcctccaacaaccgtcagccctattacagcagttacctttggtccatttggtggcacaaaacatcagggcacaacaactacaacaacttgtgctagcaaaccttgctgcatactctcagcaacatcagtttcttccattcaaccaactggctgcattgaactctgctgcttatttgcaacaacaat

SEQ ID NO: 506 - DNA, 439 bp, Zea mays
  Clone ID: LIB3061-051-Q1-K1-D8
cccacgcgtccgagttacttcaatgggcttcgaacatccagacgtgcaagcctacaggctacaactagcgcttgcggcgagcgccttacaacaaccaattgcccaattgcaacaacaatccttggcacatctaaccctacaaaccattgcaacgcatcaacaacaacaacaacagtttctgccatcactgacccacctagccgaggtgaaccctgtcacctacttgcaacagcagctgcttgcatccaacccacttgctctggcgaacgtagctgcataccatcaacaacaacagctgcaacagtttatgccagtgctcagtcaactagccatggtgaaccatgccgtctacctacaactactctgatctagcccgctcgcggcggtcaatgcacctacgtacctacaacaacagtagctgcaacacatagtaccagct

SEQ ID NO: 507 - DNA, 409 bp, Zea mays
  Clone ID: LIB3061-051-Q1-K1-D9
caactagcatcatagaaagcacaatcttgtaccaacaatggcaggcaaaatatgttggttccctatgctccttggtctgtctgcaagtgctgctaccgtaaccatcttcccacaatgctcacaagctcctatagctttctttcttgccagatacctgtcaccagcgctgtcttcagtatgtgaaaacccaactcttcaaccctacaggatccatcaggcaatcgcaacaggcatcttacctttatcacccttgttcattcaacaaccgatagccctattacagcaattacctatgaagcatttcatggcacctaacatcaaggcacatcacctacaacaactagggctatgaaaccttgctgcctactctcagtaaccgccgtctctttctttcaaccaactggctgca

SEQ ID NO: 508 - DNA, 441 bp, Zea mays
  Clone ID: LIB3061-051-Q1-K1-E10
caactagcaacatagaaagcacaatagtgtaccaacaatggcagccaaaatattggggctccttatgctccttggtctttctgcaagtgctgctacggcgaccattttcccgcaatgctcgcaagctcctatagcttcccttcttcccccgtacctctcaccagcggtgtcttcggtatgtgaaaacccaattcttcaaccctacaggatccaacaggcaatcgcagctggcatcttacctttatcacccttgttcctccaacaatcatcagccctattacaacagttacctttggtgcatttattggcacaaaacatcagggcacaacaactacaacaacttgtgctagcaaaccttgctgcctactctcagcaacagcaatttcttccattcaaccaactaggttcattgaactctgcttcttatttgcaacaacaaca

SEQ ID NO: 509 - DNA, 340 bp, Zea mays
  Clone ID: LIB3061-051-Q1-K1-E11
gctgcatactctcagcaacatcagtttcttccattcaaccaactggctgcatcgaagggtgctgcttatctgcgacaacaattaccattcagccagctagttgctgcctacccccagcaatctcttccattcaaccaactagcagcattgaactctgctgcttatttacagcagcaacaactactaccattcagccagctagctgatgtgagccctgctgccttcttgacacatcatcagttgatgccgttctacctgcacgctatgcctaacgctggcaccctattacaactgcaacaattgctgccattcaaccaacttgctctgacaaacccaacag

SEQ ID NO: 510 - DNA, 336 bp, Zea mays
  Clone ID: LIB3061-051-Q1-K1-E12
cgagcagaagaacctgaagcgcgaactccttcgtgcgcacgacgaggttaagcggagccagtctgtaccgctcgtcattggccagtttatggacatggtcgacggcaacaacggcatcgtgggctctaccactggcagcaactactacatgcggatcctcatcaccatcaaccgcgagttgctcaagccgtcagcgttcgtcgcgttgcatagtcacttcaacgctctagtcgacgtgctgccgccggaggccgacttcagcatctccttgttgggatcgtcggataagcccaacgtcacttacaacgatattggatgatgttgcattcaaaagca

SEQ ID NO: 511 - DNA, 415 bp, Zea mays
  Clone ID: LIB3061-051-Q1-K1-E2
gctgcattgaactctgctgcttatttgcaacaacaattaccattcagccagctaggggctggctacccccagcaatttcttccattcaaccaactagcagcattgaactctgctgcttatttacagcagcaacaactactaccattcagccagctagctgatgtgagccctgctgccttcttgacacaacaacagttgttgccgttctacctgcacgctatgcctaacgctggcaccctcttacaactgcaacaattgctgccattcaaccaacttgctttgacaaacccaacagtgttctaccaacaacccatcattggtggtgcccttttttagattgcttatgaattatagttcaataatgaagttttttggatgatgcttgtggcgttccaaaaataaaaagtacattttt

SEQ ID NO: 512 - DNA, 314 bp, Zea mays
  Clone ID: LIB3061-051-Q1-K1-E3
ctcaccctcgttcaccacacagtccgtcacttctttagtagcttgtgatttgtacgtggacgagatcactggtcgggtggcggacgacgacacatggggaagggtagtgtgggtgcatcatggtgggcgttcctcctgctcgccggcgtgctgctggtcgtagcagccacggccggggcggaggacggagtggtcgaacgggaccgcaaggaggacctgcggtggtgcaagcaggcgtgcgagtggcagtacggaaaggacaccccgcggaagagggaatgcgagagcgagtgccgcgagcggaaccagcaagc

SEQ ID NO: 513 - DNA, 260 bp, Zea mays
  Clone ID: LIB3061-051-Q1-K1-E5
aataacccaccgagcggatgctgccgcggccagccaccgccgccagttcatctatcgacaccggttcatctgccacctgcagggcaccttccaactgcggggcatctaccaccgacgatccacctgccatcgcctgtccacctgccaccttcagtccatgtgccgcctccagtacatctgccgtcatcaccatgccactaccctactcaaccgcccctacctcaacctcattcacagccacacccattcccatgccaaca

SEQ ID NO: 514 - DNA, 441 bp, Zea mays
  Clone ID: LIB3061-051-Q1-K1-E6
caccaaatcaaatctgcaacatcaattatctaactccaaaaaccatgaagctggtgcgtgtggttcttgctttcattgctttagtatcaagtgtttcttgtacacagacaggcggctgcagctgtggtcaacaacaaagccatgagcagcaacatcatccacaacaacatcatccacaaaaacaacaacatcaaccaccaccacaacatcaccagcagcagcaacaccaacaacaacaagttcacatgcaaccacaaaaacatcagcaacaacaagaagttcatgttcaacaacaacaacaacaaccgcagcaccaacaacaacaacaacaacaacagcaccaacaacaacatcaatgtgaaggccaacaacaacatcaccaacaatcacatggccatgtgcaacaacacgaacagagccatgagcaacaccaaggacaga

SEQ ID NO: 515 - DNA, 374 bp, Zea mays
  Clone ID: LIB3061-051-Q1-K1-E7
gatcgtcctgttgctcacagcagcagccatggcggccgagccggagaagcaggcgggccccgcggcacaggagacggccgtgcacatggtgtacgtggaccgccccgaggacgccgaccctgaggagttgcacatacgcacgctcaccttcgtcctcggcagcgaacagaaggccagggacgcagtgctctaccactacaagaacgcctccagcggcttctccgcgaagctcaccgcacagcaggtcaaggatctcaaggagcatccaggtgttctacaggtatgtgccgagccagacttaccagctacatggccctgagtatggcactcaccagcgcacgatacacacgttgagccttatgtgaaagcgtatg

SEQ ID NO: 516 - DNA, 447 bp, Zea mays
  unsure (1)..(447): unsure at all n locations; Clone ID: LIB3061-051-Q1-K1-E8
caacatacatagtgaagtacactagcaacatcttagcaccaatggcagccaagattgttgcgctccttgccctccttgctctttcagcaagtgttgctaccgcgactattattccacaatgctcacaacaatacctctctccagtgatagccgcgagatttgaatacccatctatacaatcctacaggctacaagaggccatcacagcaagcatcttacggtcgttagcattgaccgtccaacaaccatatgccctattgcaacaaccatccttagtgaatctgtatctccaaagaatcacagcacaacaactacaacaacggttgcttccaacaattaatcaagtagttgcagcgaaccttgctgcttaccttcagcaacaacaatttcttccattcaatcaactagctgnngtgaaccctgctgcttacttgcaggcacaacagc

SEQ ID NO: 517 - DNA, 135 bp, Zea mays
  Clone ID: LIB3061-051-Q1-K1-E9
ccttattgcatcagcccaccattggtggtaccatcttctagattttttatgctttatactgtaataataaatgttctcatactgatatgtgcaacttctcagtaataaaagattagagatctatattttaagttc

SEQ ID NO: 518 - DNA, 239 bp, Zea mays
  Clone ID: LIB3061-051-Q1-K1-F1
ggattccgggtggagacacgcgtgcgcagactagcgacttgcatggctctacacgtgtcagcagcgctttagaagcatgactgtgaccgtcctgaccgttggtcctgctgcaaccaggcagcactattactagaccgtacctggaaggccatttcgagcagctgagcatgagagaccaacctgctagacaactattgcatagacgaggtgctgactactgctcaggagcatcgcgtaca

SEQ ID NO: 519 - DNA, 375 bp, Zea mays
  Clone ID: LIB3061-051-Q1-K1-F10
aaagcacaatagtgtaccaacaatggcagccaaaatattttgcctccttatgctccggggtatttctgcaagtgctgctacggcgaccattttcccgcaatgctcacaagctcctatagcttcccttcttcccccgtacctctcaccagcggtgtcttcggtatgtgaaaacccaattcttcaaccctacaggatccaacaggcaatcgcagctggcatcttacctttatcacccttgttcctccaacaatcatcagccctattacagcagttacctttggtgcatttattggcacaaaacatcagggcacaacaactacaacaacttgtgctagcaaaccttgctgcctactctcagcaacagcagtttctttc

SEQ ID NO: 520 - DNA, 403 bp, Zea mays
  Clone ID: LIB3061-051-Q1-K1-F11
atgggcttcgaacattcagccgtgcaagcctacaggctacaactagcgcttgcggcgggcgccttacaacaaccaattgcccaattgcaacaacaatccttggcacatctaaccctacaaaccattgcaacgcaacaacaacaacaacaacagtttctgccatcactgagccacctagccgtggtgaaccctgtcacctacttgcaacagcagctgcttgcatccaacccacttgctctggcgaacgtagctgcataccagcaacaacaacagctgcaacagtttatgccagtgctcagtcaactagccatggtgaaccctgccgtctacctacaactactttcatctatcccgctcgcggtgggcaatgcacctacgtacctacaacaacagttgctgcaac

SEQ ID NO: 521 - DNA, 410 bp, Zea mays
  Clone ID: LIB3061-051-Q1-K1-D7
gaccattagctttatctactccagagcgcagaagaacccgatcgacaccatgagggtgttgctcgttgccctcgctctcctggctctcgctgcgagcgccacctccacgcatacaagcggcggctgcggctgccagccaccgccgccggttcatctaccgccgccggtgcatctgccacctccggttcacctgccacctccggtgcatctcccaccgccggtccacctgccgccgccggtccacctgccaccgccggtccatgtgccgacgccggttcatctgccgccgccaccatgccactaccctactcaaccgccccggcctcagcctcatccgcagccacacccatgcccgtgccaacagccgcatccaagctcgtgccagctgcagggaacctgcggcgttggca

SEQ ID NO: 522 - DNA, 396 bp, Zea mays
  Clone ID: LIB3061-051-Q1-K1-C3
attttgagcattcagaaacacaccaagcgaagcgcactagcaacaacctaacaacagtggctaccaagatattatccctccttgcgcttcttgcgctttttgcgagcgcaacaaatgcgtccattattccacaatgctcacttgctcctagttccattattccacagttcctcccaccagttacttcaatggccttcgaacacccagctgtgcaagcctataggctacaacaagcgattgcggcgagcgtcttacaacaaccaattgcccaattgcaacaacaatccttggcacatctaacaatacaaaccatcgcaacgcaacagcaacaacagttcctaccagcactgagccacctagccatggtgaaccctgtcggctacttgcaacagcagc

SEQ ID NO: 523 - DNA, 449 bp, Zea mays
  unsure (1)..(449): unsure at all n locations; Clone ID: LIB3061-051-Q1-K1-C4
ggcagtgcgtagagaggatcgtcgaacagaacagcatgaagatggtcatcgttctcgtcgtgtgcctggctctgtcagctgccagcgcctctgcaatgcagatgccctgcccctgcgcggggctgcagggcttgtacggcgctggcgccggcctgacgacgatgatgggcgccggcgggctgtacccctacgcggagtacctgaggcagccgcagtgcagcccgctggcggcggcgccctactacgccgggtgtgggcagccgagcgccatgttccagccgctccggcaacagtgctgccagcagcagatgaggatgatggacgtgcagtccgtcgcgcagcagctgcagatgatgatgcagcttgagcgtgccgctgccgncagcagcagcctgtacgagccagctctgatgcagcagcagcagcagctgctggcagcccagggtctc

SEQ ID NO: 524 - DNA, 196 bp, Zea mays
  Clone ID: LIB3061-051-Q1-K1-C5
acgaggacatcgactaaaggaacatcaatttaaacagcatgaataaaaacattggggaaggtctgatcctaacagatctatcatctatgcaccgctatagctaacatgctctatttatactctcattctactataattttacttgcactaacacatatactaacatcacttattgatctagagtattcaaacttac

SEQ ID NO: 525 - DNA, 416 bp, Zea mays
  Clone ID: LIB3061-051-Q1-K1-C6
cgcaaaccgacacgggacccacgccgtatctccgcctccgcagatcgccgccggctagtcgcgcccctccgcgcgccgatggccgccgcggacccgccgccgcgcggggaggccgcgcccgcgctgaagcggagcgccagcatcgaccggataccggcggacgcgcgccgcatcctgcaccgcctcgccggggacctctggggcggcgacgtggaccccggcgcgctggccgtgtcccagctcaggggcgccatgaccaacgaggtcttccggatcacctggcccggcggcgaggccgagggcaacggcccgcgcatggtgctcgtgcgcatctactggcgtggcgtcgaggtcttcttcgaccgcgccgactaggtccgcaccttcgagtgcatgtcgtgccacggtcaggggcc

SEQ ID NO: 526 - DNA, 465 bp, Zea mays
  Clone ID: LIB3061-051-Q1-K1-C7
ggagaaccctccgagcatcctagtgactcccatggctccggccatgtcggcgcagttcacaagaataacgttgagcaacctgtttgtccgtcgggctggcccaggcagcacggagctgaccgtggagggaaggccatccgaccagctgggcaggagaaacctcactgacagccccgtatttgacggccgtggccctgacgccagcctcgtggctcgcgtacagggagtcgctacccagatgggcgacgtgcgccagttgtacaccgtcgtgttccaggagaggccgctcaagggctccacgctcgtcaccgaaggcgcgatgacagaagggtcagacgagtgggcgatctacggtggaactggagtgttcgcgatggcgagaggcgtcataaggagaacgtttcttgccgacacgagcggcgggaactccgacgagcttgccgtgcaggttctctgcccggtgtt

SEQ ID NO: 527 - DNA, 421 bp, Zea mays
  unsure (1)..(421): unsure at all n locations; Clone ID: LIB3061-051-Q1-K1-C8
ggagaaccctccgagcatgctantgactcccatggctccggctatgtcggcgcagttcacaagaataggcttggtcaacttgtttgtccgtcgggctggcccaggcagcacggagctgaccgtggagggaaggccatccgaccagctgggcaggagaaacctcactgacagccccgtatttgacggccgtggccctgacgccagcctcgtggctcgcgtacagggagtcgctacccatatgggcgacgtgcgccagttgtacaccgtcgtgttccatgagaggccgctcaagggctccacgctcgtcaccgaaggcgcgatgacagaagggtcagactagtggtcgatctacggtggaactggaatgttcgcgatggctagaggcgtaattaggagaacgtttcttgccgacacgagcggt

SEQ ID NO: 528 - DNA, 407 bp, Zea mays
  Clone ID: LIB3061-051-Q1-K1-C9
ctcctcctcgcctcctctgcctagcctccacgacgcaagggagagtgacggaaagcggcgcggcgcgagcgaggagggccaaggggaagaggggaagcaccgcaccaggacccttgttcgccgccgccgcctctgatctccgcgaggttgtcaggattcaatatgtcgaccagcacattcgctacttcctgcacgctgttgggcaatgttagaacaacgcaggcctcccagacagccgtgaagagcccttcgtctctaagcttcttcagccaagttacgaaggttccaagcctgaagacctccaagaaactggatgtctacgccatggctgcatacaaggcgaagcttgtcagacctgaaggtgaagagcacgagtctgatgctccagacgacgcctacattcttga

SEQ ID NO: 529 - DNA, 425 bp, Zea mays
  unsure (1)..(425): unsure at all n locations; Clone ID: LIB3061-051-Q1-K1-D1
nccacgcgtccggcagtgctgccaccagatcaggcaggtggagccgctgcaccggtagcaggcgacatacggtgtggtcctgcagtccttcctgcagcagcagccgcagggcgagctcgcggcgctgatggcggcccaggtagcgcagcagctgacggcgatgtgcggtctgcagctgcagcagccaggtccctgcccttgcaacgcagctgccggcggtgtctactactgaggaaactatgtactgtagtaataatgtaatggagccgctgactagctacctatagggctatagctagttcactcgtttagcggcgatgagtaacggagtgtcacccatcaccatgggtggcagtgtgagcaatgacctgaatgaaccatttgaatgcgaaggaataatatataggggaaaaaggatgtttggg

SEQ ID NO: 530 - DNA, 376 bp, Zea mays
  Clone ID: LIB3061-051-Q1-K1-D11
gagaccaactagcagcatagaaagcacaatactgtaccaacaatggcacccaaaatattttgcctacttatgctccttggtctttctgcaagtgctgctacggcgaccattttcccgcaatgctctcaagctcctatagcttcccttcttcccccgtacctctcaccagcggtgtcttcactatgtgaaaacccaattcttcaaccctacacgatccaacacgcaatcgcacctggcatattacctctatcacacttgttcctacaacaatcatcagccctattacaacagttacctttggtgcatatattggcacaaaacatcagggcacaacatctacaacaacttgagctagcaaaccttgctggctactctc

SEQ ID NO: 531 - DNA, 354 bp, Zea mays
  unsure (1)..(354): unsure at all n locations; Clone ID: LIB3061-051-Q1-K1-D2
gagaccaactagcaacatagaaagcacaatagtgtaccaacaatggcagccaaaatattttgcctccttatgctccttggtctttctgcaagtgctgctacggcgaccattttcccgcaatgctcgcaagctcctatagcttcccttcttcccccgtacctctcaccagcggtgtcttcggtatgtgaaaacccaattcttcaaccctacaggatccaacaggcaatcgcagctggcatcttacctttatcacccttgttcctccaacaatcatcagccctattacaacagttacctttggtgcatttattggcacanaacatcagggcacaacaactacaacaacttgtgcta

SEQ ID NO: 532 - DNA, 442 bp, Zea mays
  Clone ID: LIB3061-051-Q1-K1-D3
ctgaccctcgttcaccacacagtccgtcactcctttagtagcttgtgatttgtacgtggacgagatcactggtcgggtggcggacgacgacacatggggaagggtagtgtgggtgcatcatggtgggcgttcctcctgctcgccggcgtgctgctggtcgtagcagccacggccggggcggaggacggagtggtcgaacgggaccgcaaggaggacctgcggtggtgcaagcaggcgtgcgagtggcagtacggaaaggacaccccgcggaagagggaatgcgagagcgagtgccgcgagcggcaccagcaagctgacgcgggcgaggacggcgacagcggcgtggacgcctacgtctcccgctccgggaggggcgagtgccggcgccagtgcctgcgccgtcacgagggccagccgtgggagacccaggagtgcatgaggc

SEQ ID NO: 533 - DNA, 353 bp, Zea mays
  Clone ID: LIB3061-051-Q1-K1-D4
ctgaccgtcgttcaccacacagtccgtcacttctttagtagcttgtgatttgtacgtcgaggagatcactggtcgggtggcggacgacgacacatggggaagggtagtgtgggtgcatcatggtgggcgttcctcctgctcgccggcgtgctgctggtcgtagcagccacggccgtagcggaggacggagtggtcgaacgggaccgcaaggaggacctgcggtggtgcaagcaggcgtgcgagtggcagtacggaaaggacaccccgcggaagagggaatgcgagagcgagtgccgcgagcggcaccagcaagctgacgcggtctaggacggcgacagcggcgtggacgccta

SEQ ID NO: 534 - DNA, 449 bp, Zea mays
  Clone ID: LIB3061-051-Q1-K1-D5
cgcgtccgcagcttcccttgccggctagggtttgcagatgacgacggcggcgcgccccacctgggcgccggccaagggcggcaacgagcaagggggcacccgcatcttcggcccctcccagaagtactcgtcccgcgacctcgccgcgcatacctcgctcaagctcagaaaagacggtcaacagacccaagaggagttacagaagaggaatctcagggaggaacttgaggaacgtgagcgcaagcactactcttcagcataggacttatccttggaagagaccggcggaaaagctcaagccagctactcctagaaggttcaaagagagaggcagaggataagatagttccacgagaaatcgatgcagatgactccgatgtggagcctaaaagtgatgatgagagcgatgaagatggcgacgacgacgacaccgaagctctaatggcaga

SEQ ID NO: 535 - DNA, 446 bp, Zea mays
  unsure (1)..(446): unsure at all n locations; Clone ID: LIB3061-051-Q1-K1-D6
attgagaccaactagcaacatagaaagcacaatattgtaccaataatggcagccaaaatattttgcctcattatgctccttggtctttctgcaagtgctgctacggcgagcattttcccgcaatgctcacaagctcctatagcttcccttcttcccccatacctctcaccagcgatgtcttcagtatgtgaaaatccaattcttctaccctacaggatccaacaggcaatcgcagcaggcatcttacctttatcacccttgttcctccaacaatcatcagccctattacagcagttacctttggtgcatttattggcacanaacatcagggcacaacaactacaacaactcgtgctagcaaaccttgctgcctactctcagcaacagcagttacctttggtgcatttgttggcacataacatcanggcacaacaactacaacaact

SEQ ID NO: 536 - DNA, 82 bp, Zea mays
  Clone ID: LIB3061-051-Q1-K1-A8
ctttcttatgagttatagttcaataataaatctaaaagagggatgttcgtggcttcccagaaataagaaggtacatttctag

SEQ ID NO: 537 - DNA, 404 bp, Zea mays
  Clone ID: LIB3061-051-Q1-K1-B10
cccacgcgtccgcgctgaaaaggacaaggcgttgtgtttttctgataaggaaaatcgaatgctaaaggaaaagttgtcaacactagaaaaagagcattttatccaaaataatcagcaagatctcgagctaatcatgcaagaaagtgaggaaatggttctccgtgatattgagatggagccacaaagatcatgtgagatttctgatcgagatatacagtacgaagggctcatcaagctgaatcaggttttagaaattgcctcaaccactgtaaaagaaatagaaacaaaaaggttgaatctcagtgatatccaaggtaaaagagagcaagaaaaacagctagaatgcatcctggtatttatcatgaattggtcaaaggaattaatgagactgaacatagagtgcc

SEQ ID NO: 538 - DNA, 380 bp, Zea mays
  Clone ID: LIB3061-051-Q1-K1-B11
gctggcatgtactgtacgttgcaggtgagcgacctaatgagcagcctccgcgcgagggggccgacgctggcgtgcccgtccaacgacgggctgcgcttctggggccacgagtgggagaagcacggcacctgcgcagacgacgtcttcgacgagcacggctacttccaggccgcgctgcgcctccgcgaccagctgggagtcctcggcagcgctcacctccgccggcgtcaagcccgacggcggctactacacgctgagccagatcaagggcgccatccggcaaggcaccggcttcgagccctacgtggagtgcaaccgctactaggccggcaacagccagctctaccagctctacttctgcgttgacgccgccggcgaca

SEQ ID NO: 539 - DNA, 382 bp, Zea mays
  Clone ID: LIB3061-051-Q1-K1-B12
atccggatgccgctgtcgctgtcgctgcccctcgtcctcgtcgcgctgctcctgcgggccgcccgcggcgccgcggagacgccgcagtacacgacggtgcacgcggagtcggacttcgaggtgcggctgtacggcgacaccgtctggatgtccgcccccaccccggacatcccttccttccacgtcgccaccaagctcggcttccacagattgttccagtacctgatgggcgcaaacctcaactcttcgaggatcaggatgaccacccctgtgctcacgagtgtggttccaggtgcagggcctctgcgctcctcggcctactccgtccggctgtacctgccggcgaagttccaggcttaccctgccgttcctctcccggagc

SEQ ID NO: 540 - DNA, 254 bp, Zea mays
  Clone ID: LIB3061-051-Q1-K1-B2
gcgggccaagatccaggacaaggatggcattcctccagaccagcagcgtctgatctctgcggacgagcagctggacgatggccgcgctgtctgggactacatcatacataatgcgagcaccctcaaccatgatatacgccttaggattggtatgcagatcattgcgaagaccctgactggaataaccatagccctggaggatgtcagctcggacactatctacaatgtgtaagctgatatccatgacaaggatg

SEQ ID NO: 541 - DNA, 433 bp, Zea mays
  Clone ID: LIB3061-051-Q1-K1-B3
ccgatccccaattcctccttcggatctcgcattcagcgcagcgcaggtgtgaaggaggggggacgcggaggaagatggggctcgcgttcgggaagctcttcagccggctcttcgccaagaaggagatgcggatcctcatggtcggcctcgacgccgccggtaaaaccaccatcctctacaagctcaagctcggcgagatcgtcaccaccatccccaccatcggtttcaatgttgaaactgttgagtacaagaacattagcttcactgtctgggatgtcgggggtcaggacaagatcagacctctttggaggcattacttccagaacacccagggtcttatctttgctgtggacagcaatgaccgtgaccgtgttgttgaagccagagatgagctccacaggatgctgaacgaggatgagctacgtgatgctgt

SEQ ID NO: 542 - DNA, 393 bp, Zea mays
  Clone ID: LIB3061-051-Q1-K1-B4
cagaaacacaccaagcgaagcgcactagcaacgacctaacaacaatggctaccaagagattagccctccttgcgcttcttgccctttttgtgagcgcaacaaatgcgttcattattccacaatgctcacttgctcctagtgccattattccacagttcctcccaccagttacttcaatgggcttcgaacacctagctgtgcaagccaacatgcaacaacaagcgcttgcggcgagcgtcttacaacaaccaattgcccaattgcaacaacaatccttgccacatctaacaatacaagccatcacaacgcaacagcaacaacagttcctaccagcactgagccacctagccatggggaacccttgccgctacttgcaagagcagctgcttgcat

SEQ ID NO: 543 - DNA, 159 bp, Zea mays
  Clone ID: LIB3061-051-Q1-K1-B5
ctgcatgccgcgtatcatgccatgaacttaggggagagcaatctgtgctgctgaaatcaaaacccttgtgaacgtttgttctgaacataactggaactctgcatttgcttgtatgacatgcgtatggttcaggaagtttaattccaatatttggtcact

SEQ ID NO: 544 - DNA, 433 bp, Zea mays
  Clone ID: LIB3061-051-Q1-K1-B6
cagttacctttggtgcatttattggcacaaaacatcagggcacaacaactacgagacagcttgtgctagcaaaccttgctgcctactctcagcaacagcagtttcttccattcaaccaactaggttcattgaactctgcttcttatttgcaacaacaacaactaccattcagccagctacctgctgcctacccccagcaatttcttccattcaaccaactagcagcattgaactctcctgcttatttacagcagcaacaactactaccattcagccagctagctggtgtgagccctgctaccttcttgacacaaccacagttgttgccgttctaccagcacgttgcgcctaacgctggcaccctcttacaactgcaacaattgctgccattcaaccaacttggctttgacatacccagcagtgttctaccaac

SEQ ID NO: 545 - DNA, 437 bp, Zea mays
  unsure (1)..(437): unsure at all n locations; Clone ID: LIB3061-051-Q1-K1-B7
gcaaagcggcagtgcgtagagaggatcgtcgaacagaacagcatgaagatggggatggttctcgtcgtgtgcctggctctgtcagctgccagcgcctctgcaatgcagatgccctgcccctgcgcggggctgcagggcttgtacggcgctggcgccggcctgacgacgatgatgggcgccggcgggctgtacccctacgcggagtacctgaggcagccgcagtgcagcccgctggcggcggcgccctactacgccgggtgtgggcagccgagcgccatgttccagccgctccggcaacagtgctgccagcagcagatgaggatgatggacgtgcagtccgtcgcgcagcagctgcagatgatgatgcagctngagcgtgccgctgccgncagcagcagcctgtacgagccagctctgatgcagcagcagcagcagct

SEQ ID NO: 546 - DNA, 387 bp, Zea mays
  Clone ID: LIB3061-051-Q1-K1-B8
cagaaacacaccaagcgaagcgcactagcaacgacctaacaccaatggctaccaagagattagccctccttgcgcttcttgcccttttagtgagcgcaacaaatgcgttcattattccacagtgctcacttgctcctagtgccattattccacagttcctcccaccagttacttcaatgggcttcgaacatccagccgtgcaagcctacaggctacaactagcgcttgcggcgagcgccttacaacaaccaattgcccaattgcaacaacaatccttggcacatctaaccctacaaaccattgcaacgcaacaacaacaacaacaacagtttctgccatcactgagccacctagccgtggtgaaccctgtcacctacttgcaacagc

SEQ ID NO: 547 - DNA, 382 bp, Zea mays
  Clone ID: LIB3061-051-Q1-K1-B9
gtaacgtcttccagtggcaggtcaccatcatcggcccggccgacaccctatatggtggaggctacttcgatgcaataatgacctttccccagaactataccaacagaccgccatcagtaagattcacttctgggatgcggcatccgaatgtttatacggatggtcgtgttcagcatcatctattcttcatccacctgctgaagatcccagtggttatgagcttgcacgcgaacggtggacaccagtgcacacggttgaaagtatagttctgagcatcattacaatgctatctattccgaatgacgagtctccagcagatattgaagctgccaaggactggatagagaagcgggatgagttcaagaagaaggttaggcaatgt

SEQ ID NO: 548 - DNA, 444 bp, Zea mays
  unsure (1)..(444): unsure at all n locations; Clone ID: LIB3061-051-Q1-K1-C1
gccaatgttttcggtgaagtttgacagttctgatattcctgcgtctggtgataggggctttggggcttacatagctccagtcaaagggaagacctcagaaagagttgaagatgttgacctgctgattaggagggcagagagatgcttggaagcaggcgctgatatgatcatgatcgatgctgatgatgtttgccagcgtgctgaatctctgaggacagacatcatcgccaagattgtaggccggctcgggcttgataaaaccatgtttgaagcttccaactccaacacctcggagtggttcgtcagacgttatggcccaagggtaaatctctttgttgaacactctgacgtgatgaatctggagcgcctncggggcttcaacatgcgcagaagcaactcggncttccgttttgcctcgncgttctttctgatctaatgggctaa

SEQ ID NO: 549 - DNA, 403 bp, Zea mays
  Clone ID: LIB3061-051-Q1-K1-C10
agaccaactagcaacatagaaagcacaatagtgtaccaacaatggcagccaaaatgtgctgcctccttatgctccttggtctttctgcaagtgctgctacggcgaccattttcccacaatgctcacaagctcctatagcttcccttcttcccccgtacctctcaccagcggtgtcttcggtatgtgaaaacccaattcttcaaccctataggatccaacaggcaatcgcagctggcatcttacctttatcacccttgttcctccaacaatcatcagccctattacagcagttacctttggtgcatttattggcacataacatcaaggcacaacaactacaacaacttgtgctagcaaaccttgctgcctactctcaacaacaacagtatcttccattcaacca

SEQ ID NO: 550 - DNA, 230 bp, Zea mays
  Clone ID: LIB3061-051-Q1-K1-C12
accaacttgcttcggcaaactcaacagtgttctaccaacaacccatcattggtggtggcctcttttagattgcttatgagtcatagttcaatagtgaagttttcttggatgatgtttgcggcgtcccagaaataagatagtacatttctagattcttaacacataacatcaaagaccgatacactatgtgaaaacacatctcttaaaccatacgaagcttgaacgcgcta

SEQ ID NO: 551 - DNA, 443 bp, Zea mays
  Clone ID: LIB3061-051-Q1-K1-A6
ctccggggttcggtttcgtgggtgggcggatcgagatggcggcgtcggatggggagggccgctgcttcgtcggcggcctcgcctgggccacggacgaccactccctccacaacgccttcagcacctacggcgaggtcctcgagtccaagatcatcctcgatcgggagacgcagaggtcccgcggcttcggcttcgtcaccttctccacggaggaggcgatgcggaacgccatcgagggcatgaacggcaaggagctggacggccgcaacatcaccgtcaacgaggcccagtcccgcggcggccgtggaagcggcggcggcggctacggtggtggccgtggaggcggcggctacggcggtggcgggcgccgtgatggctgcggcggctacagccgttggcgcggcggctacggtggcggcagtggctacggtggtggtggtggc

SEQ ID NO: 552 - DNA, 252 bp, Zea mays
  Clone ID: LIB3061-050-Q1-K1-D1
agcaagttcaacgctgtcattctcaagaggcttttcatgagtaaaaccaaccgaccaccaatgtgcatgcgccgccttgtcaagtttatggaaggaaaggagaagaacattgctgtcattgttggcacagtcacagatgacaaaaggatccaggaggttccagcaatgaaggttactgccctgaggttcacggagacagcaagggccaagattgtcaatgctggtggcgaatgcctcacatttgaccagctt

SEQ ID NO: 553 - DNA, 392 bp, Zea mays
  Clone ID: LIB3061-050-Q1-K1-D10
agcattcagaaacacacctagcgaagcgcactatcaacgacctaacatcaatggctaccaagatggtatccctctttgcgcttcttgccctttttgtgagcgcatcaaatgcgttcattattccacaatgctcacttgctcctagtgccattattccacagttcctccctccagttacttcaatgggcttcgaacacccagctgtgcaagcctacaggctacaacaagcgcttgcggcgagcgtcttacaacaaccaattgcccaattacaacaacaatccttggcacatctaaccatacaaaccatcgcaacgcatcagcaacaacaatttctaccagcactgagccaactagctgtggtgaaccctgtcgcctacttgcaacagcagttg

SEQ ID NO: 554 - DNA, 428 bp, Zea mays
  Clone ID: LIB3061-050-Q1-K1-D11
cggacgcgtgggcggacgcgtgggagaccagcaagcaacatagaaagtagaatccattagcaacagtagagcaacaatggcgaccaagatattttccctccttatgctccttgctctttctacatgtgttgctaacgcgacaattttccctcaatgctcacaagctcctatagcttcccttcttcccccataccttccatcaattatagcttcagtatgtgaaaacccagctcttcaaccatataggcttcaacaagcaatcgcagcaagcaacatacctttatcgcccttgttgtttcaacaatcaccagccctatctttggtgcagtcattggtacaaaccatcagggcacaacagctgcagcaactcgtgctacctgtgatcaaccaagtagctctggcaaacctttctccctactctcagcaac

SEQ ID NO: 555 - DNA, 435 bp, Zea mays
  unsure (1)..(435): unsure at all n locations; Clone ID: LIB3061-050-Q1-K1-D12
gcagagccggcgtgaccagcgaggcgagatcgtccgcgtggagccggagcacggctttcaccagctgaatccgtcgccgtcgtcgtcgtcgttttcgttcccatcgtcacaagtccagtaccaaacgtgccagcgcgacgtcgacaggcacaacgtctgcgccatggaggtgaggcacagcgtcgaacggctggaccaggccgacgtctacagccctggggctgggaggatcacacgccttaccagccacaagttccccgtcctcaacctcgtacagatgagcgcggtgcgggtagacctgtaccaggacgccatcatgtcgccgttctggaacttcaacgcccacagcgccatgtacggcatcaggggcagtgcaagggtccatgtcgccagcgacaacgggaccacggtgttcgacgacgtgctncgtgcggg

SEQ ID NO: 556 - DNA, 445 bp, Zea mays
  Clone ID: LIB3061-050-Q1-K1-D2
agcaacgtaaaaagcacaatagtgtaccaactatggctgccaaaatattttgcctccttatactgcttggtctttctgcaagagctgctacagcgaccattttcccgcaatgctcgcatgctcctatcacttacatacttcccccgtacctatcaccatccgtgtcttaagtatactaaaacccaattcttcaaccctacaggatccaacatgcaatctcatctggcatcttacctttatcaccctcagtcctccaacaatcatcaaccctattacaacacttacctcttgagcatttattggcacaaaacatcagggcacaacaactacaacaacttgtgctaacaaaccttgatgcctactatcatcaacagcagcttcttccattcaaccaactaagttcattgaactctgcttgttatttgcaacatcaacgactaccatt

SEQ ID NO: 557 - DNA, 462 bp, Zea mays
  Clone ID: LIB3061-050-Q1-K1-D3
agctcagcgactccagattggagaactcgacaccatgaaggtgctgatcgttgcccttgctctgctggcgctcgctgctagcgccgcctccagtacaagcggcggctgtggctgccagacaccaccgtttcatctaccggctccgttctatatgccgtctccgttctatctgccgccgcaacagcagccgcagccatggcaataccccactcaaccaccgcagctaatcccgtgccatcagttcggatcctgctgggtcagcagcgtccgcagcccgttcctgggccagtgcgtcgagttcctgaggcaccagtgcagtccggcggcgacgccctacggctcgccacaatgccaggcgctgcagcagcagtgctgccaccagatcatgcaagtagagccgctgcaccggtaccaggccacataccgtgtggtcctgcagtcctttctgcagcatcatccgca

SEQ ID NO: 558 - DNA, 449 bp, Zea mays
  Clone ID: LIB3061-050-Q1-K1-D4
accatacctctcaccagcggtgtcttcaatgtgtgaaaccccaattgttcaaccctacacgatggaacaggcaatctcaacaggcatcttaccattatcacccttgttcctgcaacaaccgtcagccctattacagcagttacctttggtccatttggtggcacaaaacatcatggcacaacaactacaacaacttgtgctagcaaaccttgctgcatactctcagcaacatcagtttcttccattcaaccaactggctgcattgaactctgctgcttatttgcaacaacaattaccattcagccagctagttgctgcctacccccagcaatttcttccattcaaccaactagcagcattgaactctgctgcttatttacagcagcaacaactactaccattcagccagctagctgatgtgagccctgctgcctttttgacacaacaac

SEQ ID NO: 559 - DNA, 449 bp, Zea mays
  Clone ID: LIB3061-050-Q1-K1-D5
attgagaccagcaagcaacatccaacgtagaatccatcagcaacaatagagcaacaagggcgacgaagatattttccctcgttatgctccttgctctttctacatgtgctgctaacgcgacaattctccatcaatgctcacaagctcctatagcttcccttattccaccataccttgcatcaattatagcttcagtatgtgacaacccagctcttcaaccatatatgcttcaacaagcaatcgcagcaagcaacatacctttatcgcccttgttgcttcaacaatcaccagccctatctttggtgcagtcattggtacaaaccatgacggcacaacagctgcagcaactcgtgctacctgtgatcaactcaatccctctggcaaaccttctctcctactctcaacaacaacaatttctcccatttaaccaactgtctacactgaaccct

SEQ ID NO: 560 - DNA, 197 bp, Zea mays
  Clone ID: LIB3061-050-Q1-K1-D6
ttcagaaacacaccaagcgaagctacctagcatcgacttaacaacaatggctaccaatgtatgagccctccttgcgcttcttgccctttttgtgagcgcaacaaatgcgttcattattccacaatgctcacttgctcctagtgccattataccacagtttctccgaccagttacttcaatgggcttcgaacacctag

SEQ ID NO: 561 - DNA, 312 bp, Zea mays
  Clone ID: LIB3061-050-Q1-K1-D7
ctagcaacatataaagcacaatagtgttccaacaatggcagtcaaaatattttgcttcgttatggtccttggtctttctgcaaatgctgctaccgcaaccattttcccacaatgctcacaagcttctatagcttcctttattaccacatacctatcaccagcggtgtcttcagcatgtgaaaacccaattcttcaaccctacaagatccaacaggcaatcgcagcaggcatcttacctttatcacccttgatccttcaacaaccagtagccctattacagggagtacctttggtgcatttgttggcacaaaa

SEQ ID NO: 562 - DNA, 398 bp, Zea mays
  Clone ID: LIB3061-050-Q1-K1-D8
gcgtgagcacgtgccgccggccgtctccgctgtcacctccctgccagttatcgacatgggtcgcggccgcgacgaggtccgccgcgctatcctcgacgccggcatggagttcggcttcttgctggtggtggagcacggcatcccagaggaggtgatgcgcgacatgctggaggtgtgcgaggagttcttccagctgccggcggcgagcaaggcgtacatgtactcggaggacagtcagagacccaaccggatcttctacggcacaacctacgacacgggcggcgacaagtactggcgggacttgctccgtctcggctggcccttgttcttcccggtcggcagcggcacaagggacgactgggcggacacgccccaacggctgaagggtgtcgaggaac

SEQ ID NO: 563 - DNA, 429 bp, Zea mays
  Clone ID: LIB3061-050-Q1-K1-D9
gcaacatagaaagtggaatccagtagcaacaacagagcaacaatggcgaccaagatattgtcccggcttatgctccttgctctttctgcatgtgttgctaacgcgacaattttccctcaatgctcacaagctcctatagcttcccttcttcccccataccttccatcaatgatagcttcagtatgtgaaaacccagctcttcagccctataggctccaacaagcaatcgcagcaagcaacatacctttatcacccttgttgtttcaacaatcgccagccctatctttggtgcagtcattggtacaaaccatcagggcacagcagctgcagcaactcgtgctacctgtgatcaaccaagtagctctggcaaacctttctccctactctcagcaacaacaatttcttccattcaaccaactgtctacactg

SEQ ID NO: 564 - DNA, 447 bp, Zea mays
  Clone ID: LIB3061-050-Q1-K1-E10
ctagatgggagcacaaaagctttgggttggcaactgctgggctcatctttagaggggagtgcaaaagcttcaggctggaaaccgccagctttatcgattgaagggattgctaatgcctcaggttcgcaagcattgtatcctacgcaagggagcacaaaatcttcaggttgtcagcgatcaagttcatccccagatgggaatagaaaagccccaggttggcaacagtcaagtacatcaccggtggggagtggaaaagctcatggctggcaacgatcaggttcttttacccagggtggtacaaaagctgcaggttggcaaccctctggttcttctacagatcggagtgcaaaagttgatggctggcaacgaacaagttcatctccggagggaaacagaaaagcttcaggctggcattcatcaggtcgtgagagctcaaagatcacatat

SEQ ID NO: 565 - DNA, 417 bp, Zea mays
  Clone ID: LIB3061-050-Q1-K1-E11
gcgtgccacagcaaggctgagtttgacgcccacatgaccaaggcccaggaagccggcaagctggtggtcatcgacttcactgccgcctggtgcggtccatgccgcgccatcgccccactgttcgtcgaacacgccaagaagttcactcaggtcgtcttcctgaaggtggacgtggacgaagtgaaagaagtcaccgcggcctacgaggtcgaggcgatgccgaccttccacttcgtcaagaacggcaagacggtcgcgaccatcgtgggtgccaggaaggacgagctcctggccctgatcgagaagcatgccgcgcctgcgcctgcgactgcgtctgcctaaatgagatcagatcaatcgtcgccgtcaataaaggccagcacgtatggcttgaaatgttgtcgttatcagtttctg

SEQ ID NO: 566 - DNA, 437 bp, Zea mays
  Clone ID: LIB3061-050-Q1-K1-E12
gcggcgagcgtcttacaacaaccaatttcccagttgcaacaacaatccttggcacatctaacagtgcaaaccatcgcaacgcaacagcaacaacaattcctaccagcactgagccacctagccatggtgaaccctgccgcctacttgcaacagcagttgcttgcatcaaacccacttgctctggcaaacgtagttgcaaaccagccacaacaacagctgcaacagtttctgccagcgctcagtcaactagccatggtgaaccctgccgcctacctacaacagcaacaactgctttcatctagcccgctcgctgtggccaatgcacctacatacctgcaacaacaattgttgcaacagattgtaccagctctgactcagctagttgtggcaaaccctgctgcctacttgcaacagctgcttccattcaaccaactgac

SEQ ID NO: 567 - DNA, 421 bp, Zea mays
  Clone ID: LIB3061-050-Q1-K1-C9
agcccaccgaattccctgcgattcctctcccctcgcctcctcgtctccccctaggggatcgtcggagaggaatcgcaaagagggccgtctcatccgagttaaggaagccatggagcacaaggaggctgggtgccaggcccccgagggacccatcctctgcatcaataactgtggcttcttcggcagcgcggcgaccatgaacatgtgctccaagtgccacaaggagatgataacgaagcaggatcaggccaagctggctgcctcctctatcgacagcatcgtgaacggcagcgacgccgtcatggagccggttgttgctggcagcaacacggtagtagctgttgcccaagttgagttgcaaacaatgaacgtgcagcaacccgctgatgttgccggacccagcgagggggtggcggcgatc

SEQ ID NO: 568 - DNA, 445 bp, Zea mays
  Clone ID: LIB3061-050-Q1-K1-B3
caactagcaacatagaaagcacaatagtgtaccaacaatggcagccaaaatattttgcttccttgtgctgcttggtctttctgcaagtgttgctaccgcaaccattttcccacaatgctcacaagctcctatagcttcccttcttcccccatacctctcaccagcggtgtcttcaatgtgtgaaaccccaattgttcaaccctacaggatccaacaggcaatcgcaacaggcatcttaccattatcacccttgttcctccaacaaccgtcagccctattacagcagttacctttggtccatttggtggcacaaaacatcagggcacaacaactacaacaacttgtgctagcaaaccttgctgcatactctcagcaacatcagtttcttccattcaaccaactggctgcattgaactctgctgcttatttgcaacaacaattacca

SEQ ID NO: 569 - DNA, 462 bp, Zea mays
  Clone ID: LIB3061-050-Q1-K1-B4
tcttactcatctagcaacatataaagcacaatagtgttctcaactatggctgccaaaatattatgcttccttgtgctggttggtctttctgcaagtattgctacctcaaccattttcccacaatgctcacaagctcctatagcttcccttcttccttcatacctctcaccaaacgtgtcttcaatttgttaaaccccaattgttcaaccctaccttatccaacaagcaattccaacaagcatcttaccattatcaaccttgttactccaacaacccgtaaccctattacaacaattacctttggtccattttgtggcacaaaacattaatgcacaacaactaccacaacttgtgctaacaaaccttacttcatactcttaacaacatcaatttctttcattcaaccaacttgcttcattgaactctactgcttattttcaacaacaattaccattcaatcat

SEQ ID NO: 570 - DNA, 378 bp, Zea mays
  Clone ID: LIB3061-050-Q1-K1-B5
aattaattcacaaaagctgagaagacggggggtcacacatcatacttctttcgccatggcaatggaaaacaactacgcatgcccaccacccagcaagggaaacctgatcacagtcttgagcatcgatggtggtggggtcaagggcgtcatccctgctaccttccttgcattccttgagtctaaactgcaggtaaactctacacgctcattggtccttgagcctaaatgcatatatacatgcaagtttgagtgccatttattcgttggtgttcttctacattttcctaggagcttgatgggagcagcgcgcgcatagctaactactttgatgtcatcgctggaacaagcacaggtggacttattgctgcaatgctggca

SEQ ID NO: 571 - DNA, 466 bp, Zea mays
  Clone ID: LIB3061-050-Q1-K1-B6
aagatattcagggaccaggggaagaacattcatgaatacaagggccctagggaggctggtggcggtgtggattacttgaagaagcaggttggccctgcgtccaaggagatcaagtcaccagaagatgcgacggcccttatcgatgacaagaagatctacattgttggtatcttcgctgaattcagcggcaccgaatttacaaacttcatgaaggtcgcagagaagctgaggtctgactacgactttggccacactttgcatgccaaccaccttccacgtggtgatgcagcagtggaacggccattggtcaggctgctgaagccatttgatgagcttgttgttgacagcaaggattttgatgtcgctgcactgatgaagtttattgatgctagcaccatccctagagttgtcacttttgacaagaaccctgacaaccacccatacctcatgaaattcttccaaagct

SEQ ID NO: 572 - DNA, 349 bp, Zea mays
  Clone ID: LIB3061-050-Q1-K1-B7
gtgggttggcttctcctccccctacggttcgggttcgggttcgtgaggttctccggggttcggtttcgtgggtgagcggatcgagatggcggcgtcggatgttgagtaccgctgcttcgtcggcggcctcgcctgggccacggacgaccactacctccacaacgccttcagcacctacggcgaagtcctcgagttcaagatcatcctcgatcgggagacgcaaaagtcccgcggcttcggcttcgtcaccttcttcactgaggacgcgattcggaacgccatcgaaggcatgaaccgcaaggagctggacggtcgcaacatcaccgtcaacgaggcccagtcccgcggc

SEQ ID NO: 573 - DNA, 434 bp, Zea mays
  Clone ID: LIB3061-050-Q1-K1-B9
attgagaccaactagcaacatagaaagcacaatagtgtaccaacaatggcagccaaaatggttgggctccttatgctccttggtctttctgcaagtgctgctacggcgaccattttcccgcaatgctcgcaagctcctatagcttcccttcttcccccgtacctctcaccagcggtgtcttcggtatgtgaaaacccaattcttcaaccctacaggatccaacaggcaatcgcagctggcatcttacctttatcacccttgttcctccaacaatcatcagccctattacaacagttacctttggtgcatttattggcacaaaacatcagggcacaacaactacaacaacttgtgctagcaaaccttgctgcctactctcagcaacagcagtttcttccattcaaccaactaggttcattgaactctgcttctta

SEQ ID NO: 574 - DNA, 430 bp, Zea mays
  Clone ID: LIB3061-050-Q1-K1-C11
tgccattgccatctactgacctgtgacctccgcatttccaaacagcccgagcgagctagagctagcagagcggcaggcacctccctcctcaaggaacatggcccgcacgcagcagttggcagtagtggcgaccgccgtggtggccttggtgctgctggcggcggcggctacctcggaggcggccatcagctgcgggcaggtggcgtcggccatcgcgccctgcatctcctacgcgcgcggccagggctcggggccctccgccggctgctgcagcggcgtcaggagcctcaacaacgccgtccgcaccaccgtcgaccgccgcgccgtctgcaactgcctcaagaacgccgtcgccggcgtcagcggcctcaacgccggcaacgccgtcagcatcccctccaagtgcggcgtcagcatcccctacaccatc

SEQ ID NO: 575 - DNA, 429 bp, Zea mays
  Clone ID: LIB3061-050-Q1-K1-C12
cgctcactgactgactactgtaataccagagatcgaacaacttggtcctgcagctcaagaagagagttttgtgcatttgggggccgggggcaagagagagagagagagccatggcggcggaccagcagccgcagctgcaggaggagatgaacgactctgccggcggcggcctcaggctgcctccagggttccgcttccacccgagcgacttcgagattgtcagcttctacctcaccaacaaggtgctcaacacgcgcttcacctgcaccgccatcacggaggccgacctaaacaagattgagccatgggacctcccgagcaaggcgaagatgggcgagaaagagtggtacttcttctaccagaaggaccgcaagtacccgacggggctgaaggcgaaccgggccaccgaggccggttactggaaagcga

SEQ ID NO: 576 - DNA, 200 bp, Zea mays
  Clone ID: LIB3061-050-Q1-K1-C2
ctcgcgcaaaaccgtagcgccctcgcctgctcgccgccgccgtcgttgcgagctccccatctgggtccggtgaccatggcgacccagatcagcaagaagaagaagttcgtcagcgacggcgtgttctacgccgagctcaatgagatgctgacgcgggagctcgcggaggacggctactcccgcgtggaggtgcgtgtcac

SEQ ID NO: 577 - DNA, 452 bp, Zea mays
  Clone ID: LIB3061-050-Q1-K1-C3
cagaaacacacctagcgaagcgcactatcatcgacctaacaacaatggctaccaagatattatgcctctttgcgcttcttgccctttttgtgagcgcaacaaatgcgttcattattccacaatgctcacttgctcctagtgccattattccacagttccttcctccagttacttcaatgggcttcgaacacccagctgtgcaagcctacatgctacaacaagcgcttgccgccagcgtcttacaacaaccaattgcccaattacaacaacaatccttggcacatctaaccatacaaaccatcgcaacgcatcagcaacaacaatttctaccagcactgagccaactagctgtggtgaaccctgtcgcctacttgcaacagcaattgcttgcattcaacccacttgctctggcaaacatagttgcataccaactacaacaacaattgcaacag

SEQ ID NO: 578 - DNA, 429 bp, Zea mays
  Clone ID: LIB3061-050-Q1-K1-C4
cttacacacaccgagcgattcgctctatcctctacctaaccactgtggctaccaagatattatcgctctgtgctcttcgcgccctttacgtgagctcatcacatgcgttcattattccacagtgctcacttgctcctagtgccattattccacagttacttcctacagttacttcaatgagcttcgaacacccaactgttcaagccttctagctacaacaagctcttgccaccagcctctaacaacatccaattgcccaattacaacaacattccttggctcatctaaccatacaaactatcgcaactcatcaacgtcaacaatttctaccagcactgagccaactagcttaagcgaaccctgtctgctaattgcaacagcatattcttgcattcaacccactttctcttgcaaacataggtgcatacc

SEQ ID NO: 579 - DNA, 400 bp, Zea mays
  Clone ID: LIB3061-050-Q1-K1-C5
ctggcaaacctttgtacttactctgagcaacatcaatttcttccattcaaccaactgggtacagtgaaccctgctgcttattcgaagcaacaactattaccatttagccagctagctactgcctactatgagcaacaacaacttcttacatttaaccaattggacgcactgaacctcactgcttatttgcagcaccaaatactactggcatttaacgagctagctgcaacaagtcatgcttccttcttgacacaggaacagctgctggctttctacaagcagtttgcggataaccccgaaaccctcttacaactacaacaattgctggcctttgtccaacttgatttgacaaacccaacaaccttctaccaacaacacatcaatggtggtgccctatttt

SEQ ID NO: 580 - DNA, 401 bp, Zea mays
  Clone ID: LIB3061-050-Q1-K1-C6
aggaggcttagggaactcttgacaaccaaacttcatatctatcacatttccagtcaagggccggggctgctgaaatagctgctaaaaggtgactaccttttcttcttcttccccgggaacatcttgtgaggacgagatgtggttctgtgactgttgccgtgtacggagacgaggacaagccagcgcttataacgtacccggatgtagctctgaactacatgtcctgtttccaaggattcttcttctgcccggaagtggcgtctttgctgctacacaacttctgcgtctaccacaccaatccccatgggcacgaggagtcctacagatgggagcagctacaatgtcgtcagatgtgccggtgccatctgttgctgatctcgctgatcaagttgcaaatgtgc

SEQ ID NO: 581 - DNA, 297 bp, Zea mays
  Clone ID: LIB3061-050-Q1-K1-C8
cctagatcagaagagcctcggagggatgatcttcgtgccgatagggatcgtgaaaagtggctggggacggtacgggaaatagaccgtgacgagaggacccgtgaacgttcgcatgaccggactcgtgatagagatctacgagatgagaagcatcaccatagagaccgtgagaggactcgggatagggagagaggaacggaccgtgagcgataccacggacgtgaccgggagcatgatcgtcatgacttggtcctagatcgtggtctggactatgatagagaaagggaccgtggtcgg

SEQ ID NO: 582 - DNA, 429 bp, Zea mays
  Clone ID: LIB3061-050-Q1-K1-B2
cagaaacacacctagcgaagcgcactatcatcgacctaacaacaatggcttccaagacattatcgctacttgcgcttcttgccctttatgtgagtgcaacaaatgcgttcattattacacaatgctcacttgctccgagtgccattattccacagttcctccatccagttacttcaatgggcttcgaacacccaactgtgcaagcctataggctacaacaagcgcttgcagcgaacgttttaaaacaaccaattggccaattacaacaacaattcttggcacatctaaccataccaaccatcgcaacgcagcagcaacaagcactgagccacctagccgtggtgaaccctatcggctacttgcaacaacagctgcttgcattcaacccacttgctttggcaaacgtaactgcataccaacaacaacaac

SEQ ID NO: 583 - DNA, 455 bp, Zea mays
  Clone ID: LIB3061-049-Q1-K1-H7
aacaagcaacatagaaagtggaatacagtagcaaaaatagagcaacaatggcggccaagatatggtccatccttatgctccttgctctttctgcatgtgttgctaacgcgaccatttttcctcaatactcacaagctcctatagctgcccttcttcccccataccttccatcaatgaccgctttagtatgtgaaaacccagcccttcaaccctacaggatccagcaagcaatcgcaacaagcaacttacctttatcacacctgttctttcaacaatcgccagccctatctttggtgcagtcattggtacaaaccatcagggcagaacagttgcagcaactcgtgctaccagtgatcagccaagtagctctggcaaacctttccccctactctcagcaacaacaatttcttccattcaaccaactgtctatactgaaccctgctgcttatttgcag

SEQ ID NO: 584 - DNA, 233 bp, Zea mays
  Clone ID: LIB3061-049-Q1-K1-H8
aaaaagcaacataaaaagagaaatacaaaattcaaaaatatagcaacaatggcggacccggaatgggggcattcttatgctccttgctcttgctacatgcgagggtaacacaaacattggccctcaattctcgcaagctaatgtagctaccctgaataccccataccttccatccatgatcgatttcctaagcgaaaacccaggccttgatctttacaggattcaccgtgcaa

SEQ ID NO: 585 - DNA, 434 bp, Zea mays
  Clone ID: LIB3061-049-Q1-K1-H9
gcaacatagaaagtagaatccattagcaacaatagagcaacaatggcgaccaagatattttccctgcttgtgctccttgctctttctacatgtgttgctaacgcgacaattttccctcaatgctcacaagctcctatagcttcccttcttcccccataccttccatcaattatagcttcagtatgtgaaaacccagctcttcaaccatataggcttcaacaagcaatcgcagcaagcaacatacctttatcgcccttgttgtttcaacaatcaccagccctatctttggtgcagtcattggtacaaaccatcagggcacaacagctgcagcaactcgtgctacctgtgatcaaccaagtagctctggcaaacctttcttcctactctcagcaacaacaatttctttcattcaacccactggctacactgaaccc

SEQ ID NO: 586 - DNA, 353 bp, Zea mays
  Clone ID: LIB3061-050-Q1-K1-A1
caaaagcacaccaagcgaagcgcactagcatcgacctatcaccaatggctaccaagatattagggctccttgcgcttcttgcccttttagtgagcgcaacaaatgcgttcattattgcacagtgctcacttgctcctagtgccagtattccacagttcctccaaccagttacttcaatgggcttcgaacatccagccgtgcaagcctacaggctacaactagcgcttgcggcaagcgccttacaacaaccaattgcccaattgcaacaccaatccttggcacatttaaccttacaaaccattgcaacgcaccaccaacaacaccagtttttgccatcactgagccacctagcc

SEQ ID NO: 587 - DNA, 349 bp, Zea mays
  Clone ID: LIB3061-050-Q1-K1-A10
attgagaccaactagcaacatagaaagcacaatagtgtaccaacaatggcagccaaaatattttgcctccttatgctccttggtctttctgcaagtgctgctacggcgaccattttcccgcaatgctcgcaagctcctatagcttcccttcttcccccgtacctctcaccagcggtgtcttcggtatgtgaaaacccaattcttcaaccctacaggatccaacaggcaatcacagctggcatcttacctttatcacccttggtcctccaacaatcatcagccctattacatcagttacctttggtgcatttattggcacaaaacatcaaggcacaacaactacaacaac

SEQ ID NO: 588 - DNA, 430 bp, Zea mays
  Clone ID: LIB3061-050-Q1-K1-A11
gtcgtcccgaccttcttttcaatcccgtctcggattcgttccgtctcagctaccgcgacgacgaggccgacgcgagagggcagggaacacagccactcgccgacgagaccccggcgcgcgcgagagaaagagaagagaggaggatcttttgttcgtgaaaaatattggaggcggagggaaggtgaaggagggggatcggagatgaacgtgttccggctggcgggggacatgacccacctcctcagcgtggtagtgctgctcctcaagatccataccatcaagtcctgcgcaggcatatctctgaagacacaggagctgtatgcacttgtttttgcagcacggtacctggacctgtttgttcattttgtgtctctgtataacactgtcatgaagctggtcttcttggcaagttctttctcgatagtttggt

SEQ ID NO: 589 - DNA, 306 bp, Zea mays
  Clone ID: LIB3061-050-Q1-K1-A12
caactagcaacatacatagcacaatagtttaccaacaatggcagccaaaatatcctgcctggttaggctcctcggtctttctgcaagtcctactacctcgaccattttaccgcaatgctcgcaagctactataactaaccttcttcccccgtacctctcaccaactgtatcttcagtatatgaaaacccaattcttcaaccatacacgatccaacactcaatcgcaacttgcatcttacctttatcaccctagttcctccaacaatcatcaatcctattacaacatttacattcgtatcatttatt

SEQ ID NO: 590 - DNA, 362 bp, Zea mays
  Clone ID: LIB3061-050-Q1-K1-A2
acgcaactagcaacatagaaagcacaatagtgtaccaacaatggcagccaaaatattttgcctactgaggctggttggtctttctgcaagtgctgctaccgcgaccattttcccgcattgctcgcaagctcctatagcttcccttcttcccccgtacctgtaaccagcggtgtcttcggtatgtggaaaacccaatttttaaaccttccagaacccaacaggcattaccagctggcatttaaccttaataaccctggttcctccaccattattcacccttttaccttaattacccttagcgcctttaatggcaccaaacattaaggcacaaccacctccacaacctgggctatcaaaacttg

SEQ ID NO: 591 - DNA, 339 bp, Zea mays
  Clone ID: LIB3061-050-Q1-K1-A4
acgctcctgtctcgcatccgcagcctctcgagctctactccatcccctcgatctcgaagcgcagcagcagcagtcaggcggtcatggacgcgagcgcagtcggagccggcgggaaggcgaagaagggcgcggtcggtcgcaaggccggcgggccgaggaagaagtcggtgactaggtccgtcaaggccgggctgcagtttcccgtcggtcgcatcgggcggtacctgaagaagggccggtccgcgcatcgcgtcggaacgagcgcccccgtctacctggccgtcgtcctcaagtacttggccgccgaggtgctggagctggccggcaacgctgccaagg

SEQ ID NO: 592 - DNA, 363 bp, Zea mays
  Clone ID: LIB3061-050-Q1-K1-A5
ggccggcaccctaccccctttatcccttggttggccaccccctctcctctcatggcaggcacgcgccatttcttcctcctgcctagatctccccctcccccacgcagcaaggatcgagatgatgacgagcaagaacggattgaagagaaaaaaaggatcacggaaacgttctaccccgccccccccatctatggaaaatcttctggggaaacccctaggggcttccactccaaaccttgcttagcccattcctctttcttcaataaaggaccttgatcaaggtggggaataagggaagtagcacaccgtcaaccttaattttcataatacccttgaccaggaccaaccatgattcaattaaaa

SEQ ID NO: 593 - DNA, 119 bp, Zea mays
  Clone ID: LIB3061-050-Q1-K1-A6
caacaacccatcattggtggtgccctcttttagattgcttatgagttatacttcaataatgaaggtttttggatgatgtttgtggcttcccagaaataagaaagtacatttctagattc

SEQ ID NO: 594 - DNA, 113 bp, Zea mays
  Clone ID: LIB3061-050-Q1-K1-A7
attgagaccaactatcaacatacattgcacaacaatgcaccaacaatggcctctaatagatatggtctccttatgctccttggtctttcttcaagtgctgcatactgcgacca

SEQ ID NO: 595 - DNA, 452 bp, Zea mays
  Clone ID: LIB3061-050-Q1-K1-A8
gtcaggctagcaattagctcatcgactccatattggagaactcgacaccatgaaggtggtgatggctgcccttgctctcctggcgctcgctgcgagcgccgtctacagtacaagcggcggatgtggctgccagacaccaccgtttcatctaccgcctccgttctatatgccgcctccgttctatctgccgtcgcagcagcagtcgcagccatggcaataccccactcaaccaccgcagctaagcccgtgccagcagttcggatcctgcggcgtcggcagcgtcggcagcccgttcctgggccagtgcgtcgagttcctgaggcaccagtgcagcccggcagcgacgccctacggctcgccacagtgccaggcgctgcaacagcagtgctgtcaccagatcaggcaggtggagccgctgcaccggtaccaggcgacatacggagtggtcctgc

SEQ ID NO: 596 - DNA, 441 bp, Zea mays
  Clone ID: LIB3061-050-Q1-K1-A9
gcgtccggcaactagcaacatagaatgcacaatagtgtaccaacaatggcaaccaaaatattttgcgtactgatgctccttggtctttctgcaagtgctgctaccgcgaccattttcccgcaatgctcacaagctcctatagcttaccttcttcccccatacctctcaccagcggtgtcttcagtatgtgaaaacccaattcttcaaccctacaggatccaacaggcaatcgcagcacgcatcttacctttatcacccttgatcctacaacaaccgtcagccctattacagcagttacctttggtgcatttgttggcacaaaacatcagggcacaacaactacaacaacttgtgctagcaaaccttgctgactactctcagcaacagcagtttcttacattcaaccaactggctgcattgaactctgctgcttatttgcaa

SEQ ID NO: 597 - DNA, 319 bp, Zea mays
  Clone ID: LIB3061-050-Q1-K1-B1
gaccagctagcaacatagaaagcacactagtgtaccaacaatggcagccaaaatattttgcctgcttatgctccttggtctttctgcaagtgctgctacggcgaccattttcccgcaatgctcgcaagctcctatagcttcccttcttaccccgtacctctcaccagcggtgtcttccgtatgtgaaaacccaattcttcaaccctacaggatccaacaggcaatcacagctggcatcttacctttatcacccttgttcctacaacaatcatcagccctattacatcaattacctttggtgcatttattggcacaaaac

SEQ ID NO: 598 - DNA, 429 bp, Zea mays
  unsure (1)..(429): unsure at all n locations; Clone ID: LIB3061-050-Q1-K1-B10
cagaaacacaccaagcgaagcacattagcaacaacctaacaacaatggctaccaagatattatcggtccttgcgcttcttgcgctttttgcgagcgcaacaaatgcgttcattattccacaatgctcacttgctccaagttccattattacacagttcctcccaccagttacttcaatgggcttcgaacacccagctgtgcaagcctataggctacaacaagcaattgcggcgagcgtcttacaacaaccaatttcccagttgcaacaacaatccttggcacatctaacaatacaaaccatcgcaacgcatcagcaacaacaattcctaccagcactgagccacctagccatggtgaaccctgccgnctacttgcaacagcagttgcttgcatcaaacccacttgctctggcaaacgtaattgcaaacc

SEQ ID NO: 599 - DNA, 420 bp, Zea mays
  Clone ID: LIB3061-050-Q1-K1-B11
caaacgcgtacagtactccacagtgctcacttgctcctagtgccattattccacagttacgcccggcagttactccaatgggcttggaacacccagctgtgcaagcctacaggctacaacaagcgcttgcggcgagcgtcttacatcaaccaattgcccaattacaacaacgatccttggcacatctaaccatacataccatcgcaacgcagcagcaacaacaatttctaccagcactgagccaactagctgtggtgaaccctgtcgcctacttgcaacagcagctgcttgcattcaacccacttgctctggcaaacatagttgcataccaacaactacgacaattgcaacaggttctaccatcgctcagacaactagccatggagaaccctgccggctacctacgacagcaacaactga

SEQ ID NO: 600 - DNA, 309 bp, Zea mays
  Clone ID: LIB3061-050-Q1-K1-B12
caaacgcatacattactacacaatgctcactttctcctactgccattattacacagttacgctcgccagttactctaatggtcttagaacacccagctttacaagcctacattctacaacaatgcgctactctgctgatgctgtcttacatacaaccatattgcccaattactacaacattccttggcacatctaaccatacataccatatcatctcatcagcaacaacaatttctaccatcactgatccaactagctctgatgaaccatgaaccctacttccaacagcacttgctcgcattaaacgta

SEQ ID NO: 601 - DNA, 464 bp, Zea mays
  Clone ID: LIB3061-049-Q1-K1-H6
tgctaacgcgacaattttccctcaatgctcacaagctcctatagcttcccttcttcccccataccttccatcaatgatagcttcagtatgtgaaaacccagctcttcagccctataggctccaacaagcaatcgcagcaagcaacatacctttatcacccttgttgtttcaacaatcgccagccctatctttggtgcagtcattggtacaaaccatcagggcacagcagctgcagcaactcgtgctacctgtgatcaaccaagtagctctggcaaacctttctccctactctcagcaacaacaatttcttccattcaaccaactgtctacactgaaccctgctgcttatttgcagcaacaactattaccattcagccagctagctactgcctactctcagcaacaacaacttcttccatttaaccaattggccgcactgaaccccgctgcttatttgcagcagc

SEQ ID NO: 602 - DNA, 402 bp, Zea mays
  unsure (1)..(402): unsure at all n locations; Clone ID: LIB3061-045-Q1-K1-H12
aaaagattcgcggcggtggagtcggagctcaactcatcaatagggtttgatcagcgctgcgctcgtgctagccacccagcccccccgcgcccacttgcgacggcgatggcttcgccgtactcgctcagctgggccgacgcgccgccctaccactaccacgggagaccccagccagcgcccgactcacccgcatcctccgacggggccgggccccgctcgctctggatcggcggcctgctgccatggatggacgaggactacctctacggctgcttcaccacctcgcgcgagcttctttcccttgtcatcaaacggaacaagcagactggccaatcagagggctttggcttcctcaaattttctgaccataccgncgctgctcatattctcaagtcttacaat

SEQ ID NO: 603 - DNA, 339 bp, Zea mays
  Clone ID: LIB3061-045-Q1-K1-H2
agcatgcaaaaacacaccaagcgaagcgcactagcaacgacctaacaccaatggctaccaagatatgagccctccgtgcgcttcttgcccttttagtgagcgcaacaaatgcgttcattattccacagtgctcacttgctcctagtgccattattccacagttcctcccaccagttacttcaatgggcttcgaacattcagccgtgcaagcctacaagctacaactagcgcttgcggcgagcgccttaacacaaccaattgcccaattgcaacaacaatccttggcacatctaaccctacaaaccattgcaacgcaacaacaacaacaacaacagtttc

SEQ ID NO: 604 - DNA, 206 bp, Zea mays
  Clone ID: LIB3061-045-Q1-K1-H3
cagcacgctgcgcctaacgctggcagaatcttacaactgcaacaattgctgccattgggccaacttgctttgacaaacccagcagcattctaccaacaacccatcattggtggtgccctcttttagatttcttatgagttatagttcaataataaagttttttgtctgatgtttgtggcttcccagaaataagaaagtacatttct

SEQ ID NO: 605 - DNA, 406 bp, Zea mays
  Clone ID: LIB3061-045-Q1-K1-H4
gttcggagacccacgcgtgcgcccacgcgtccgctgatttacaaaaagtcacagatgagtacatgaaaaagatcgaatgcatccagaggcagaaggaacaggaactgatgaaaatttagacctcaagctgactgtatggctggtgaggagtaaccgcctccgtgaagcatggacccctgcatatgttggtgtttctgaagcaatttgtttggttcatggctttggcgtctcggcgctgcgccagggatgcacgttttgaatcaggcgctttgctggaacttttgggtgcacacaagttgagacaatgctgctgctgctgtgtgtgtgtgttttgagattaagacaatgctgctgtgttttttctttgagattaagacaatggctgtgcgtgtgttcttcttcgttc

SEQ ID NO: 606 - DNA, 416 bp, Zea mays
  Clone ID: LIB3061-045-Q1-K1-H5
ctgatttcatctagccctctcgatgtggttaatgcacctacatacctgagacaacaggtgctgcaacagagtgtaccagctttgactcacctagctgtggcaaaccctgctacctacttgcaacagctgcttacattcaaccaactgactgtagtccaactctgctgcgtacctacaacagcgacaacagatacttaatccactagcggtggctaacccattgctcgctgcctttctacagcagcagcaattgctgtcatacaaccagttgtctttgatgaaccctgccttggtgaggcagcaccctatcgacggaggtgccatctcttcgactacatctgagatgtactcgattgtggcgccctcatagcgtcatgcgtgtcctagacttgctcaatatattgattgagatctat

SEQ ID NO: 607 - DNA, 434 bp, Zea mays
  Clone ID: LIB3061-045-Q1-K1-H6
gcagggagttgatttatccgctgcagccatgagtaagttgcagtctgagtctgtcagggatgccatctcccagattgttggggatgccaaggagaagaataggaagttcactgagactgtggaacttcagattggtctgaagaattatgatccacagaaggacaagcgtttcagtggctctgttaagttgccccatatccctcgtcccaagatgaaggtgtgcatgcttggtgatgcccagcatgttgaggaggccgagaagatgggacttgactacatggatgttgaggctctcaagaaaatgaacaagaacaagaagcttgttaagaggcttgccaagaagtaccatgctttcttggcatcagaggccatcatcaagcagattccccgtctccttgtcctggtctcaacaaggcaggcaagttcccgaccct

SEQ ID NO: 608 - DNA, 442 bp, Zea mays
  Clone ID: LIB3061-045-Q1-K1-H7
gtggaatacagtagcaaaaatagagcaacaatggcggccaagatatttgccatccttatgctccttgctctttctgcatgtgttgctaacgcgaccatttttcctcaatactcacaagctcctatagctgcccttcttcccccataccttccatcaatgaccgctttagtatgtgaaaacccagcccttcaaccctacaggatccagcaagcaatcgcaacaagcaacttacctttatcacacctgttctttcaacaatcgccagccctatctttggtgcagtcattggtacaaaccatcagggcagaacagttgcagcaactcgtgctaccagtgatcagccaagtagctctggcaaacctttccccctactctcagcaacaacaatttcttccattcaaccaactgtctatactgaaccctgctgcttatttgcagcaac

SEQ ID NO: 609 - DNA, 415 bp, Zea mays
  Clone ID: LIB3061-045-Q1-K1-H9
tgagaccaactagcaacatagaaagcacaatagtgtaccaacaatggcagccaaaatattttgcttccttatgctccttggtctttctgcaagtgctgctaccgcaaccattttcccacaatgctcacaagctcctatagcttcctttcttcccccatacctctcaccagcggtgtcttcagtatgtgaaaacccaattcttcaaccctacaggatccaacaggcaatcgcagcaggcatcttacctttatcacccttgttcctccaacaaccgtcagccctattacagcagttacctttggtgcatttgttggcacaaaacatcaaggcacaacaactacaacaacttgtgctaggaaaccttgctgcctactctcagcaacagcagtttcttccattcaaccaactggctgca

SEQ ID NO: 610 - DNA, 407 bp, Zea mays
  Clone ID: LIB3061-046-Q1-K1-A1
tgcttatttacaacaacaacaactactaccattcagccagctagctactgcctactggcagcaggggcaatttcttccatttaaccaattggccgcactgaacccctctgcttatttccagcagcaaatactactaccatttggccagctagctacaacaagccccacttcctttttgaaacaacaacaattgcttccgttctaccagcagtttgtggctaaccccgcaaccctcttacaactgcaacagttgctgccctttgtccaacttgctttgacaaacccagcagccttctaccaacaacacatcattggcggtgccatcttttagattgcttattagttgtaattcaataatgaagttttttggctgatgtatgtggcctcctagaaataagaagttacat

SEQ ID NO: 611 - DNA, 371 bp, Zea mays
  Clone ID: LIB3061-046-Q1-K1-A10
gaccaactagcaacatagaaagcacaatagtgtaccaacaatggcagccaaaatattgtgcctccttatgctccttggtctttctgcaagtgctgctacggcgaccattttcccgcaatgctcgcaagctcctatagcttcccttcttcccccgtacctctcaccagcggtgtcttcggtatgtgaaaacccaattcttcaaccctacaggatccaacaggcaatcgcagctggcatcttacctttatcacccttgttcctccaacaatcatcagccctattacaacagttacctttggtgcatttattggcacaaaacatcagggcacaacaactaccacaacctgggcctaccaaaccttgctgcctac

SEQ ID NO: 612 - DNA, 436 bp, Zea mays
  Clone ID: LIB3061-046-Q1-K1-A11
agaagctcaaatactgatctcactgatccagtatggctatggcaaaggcaggcgcgccgagggtctcggcggcccagctggtgactctcgggctatcactcctctgcgctgtcgccggcccggccgccgcgcagaactgcggctgccagccaaacgtatgctgcagcaagtttggctactgcggcacgaccgacgagtactgcggcgacgggtgccagtcgggcccgtgccgctcgggcggcggcggcagcagtggcggcggtggtgcgaacgtggctagcgtcgtcaccggctccttcttcaacggcatcaagagccaggccgggagcgggtgcgagggcaagaacttctacacccggagcgcgttcctgagcgccgtcaaggcgtacccaggcttcgcccatggcgggtcgcaggtgcagggcaagcgcgagat

SEQ ID NO: 613 - DNA, 325 bp, Zea mays
  Clone ID: LIB3061-046-Q1-K1-A12
aactagcaacatacatagtgaaatacactagcaacatcttaacaccaatgggaaccaagaattttgccctccttgccctccttgctctttcagcaagcgctgctacctcgacttttattccacaatgctcacaacaatacctctctccggtgacagccgcgggatttcaatacccaactatacaatcctacatggtacaagaagccatccaagcaagcatcttacggtcattaacattaacccttcaacaaccatatgctctattgcaacagccatccttagtgcatctgtatcttcaaaggaatcgcggcacaacaactacaac

SEQ ID NO: 614 - DNA, 385 bp, Zea mays
  unsure (1)..(385): unsure at all n locations; Clone ID: LIB3061-046-Q1-K1-A2
gcattcagaaacacaccaagcgaagctacctagcaacgacttaacaacaatggctacgagagatattagccctccttgcgcttcttgccctttttgtgagcgcaacaaatgcgttcattattccacaatgctcacttgctcctagtgccattataccacagttcctccgaccagttacttcaatgggcttcgaacacctagctgtgcaagcctacaggctacaacaagcgcttgcggcgagcgtcttacaacaaccaattaaccaattgcaacaacaatccttggcacatctaaccatacaaaccatcgcaacacaacagcaacaacagttcctaccagcactgagccaactagatgtggtgaaccctgtcgnctacttgcaaca

SEQ ID NO: 615 - DNA, 443 bp, Zea mays
  Clone ID: LIB3061-046-Q1-K1-A3
ttcaaaaacacaccaagcgaagcgcactagcaacgacctaacaccaatggctgccaagagattagccctgcttgcgcttcttgcccttttagtgagcgcaacaaatgcgttcattattccacagtgctcacttgctcctagtgccagtattccacagttcctgccaccagttacttcaatgggcttcgaacatccagccgtgcaagcctacaggctacaactagcgcttgcggcgagcgccttacaacaaccaattgcccaattgcaacaacaatccttggcacatctaaccctacaaaccattgcaacgcaacaacaacaacaacagtttctgccatcactgagccacctagccgtggtgaaccctgtcacctacttgcaacagcagctgcttgcatccaacccacttgctctggcgaacgtagctgcataccagcaacaac

SEQ ID NO: 616 - DNA, 390 bp, Zea mays
  Clone ID: LIB3061-046-Q1-K1-A4
cgcggataattttgcaggtcacctctcgtctctcccgagcacagcaaatccatcaatgcaacagaccaacacaaacccaacctgcccccggtcgatcgcgcaaaccctagcgccgtcgcctccctctcggttctacaccgtcctctccagcctcgcccgcgtgcaccgcagatcaggggacgtacgtcgcccgcgcgcaccgcagatcaggcaacgtacgtcgcccgccggagatcggaattctgtatttttccttccgtgctcgcggctgctacggcgatggcgggcggcgggagcaggcgcgccggcgcggcggagcagccgaagatcggcagcggcaacgtcttcgccgcgctcgagacgcttaagaagaagaagaagcccgcggac

SEQ ID NO: 617 - DNA, 449 bp, Zea mays
  Clone ID: LIB3061-046-Q1-K1-A5
ccaagcgttcgctcctaccccacacagaagcggcggcggcggagcaaacgcaggcgaaggcgagggtgtgagggaaggagcaccagccatggtgcacgtcaacttctaccgcaactatggtaagacgttcaagaaaccaaggcgtccttatgagaaggagcgtcttgatgctgaactgaagctggttggtgagtatgggctgaggtgcaagcgtgagctttggagggtccagtatgcactgagcaggatccgtaatgctgcaaggcacttgctcacccttgacgagaagaacccccgtcgtatctttgagggtgaggcactttttcgccgcatgaaccgctatgggctgcttgctgagggtcagaacaagcttgattatgttcttgccctcaccgctgagaacttcctcgcaaggcggcttcaaacacttgtcttcaagctggcatggc

SEQ ID NO: 618 - DNA, 415 bp, Zea mays
  Clone ID: LIB3061-045-Q1-K1-H11
cttgcttcatcttcttcagcttgcagtgggctgctgggttttggaccttttggtaccgcggtggatcaagaagtggccgtgcatttttgcttccctggcatgtcttctttggtatattcatctatgttcttgctatcgccacaagtgtgactggactcctggagaagtcaatctttatgcagagcgccaaaatgattgagcgcttctccacagaagccatgtttatgaactccctgggaatgctgctggtgttgttgagcagccttgttattcttgcactcgttagtcctggacccagcatgatcgacacatacagaggctcttctgagtgagaggaaatgattacagcctagtttcttaagctacatttttaatcagtagctgagcaatttttgtgtacatgtacccagaatta

SEQ ID NO: 619 - DNA, 328 bp, Zea mays
  Clone ID: LIB3061-045-Q1-K1-F6
cgcacgcgtccggctgatgatccaagtagcagagctagttcccaagcggcacggaagtacatttaagcaggagcgagcgcccaatcccggtggcagttcaaagaacacaaaaggcgggaaaaagaaaaagtgatgcagtatcattgtgttgttttttgttctgttcgtcatcatacactaagcttctgtgaaaaagaaaaagtcttggacgttgttgttatgttgccattgtgccatttttcatgtataagaacttactaagaatcttccaaaaaaaaacaacaaatacaacaacttatgctaagaaaaaatactagactaataaaaa

SEQ ID NO: 620 - DNA, 429 bp, Zea mays
  Clone ID: LIB3061-045-Q1-K1-F7
cggcgagatcctcgactccaaggtcatcaccgaccgggagacggggaggtctcgcgggttcggcttcgttaccttctcctccgagaactccatgctcgacgctatcgagaacatgaacggcaaggagctcgacggccgtaacatcaccgttaaccaggcccagtcccgtggcggtggcggtggcggcggtggctacggcggcggtcgcggcggcggcggctatggtggcgggcgccgtgacggcggttatggcggcggtggcggctacggcggtcggcgcgagggtggtggcggcggctacggaggcggtggcggctacggcggtcggcgcgagggtggtggtggcggctacggcggcggcggcggcggctggagggactgatgtgtgggcccatcctggcttcggccgagttatcttatctatctata

SEQ ID NO: 621 - DNA, 262 bp, Zea mays
  Clone ID: LIB3061-045-Q1-K1-F8
gggcacaacagctgcagcaactcgtgctacctgtgatcaaccaagtagctctggcagacctttctccctactctcagcaacaacaatttcttccattcaaccaactgtctacactgaaccctgctggttatttacaggcaccaccaattacaaccattcagccagctagctactgcctactctcagcaacaacaacttcttccatttaaccaattgcccgcactgaaccccgctgcttatttgcagcagaaaatactactgc

SEQ ID NO: 622 - DNA, 353 bp, Zea mays
  Clone ID: LIB3061-045-Q1-K1-F9
agcgaaccttgctgcttacctccagcaacaacaatttcttccattcaatcaactagctggggtgaaccctgctgcttacttgcaggcacaacagctactaccattcaaccaacttgtcaggagccctgctgccttcttactgcagcaacagttgcttccattccatttacaagttgtggcaaacattgctgctttcttgcaacaacaacaacaattgctgccattttacccacaggttgtgggaaacattaacgccttcttgcaacagcaacagttgctaccattctacccacaggatgtggcaaacaatgtcgccttcttacaacaacaacaattgctgccatttaaccaac

SEQ ID NO: 623 - DNA, 413 bp, Zea mays
  unsure (1)..(413): unsure at all n locations; Clone ID: LIB3061-045-Q1-K1-G1
cgagaagctgggccttgacgccaagcccgtaacagaatgctacaaaagcgagcatgggcacaagcgcgagctcaagtacgcgaaccagaccgacgctctcgagccgccgcaccggtacgtgccctgggtggtcgtcgacgggcagcccctgctagaggattacgagaatttcgaggcttacatctgcaaggcttacaagggcactccaccgaaggcctgtgagggcctggaacgtctgcagatggccctcgagacagcggcggaggcgcgcaacggcgtcagctacaactccggtgtcagcaagcttgcgactgctgaagatganggtggggagcataaggtgggagaatactagtacgtaattgactagcgacgtgcccttttttgggtcatgtgaagatatgaaagacccg

SEQ ID NO: 624 - DNA, 418 bp, Zea mays
  Clone ID: LIB3061-045-Q1-K1-G11
ctaccggtgcatctacccaccgccggtccacctgccgccgccggtccacctgccaccggcggtccatgtgccgccgccggttcatctgccgccgccaccatgccactaccctactcaaccgccccggcctcagcctcatccccagccacacccatgcccgtgccaacagccgcatccaagcccgtgccagctgcagggaacctgcggcgttggcagcaccccgatcctgggccagtgcgtcgagttcctgaggcatcagtgcagcccgacggcgacgccctactgctcgcctcagtgccagtcgttgcggcagcagtgttgccagcagctcaggcaagtggagccgcagcaccggtaccaggcgatcttcggcttggtccttcagtccatcctgcagcagcagccgcaaagcggccag

SEQ ID NO: 625 - DNA, 415 bp, Zea mays
  Clone ID: LIB3061-045-Q1-K1-G12
ctcacttgctccgagtgccattattccacagttcctccctccagttacttcaatgggcttcgaacacccagctgtgcaagcctataggctacaacaagcgcttgcggcgagcgtcttagaacaaccaattgcccaattacaacaacaatccttggcacatctaaccatacaaaccatcgcaacgcagcagcaacaagcactgagccacctagccgtggtgaaccctatcgcctacttgcaacaacagctgcttgcatccaacccacttgctttggcaaacgtagctgcataccaacaacaacaacagttgcaacagtttctaccagcgctcagtcaactagccatggtgaaccctatcgcctacctacaacagcaacaacttctttcatctagcccgctcgctatgggcaatgca

SEQ ID NO: 626 - DNA, 270 bp, Zea mays
  Clone ID: LIB3061-045-Q1-K1-G2
attcaaccaactggctggattggactctggtgcttatttgcaacaaccattaccattgagccagcgggttgctgcctacccccagcaatttcttccattcaaccaactagcagcattgaactctgctgcttatttacagcagcaacaactactaccattcagccagctagctgatgtgagccctgctgccttcttgacacaacaacagttgttgccgttctacctgcacgctatgcctaacgctggcaccctcttacaactgcaacaatt

SEQ ID NO: 627 - DNA, 446 bp, Zea mays
  Clone ID: LIB3061-045-Q1-K1-G3
gagaccaactagcaacatagaaagcacaatagtgtaccaacaatggcagccaaaatattttgcttgcttatgctccttggtctttctgcaagtgttgctaccgcaaccattttcccacaatgctcacaagctcctatagcttcccttcttcccccatacctctcaccagcggtgtcttcaatgtgtgaaaccccaattgttcaaccctacaggatccaacaggcaatcgcaacaggcatcttaccattatcacccttgttcctccaacaaccgtcagccctattacagcagttacctttggtccatttggtggcacaaaacatcagggcacaacaactacaacaacttgtgctagcaaaccttgctgcatactctcagcaacatcagtttcttccattcaaccaactggctgcattgaactctgctgcttatttgcaacaacaatt

SEQ ID NO: 628 - DNA, 353 bp, Zea mays
  Clone ID: LIB3061-045-Q1-K1-G4
aacacaccaagcgaagcgcactagcaacgacctaacaacaatggctaccaagatatgagccctccttgcgcttcttgccctttttgtgagcgcaacaaatgcgttcattattccacaatgctcacttgctcctagtgccattattccacagttcctcccaccagttacttcaatgggcttcgaacacctagctgtgcaagccaacatgcaacaacaagcgcttgcggcgagcgtcttacaacaaccaattgcccaattgcaacaacaatccttgccacatctaacaatacaagccatcacaacgcaacagcaacaacagttcctaccagcactgagccacctagccatggtga

SEQ ID NO: 629 - DNA, 455 bp, Zea mays
  unsure (1)..(455): unsure at all n locations; Clone ID: LIB3061-045-Q1-K1-G5
cagcaagcaacatagaaagtagaatccattagcaacaatagagcaacaatggcgaccaagatattttccctccgtatgctccttgctctttctacatgtgttgctaacgcgacaattttccctcaatgctcacaagctcctatagcttcccttcttcccccataccttccatcaattatagcttcagtatgtgaaaacccagctcttcaaccatataggcttcaacaagcaatcgcagcaagcaacatacctttatcgcccttgttgtttcaacaatcaccagccctatctttggtgcagtcattggtacaaaccatcagggcacaacagctgcagcaacttgtgctacctgggatcaacccagtaactcttgccaaacctttctccctactctcagcaccaacaattncttccattcaaccaactgtctacactggaccctgctgcttatttgc

SEQ ID NO: 630 - DNA, 438 bp, Zea mays
  Clone ID: LIB3061-045-Q1-K1-G7
gaaaacccagctcttcaaccatataggcttcaacaagcaatcgcagcaagcaacatacctttatcgcccttgttgtttcaacaatcaccagccctatctttggtgcagtcattggtacaaaccatcagggcacaacagctgcagcaactcgtgctacctgtgatcaaccaagtagctctggcaaacctttctccctactctcagcaacaacaatttcttccattcaaccaactgtctacactgaaccctgctgcttatttgcagcaacaactattaccatttagccagctagctactgcctactctcagcaacaacaacttcttccatttaaccaattggccgcactgaaccccgctgcttatttgcagcagcaaatactactgccatttagcgagctaactgcaacaagtcgtgctttcctcttgacacagcaacag

SEQ ID NO: 631 - DNA, 236 bp, Zea mays
  Clone ID: LIB3061-045-Q1-K1-G8
cccacgcgtccgttcttccttgctgtgcactacacaaaccaaccataacttctcttgttctcgttctcttccctgcgtgaaccgcggaccaagaagaagcgggcgttggggactttgggatttgaaagcctacatattattatttctctaattcaggagtggtctgtgctgggagggaagggatctgtggggctgcagccccatccgggctgagggttgaaagatccggccctttg

SEQ ID NO: 632 - DNA, 413 bp, Zea mays
  Clone ID: LIB3061-045-Q1-K1-G9
caactagcaacatacaaagctcaatagtttaccaacaatggcagacaaaagattctgagtccttatgctccttgggcttgctgcaagtgctcgtacagtgaccattctcccgcaatgctcgcaagctcctatagctctccttcttaccccgtacctatcaccaacagtgtctgcgatatgtgaaaacccaattcttcaaccctacaacatccaacaagcaattgcaacttgcatcttaaccttaataaccttggttcttcaacaataatcaagcctaatacaacaagtacctttagttcaattaatggcaccaaaccaccaggccccaccaactacaacacctgttcctagcaaaccttgctgcctactctaagaaccacaactttcttccattcaaccacttcggtcaattg

SEQ ID NO: 633 - DNA, 414 bp, Zea mays
  unsure (1)..(414): unsure at all n locations; Clone ID: LIB3061-045-Q1-K1-H1
gcttctgcacgccgtcggtcaccaatcgtcgcctactacgactcggccttcaagcgggagcttcatgcgcgacgtccgcgtcgccgtcttgcgccacgacctcacccgagcgctctgcctactcccgaagccctcctccgcggcgcccgccccagcagttcctcctccgcagcgcccgccccatcagttcctcctccgcggtgcccgtcgacccgccgagcaccagcagcagcgtcgccggtggttgagctccaccgcctttgccgcgctccatctcttccggaagtgccctgctccaccgnccacctgtacggcagcctgacccagctattcggctgcctgcctcggagatctcgctgcctcgccgacctgaaatttgtgtatgttctacctgtataggagggttcatcttct

SEQ ID NO: 634 - DNA, 411 bp, Zea mays
  Clone ID: LIB3061-045-Q1-K1-H10
gcaacatagaaagtggaatccagtagcaacaacagagcaacaatggcgaccaagataggttccctccttatgctccttgctctttctgcatgtgttgctaacgcgacaattttccctcaatgctcacaagctcctatagcttcccttcttcccccataccttccatcaatgatagcttcagtatgtgaaaacccagctcttcagccctataggctccaacaagcaatcgcagcaagcaacatacctttatcacccttgttgtttcaacaatcgccagccctatctttggtgcagtcattggtacaaaccatcagggcacagcagctgcagcaactcgtgctacctgtgatcaaccaagtagctctggcaaacctttctccctactctcagcaacaacaatttcttccattc

SEQ ID NO: 635 - DNA, 412 bp, Zea mays
  Clone ID: LIB3061-045-Q1-K1-E12
gcaacatagaaagtggaatccagtagcaacaatagagcaacaatggcgaccaagatacgtttccctccttatgctccttgctctttctgcatgtgttgctaacgcgacaattttccctcaatgctcacaagctcctatagcttcccttcttcccccataccttccatcaatgatagcttcagtatgtgaaaacccagctcttcaaccctataggctccaacaagcaatcgcagcaagcaacatacctttatcacccttgtttcaacaatcgccagccctatctttggtgcagtcattggtacaaaccatcaaggcacagcagctgcagcaactcgtgctacctgtgatcaaccaagtagctctggcaaacctttctccctactatcagcaacaacaatttcttccattcaac

SEQ ID NO: 636 - DNA, 327 bp, Zea mays
  unsure (1)..(327): unsure at all n locations; Clone ID: LIB3061-045-Q1-K1-E2
gtaacttgcgtggttctcttgctgcgacggaagcaaacactgcccgagacatagacggcgggacggcgagatggccgacggggaggacgccgtcgtcgcgcgccgtcgggccgtcatcacagactaccgcaagaagctgctcaactgcagggagctagagtcgcgcgtcggcaccgtgagagaaagccttaaaactgcaaagaaggattttaccaagactgaggacgacttaaagtctctgcagagtgtggggcaaataattggagaagtactccgacctcttgataatgaacgctntatcgtgaaggccagcagtggtccccgata

SEQ ID NO: 637 - DNA, 428 bp, Zea mays
  Clone ID: LIB3061-045-Q1-K1-E5
gaaatgctgaactcccagaggcgatggaccttttatacaagggaactatgcgagttgtgcttgtactactgcatgactttcctgaatttctttgtgattatcacttcagtttctgcgatgtgattccttcaagttgcattcaaatgcgcaatgtcattcttagtgcttttccacgtaacatgagactgccagacccttctacccctaatctaaagattgatttgttggctgaaatttcaatagcaccacgaatcatgtcggatgttgatggtgcccttaaatcaaagcagttgaagactgaggttgatgaatatctcaagaggccggaaggctcttcctttttaagtgacctgaaccaaaaattgctgctgcctcagaatgaagcaagtgttgctgggacacgctacaacgtgcctctgatcaattca

SEQ ID NO: 638 - DNA, 416 bp, Zea mays
  Clone ID: LIB3061-045-Q1-K1-E6
attgagaccaactagcaacatagaaagcacaatagtgtaccaacaatggcagccaagatattttgcttccttatgctccttggtctttctgcaagtgttgctaccgcaaccattttcccacaatgctcacaagctcctatagcttcccttcttcccccatacctctcaccagcggtgtcttcaatgtgtgaaaccccaattgttcaaccctacaggatccaacaggcaatcgcaacaggcatcttaccattatcacccttgttcctccaacaaccgtcagccctattacagcagttacctttggtcccatttggtggcacaaaacatcagggcacaacaactacaacaacttgtgctagcaaaccttgctgcatactctcagcaacatcagtttcttccattcaaccaactggctg

SEQ ID NO: 639 - DNA, 425 bp, Zea mays
  Clone ID: LIB3061-045-Q1-K1-E7
ctataatccttccctagcagctgctcttggcccgagccagccaaatccggatctcaagcttgctgctgttggcttaacacctggctctgctggaggattagaaggtccagaccggatctttgtaggtggtctaccatattatttcactgaggctcaagtgcgggagttgctcgagtccttcggacctctgcgtggattcgatcttgtgaaggatagagaaactggtaactcgaagggatatgccttctgtgtttaccaggatcttaatgtcactgacattgcctgtgctgcccttaatggcatcaagatgggggacaagactcttactgttaggagggcaaaccaaggagcttctcagcctaggccagagcaagaaagcatcctgctgcaggcacagcagcaggtgcaaatgcagaaactcgtat

SEQ ID NO: 640 - DNA, 448 bp, Zea mays
  Clone ID: LIB3061-045-Q1-K1-E8
caactagcaacatagaaagcacaatagtgtaccaacaatggcagccaaaatattttgcttccttatgctccttggtctttctgcaagtgctgctaccgcaaccattttcccacaatgctcacaagctcctatagcttcctttcttcccccatacctctcaccagcggtgtcttcagtatgtgaaaacccaattcttcaaccctacaggatccaacaggcaatcgcagcaggcatcttacctttatcacccttgttcctccaacaaccgtcagccctattacagcagttacctttggtgcatttgttggcacaaaacatcaaggcacaacaactaccacaacttgtgctaggaaaccttgctgcctactctcagccacagcagtttcttccattcaaccaactggctgcattgaactctgctgcttatttgcaacaacaactaccattc

SEQ ID NO: 641 - DNA, 431 bp, Zea mays
  unsure (1)..(431): unsure at all n locations; Clone ID: LIB3061-045-Q1-K1-F1
caaggccgtcgccgtccccgccgccgcggccaccagctcggaggagttcggcagcatgtcgtcgaagaagccgaggaatgccagccccagactcgcgcccgtatcaccaaaggagaagaaggacaagatcggcgagagggtcgcagcgctccagcagctcgtgtcaccgttcggaaagaccgacacggcttctgtcctgcaggaggcgtcggggtacatcaagttcctgcaccagcagctggaggtcctgagctccccttacatgcgcgctcctccggccgctggcgctgcgcctgaggacccccagcgctacagcctncggagccgcgggctgtgcctggtgccggtggacctgacgctgcagctgacccagagcaacggggcccgacctgtgggcgccggcgcacacggncaggcgaaagtgaggactg

SEQ ID NO: 642 - DNA, 411 bp, Zea mays
  Clone ID: LIB3061-045-Q1-K1-F10
agcctggtcgcgccaccaccgatggcccccgccggccggcggcggcggcggcggcatgcgacttctgtgacccgccgcggccaaaccctcgccgccctcccgtgccactgtggacggcggcacgtcatcggtgcctcctcggctgccgctctccttcctttcctcgcccctccttctctggccgctccgtccgtcgaccccgacgtggtgctccagcgagtgcacccgtcgaggccggactggtatgaggagttctatgcctcggccatggaccagggaatgaaatcatacgaagcagagatcgcaggatacaaagtaaagctcttctctcaactgtcgcctgcgggaaagaacattctcgagctcggtgttgggacaaggcctaacttcaaatactatgcaagtgaagat

SEQ ID NO: 643 - DNA, 416 bp, Zea mays
  Clone ID: LIB3061-045-Q1-K1-F11
attgagaccaactagcaacatagaaagcacaatagtgtaccaacaatggcagccaaaagattttgcttccttatgctccttggtctttctgcaagtgttgctaccgcaaccattttcccacaatgctcacaagctcctatagcttcccttcttcccccatacctctcaccagcggtgtcttcaatgtgtgaaaacccaattgttcaaccctacaggatccaacaggcaatcgcaacaggcatcttaccattatcacccttgttcctccaacaaccgtcagccctattacagcagttacctttggtccatttggtggcacaaaacatcagggcacaacaactacaacaacttgtgctagcaaaccttgctgcatactctcagcaacatcagtttcttccattcaaccaactggctgc

SEQ ID NO: 644 - DNA, 407 bp, Zea mays
  Clone ID: LIB3061-045-Q1-K1-F12
aactgcttcaacagtggtataaataagatatttgtgatgagtcagttcaattctactgcgcttaaccgccatattcatcgtacataccttgaaggcgggatcaactttgctgatggatctgtacaggtattagcggctacacaaatgcctgaagagccagctggatggttccagggtacagcagactctatcagaaaatttatctgggtactcgaggattattacagtcacaaatccattgacaacattgtaatcttgagtggcgatcagctttatcggatgaattacatggaacttgtgcagaaacatgtcgaggacgatgctgatatcactatatcatgtgctcctgttgatgagagccgagcttctaaaaatgggctagtgaagattgatcatactggacgtgt

SEQ ID NO: 645 - DNA, 325 bp, Zea mays
  Clone ID: LIB3061-045-Q1-K1-F2
gcctcatccccagccacacccatgcccgtgccaacagccgcatccaagcccgtgccagctgcagggaacctgcggcgttggcagcaccccgatcctgggccagtgcgtcgagttcctgaggcatcagtgcagcccgacggcgacgccctactgctcgcctcagtgccagtcgttgcggcagcagtgttgccagcagctcaggcaggtggagccgcagcaccggtaccaggcgatcttcggcttggtccttcagtccattctgcagcagcagccgcaaagcggtcaggtcgcggggctgttggcggcgcaaatagcgcagcaactg

SEQ ID NO: 646 - DNA, 369 bp, Zea mays
  unsure (1)..(369): unsure at all n locations; Clone ID: LIB3061-045-Q1-K1-F3
ctagcagatcaaacaagtagcgacagctcgacaaagatttgtgagagtgatccggcgctgagaagagatggctaagatcgccgcagccgccgcggcggcggcggcgctgtgcttcgcggccctggtggccgtggccgtctgccaaggcgaggtcgagcggcagaggctcagggacctgcagtgctggcaggaggtccaggagagcccgctcgacgcgtgccgccaggtcctcgaccggcagctaaccggcggcggcgtcggcggcccgttccggtggggcaccgggctccggatgcggtgctgccagcagctccaggacgtgagccgcgagtgccgctgcgccgncatccggagcatggtcaggggcta

SEQ ID NO: 647 - DNA, 368 bp, Zea mays
  Clone ID: LIB3061-045-Q1-K1-E11
cacttaccaaccagagcgacaagcccgaccgcccgcttccttgcaaacgaaacaaaacggaacaatggcgacagcgagtgagatcgcggcggtgggcgtaataggcgcggggcagatgggctcgggcatcgcccagctcgccgccggcggcggctgtgccgtacttctcctcgacgccgaccccactgccctctcccgtgccgtcgtctccatctccggctccctacggcgcctcgccgccaaaggccagctctcccaagccgcgtgcgaagactcaataaagcggataaggtgcgtcttcggcgtgcaggatctcaaggacgccgatcttgtgatcgaaggcgtcgtggagaacgaagacatcaaga

SEQ ID NO: 648 - DNA, 421 bp, Zea mays
  Clone ID: LIB3061-050-Q1-K1-H11
cccacgcgtacgcccactcgtccgattggcactaaacatcagggcacaacaactacaacgggctggtgctagcaaaccttgctgcctactctcagcaacagcagtttcttccattcaaccaactagctgcattgaactctgcttcttatttgcaacaacaacaactaccattcagccagctacctgctgcctacccccaacaatttctttcattcaaccaactggcagcattgaactctcctgcttatttacaacaacaacaactactaacattcaaccaactagcttgtgttaacccttcttacttctttatacaaccacaattggtgcccttctaacaacaaccttggcctaacgcttgcaaccttttaacacttcaaccattgcttgcattcaacccaattgctttgaccaaaccaac

SEQ ID NO: 649 - DNA, 439 bp, Zea mays
  Clone ID: LIB3061-050-Q1-K1-H12
gcaacatagaaagcacaatagtgtaccaacaatggcagccaaaatattttgcctccttatgctcgttggtatttctgcaagtgctgctacggcgaccattttcccgcaatgctcacaagctcctatagcttcccttcttcccccgtacctctcaccagcggtgtcttcggtatgtgaaaacccaattcttcaaccctacaggatccaacaggcaatcgcagctggcatcttacctttatcacccttgttcctccaacaatcatcagccctattacagcagttacctttggtgcatttattggcacaaaacatcaaggcacaacaactacaacaacttgtgctagcaaaccttgctgcctactctcagcaacagcagtttcttccattcaaccaactagctgcattgaactctgcttcttatttgcaacaacaacaacta

SEQ ID NO: 650 - DNA, 419 bp, Zea mays
  Clone ID: LIB3061-050-Q1-K1-H2
cgacggagcacgacgcacgcagagccgcagagatccgtcacactgcaagttttgaaaactgaactgtaagatggcatcagcagagctttcccgtgaggaaaatgtgtacatggcgaagctcgccgagcaggcagagaggtacgaggaaatggttgagttcatggagaaggtagcgaaaactgttgactcggaggagctcactgtggaggagcgcaacctcctgtctgttgcatacaagaacgtcattggagcccgccgtgcctcatggcgcatcatctcctccatcgagcagaaggaggagggtcgaggcaatgaggaccgtgtaacactcatcaaggactaccgtggcaagaatgaaactgagctcaccaagatctgtgatggcatcctcaagcttctcgaatctcaccttgtgccgt

SEQ ID NO: 651 - DNA, 489 bp, Zea mays
  unsure (1)..(489): unsure at all n locations; Clone ID: LIB3061-050-Q1-K1-H4
ggctcacaaaccctcttgctttgctgctgcacctgcaagtctgcaaccgtgcacacagagatgtcgacgacggtgagccgtgcgtccgtcgaccagaagctcgccctcgccaagcgttgctcccgagaggcgaccctcgccggagccaaggcggcagcggtggcgactatcgcctccgcgatccccaccctggccagcgtgcggatgctgccatgggccaaggccaacatcaaccccaccggccaggcgctcatcgtctccacggtggctgggatggcctacttcatcgccgccgacaagaagatcctgtcgctggcgaggcgccactcgttcgagcaagcccctgagcacctcaagaacacctncttccagggcaccggccgtccccacccagccttcttcaggccgtgagacgagaccttcgtccagagctagctacctacctctttttccagtttgccaatgcaagcaccaaatgcccaccgatgc

SEQ ID NO: 652 - DNA, 452 bp, Zea mays
  Clone ID: LIB3061-050-Q1-K1-H5
agaccaactagcaacatagaaagcacaatagtgtaccaacaatggcagccaaaatattgtgcctgcttatgctccttggtctttctgcaagtgctgctacggcgaccattttcccgcaatgctcgcaagctcctatagcttcccttcttcccccgtacctctcaccagcggtgtcttcggtatgtgaaaacccaattcttcaaccctacaggatccaacaggcaatcgcagctggcatcttacctttatcacccttgttcctccaacaatcatcagccctattacaacagttacctttggtgcatttattggcacaaaacatcagggcacaacaactacaacaacttgtgctagcaaaccttgctgcctactctcagcaacagcagtttcttccattcaaccaactaagttcattgaactctgcttcttatttgcaacaacaacaactacca

SEQ ID NO: 653 - DNA, 336 bp, Zea mays
  Clone ID: LIB3061-050-Q1-K1-H6
gaacagcctagcggcattgcgtgcacaggatcgtaccaccgaacagcatgaagatggtgatcgtgctcatgctgcgcctggctctggcaactgccagtacctctaccatgcagatgccctgcccctgcgctgctctagcatggcttgcacggcgctgactcctgactgacgacgatgatgggcgccaacagcctgtacccctacgctgagtacctgaagcagccgtagtgcatcccgattcacgcttgatcactactactcctgcagcagtcatccgagctccatgttccagtcgctccggcaacagtgctgccagcagccgatgaggatgatcga

SEQ ID NO: 654 - DNA, 459 bp, Zea mays
  Clone ID: LIB3061-050-Q1-K1-H7
actggtcttagcgtggggtatatgcgaccagtagacagcacagggtatttttgtaaatggcaaggatctatactattgcaatggccaaaagctcccctttgcagctgctcaaattgggcaagcttttagaaatgagatctcgccacgacaaggtcttctccgagtgcgtgaattcacattggcagagattgagcattttgtggacccaaaagacaaatcacatccaaaatttgttgatgttgctgatttggagttcctgatgtttccaagagagctacaactctcaagggagtcggccaaactattgaagctcggggaagcagttgcaaagggaactgttaataacgagacacttggttacttcattggaagggtctatcttttcctgacatgcttgggaattgataagggtcggttgcgcttcaagcagcatttacctaatgagatggctcattatgc

SEQ ID NO: 655 - DNA, 242 bp, Zea mays
  Clone ID: LIB3061-050-Q1-K1-H8
ttttactccaccactacaggtccatttatttactcgcaatataaaattaccgatcggtgcttaggtacacacgcaagcaattagttcatgcgcttattaggttgtgccactggccaccactacactacattacactagcacaagcaagcagctacacatacttgtccatatcacataaacgaaacagcatatataagaagatgtcccaacatctttgcaccacgcgcgagatcaggggccct

SEQ ID NO: 656 - DNA, 128 bp, Zea mays
  Clone ID: LIB3061-050-Q1-K1-H9
caacaacccatcattggtggtgccctcttttagattgcttatgagttatacttcaataatgaagctttttggatgatgtttgtggctttccagaaataagaaagtacatttgtaaaaaaatacaatac

SEQ ID NO: 657 - DNA, 445 bp, Zea mays
  Clone ID: LIB3061-051-Q1-K1-A1
atggagaccaactagcaacatagaaagcacaatagtgtaccaacaatggcagccaaagtatggtgcctccttatgctccttggtctttctgcaagtgctgctacggcgaccattttcccgcaatgctcgcaagctcctatagcttcccttcttcccccgtacctctcaccagcggtgtcttcggtatgtgaaaacccaattcttcaaccctacaggatccaacaggcaatcacagctggcatcttacctttatcacccttgttcctccaacaatcatcagccctattacatcagttacctttggtgcatttattggcacaaaacatcagggcacaacaactacaacaacttgtgctagcaaaccttgctgcctactctcagcaacagcagtttcttccattcacccaactaactgcattgaactctgcttcttatttgcaacaac

SEQ ID NO: 658 - DNA, 427 bp, Zea mays
  unsure (1)..(427): unsure at all n locations; Clone ID: LIB3061-051-Q1-K1-A10
catagaaagcacaatattgtaccaataatggcagccaaaatattttgcctcattatggtccttggtctttctgcaagtgctgctacggcgagcattttcccgcaatgctcacaagctcctatagcttcccttcttcccccatacctctcaccagcgatgtcttcagtatgtgaaaatccaattcttctaccctacaggatccaacaggcaatcgcagcaggcatcttacctttatcacccttgttcctccaacaatcatcagccctattacagcagttacctttggtgcatttattggcacaaaacatcagggcacaacaactacaacaactcgtgctagcaaaccttgctgcctactctcagcaacagcagttacctttggtgcatttgttggcacanaacatcagggcacaacaactacaacaac

SEQ ID NO: 659 - DNA, 366 bp, Zea mays
  Clone ID: LIB3061-051-Q1-K1-A11
gctggcttgcgtggtcttggtggaatgggtggtatgggaatggatgattttgaggaggatagtgatgaagaagtatcgacacctcaagctgccagacatgctgctgaggccgactaagactgagtcggcggaagccaagactgagtcgactcacagcagttgaagatgcttccgacatgatctaaactagttgaattggcatgttaattatgctgaatcgacggacaaacttctaccttgtgccactggcctatcccagtgacttgccctaaaatcaacattgtgtctttacatgcacatcctagggttgccctgatcacattattgatattgtccctgagatgcttatttagatctacaattatg

SEQ ID NO: 660 - DNA, 453 bp, Zea mays
  unsure (1)..(453): unsure at all n locations; Clone ID: LIB3061-051-Q1-K1-A2
ccaactagcaacatagaaagcacaatagtgtaccaacaatggcagccaaaatattttgcttgcttatgctccttggtctttctgcaagtgttgctaccgcaaccattttcccacaatgctcacaagctcctatagcttcccttcttcccccatacctctcaccagcggtgtcttcaatgtgtgaaaccccaattgttcaaccctacaggatccaacaggcaatcgcaacaggcatcttaccattatcacccttgttcctccaacaaccgtcagccctattacagcagttacctttggtccatttggtggcacaaaacatcagggcacaacaactacaacaacttgtgctagcaaaccttgctgcatactctcagcaacatcangttcttccatccacccaacttgctgcattgaactctgctgcttatttgcaacaacaattaccattcagcc

SEQ ID NO: 661 - DNA, 418 bp, Zea mays
  Clone ID: LIB3061-051-Q1-K1-A3
cccacgcgtccgatcgccctcgttatttacatcgctgccaccctcctctccgccgtggccggcgccgccggggatggggggagcgcaattccccggcgacaacgacgtcgcggaagtagacgcggcccgcgacggagaggtggaccgccgtgacgtgggcaagatgaagcacgggtgcgagcattaccggcggaggtgcaagatcgtggcaccgtgctgcaaccaggtgttcccctgccgccactgccacaacgaggctacggcttccggagatcggcatacaatatgtcgtcaggatgttgaaaaagtagtttgcctactctgtgaaacaaaacagccggtgtcacaagtgtgcataagctgtggagtcaatatgggagagtacttttgtgatatatgcaaaattttatgatgatga

SEQ ID NO: 662 - DNA, 440 bp, Zea mays
  unsure (1)..(440): unsure at all n locations; Clone ID: LIB3061-051-Q1-K1-A5
cggatggacccggtgttactttaatatcagcgaaatgggtttttctgcgtacctttgttatatggctatgtatctcatttttgtggagtttggaatttactggatgcacagagagttgcatgacataaagccactatacaaacatctgcatgcgacccaccatatttacaacaaggagaacaccttgtctccgtttgctggactcgcgtttcacccactggatggtattctgcaagcgataccgcatgtgcttgcgctcttcctcctcccaacgcacttcaggacgcacatcgctctcgtgttcttggagggcgtgtggacgacaaacatccacgactgcattcacggcaaggtatggccagtcatgggcgctgggtatcacaccatccaccatacgacttaccgncacaactatggccactacaccgtctggatggact

SEQ ID NO: 663 - DNA, 424 bp, Zea mays
  Clone ID: LIB3061-050-Q1-K1-H10
cccacgcgtccgcccacgcgtccgattggcacaaaacatcagggcacaacaactacaacaactggtgctagcaaaccttgctgcctactctcagcaacagcagtttcttccattcaaccaactagctgcattgaactctgcttcttatttgcaacaacaacaactaccattcagccagctacctgctgcctacccccagcaatttcttccattcaaccaactggcagcattgaactctcctgcttatttacagcagcaacaactactaccattcagccagctagctggtgtgagccctgctaccttcttgatacaaccacagttgttgccgttctaccagcacgctgcgcctaacgctggcaccctcttacaactgcaacaaattgctgccattcaaccaacttgctttgacaaacccagcagc

SEQ ID NO: 664 - DNA, 454 bp, Zea mays
  Clone ID: LIB3061-050-Q1-K1-F7
acgcatctagcaacatataaagcacaatagtgtttcaacattggcagccaaaatattctgcctcctcgtgctggttgtactttcaccacgtgctgctactgctaccattctcccgcaatgatcgcaagcttctatagcttacattcttcaccagtacctctcaccagaggtgtattccctatgtgaaaacccaactctttaaccctacaggatccaacacgcaatcacagctgacatcttacctttatcacactagcttctccaacaattataaaacctattacatcacatacctttgctgcatttattggcacaaaacatcaggtcacaacaactacaacaacttgtgctaacaaaccttactgtctactctcaataacaataaattatttcattcaaccaaataacttaatttaactctacttcttatttcaacaacaacacctaccattca

SEQ ID NO: 665 - DNA, 364 bp, Zea mays
  Clone ID: LIB3061-050-Q1-K1-F8
ctccagtgctcccccgtgccccgtttccgcttccgccgccggccgctcgcccgcaggccgcagggcgctccgtgcctccctccgcgctgtccgcggaccgcggtcccctgcagccctgctctgtcgtccgcccccagccccctgctccgctgcgggctgcggcgctgcctgctccctggctctcagcctgccgcttctcagtccacttctgccgcagcccctcttctctcggtctagagatccgtccgggcgcggcaagctcgctttcgtttcgcattcagtgaacgcattggctatatcaaccctgggggcataactctagtagaaaaagggaaagaagccaggatctaaggcaagggttttc

SEQ ID NO: 666 - DNA, 391 bp, Zea mays
  Clone ID: LIB3061-050-Q1-K1-F9
gtccatggatcatatcgtcaactggtccggctgttcgcgacaccatgagctccacggagtgcgggggctgcggcggcggctccaagacgtcgtggcctgaggtggtcgggctgagcgtggaggacgccaagaaggtgatcctcaaggacaagccggacgccgacatcgtggtgctgcccgtcggctccgtggtgaccgcggattatcgccctaaccgtgtcccgatcttcgtcgacatcgtcggccaaacgccccacatcggctgataatatataagctagccgctattttcttttcttggcccaaaacttggaataaatatatatacgatgaaataacgccggcatgccgaataatggatgtgtgaattctcactaattaagtaatgcat

SEQ ID NO: 667 - DNA, 451 bp, Zea mays
  Clone ID: LIB3061-050-Q1-K1-G1
caactagcaacatagaaagcacaatagtgtaccaacaatggcagccaaaatattttgcctccttgtgctgcttggtctttctgcaagtgctgctacggcgaccattttcccgcaatgctcgcaagctcctatagcttcccttcttcccccgtacctctcaccagcggtgtcttcggtatgtgaaaacccaattcttcaaccctacaggatccaacaggcaatcacagctggcatcttacctttatcacccttgttcctccaacaatcatcagccctattacatcagttacctttggtgcatttattggcacaaaacatcagggcacaacaactacaacaacttgtgctagcaaaccttgctgcctactctcagcaacagcagtttcttccattcaaccaactagctgcattgaactctgcttcttatttgcaacaacaacaactaccattc

SEQ ID NO: 668 - DNA, 435 bp, Zea mays
  Clone ID: LIB3061-050-Q1-K1-G10
atccaggacaccacccagatccacacccacatgtgctactccaacttcaacgacatcatccactggatcatcgacatggacgcggacgtgatcaccatcgagaactcgcggtccgacgagaagctgctctccgtgttccgtgagggtgtcaagtacggcgcgggcatcggccccggtgtctacgacatccactcccccaggatcccgtcggccgaggagatcgccgaccgcatcgacaagatgctggccgtgctggacaccaacatcctctgggtgaaccccgactgcggcctcaagacccgcaagtacacggaggtcaagcccgccctgaccaacatggtctccgctgctaagctcattcgcacccagctcgccagcgccaagtgagcacctttttttgcctttttcgtttccgaggaaggcgtcgtcgatgcc

SEQ ID NO: 669 - DNA, 405 bp, Zea mays
  Clone ID: LIB3061-050-Q1-K1-G11
ggacgtgagactagcaatgagctcatcgactccagattggagaactcgacaccatgaaggtgctgatcgttgccattgctctcgtggcgctcgctgctagcgccgactccagtacaagcggcggctgctgctgccagacaccagcgtgtcatctaccgccttagttctatatgccgactccgttctatctgccgacgcagcagcatccgcagccatggcattaccacactcatccaccgcagctaatcccgtgccagcagttcggatcctgcggcgtcggcagcgtatgcagtccgctcctgggccagcgcgtcgagatgctgaggcaccatgtgcagaccggcggctactccgtacagctcgacacagtgccaggcgctgcagcagcaatgctgacaccagatc

SEQ ID NO: 670 - DNA, 437 bp, Zea mays
  Clone ID: LIB3061-050-Q1-K1-G12
gcacaatagtgtaccaacaatggcagccaaaatattttgcttccttatgctccttggtctttctgcaagtgctgctaccgcaaccattttcccacaatgctcacaagctcctatagcttcctttcttcccccatacctctcaccagcggtgtcttcagtatgtgaaaacccaattcttcaaccctacaggatccaacaggcaatcgcagcaggcatcttacctttatcacccttgttcctacaacaaccgtcagccctattacagcagttacctttggtgcatgtgttggcacaaaacatcaaggcacaacaactacaacaacttgtgctaggaaaccttgctgcctactctcagcaacagcagtttcttccattcaaccaactggctgcattgaactctgctgcttatttgcaacaacaactaccattcagtcagc

SEQ ID NO: 671 - DNA, 363 bp, Zea mays
  Clone ID: LIB3061-050-Q1-K1-G2
gcggcggctgcggctgccagccaccgccgtcggttcatctaccgccgccggtgcatctgccacgtccgggtcacctgccacctccggtgcatctcccaccgccggtccacctgccgccgccggtccacctgccaccgccggtccatgtgccgccgccggttcatctgccgccgccaccatgccactaccctactcaaccgccccggcctcagcctcatccccagccacacccatgcccgtgccaacagccgcatccaagcccgtgccagctgcagggaacctgcggcgttggcagcaccccgatcctgggccagtgcgtcgagttcctgaagcatcagtgcagcccgacggcgacgccctact

SEQ ID NO: 672 - DNA, 330 bp, Zea mays
  Clone ID: LIB3061-050-Q1-K1-G4
attttgagcattcagaaacacaccaagcgaatcgcactagcaacaacctaacaacaatggctacgaagagattatccctccttgcgcttcttgcgctttttgcgagcgcaacaaatgcgtccattattccacaatgctcacttgctcctagttccattattccacagttcctcccaccagttacttcaatggccttcgaacacccagctgtgcaagcctataggctacaacaagcgattgcggcaagcgtcttacaacaaccaattgcccaattgcaacaacaatccttggcacatctaacaatacaaaccaatcgaacgcaacagcaac

SEQ ID NO: 673 - DNA, 427 bp, Zea mays
  Clone ID: LIB3061-050-Q1-K1-G5
cgccctggctatttacatctgtggctcgctgctctccgtcttctgcgtctccgtcggggatgggggtagcgcaattccccggcgacatccacgtggcagaagtagacgcgggccgatacagagaggtggaccgacgtgacatgtgcaagatgaatcacgggtgcgagcattaccggaggaggtgcaagatcgtggcaccgtgctgaaaccagatgttcccctgacgtcactgccacaacgaggctacggcttccggaaatccgcatacaatatgtagtcaggatgttcaaaaagtaatttgcctactatgtgtaacaaaacaaacggtgtcacaagtgtgcataacctgtggagtcaatatgggagaatacttttgtgatatatgcaaattatatgatgatgattcagacgaaaggcagtaccattg

SEQ ID NO: 674 - DNA, 380 bp, Zea mays
  Clone ID: LIB3061-050-Q1-K1-G6
attgagaccaactagcaacatagaaagcacaatagtgtaccaacaatggcagccaaaagattgggcctccttatgctccttggtctttctgcaagtgctgctacggcgaccattttcccgcaatgctcgcaagctcctatagcttcccttcttcccccgtacctctcaccagcggtgtcttcggtatgtgaaaacccaattcttcaaccctacaggatccaacaggcaatcacagctggcatcttaaccttaataaccttggttcttccaccattaatcagccttataccataagttaccttggggcaattaatggcaccaaaccttaaggcaccaccacctccaccacctggggctacaaaacttggtggcttacttta

SEQ ID NO: 675 - DNA, 445 bp, Zea mays
  Clone ID: LIB3061-050-Q1-K1-G7
gagcattcagaaacacacctagcgaagcgcactagcaacgacctaacaacaatggctggcaagagattatccctgcttgcgcttcttgccctttttgcgagtgcaacaaatgcgttcattattccacaatgctcacttgctccgagtgccattattccacagttcctacctccagttacttcaatgggcttcgaacacccagctgtgcaagcctataagctacaacaagcgcttgctgcgaagcgtctaaaaccacccatttgccaattacaacaacaatccctggcacatctaaccatacaaaccatcgcaacgcaacaacaacaagcactgaaccaactagccgtggtgaaacctatcgactacttgcaacaacagctgcttgcattcaacccaattgctttggcaaacgtagcttcataccaacaacaacaacagttgcaac

SEQ ID NO: 676 - DNA, 331 bp, Zea mays
  Clone ID: LIB3061-050-Q1-K1-G8
gctagctactgcctactctcagcaacaacaacttcttccatttaaccaactggccgcagtgaggcccgctgcttatttgcagcagcaaatactactaccatttagccagctagctgcagcaaaccgtgcttccttcttgacacagcaacagttgctgcctttctaccagcagtttgcggctaaccccgcaaccctcttacaactacaacaattgttgccctttgtccaacttgctttgacagacccagcggacttctaaccaccacacatcattggtggtgcgcctctttaaaatggttattaactggaatttcaatataaaagtttttgg

SEQ ID NO: 677 - DNA, 418 bp, Zea mays
  Clone ID: LIB3061-050-Q1-K1-G9
atttccatcggctttctggcggcaaccggagttcgggtggcgaacgagctgggagccgggagcgcgaggagggccaagttcgccatctacaacgtggtggccacctcctccatcatcgggtccgtgctgttcgtgctgttcctactcttccgcggaggcctcgcctacatattcaccgacagccaggcggtggcggacgcagtcgccggcctctcgcccctgctggccttctccatactgctcaacagcgtccagccagtgctgtcaagcgtcgctgtcggcgcgggctggcagagcgtcgtcggctacgttaacatcacttcgtactacctcatcggcatccctcttggagccgtgctgggctacgcgctggggcttcatgtgaagggcatctggatcggcatgctgctcggaacgc

SEQ ID NO: 678 - DNA, 246 bp, Zea mays
  Clone ID: LIB3061-050-Q1-K1-H1
catcttgctatgacaaaacaagtacacttgtaccaacatcacattattgtcgtagccctataggagatggattattagttatgattcaatagtagaaatatataggatgatgcaagttacctcatagaactaagaagttatattctcaattatattgagatcagatctgggatgcgaactatctagaataagctgagataagacataaggggcaatataatatggtgatgttgtcacttgaagcct

SEQ ID NO: 679 - DNA, 464 bp, Zea mays
  Clone ID: LIB3061-050-Q1-K1-F6
caactagcaacatagaaagcacaatagtgtaccaacaatggcagccaaaatattttgggtcctgatgctccttggtatttctgcaagtgctgctacggcgaccattttcccgcaatgctcacaagctcctatagcttcccttcttcccccgtacctctcaccagcggtgtcttcggtatgtgaaaacccaattcttcaaccctacaggatccaacaggcaatcgcagctggcatcttacctttatcacccttgttcctccaacaatcatcagccctattacagcagttacctttggtgcatttattggcacaaaacatcagggcacaacaactacaacaacttgtgctagcaaaccttgctgcctactctcagcaacagcagtttcttccattcaaccaactagctgcattgaactctgcttcttatttgcaacaacaacaactaccattcagccagctacctg

SEQ ID NO: 680 - DNA, 406 bp, Zea mays
  Clone ID: LIB3061-050-Q1-K1-E3
gttctagctcttgcactgtacgcttgcgtggtacgcgtggtgcgcgcgcatgctctgccgtagtgataggtgctgacggtggccacgccaccccgacctcttggcattttcctgcccttggtttgcagctcaccttcgacgtcggcgtcatcgccatcttcggccaccggctggccggccacgtgaaggaggagctgaggaggaactacttcaccatggagaaaggctacaacagcttccccatcccggtcgcctgcaccagctacagccaggccatcaaggcgaggcagcggctggccccggtgctgaccggcatcctggcggaccggaggccccggcgaaccgactactacgacgaccatggcctcctgaacgccctaatgcgctcccttgacaacagcggggc

SEQ ID NO: 681 - DNA, 441 bp, Zea mays
  Clone ID: LIB3061-050-Q1-K1-E4
acgctatcagtaccatcaatcatcattcatcttattagtataggcaccaaatcaaatctgcaacatcaattagctaactccaaaaaccatgaagctggtgcttgtggttcttgctttcattgctttagtatcaagtgtttcttgtacacagacaggcggctgcagctgtggtcaacaacaaagccatgagcagcaacatcatccacaacaacatcatccacataaacaacaacatcaaccaccaccacaacatcaccagcagcagcaacaccaacatcaacaagttcacatgcaaccacaaaaacatcagcatcaacaagaagttcatgttcaacaacaacaacaacaaccgtagtaccaacatcaacaacaacatcaacagtaccaacaacaacatcaatgtgaaggccaacaacaacataaccaacaataacaaggcca

SEQ ID NO: 682 - DNA, 375 bp, Zea mays
  Clone ID: LIB3061-050-Q1-K1-E5
aaagagaacggaatggccgagataaccctagagccgagtgatcttatggcgcatacaggcaagagaatagtgccaaagttcactgaaatcttccccgtggaggacgcgaactacccttacagtgccttcatagcgtcggtccggaaagacgtgatcaaacactgcaccgaccataaagggatcttacaacccgtactggcaactgaaaaaaagggaccggagctatgggtttacccaaagcttaaaactaggaccagttccatcacgcttgccattcgcatggacaacctggaccttgtgggcttcaagaccccgggcagggtgttgtgggaagtccgcaaggaccgggacacccaacttcttggggacaacccc

SEQ ID NO: 683 - DNA, 409 bp, Zea mays
  Clone ID: LIB3061-050-Q1-K1-E6
caacaagcaacatagaaagtggaatccagtttcaacaacagagcaacaatggcgaccaagatatgttccctccttatgctccttgctctttctgcatgtgttgctaacgcgacaattttccctcaatgctcacaagctcctatagcttcccttcttcccccataccttccatcaatgatagcttcagtatgtgaaaacccagctcttcagccctataggctccaacaagcaatcgcagcaagcaacatacctttatcacccttgttgtttcaacaatcgccagccctatctttggtgcagtcattggtacaaaccatcagggcacagcagcttgagcaactcgtgctacctgtgatcaaccaagtagctctggcaaaccttttctcctactctcagcaacaacaatttc

SEQ ID NO: 684 - DNA, 460 bp, Zea mays
  Clone ID: LIB3061-050-Q1-K1-E8
tcgcccacgcgtccgcccacgcgtccgattcagaggacccaatgtctacttgcagaaagatggtgagctggagaagtcacttgaaattccctgaagaggcaaagcttcctcctgaagctaaggctctcatcagcaagcttttgtgtaatgttgagcatcgacttggtacaaaaggagcccatgaaataaaagcgcatccatggttcggaggtgttcagtgggagaagttgtatcagatgaaagctgctttcataccagaagttaatggagagttggatactcagaattttgagaatttcgaggagattggaactcaaattcaaagttcatccaagtcaggcccttggagaaagatgcttccatccaaagatgcaaactttgttgggtatacgtacaagaactttgaaattgtgaatgatgatgaagtggcaggaattgcacagttgaagaaaaagagttc

SEQ ID NO: 685 - DNA, 394 bp, Zea mays
  Clone ID: LIB3061-050-Q1-K1-E9
gcaattgcttccattcaaccaactggcagcattgaactctgctgcttatttacaacagcggcagcgaccaccattcagccagctagctgatgtgagccctgttgccttcttgacacaacaacagttgttgccgttctacctgcacgctgcgcctaacgctggcaccctcttacaactgcaacaattgctgccattcaaccaacttgctttgacaaacccaacaacgttttaccaacaaccaataattggcggggccctttttaaaatggctaataagtaatagttaaataaggaagtttttggaataaggttgggggtttcccaaaattagaaagggcctatttagaatcctaaagggctttaagcctccaaaaaaaaaaaaaaaggggggccc

SEQ ID NO: 686 - DNA, 304 bp, Zea mays
  Clone ID: LIB3061-050-Q1-K1-F1
acgcattggtggtggcctctctcccacactattattctcttattcttcctgtactatatatccttccgtctcagatcaacacttactagtgatgtcattccgcttgcttgattgtcacacatattcacacttcacccgatcctcttatcacgatatacctttctgcatcctacttgcttactgtcctcatctgaaactccaacccttccgctatcgatttgacttccattctggaatcttaccactttcaatcttacaactaaaacaatcaacttcctttttacaaaatttaccttaattacat

SEQ ID NO: 687 - DNA, 330 bp, Zea mays
  Clone ID: LIB3061-050-Q1-K1-F10
attcaaccaactagctgcattgaagaaactgttgttgctacaacttgagctccacgtagggagggggctatttgcttacttccaagacgtattggcatcatgctgccgtgctacaactttatgacgtccagaatgtgatctgttatgacaagctgtacgattacatcatagatctgtcggtctcattcttactgtccgtacattatcgccctaacagagtttgtatcttcactctaatcatatctcagacaccctacatctgctgatactatataatctaatcactctttcctctacttgaatcataacttgatatctatatatattcca

SEQ ID NO: 688 - DNA, 430 bp, Zea mays
  Clone ID: LIB3061-050-Q1-K1-F11
caacaagcaacatagaaagtggaatacagtagcaacaatagagcaacaatggcggccaagatatgttccatccttatgctccttgctctttctgcatgtgttgctaacgcgaccatttttcctcaatactcacaagctcctatagctgcccttcttcccccataccttccatcaatgaccgcttcagtttgtgaaaacccagcccttcaaccctacaggctccaacaagcaatcgcaacaagcaacttacctttatcacccctgttctttcaacaatcgccagccctatctttggtgcagtcattggtacaaaccatcagggcacaacagctgcaacaactcgtgctaccagtgatcagccaagtagctctggcaaacctttctccctactctcagcaacaacaatttcttccattcaaccaactgtcta

SEQ ID NO: 689 - DNA, 450 bp, Zea mays
  Clone ID: LIB3061-050-Q1-K1-F12
atcagcatatacatctatcaaatccttcaaagggagcccttactggatggcaccagaggttattatgaatagcaatggtgcagcctttcagtagacatttggagccttggctgcaccattcttgagatggcaacagcaaagcctccttggagtcagtatgaaggggtggcagcaatattcaaaattggcaacagcaaagacataccagatatcccaaataatctttcttctgaggcaaaaagtttcctgaaactctgcttgcagcgtgatcctgctgcccgccctacagctgctcagctgatggatcacccttttgtcaaggaccaggctacagtcaggagttccaggtccagtatcacaagggatatgtttcctaattcaactgacggaaaaaacagcagggtgaaaattgaaacttcgtcatacagaagtttatctcctttaagagat

SEQ ID NO: 690 - DNA, 451 bp, Zea mays
  Clone ID: LIB3061-050-Q1-K1-F2
catctagcaacatagaaagcacaatagtgtaccaacaatggcagccaaaatattttgcctcctgatgctgcttggtctttctgcaagtgctgctacggcgaccattttcccgcaatgctcgcaagctcctatagcttcccttcttcccccgtacctctcaccagcggtgtcttcggtatgtgaaaacccaattcttcaaccctacaggatccaacatgcaatcacagctggcatcttacctttatcacccttgttcctccaacaatcatcagccctattacatcagttacctttggtgcatttattggcacaaaacatcagggcacatcaactacaacaacttgtgctagcaaaccttgctgcctactctcagcaacagcagtttcttccattcaaccaactagctgcattgaactctgcttcttatttgcaacaacaacaactaccattc

SEQ ID NO: 691 - DNA, 447 bp, Zea mays
  Clone ID: LIB3061-050-Q1-K1-F3
ctgaattcccggggaccaactagcatcatagaaagcacaatagtgtaccaacaatggcagccaaaatattttgcctccttatgctccttggtcgttctgcaagtgctgctacggcgaccattttcccgcaatgctcgcaagctcctatagcttcccttcttcccccgtacctctcaccagcggtgtcttcggtatgtgaaaacccaattcttcaaccctacaggatccaacaggcaatcgcagctggcatcttacctttatcacccttgttcctccaacaatcatcagccctattacaacagttacctttggtgcatttattggcacaaaacatcagggcacatcatctacaacaacttgtgctagcaaaccttgctgcctactctcagcaccagcagtttcttccattcaaccaactaggttaattgaactctgcttctaatttgc

SEQ ID NO: 692 - DNA, 269 bp, Zea mays
  Clone ID: LIB3061-050-Q1-K1-F4
acgcagctagctgatgtgatccctgctgccttcttgacacttcaacagctgctgacgctctacctgggctctgcgcctaacgctggcactctcttacaactgcaacaattgctgccattcaacccacttgctttgacaaacccaacatcgttctaccaacaacccatcattggtggcgccctcttttaaatcgattatgagctatactataataatgaaggcttttggatgatgtctggggctttccaaaaattagaatgtacatttct

SEQ ID NO: 693 - DNA, 441 bp, Zea mays
  Clone ID: LIB3061-050-Q1-K1-E2
ctccagcctcagctaccctctccaatcgcagttgcagttgcggctgggctaggctttcgtcaggagcacggtcctcccctcggctcttgacagatcgaactgcttccatcagcaattcaatcgggagatggccaccactcagttcgccatggttgaggagctggcctcgctcatcaaggacaacctgcacagcaagcatctcatcctctccaccgatgagtccctcgtcgcagccctccaagagctgcactgccgtgaagaggacgacggcgcggcggatacgatagaactccagcctgccggggcctaccaccgtcttctcttgcatcgccttgctgaaatttatgggctcgcgcatgaatcggccggtgaaggcgaagatcgacatttggtcctacagcgcttccccgaaacagccattccatctggtcttggtagtga

SEQ ID NO: 694 - DNA, 394 bp, Zea mays
  Clone ID: LIB3061-044-Q1-K1-B8
catgccactaccctactcaaccgccccggcctcagcctcatccccagccacacccatgcccgtgccaacagccgcatccaagcccgtgccagctgcagggaacctgcggcgttggcagcaccccgatcctgggccagtgcgtcgagttcctgaggcatcagtgcagcccgacggcgacgccctactgctcgcctcagtgccagtcgttgcggcagcagtgttgccagcagctcaggcaggtggagccgcagcaccggtaccaggcgatcttcggcttggtcctccagtccatcctgcagcagcagccgcaaagcggccaggtcgcggggctgttggcggcgcagatagcgcagcaactgacggcgatgtgcggcctgcagcagccgactccatg

SEQ ID NO: 695 - DNA, 243 bp, Zea mays
  Clone ID: LIB3061-044-Q1-K1-B9
tcgagaagtagaatccattgcaacaatagagcaacaatggcgaccaagatattttcccggcttatgctggctggtctttctacatggggtggtaacgcgacaattttccctcaatgctcacaagctcctatagcttcccttctttccccataccttccatcaattatagcttcagtatgtgaaaacccagctcttcaaccatataagcttcaacaagcaatcgcagcaagcaacataccttta

SEQ ID NO: 696 - DNA, 371 bp, Zea mays
  Clone ID: LIB3061-044-Q1-K1-C1
cttccttccgcggactagttttttctgaagattcggcgatggcggcgacgatccaatggcgtgaaggcgcgccagatctttgacagccgcggcaaccctacagtcgaggtcgacgtgttttgctcagatggaacctttgcaagggcagctgttcccagtggagcatcaactggtgtatatgaagctctggagttgagggatggtggctctgactatttggggaagggtgtctccaaggctgtgaacaatgtgaattctgttattggacctgctctgattggcaaggaccctacagcacagactgagattgataacttcatggttcaacaacttgatgggaccaaaaatgagtggtgatggtgcaagcaaaa

SEQ ID NO: 697 - DNA, 418 bp, Zea mays
  Clone ID: LIB3061-044-Q1-K1-C10
gaagcagtcatcgttgctccttcgagagaattaggaatgcaaattgggcgagaagtgggagagattgtgggtcctaatgacaaaagactggtccagcaacttgttggcggagctaatcgttccaggcaggaagaagcattgaagaagaacaaaccaatcattgttgtcggaacacctggccgtatttctgaaatttctgcagcaggtaagctacacactcatggctgccgttttcttgtactggatgaagtcgaccagcttctgtcttttaattaccgtgaagatatgcatagaattttggagcatgttggaaggagacctggaggcacatctagggatattcttggcccacttgcgagacgatctgagcgtcagactatcctggtttctgcaacaataccattttcagttatacgag

SEQ ID NO: 698 - DNA, 423 bp, Zea mays
  Clone ID: LIB3061-044-Q1-K1-C11
gaccaactagcaacatagaaagcacaatagtgtaccaacaatggcagccaaaatattgggcctccggatgctccttggtctttctgcaagtgctgctacggcgaccattttcccgcaatgctcgcaagctcctatagcttcccttcttcccccgtacctctcaccagcggtgtcttcggtatgtgaaaacccaattcttcaaccctacaggatccaacaggcaatcacagctggcatcttacctttatcacccttgttcctccaacaatcatcagccctattacatcagttacctttggtgcatttattggcacaaaacatcagggcacaacaactacaacaacttgtgctagcaaaccttgctgcctactctcagcaacagcagtttcttccattcaaccaactagctgcattgaactctgc

SEQ ID NO: 699 - DNA, 404 bp, Zea mays
  Clone ID: LIB3061-044-Q1-K1-C12
gagatcggaggagaaaaccgaaacgtgacaagcgatcaacagaaatttctcttgttatgggacagagaatggaggcaagcatattaacacatttaatgccacactcacagattgatatatatgtccaagttcttcaagctgatggtggaacaaggtcagcttgcataaatgctgcaacactagctcttgcagatgctgggattccaatgcgagacattgccacatcatgtagtgctggttatctgtgttctactcctttgctcgatctgaattacctcgaagacagtgctgggggttctgatgtcactgttggcattcttgcaaagatggacaaagtgactttgcttcagatggatgcaaaattaccaattgatacatttgaaaatgtaatgggacttgcaata

SEQ ID NO: 700 - DNA, 446 bp, Zea mays
  Clone ID: LIB3061-044-Q1-K1-C2
accaactagcaacatagaaagcacaatagtgtaccaacaatggcagctaaaatatttggcctccttatgctccttggtctttctgcaagtgctgctacggcgaccattttcccacaatgctcacaagctcctatagcttccctttcttcccccgtacctctcaccaacggtgtcttcggtatgtgaaaacccaattcttcaaccctacaggatccaacaggcaatcgcagctggcatcttacctttatcacccttgttcctccaacaatcatcagccctattacagcagttacctttggtgcatttattggcacaaaacatcagggcacaacaactacaacaacttgtgctagcaaaccttgctgcctactctcagcaacagcagtttcttccattcaaccaactagctgcattgaactctggttcttatttgcaacaacaacaac

SEQ ID NO: 701 - DNA, 353 bp, Zea mays
  Clone ID: LIB3061-044-Q1-K1-C3
ctgaaccctgctgtgaaccctgatgatcatctattaccactcatacagctatctactgagtactctaatgaccaccatcatcttccacttctcctatcgttcaacctgtaccccgctgttaacctggatgattatatgctactaccatttctactactatctacacagctccgtgcttccttcttgactcagttactgacgctgcatctgtacctgcatttctaccataaccccgcagctatcttacaactactacaactgctgccataagtgcaactcgctgtgacagacgctgcgacctactaccagcaacacttcattgatcacatcatctgtgataccgtttattagat

SEQ ID NO: 702 - DNA, 445 bp, Zea mays
  unsure (1)..(445): unsure at all n locations; Clone ID: LIB3061-044-Q1-K1-C4
cccgagccagccgtctcgctagggtttctccgccgccgccgccgccgccatgcctcgccgcagctcaggaaggtctgccccacgcccagctccccgtgctgctccagtgaggaacccgccacagccagcacgccaggctcctcctccagctcctgttcgagatggtggtggctccatgtttggaggaattgggtccaccattgctcaaggtatggcgtttggcacgggtagtgccatggcacacagggctgttgatgctgtattaggtccccggaccattcagcatgagactgttgcctcagaagctgctgctgctgcccctgcccctccagtgatgaatgctgatgcttgcagcatccattctaaggctttncaagattgtctcaacaactatggcagcgagatcagcaattgccagttctacctagacatgctgaacgagtgc

SEQ ID NO: 703 - DNA, 363 bp, Zea mays
  Clone ID: LIB3061-044-Q1-K1-C5
gaccaacaagcatcatagaaagtggaatccagtagcaacagtagagcaacaatggcgagcaagataggctccctccttatgctccttgctctttctacatgtgttgctaacgcgacaattttccctcaatgctcacaagctcctatagcttcccttcttaccccataccttccatcaattatagcttcaatatgtgaaaacccagctcttcaaccatataggcttcaacaagcaatcgcagcatgcaacatacctttatcgcccttgttgtttcaacaatcgccagccctatctttggtgcagtcattggtacaaaccatcagggcacaacagctgcagcaactcgtgctacctatgatcaac

SEQ ID NO: 704 - DNA, 438 bp, Zea mays
  Clone ID: LIB3061-044-Q1-K1-C6
gtttcttccattcaaccaactagctgcattgaactctgcttcttatttgcaacaacaacaactaccagtcagccagctatctgctgcctacccccagcaatttcttccattcaaccaactgacagcattgaactctcctgcttatttacagcagcaacaactactaccattcagccagctagctggtgtgagccctgctaccttcttgacacaaccacagttgttgccgttctaccagcacgctgcgcctaacgctggcaccctcttacaactgcaacaattgctgccattcaaccaacttgctttgacaaacccagcagcattctaccaacaacccatcattggtggtgccctcttttagatttcttatgagttatagttcaataataaagtttttgtctgatgttgtggcttcccagaaataagaagtacatttct

SEQ ID NO: 705 - DNA, 373 bp, Zea mays
  Clone ID: LIB3061-044-Q1-K1-C7
ccaacaagcaacatagaaagtggaatacagtagcaaaaatagagcaacaatggcggccaagatatttgccatccttatgctccttgctctttctgcatgtgttgctaacgcgaccatttttcctcaatactcacaagctcctatagctgcccttcttcccccataccttccatcaatgaccgctttagtatgtgaaaacccagcccttcaaccctacaggatccagcaagcaatcgcaacaagcaacttacctttatcacacctgttctttcaacaatcgccagccctatctttggtgcagtcattggtacaaaccatcagggcagaacagttgcagcaactcgtgctaccagtgatcagccaagtagctctg

SEQ ID NO: 706 - DNA, 346 bp, Zea mays
  Clone ID: LIB3061-044-Q1-K1-C8
ggcagccaaaatattttgcctccttatgctccttggtctttctgcaagtgctgctacggcgaccattgtcccgcaatgctcgcaagctcctatagcttcccttcttcccccgtacctctcaccagcggtgtcttcggtatgtgaaaacccaattcttcaaccctacaggatccaacaggcaatcgcagctggcatcttacctttatcacccttgttcctccaacaatcatcagccctattacaacagttacctttggtgcatttattggcacataacatcagggcacaacaactacaacaacttgtgctagcaaaccttgctgcctactctcagcaacagcagttt

SEQ ID NO: 707 - DNA, 406 bp, Zea mays
  Clone ID: LIB3061-044-Q1-K1-D1
gaagttattcttgtgggtggatccacccgaatccctgcagttcaagaacttgtgagggggcttactgacaaagatcccaatgttacggtcaaccctgatgaggttgtttctcttggggcagctgtgcagggtggggttttggcaggagacgtgaaagatgtagttcttctggatgttactccattatctcttggtttggagacattgggaggagtgatgacaaagattatccccaggaataccacactgccaacctcaaaatcggaggtattctcaacagctgcagatggacagacgagcgttgagattaatgttctccagggagaaagagagtttgtcagggacaacaagtccgttggaagcttccggttggatgggatccctcctgcacctcgtggtgtcccac

SEQ ID NO: 708 - DNA, 420 bp, Zea mays
  unsure (1)..(420): unsure at all n locations; Clone ID: LIB3061-044-Q1-K1-D10
attgtgagcattcagaaacacacctagcgaaacgcactaaccaccaacctaccaccattggcttccaagacattatccctccttgcgcttcttgccctttttgtgagtgcaacaaatgcgttcattattccacaatgctcactngctccgagtgccattattccacagttcctccctgcagttacttcaatgggcttcgaacacccagctgtgcaagcctataggctacaacaagcgcttgcggcgagcgtcttagaacaaccaattgcccaattacaacaacaatccttggcacatctaaccatacaaaccatcgcaacgcagcatcaacaagcactgagccacctagccgtggtgaaccctatcgcctacttgcaacaacagctgcttgcatccaacccacttgctttggcaaacgta

SEQ ID NO: 709 - DNA, 415 bp, Zea mays
  Clone ID: LIB3061-044-Q1-K1-D11
ctagcaacatagaaagcacaatagtgtaccaacaatggcagccaaaatattttgcctggttatgctccttggtatttctgcaagtgctgctacggcgaccattttcccgcaatgctcacaagctcctatagcttcccttcttcccccgtacctctcaccagcggcgtcttcggtatgtgaaaacccaattcttcaaccctacaggatccaacaggcaatcgcagctggcatcttacctttatcacccttgttcctccaacaatcatcagccctattacagcagttacctttggtgcatttattggcacaaaacatcaaggcacaacaactacaacaacttgtgctagcaaaccttgctgcctactctcagcaacagcagtttcttgcattcaaccaactagctgcattgaactct

SEQ ID NO: 710 - DNA, 409 bp, Zea mays
  Clone ID: LIB3061-044-Q1-K1-A3
ccaggcgtgacgccacgcgttcgcaactagcaacatagaaagcacaatagtgtaccaacaatggcagccaaaatattttgcctccttatgctccttggtatttctgcaagtgctgctacggcgaccattttcccgcaatgctcacaagctcctatagcttcccttcttcccccgtacctctcaccagcggtgtcttcggtatgtgaaaacccaattcttcaaccctacaggatccaacaggcaatcgcagctggcatcttacctttatcacccttgttcctccaacaatcatcagccctattacagcagttacctttggtgcatttattggcacaaaacatcagggcacaacaactacaacaacttgtgctagcaaaccttgctgcctactctcagcaacagcagtttc

SEQ ID NO: 711 - DNA, 418 bp, Zea mays
  Clone ID: LIB3061-044-Q1-K1-A4
attttgagcattcagaaacacacctagcgaagcgcactagcaacgacctaacaacaatggcttccaagacattatccctccttgcgcttcttgccctttttgtgagtgcaacaaatgcgttcattattccacaatgctcacttgctccgagtgccattattccacagttcctcccttcagttacttcaatgggcttcgaacacccagctgtgcaagcctataggctacaacaagcgcttgcggcgagcgtcttagaacaaccaattgcccaattacaacaacaatccttggcacatctaaccatacaaaccatcgcaacgcagcagcaacaagcactgagccacctagccgtggtgaaccctatcgcctacttgcaacaacagctgcttgcattcaacccacttgctttggcaaacgt

SEQ ID NO: 712 - DNA, 272 bp, Zea mays
  Clone ID: LIB3061-044-Q1-K1-A6
ctagcatcatttttctatcctgtttaaatacagcagcttcaacggctaccttggaaccttctaactcttgtgagccctactaccttcttgacacaaccacagctgttgccattctaccatcacgttccgcctaacgctgtcaccctattacaactgcaacaattgctgacattcaaccaacttgctttgacaaacccatcactgttctaccaacaacccatcattagtagtaccctcttttagatttcttatgagttataattcaataataa

SEQ ID NO: 713 - DNA, 377 bp, Zea mays
  unsure (1)..(377): unsure at all n locations; Clone ID: LIB3061-044-Q1-K1-A7
acctgcagtgcgtcgagaggatcggcgcacagaacagcatgaagatggtcatcggtctcgtcgtgtgcctggctctgtcagctgccagcgcctctgcaatgcagatgccctgcccctgcgcggggctgcagggcttgtacggcgctggcgccggcctgacgacgatgatgggcgccggcgggctgtacccctacgcggagtacctgaggcagccgcagtgcagcccgctggcggcggcgccctactacgccgggtgtgggcagccgagcgccatgttccagccgctccggcaacagtgctgccagcagcagatgaggatgatggacgtgcagtccgtcgcgcagcagctgcagatgatgatgcaactngagcgtgcc

SEQ ID NO: 714 - DNA, 307 bp, Zea mays
  Clone ID: LIB3061-044-Q1-K1-A8
tcggcaacatagaaagcacaatagtgtaccaacaatggcagccaaaatattttgcttccttatgctccttggtctttctgcaagtgttgctaccgcaaccattttcccacaatgctcacaagctcctatagcttcccttcttcccccatacctctcaccagcggtgtcttcaatgtgtgaaaccccaattgttcaaccctacaggatccaacaggcaatcgcaacaggcatcttaccattatcacccttgttcctccaacaaccgtcagccctattacagcagttacctttggtccatttggtggca

SEQ ID NO: 715 - DNA, 429 bp, Zea mays
  Clone ID: LIB3061-044-Q1-K1-A9
ggcaaacctttctccctactctcagcatcaacaatttcttccattcaaccaactgtggacactgaaccctgctgcttatttgcagcaacaactattaccatttagccagctagctactgcctactctcagcaacaacaacttcttccatttaaccaattggccgcactgaaccccgctgcttatttgcagcagcaaatactactgccatttagcgagctagctgcagcaagtcgtgcttccttcttgacacagcaacagttgctgcctttctacaagcagtttgcggctaaccccgcaaccctcttacaactacaacaattgttgccctttgtccaacttgctttgacaaacccagcagccttctaccaacaacacatcattggtggtgccctcttttaaattgattattagttgtaattcaataataa

SEQ ID NO: 716 - DNA, 417 bp, Zea mays
  Clone ID: LIB3061-044-Q1-K1-B1
ccgacgcgtccgctcggcctctaccgccccctcgatcggtcggccggtcagctatgaggccgggaagctcggccgccggatccggcgtcgtcgttcctcggaacttcaggctcctagaagagcttgaacgtggagagaagggcattggagatgggacagtgagctatggaatggatgacgcagatgacatctacatgcgatcatggactggcactattattggccctcataataccgtccatgagggtcgcatctaccagctgaagttgttctgcgacaaggactaccctgagaagccaccatcagttcgatttcattcaagaataaacttaacatgcgttaatcatgaaactggagtggttgacccgaagaagttcagcgttctgggtaactggcaacgtgattactcaatggaat

SEQ ID NO: 717 - DNA, 421 bp, Zea mays
  Clone ID: LIB3061-044-Q1-K1-B10
gagcggtgccagttccgaaagcgcacaccaaccacggtcgatcttcttttcctggtcggtcacgggccctgacgcatctgcctcgccggccgcgtcctcccgccccagcctcaagccggccgcggggattacgccggcgatgttcggcgcgccggtcaccgagcaggaggccgaggatctgagcaagagtgaaaggaaattttgctctggctcaaagttgaaagagatgggtgggagtgggatttttgctgagaagagtgaaaatggtgatgcagaggcttcaaatcctgctaacaagacttccttgaggatgtaccagcaaactgtgactggaataagccagatttcatttagcgctgatggaagtgtttcaccaaagaagccatcgtcgatacctgaggtggctaagcagcgagagctt

SEQ ID NO: 718 - DNA, 366 bp, Zea mays
  Clone ID: LIB3061-044-Q1-K1-B11
gttgcaacagtttctaccagcgctcagtcaactagccatggtgaaccctatcgcctagctacaacagcaacaacttctttcatctagcccgctcgctatgggcaatgcacctacatacctgcaacaacagttgttgcaacaacagttgctgcaacaaattgtaccagctcttactcagctagctgtggcaaaccctgctgcctacttgcaacaactacttccattcaaccaactgactgtgtcgaactctgctgcgtacctacaacagcgacaacagttacttaatccactagcggtggctaacccattggtcgctgccttcctacagcagccacaatggctgccatacaaccagttctctttgat

SEQ ID NO: 719 - DNA, 416 bp, Zea mays
  unsure (1)..(416): unsure at all n locations; Clone ID: LIB3061-044-Q1-K1-B12
tccacgcctccggtcgttcctgtcgcgcaaccaccgacttcaatttcacattttccccggcggtggcgcggtcaggtgaaccatggcggactccaaagccacctcggcggtcaccctccgcacccgcaagttcatgaccaaccgcctnctggcccgcaagcaattcgtgcttgaggtgatccaccccggccgcgccaacgtctccaaggcggagttgaaggagaggcttgccaaggcgtacgaggtgaaggaccccaacaccatctttgtcttcaagttccgcacccacttcggaggaggaaagtccactggtttcggcctcatctacgacaacctcgaggctgccaagaagttcgagccgaaataccgnctcatcaggaatggtcttgctactaaggttgagaagtcccgcaagc

SEQ ID NO: 720 - DNA, 440 bp, Zea mays
  unsure (1)..(440): unsure at all n locations; Clone ID: LIB3061-044-Q1-K1-B3
gcctgctaggtttagagcggtggcacggaggagggacgcgagaggcgacgcgtgcggcgagcaagcggcggcgtgcggcgagcaagcgactacgccgtggagtgcgacctacagcctgcagcctccaggagtaaagttcataagaggaagaggaatgggtaaagaaacagaggtcaatgaatatgaactacagagggctgccaacataagagaaaatatgaagaggatgagatctcttaatctccctgtacctagtactatggttaatgaagcaaatggatcacatcgagccagcaagaaacacaagacaaggaaattagcatattcaactaatggtcctactttgcgatcaaggactcanagggatattgttgacgataaccatgaggatagtacttctgaaatagttatggagaatctaaatatcccatcaatgatga

SEQ ID NO: 721 - DNA, 443 bp, Zea mays
  Clone ID: LIB3061-044-Q1-K1-B4
cacatctaaccatacaaaccatcgcaacgcaacagcaacaacaatttctaccagcactgagccaactagctgtggtgaaccctgtcgcctacttgcaacagcagttgcttgcatccaacccacttgctctggcaaacatagttgcataccaacaacaacaacaattgcaacagtttctaccagcgctcagtcaactagccatggtgaaccctgccgcctacctacaacagcaacaactgatttcatctagccctctcgctgtggttaatgcacctacatacctgcaacaacagttgctgcaacagattgtaccagctctgactcagctagctgtggcaaaccctgctgcctacttgcaacagctgcttccattcaaccaactgactgtgtcgaactctgctgcgtacctacaacagcgacaacaggtacttaatccactagcg

SEQ ID NO: 722 - DNA, 367 bp, Zea mays
  Clone ID: LIB3061-044-Q1-K1-B5
cgactccagattggagaactcgacaccatgaaggtgctgatcgttgcccttgctctcctggcgctcgctgcgagcgccgcctccagtacaagcggcggctgtggctgccagacaccaccgtttcatctaccgcctccgttctatatgccgcctccgttctatctgccgccgcagcagcagccgcagccatggcaataccccactcaaccaccgcagctaagcccgtgccagcagttcggatcctgcggcgtcggcagcgtcggcagcccgttcctgggccagtgcgtcgagttcctgaggcaccagtgcagcccggcggcgacgccctacggctcgccacagtgccaggcgctgcagcagcagtgct

SEQ ID NO: 723 - DNA, 437 bp, Zea mays
  unsure (1)..(437): unsure at all n locations; Clone ID: LIB3061-044-Q1-K1-B6
cgcgcctctacatttcttctctctctgctcctccgccttcgccttcgcctgatccatccaagacagggatcgccatgtcggactcggaggagcaccacttcgaatcgaaggccgacgctggggcgtccaagacctacccgcagcaggctggcaccgtccgtaagaacggcttcatcgtcatcaagaaccgtccctgcaaggttgtggaggtttctacctccaagactggtaagcatggccacgccaaatgccactttgtcgccatagacatattcaatgggaaaaagcttgaagatattgttccttcatcacacaactgtgacattccgcatgtgaaccgtactgagtatcagctgattgatatttctgaggatggatttgtgagccttcttacttcagatggcaacactaaggatgatnctagactcccaactgat

SEQ ID NO: 724 - DNA, 423 bp, Zea mays
  Clone ID: LIB3061-044-Q1-K1-A11
gaccaactagcaacatagaaagcacaatagtgtaccaacaatggcagccaaaatattgtgcttccttatgctccttggtctttctgcaagtgctgctaccgcaaccattttcccacaatgctcacaagctcctatagcttcctttcttcccccatacctctcaccagcggtgtcttcagtatgtgaaaacccaattcttcaaccctacaggatccaacaggcaatcgcagcaggcatcttacctttatcacccttgttcctccaacaaccgtcagccctattacagcagttacctttggtgcatttgttggcacaaaacatcaaggcacaacaactacaacaacttgtgctaggaaaccttgctgcctactctcagcaacagcagtttcttccattcaaccaactggctgcattgaactctgc

SEQ ID NO: 725 - DNA, 449 bp, Zea mays
  Clone ID: LIB3061-043-Q1-K1-G9
gcaattagctcatcgactccagattggagaactcgacaccatgaaggtgctgatcgttggccttgctctcctggcgctcgctgcgagcgccgcctccagtacaagcggcggctgtggctgccagacaccaccgtttcatctaccgcctccgttctatatgccgcctccgttctatctgccgccgcagcagcagccgcagccatggcaataccccactcaaccaccgcagctaagcccgtgccagcagttcggatcctgcggcgtcggcagcgtcggcagcccgttcctgggccagtgcgtcgagttcctgaggcaccagtgcagcccggcggcgacgccctacggctcgccacagtgccaggcgctgcagcagcagtgctgccaccagatcaggcaggtggagccgctgcaccggtaccaggcgacatacggggtggtcctgcaatcct

SEQ ID NO: 726 - DNA, 445 bp, Zea mays
  unsure (1)..(445): unsure at all n locations; Clone ID: LIB3061-043-Q1-K1-H1
ccgcaacctcctcaccttgctcctccccagcatggtacctggcctcgaggtcgcctagaggggcgactggatccgggtggagcctgtgcccggcgccttcgtcgtcaacttcggatgccagcttgaggttgtgacgaacgggatcttgaagagcatcgagcaccgggtgatgaccaacctgggagtggcgcggacaacggtggccacgttcatcatgcccaccacggactgcctcatcggccccgccgccgagttcctcagcgacgacaacccgccgtgctaccgcaccctcaccttcggcgacttcaagcgcatctacagcgttgtcaagctgggctcgtcgctcaacctcaccacaaatctcaagaccgttcagaaggagctctgattatccatcaaactttgtagcctncctcgaattggcggcgaggaactagctagctag

SEQ ID NO: 727 - DNA, 446 bp, Zea mays
  Clone ID: LIB3061-043-Q1-K1-H10
gtaacacaaggctgaatttttgttcggtctagccgacccgacgatggcgtccagcgacgggaaagcactgccaaccgcggcctctgtgggcggcggcggcggcagcagcaccgcgccgcccgggcagccgaccacggtagcgtccaaggtgctggacatgggcgcggcggcgatgcagtcgttgcgccccgtgaagcaggcgaagcagcacatgtgcacgttcgcgctgtacgcgcacgacccgaagcggcaggtggagaccgcaccactacgtctccgcctcaaccaggacttcctccagtgcgccgtctatgactccgacaaagccgacgcgcgtctcatcggcgtggagtacatcgtgtcgagggagatctttgactcgctgccggcggaggagcagcggctgtggcactcgcacgcgcacgagatcaagtcaagcctgtgga

SEQ ID NO: 728 - DNA, 339 bp, Zea mays
  Clone ID: LIB3061-043-Q1-K1-H11
attttcagcattcaaaaacacaccaagcgaagcgcactagcaacgacctaacaccaatggctaccgagatattagccctccttgcgcttcttgcccttttagtgagcgcaacaaatgcgttcattattccacagtgctcacttgctcctagtgccattattccacagttcctaccaccagttacttcaatgggcttcgaacatccagccgtgcaagcctacaggctacaactagcgcttgcggcgagcgccttacaacaaccaattgcccaattgcaacaacaatccttggcacatctaaccctacaaaccattgcaacgcaacaacaacaacaacaac

SEQ ID NO: 729 - DNA, 380 bp, Zea mays
  Clone ID: LIB3061-043-Q1-K1-H12
agcaaagcggcagtgcgtagagaggatcgtcgaacagaacagcatgaagatggtcatcggtctcgtcgtgtgcctggctctgtcagctgccagcgcctctgcaatgcagatgccctgcccctgcgcggggctgcagggcttgtacggcgctggcgccggcctgacgacgatgatgggcgccggcgggctgtacccctacgcggagtacctgaggcagccgcagtgcagcccgctggcggcggcgccctactacgccgggtgtgggcagccgagcgccatgttccagccgctccggcaacagtgctgccagcagcagatgaggatgatggacgtgcaagccgtcgcgcagcagctgcagatgatgatgcagcttgagcgtg

SEQ ID NO: 730 - DNA, 441 bp, Zea mays
  unsure (1)..(441): unsure at all n locations; Clone ID: LIB3061-043-Q1-K1-H2
cccacgcgtccggcgaagcgcactagcaacgacctaacaccaatggctaccaagaaatgagggcttcttgggcctcttggccttttaatgaacgccacaaatgccgtcattatttcacaatgcttaattggttctaatggcattatttcacagattcttccaccacatactctaatgggcttgaaacattcgnaccgcgcaagctatacaggttacatctagcgcttgcggagagcgctttacaacaaccaatggcccaattgcaacaacaatccttggcacatctaaccatacaaaccattgcaacgcaacaacaacaacaacaacagtttctgccatcactgagccacctagccgtggtgaaccctgtcacctacttgcaacagcagctgcttgcatccaacccacttgctctggcgaacgtagctgcataccagcaac

SEQ ID NO: 731 - DNA, 462 bp, Zea mays
  Clone ID: LIB3061-043-Q1-K1-H3
ctcaccagcggtgtcttcaatgtgtgaaaccccaattgttcaaccctacaggatccaacaggcaatcgcaacaggcatcttaccattatcacccttgttcctccaacaaccgtcagccctattacagcagttacctttggtccatttggtggcacaaaacatcagggcacaacaactacaacaacttgtgctagcaaaccttgctgcatactctcagcaacatcagtttcttccattcaaccaactggctgcattgaactctgctgcttatttgcaacaacaattaccattcagccagctagttgctgcctacccccagcaatttcttccattcaaccaactagcagcattgaactctgctgcttatttacagcagcaacaactactaccattcagccagctagctgatgtgagccctgctgccttcttgacacaacaacagttgttgccgttctacctgca

SEQ ID NO: 732 - DNA, 441 bp, Zea mays
  Clone ID: LIB3061-043-Q1-K1-H4
gtcgcgaagccggccgacgtgtgcgcgaggttcgccgcccccgtcgagaacctgcacgttcgccggcgaggcggccagtgccgagcactcggggtccgtgcacggcgcctactcgtcgggcatcgccgctgccgaggaatgcaggaagcggctcctggcgctgaagggcatcccggacctggtccaggtcgcggcgtgggaggagatggccggagctgtggctcctctgcagatttgcaggacctgagtgagattggatcactggctgcctttggacattggagtggatcgtggatcgcttcgctgctccctgatggttgccgagtctttttttatatttaccttaccttgaaggccgttgtgtcttgtctggaataaatcaagattgactggcactgaaagtgtcatcgcgtcactctttcatacttattaataaatatc

SEQ ID NO: 733 - DNA, 436 bp, Zea mays
  Clone ID: LIB3061-043-Q1-K1-H5
gtgccggttcggaagccgcacaccagcacggccgaccttctctcctggtcggccaggggccctgacgcatgtgcgtcgccggccgcgtcctcccgccccagcctcaagccggccgccgggattacgcctgcgatgttcggcgcgccggtcaccgagcaggaggccgaggatctgagcaagagtgaaaggaaattttgctccggatcgaagttgaaagagatgagtgggagtgggattttcgctgagaagagtgaaaatggtgactcagaggcttcaaatcctgataacaagacttccttgaggatgtaccatcaaactgggactggaataagccagattgcatttactgctgatggaagtgttacaccgaagaagccgctgtcaatacctgacgtggctaagcagcgagagcttattggtaccctggaacatgctg

SEQ ID NO: 734 - DNA, 435 bp, Zea mays
  Clone ID: LIB3061-043-Q1-K1-H6
cacatcagtagtcgaccaagcacaagcagcagagccggccggaatatgtggacgatgaggaaggtggcgacgccgcaggtggccgtcctcctgctgctcctcatcgtcgttgcgcaggaggcggctccgttggcggaggcgcgcgtgtgccggcgccggagcgcgggcttcaagggggtctgcatgtccgaccacaactgcacgcacgtgtgcttgcatgaggtctacagcggcggcaactgcgacggcatcatgcgccagtgcaagtgcatcatggagtgctagctagctaggctctaggatctagcaagctagctatatcggcctttaattaaattaataaggatcgacgtcgtggccggtcgctaaatatgtactactatacgtttacactacatgcaataatgcaccacatgtacgcgtacgcgcgccgag

SEQ ID NO: 735 - DNA, 443 bp, Zea mays
  Clone ID: LIB3061-043-Q1-K1-H7
agaaagcacaatagtgtaccaacaatggcagccaaaatattttgcttccttatgctcgttggtctttctgcaagtgttgctaccgcaaccattttcccacaatgctcacaagctcctatagcttcccttcttcccccatacctctcaccagcggtgtcttcaatgtgtgaaaccccaattgttcaaccctacaggatccaacaggcaatcgcaacaggcatcttaccattatcacccttgttcctccaacaaccgtcagccctattacagcagttacctttggtccatttggtggcacaaaacatcagggcacaacaactacaacaacttgtgctagcaaaccttgctgcatactctcagcaacatcagtttcttccattcaaccaactggctgcattgaactctgctgcttatttgcaacaacaattaccattcagccagct

SEQ ID NO: 736 - DNA, 430 bp, Zea mays
  unsure (1)..(430): unsure at all n locations; Clone ID: LIB3061-043-Q1-K1-H8
gataatgtgaaggccaaaatccaggacaaggagggtatccccccggaccagcagcgggtgatcttcgccggcaagcagctggaggatggtcgcaccttggctgactacaacatccagaaggagagcaccctccatctggtgctccgcctgaggggtggtatgcagatctttgtgaagaccttgactggcaagaccataaccctggaggttgagagctctgacaccatcgacaacgtgaaggctaagatccaggacaaggaggggattcccccagaccagcagcgtctgatcttcgccggcaagcagctggaggatggtcgcacccttgcagactacaatatccagaaggagagcaccctncacctggtgctccgtcttcgcggtggttattaagccatcagtcgttgaaacttgtgctgtatctgggtat

SEQ ID NO: 737 - DNA, 451 bp, Zea mays
  Clone ID: LIB3061-043-Q1-K1-H9
gaaagtggaatccagtagcaacaatagagcaacaatggcgaccaagatactttccctccgtatgcgccttgctctttctgcatgtgttgctaacgcgacaattttccctcaatgctcacaagctcctatagcttcccttcttcccccataccttccatcaatgatagcttcagtatgtgaaaacccagctcttcaaccctataggctccaacaagcaatcgcagcaagcaacatacctttatcacccttgtttcaacaatcgccagccctatctttggtgcagtcattggtacaaaccatcaaagcacagcagctgcagcaactcgtgctacctgtgatcaaccaagtagctctggcaaacctttctccctactatcagcaacaacaatttcttccattcaaccaactatctacactgaaccctgctgcttatttgcagcaacaactatta

SEQ ID NO: 738 - DNA, 363 bp, Zea mays
  Clone ID: LIB3061-044-Q1-K1-A1
cccactcgttcgcaactagcagcattgaactctcctgcttatttacagcagcatcaactgctaccattcatccagctagctggtgtgagccctgctaccttcttgacacaaccacagttgttgccgttctaccagcacgttgcgcctaacgctggcacccttttacaactgcaacaattgctgccattcaaccaacttgctttgacaaacccatcagtgttctaccaacaacccatcattggtggtgccctcttttagatctcttatgagttatagttcaataatatagctttgtatctgatgttggtggcttccaagaaataagaaagtacatttctaatagagctacctgtgatcaagggc

SEQ ID NO: 739 - DNA, 400 bp, Zea mays
  Clone ID: LIB3061-044-Q1-K1-A10
cttatttgcaacaacaacaactaccattcagccagctacctgctggctacccccagcaatttctttcattcaacgaactggcagcattgaaactctctgcttatttacagcagcaacaactactaccattcagccagctagctggtgtgagccctgctaccttcttgatacaaccacagttgttgccgttctaccagcacgctgcgcctaacgctggcaccctcttacaactgcaacaattgctgccattcaaccaacttgctttgacaaacccagcagcgttctaccaacaacccatcattggtggtgccctcttttagatttcttatgagttatagttcaataataaagttttttgtctgatgtttgtggcttcccagaaataagaaagtacatttct

SEQ ID NO: 740 - DNA, 376 bp, Zea mays
  Clone ID: LIB3061-043-Q1-K1-G8
agaaagcacaatagtgtaccaacaatggcagccaaaatattttgcctccttatgctcgttggtatttctgcaagggctgctacggcgaccattttcccgcattgctcacaagctcctatagcttcccttcttcccccgtacctctcaccagcggtgtcttcggtatgtgaaacccaattttttaacccctacggtgcccaacgggtattcgcaggtgtcttatcactattacccccgttgctcctacaatcatcatccccattatagcagttacccctggtgcacatattgtcgcaaaaaatcatggcgcaacaactactacaacttgtgctagcaaaccatgctgcctactcttatcaacaaccagtttttttca

SEQ ID NO: 741 - DNA, 449 bp, Zea mays
  Clone ID: LIB3061-058-Q1-K1-H9
gcaacaatggcgaccaagatattttccctccttatgctccttgctctttctacatgtggggctaacgcgacaattttgcctcaatgctcacaagctcctatagcttcccttcttcccccataccttccatcaattatagcttcagtatgtgaaaacccagctcttcaaccatataggcttcaacaagcaatcgcagcaagcaacatacctttatcgcccttgttgtttcaacaatcaccagccctatctttggtgcagtcattggtacaaaccatcagggcacaacagctgcagcaactcgtgctacctgtgatcaaccaagtagctctggcaaacctttctccctactctcagcaacaacaatttcttccattcaaccaactgtctacactgaaccctgctgcttatttgcagcaacaactattaccatttagccagctagctactgc

SEQ ID NO: 742 - DNA, 343 bp, Zea mays
  Clone ID: LIB3061-058-Q1-K1-G6
gatagaccttcaactcataccattgatcgtgggatagcattacatacgatgatgagagttatcacaatgggtttgggaggagagggctatcttaatttcatgggaaatgagactggacattctgaatggatagattttccaagaggtccgcaaagacttacaagtggtaagtttattccagagaataacaaccgttatgacaaatgtcgtctaagatttgacctgcgtgatgcacactatcttaggtatcatggtatgcaagagtttgatcaggcaatgcaacatcttcagcaaaaatatgaattcatgacatctgatcaccagtatatataccggaaacatg

SEQ ID NO: 743 - DNA, 427 bp, Zea mays
  Clone ID: LIB3061-058-Q1-K1-G7
attgagaccaactagcaacatataaagcacaatagtgtaccaacaatggcagccaaaggattttgcttccttatgctccttggtctctctgcaagtgttgctaccgcaaccattttcccacaatgctcacaagctcctatagcttcccttcttcccccatacctgtcaccagcggtgtcttcaatgtgtgaaaccccaattgttcaaccctacaggatccaacaggcaatcgcaacaggcatcttaccattatcacccttgttcctacaacaaccgtcagccctattacagcagttacctttggtccatttggtggcacaaaacatcagggcacaacaactacaacaacttgtgctagcaaaccttgctgcatactctcagcaacatcaatttcttccattcaaccaactggctgcattgaactttg

SEQ ID NO: 744 - DNA, 434 bp, Zea mays
  unsure (1)..(434): unsure at all n locations; Clone ID: LIB3061-058-Q1-K1-G8
gccaaaacggggtttcaacctctaattagttgaaacgtcgtttaaatgtagttgtaagaacactggataatgaagtgcattggttgtatatcaatctgacacactatggaaccccaataatatgcactgctgtataattaggttctgttactgcattttgagattccttttgtttgaagaaatgctaaatttgacatctctcttttgttgacaacttaggtacgactaccatgctggtttttggggtgtcatgggacgggaatgtattggcattgtccctccatttattagagaatttaattatccgatggccaaaaattgtgccggtggggatacaagtgtttttgtcaatggcagagaactgcatcaaagagatttagatttacttgtaagaagaagactaccacngacatctggcatgtcatattctaatg

SEQ ID NO: 745 - DNA, 454 bp, Zea mays
  Clone ID: LIB3061-058-Q1-K1-G9
cagcaagcaacatagaaagtagaatccattagcaacaatagagcatcaatggcgaccaagatattttccgtcctggtgctccttgctctttctacatgtgttgctaacgcgacaattttccctcaatgctcacaagctcctatagcttcccttcttcccccataccttccatcaattatagcttcagtatgtgaaaacccagctcttcaaccatataggcttcaacaagcaatcgcagcaagcaacatacctttatcgcccttgttgtttcaacaatcaccagccctatctttggtgcagtcattggtacaaaccatcagggcacaacagctgcagcaactcgtgctacctgtgatcaaccaagtagctctggcaaacctttctccctactctcagcaacaacaatttcttccattcaaccaactgtctacactgaaccctgctgcttatttgc

SEQ ID NO: 746 - DNA, 437 bp, Zea mays
  Clone ID: LIB3061-058-Q1-K1-H1
ctcgcacttccgcttcagcttccaccgtgcccaagagtcacgaggcggcggcgggtcaggccgacgtactctcaggtgctgcggtgggactgcccctgctgctgccgcgggggcggcggaggggaggatggccgcggcgacggcggcggacatggtgtgggtgagggtgcttgaggatggcgtgttccggttcgacgcgtcggaggcggcgcgcgccgccgcggggcccagcctctcgttcgcggacccgcggcggcgggaggcgccgcatgacggggccgacatgcccgccgttgtcccggtatgcgaagtcgcggcggggggatcccagaaggtcgtgataaagcttcctcctgggacatctttctatggtactggagaagcgagtggcccacttgaacggactgggaaacgagttttcacatggaatacagatg

SEQ ID NO: 747 - DNA, 434 bp, Zea mays
  Clone ID: LIB3061-058-Q1-K1-H10
tgaaaaaggaaaattcaaagaagaagcaggtactgtatgtcatgaatccgaacaggttcagggcttgtgaattcctgattcgattccatgagcaacaacgtggagacaagataattgtgtttgctgataatctgtttgcactaactacttatgcgatgaaactgcgcaagccaatgatttttggtgccacaagccatgctgagaggacaagaattctctaccaattcaagaacagtccagaagtcaatacaatttttctttcaaaggtcggtgataactcgattgatatcccagaagctaatgttatcatacaaatatcatctcacgctggttcgagacgtcaagaagctcagcgtctgggccgtattctcagagcatagggtaaacaccaagataggatggctggaagaaaagaagaatacaatgcttttttc

SEQ ID NO: 748 - DNA, 210 bp, Zea mays
  Clone ID: LIB3061-058-Q1-K1-H11
ataaatcccctacttttcttcctccatatataggggccatcagatccagtaaggggaatgcaccaggggcttcgcgcccgttcacgatcccatgttcccgacgaattcttagagtgacctcttatcccttcagacaccttcaaggctcttggtgtagcttgccactctcaccaatcaagttctcatgtctgatctcgacattcagatccc

SEQ ID NO: 749 - DNA, 450 bp, Zea mays
  Clone ID: LIB3061-058-Q1-K1-H12
accaactagcaacatagaaagcacaatagtgtaccaacaatggcagccaaaatattttggctccttatgctccttggtctttctgcaagtgctgctacggcgaccattttcccgcaatgctcgcaagctcctatagcttcccttcttcccccgtacctctcaccagcggtgtcttcggtatgtgaaaacccaattcttcaaccctacaggatccaacaggcaatcgcagctggcatcttacctttatcacccttgttcctccaacaatcatcagccctattacaacagttacctttggtgcatttattggcacaaaacatcagggcacaacaactacaacaacttgtgctagcaaaccttgctgcctactctcagcaacagcagtttcttccattcaaccaactaagttcattgaactctgcttcttatttgcaacaacaacaactacca

SEQ ID NO: 750 - DNA, 358 bp, Zea mays
  Clone ID: LIB3061-058-Q1-K1-H2
aacacaccaagcgaagcgcactagcaactacctatcaccaacggctaccaagatatgggccggccttgcgcttatgggcctttgactgagcgcaacaaatgcgtccattattacacagtgctcaattgatactagtgccaacattccacagctactccgatcagttacttcaatgggcttacaacattcagccgtgcaagcctacaggctacaactagcgcttgcagtgagctgcctacaacaaccaattgcccaaacgcaacaccaatgcttggcacatctaaacttactaaccattgcaacgcagcaaccacaccaacagtacctgccataactgatccatctagccgtggtgaac

SEQ ID NO: 751 - DNA, 417 bp, Zea mays
  unsure (1)..(417): unsure at all n locations; Clone ID: LIB3061-058-Q1-K1-H3
catcactttggaggtggagtcctcggacaccatcgacaatgtgaaggccaagatccaggacaaggagggcatccgcccggaccagcagcggctcatcttcgccggcaagcagctcgaggacggtcgcaccctcgccgactacaacatccagaaggagtccacactccacctggtgctccgcctccgcggcggcgccaagaagcgtaagaagaagacgtacaccaagcccaagaagatcaagcacaagcacaagaaggtcaagctctccgtgctgcagttctataaggtggacgacaccactagcaaggtgacccgcctccgcaaggagtgccccaacacagagtgcggcgcgggcgtcttcatggccaaccacttcgaccgncactactgcggcaagtgcggccttaactatgtcta

SEQ ID NO: 752 - DNA, 435 bp, Zea mays
  Clone ID: LIB3061-058-Q1-K1-H4
aggcaatcgcagctggcatcttacctttatcacccttgttcctccaacaatcatcagggctaggacaacagttacgtttggtgcatttattggcacaaaacatcagggcacaacaactacaacaacttgtgctagcaaaccttgctgcctactctcagcaacagcagtttcttccattcaaccaactaggttcattgaactctgcttcttatttgcaacaacaacaactaccattcagccagctacctgctgcctacccccagcaatttcttccattcaaccaactagcagcattgaactctcctgcttatttacagcagcaacaactactaccattcagccagctagctggtgtgagccctgctaccttcttgacacaaccacagttgttgccgttctaccagcacgttgcgcctaacgctggcaccctcttac

SEQ ID NO: 753 - DNA, 391 bp, Zea mays
  unsure (1)..(391): unsure at all n locations; Clone ID: LIB3061-058-Q1-K1-H5
cacgtctcccagatctaactcccaaagactcacgaatcccagagagcctccatggcgacgcaccgccactgcctcccactcctcctcgtggccgccgccctcgccctcgccgccgtccctgctcgcgcggcgctgggcggcgggcgcggcccgctgctgggcgggtggaacccgatccctgacgtgagcgactcgcacatccaggagctaggcgggtgggcgctggggcaggcgaagcaccagaagctggccgccgacgggctgcggttccgccgcgtggtgcgcggcgagcagcaggtcgtgtccgggatgaactaccgcctctacgtcgacgccgncgaccccgccggccgcaccgtgccctacgtcggcctcgtgtacgagcaagtct

SEQ ID NO: 754 - DNA, 379 bp, Zea mays
  Clone ID: LIB3061-058-Q1-K1-H6
cggacgcgtgggattttcagcattcaaaaacacaccaagcgaagcgcactagcggcgagctaacaccaatggctaccaagatattagccctccttgcgcttcttgcccttttagtgagcgcaacaaatgcgttcattattccacagtgctcacttgctcctagtgccattattccacagttcctcccaccagttacttcaatgggcttcgaacatccagccgtgcaagcctacaggctacaactagcgcttgcggcgagcgccttacaacaaccaattgcccaattgcaacaacaatccttggcacatctaaccctacaaaccattgcaacgcaacaacaacaacaacaacagtttctggcatcactggaccacctaac

SEQ ID NO: 755 - DNA, 404 bp, Zea mays
  Clone ID: LIB3061-058-Q1-K1-H7
caagcaacatagaaagtggaatccagtagcaacaatagagcaacaatggcgaccaagagactttccctccttatgctccttgctctttctgcatgtgttgctaacgcgacaattttccctcaatgctcacaagctcctatagcttcccttcttcccccataccttccatcaatgatagcttcagtatgtgaaaacccagctcttcaaccctataggctccaacaagcaatcgcagcaagcaacatacctttatcacccttgtttcaacaatcgccagccctatctttggtgcagtcattggtacaaaccatcaaggcacagcagctgcagcaactcgtgctacctgtgatcaaccaagtagctctggcaaacctttctccctactatcagcaacaacaatttct

SEQ ID NO: 756 - DNA, 439 bp, Zea mays
  Clone ID: LIB3061-058-Q1-K1-H8
cccgggcgccaagcgaagcgcactagcaacgacctaacaacaatggctaccaagatattagccctccttgcgcttgttgcgctttttgtgagcgcagcaaatgcgttcattattccacaatgctcacttgctcctagtgccattattccacagttcctcccaccagttacttcaatgggcttcgaacacctagctgtgcaagccaacatgcaacaacaagcgcttgcggcgagcgtcttacaacaaccaattgcccaattgcaacaacaatccttgccacatctaacaatacaagccatcacaacgcaacagcaacaacagttcctaccagcactgagccacctagccatggtgaaccctgccgcctacttgcaagagcagctgcttgcatccaacccacttgctctggcgaacgtaattgcaaaccagcaacaacaac

SEQ ID NO: 757 - DNA, 451 bp, Zea mays
  Clone ID: LIB3061-058-Q1-K1-G5
agcaacatagaaagcacaatagtgtaccaacaatggcagccaaaatattttgcttccttatgctccttggtctggctgcaagtgctgctaccgcaaccattttcccacaatgctcacaagctcctatagcttcctttcttcccccatacctctcaccagcggtgtcttcagtatgtgaaaacccaattcttcaaccctacaggatccaacaggcaatcgcagcaggcatcttacctttatcacccttgttcctccaacaaccgtcagccctattacagcagttacctttggtgcatttgttggcacaaaacatcaaggcacaacaactacaacaacttgtgctaggaaaccttgctgcctactctcagcaacagcagtttcttccattcaaccaactggctgcattgaactctgctgcttatttgcaacaacaactaccattcagtcagct

SEQ ID NO: 758 - DNA, 452 bp, Zea mays
  Clone ID: LIB3061-058-Q1-K1-F12
gaagaagacaaacgatatgcggtgacaccagcccaatcattgtacgggactggctatgaggattatacaagtgaaccgaacagtccgggagattccaggtccagggctgaaaaaacacaagaacctgttattgacatattgcctcagctctatgatattggttccagtgacagcagaggaccttcaactggaatgtggtctcgaactcttcgactaaagattacaggaagagatgggatccagaaaattgatgccaggatacctgctgggttcttagaagggatgacaagaattattccaggcttggctggagctaatattatggaaaggcttcggaatgctcctgttgatacagacaacccccagaatggtcaaatactgcttgattttgaggacgccatgggagataagatccaggtgtttattgcatgagctgatggtgtatttgctag

SEQ ID NO: 759 - DNA, 348 bp, Zea mays
  Clone ID: LIB3061-058-Q1-K1-F2
gagcactagccagggcgaaccatatcgtctacctacaacagcaacaactcctttcagggagggctctccctatgggcaatgcacctacatacctgcaacaacacttgatgcaacaacagttgctgcaacaaactgcaccagctcttactcaactagctgtggcaaacactactgcctactcacaacaactactctcattcaaccaactaactgtgtcgaactctgctacgtacctacaacagcgataacacatacttaatacaatatcagcagctaacacattgatcgcagccttcctacagcagcaacaaacgctgccatacaaccagttctctttgatcaacccta

SEQ ID NO: 760 - DNA, 400 bp, Zea mays
  Clone ID: LIB3061-058-Q1-K1-F3
cgtcagcctagcaattagctcatcgactccagattggagaactcgacaccatgaaggtgctgatcgttgcccttgctctcctggcgctcgctgcgagcgccgcctccagtacaagcggcggctgtggctgccagacaccaccgtttcgtctaccgcctccgttctatatgccgcctccgttctatctgccgccgcagcagcagccgcagccatggcaataccccactcaaccaccgcagctaagcccgtgccagcagttcggatcctgcggcgtcggcagcgtcggcagcccgttcctgggccagtgcgtcgagttcctgaggcaccagtgcagcccggcggcgacgccctacggctcgccacagtgccaggcgctgcagcagcagtgctggcaccagat

SEQ ID NO: 761 - DNA, 390 bp, Zea mays
  Clone ID: LIB3061-058-Q1-K1-F4
ataacaagtttgttgttcgtttataaaataaaatgacaatatgcactaggtttggtcgggtttaaaaaacccagggggtcacgggtttgggtactataggaacaaacccgtacccataaacccgctgggtacagatttatgcccattaacaaacccatgggtatgaaaattggcccaaacccgtaccctaatggggtaaaaacccatcgggtttcgggtacccattgccatctctagttgtaacccttcttcattcgtcaccaggtctgcactggatggggaatgtggtttccttgctgctaacctttatgcaaagagtgtttttggcgaggactctttggtgaacatcaacattgagaagcaacatgacggcaagctcagtggctacat

SEQ ID NO: 762 - DNA, 420 bp, Zea mays
  Clone ID: LIB3061-058-Q1-K1-F5
gcacagcgccggcaaccgccgccatcgatcgatcgcccggaaactgacctctaccgatgtctggagccggcgaggaggataagaagcccgcggagggcggcgcccacatcaaccttaaggtcaagggacaggatggcaatgaggtgttctttcgcataaagaggtccacccagctgaagaagctgatgaacgcctattgcgaccgccagtctgtggacatgaatgccattgcattcctgtttgatggccgcaggcttcgcggcgagcagacccctgatgagctggagatggaggacggcgacgagatcgacgccatgcttcaccagaccggaagcagcgttcctagcaccacctaaaagcagcagctgcggagcctcggtttgctctccggcctgcgtagtactaaacaaaaaggaaaaa

SEQ ID NO: 763 - DNA, 421 bp, Zea mays
  Clone ID: LIB3061-058-Q1-K1-F6
cgagatttgaagccagaaaatcttttgctcgatgagaatagcaacctgaaggtatcagattttggtctaagcgcacttgctgaatgccatagacaagacggcctgctccacacgacttgtggcacgcctgcttatgttgccccagaggtgattaacagaaagggttatgatggtgcaaaggctgacatatggtcttgtggggtcatcctgtttgtgctattggctggttatcttccgttccatgataagaacttgatggacatgtataagaagattgagaaagctgacttcaaatgtccaagttggttttctaccgatgttcggaggcttttgcaaaggattcttgatcctaaccctagtagaaggatctcggtggaaaaaatcatggagaatccatggtttaagaagggtttaggtgcaa

SEQ ID NO: 764 - DNA, 432 bp, Zea mays
  Clone ID: LIB3061-058-Q1-K1-F7
attagctcatcgactccagattggagaactcgacaccatgaaggtgctgatcgttgcggttgctctcctggcgctcgctgcgagcgccgcctccagtacaagcggcggctgtggctgccagacaccaccgtttcatctaccgcctccgttctatatgccgcctccgttctatctgccgccgcagcagcagccgcagccatggcaataccccactcaaccaccgcagctaagcccgtgccagcagttcggatcctgcggcgtcggcagcgtcggcagcccgttcctgggccagtgcgtcgagttcctgaggcaccagtgcagcccggcggcgacgccctacggctcgccacagtgccaggcgctgcagcagcagtgctgccaccagatcaggcaagtggagccgatgcaccggtaccaggcgacatacggtgt

SEQ ID NO: 765 - DNA, 380 bp, Zea mays
  Clone ID: LIB3061-058-Q1-K1-F8
ccaactagcaacatagaaagcacaatagtgtaccaacaatggcagccaaaatatgtgggctccttatgctccttggtctttctgcaagtgctgctacggcgaccattttcccgcaatgctcgcaagctcctatagcttcccttcttcccccgtacctctcaccagcggtgtcttcggtatgtgaaaacccaattcttcaaccctacaggatccaacaggcaatcacagctggcatcttacctttatcacccttgttcctccaacaatcatcagccctattacatcagttacctttggtgcatttattggcacaaaacatcaaggcacaacaactacaacaacttgtgctagcaaaccttgctgcctactctcaacaacag

SEQ ID NO: 766 - DNA, 445 bp, Zea mays
  Clone ID: LIB3061-058-Q1-K1-F9
caaaaacacaccaagcgaagcgcactagcaacgacctaacaccaatggctaccaagatattagccctccttgcgcgtcttgcccttttagtgagcgcaacaaatgcgttcattattccacagtgctcacttgctcctagtgccattattccacagttcctcccaccagttacttcaatgggcttcgaacatccagccgtgcaagcctacaggctacaactagcgcttgcggcgagcgccttacaacaaccaattgcccaattgcaacaacaatccttggcacatctaaccctacaaaccattgcaacgcaacaacaacaacaacaacagtttctgccatcactgagccacctagccgtggtgaaccctgtcacctacttgcaacagcagctgcttgcattcaacccacttgctctggcgaacgtagctgcataccagcaacaaca

SEQ ID NO: 767 - DNA, 435 bp, Zea mays
  Clone ID: LIB3061-058-Q1-K1-G1
caacaagcaacatagaaagtggaatccagtagcaacaatagagcaacaatggcgaccgggagagtttacctccttatgctccttgctctttctacatgtgttgctaacgcgacaattttccctcaatgctcacaagctcctatagcttcccttcttcccccataccttccatcaattatagcttcaatatgtgaaaacccagctcttcaaccatataggcttcaacaagcaatcgcagcaagcaacatacctttatcgcccttgttgtttcaacaatcgccagccctatctttggtgcagtcattggtacaaaccatcagggcacaacagctgcagcaactcgtgctacctctgatcaaccaagtaactatggcaaacctttctccctactctcagcaacaacaatttcttccattcaaccaactggctacactg

SEQ ID NO: 768 - DNA, 98 bp, Zea mays
  unsure (1)..(98): unsure at all n locations; Clone ID: LIB3061-058-Q1-K1-G10
aaaagattagagatctatattttattactgagaagttgcacatatcagtatgagaaatgtctcantaataaaagattagagatctatattttaagttc

SEQ ID NO: 769 - DNA, 439 bp, Zea mays
  Clone ID: LIB3061-058-Q1-K1-G11
attagctttatctactccagagcgcagaagaacccgatcgacaccatgagggtgttgctcgttgccctcgctctcctggctctcgctgcgagcgccacctccacgcatacaagcggcggctgcggctgccagccaccgccgccggttcatctaccgccgccggtgcatctgccacctccggttcacctgccacctccggtgcatctcccaccgccggtccacctgccgccgccggtccacctgccaccgccggtccatgtgccgccgccggttcatctgccgccgccaccatgccactaccctactcaaccgccccggcctcagcctcatccccagccacacccatgcccgtgccaacagccgcatccaagcccgtgccagctgcagggaacctgcggcgttggcagcaccccgatcctgggccagtgcgtcgagtttc

SEQ ID NO: 770 - DNA, 452 bp, Zea mays
  Clone ID: LIB3061-058-Q1-K1-G12
cccacgcgtccggttacgcgggcgagtacttcggggacaagatccacggcttgggcgtgtacagcttcgccaacgggcactgctacgaaggctcgtggcacgaaggcaagaagcagggattcgggatgtacacgttccggaacggcgacaagcgatcgggggactgggattctgggacgctcaagacccccttgcccccggccgatccttctgtccagcgagccgtacaggctgcacagcgagctgcagagaacgcgtttcgcttgcctagagttgatgagcaggtccacagggcggtaatggccgcgaacagggcggccacggccgctcgagtggcggcgatcaaggcagtccagaacaggatggatgggaagttttgtgagacctatgtgtgaattgctgtgtgcgaaaccatgtttcgctctctctctctctttctaactggacattta

SEQ ID NO: 771 - DNA, 455 bp, Zea mays
  Clone ID: LIB3061-058-Q1-K1-G3
attgtgagcattcagaaacacaccaagcgaagcacattagcaacaacctaacaacaatggctaccaagatattatgccggcttgcgcttcttgcgctttttgcgagcgcaacaaatgcgttcattattccacaatgctcacttgctccaagttccattattacacagttcctcccaccagttacttcaatgggcttcgaacacccagctgtgcaagcctataggctacaacaagcaattgcggcgagcgtcttacaacaaccaatttcccagttgcaacaacaatccttggcacatctaacaatacaaaccatcgcaacgcaacagcaacaacaattcctaccagcactgagccacctagccatggtgaaccctgccgcctacttgcaacagcagttgcttgcatcaaacccacttgctctggcaaacgtagttgcaaaccagccacaacaacag

SEQ ID NO: 772 - DNA, 437 bp, Zea mays
  Clone ID: LIB3061-058-Q1-K1-G4
ctagcaacatagaaagcacaatagtgtaccaacaatggcagccaaaatattttgcttggttatgctccttggtctgtctgcaagtgctgctaccgcaaccattttcccacaatgctcacaagctcctatagcttcctttcttcccccatacctctcaccagcggtgtcttcagtatgtgaaaacccaattcttcaaccctacaggatccaacaggcaatcgcagcaagcatcttacctttatcacccttgttcctccaacaaccgtcagccctattacagcaattacctttggtgcatttgttggcacaaaacatcaaagcacaacaactacaacaacttgtgctaggaaaccttgctgcctactctcagcaacagcagtttcttccattcaaccaactggctgcattgaactctgctgcttatttgcaacaacaac

SEQ ID NO: 773 - DNA, 436 bp, Zea mays
  Clone ID: LIB3061-058-Q1-K1-F11
caacatagaaagcacaatagtgtaccaacaatggcagccaaaatatttcgctggcttaggctccttggtctttctgcgaagtgctgctaccgcaaccattttcccacaatgctcacaagctcctatagcttcctttcttcccccatacctcttaccagcggtgtcttcagtatgtgaaaacccaattcttcaaccctacaggatccaacaggcaatcgcagcaagcatcttacctttatcacccttgtatcttcaacaaccggcagccctattacagcagatacctttcatgcatttgttggcacaaaacatcaatgcacaacaactacaacaacttgagctatgaaaccttgctgtctactctcaatcacaggcatttcttacattcaaccaactggctgcattgaactctgctgcttattttcaacaacaacta

SEQ ID NO: 774 - DNA, 238 bp, Zea mays
  Clone ID: LIB3061-058-Q1-K1-D6
gcgaacagcaccaagcaacacacggagagccctataccagcacaaacactggcgcgggggtttagaagcagccagcgcggactaatcctcgcagcacgacatcacgctgtccatgctccctgcatccaacgccagtgctgcgacgatccgcgtgccggcataccacaatccatacgacccgttacagagctgcccatggatcataacacgacccaacaggaaaaatacaccgcaagca

SEQ ID NO: 775 - DNA, 416 bp, Zea mays
  Clone ID: LIB3061-058-Q1-K1-D7
cagcatacaaaaacacaacaaacgaagcgcactatcaacgacctaacaccaatggcagcgaacatatcaaacctgctcgcactaatcgcccttaatagtgaacgcaacaaatgcgatcattaaatcacagtactcacttgctcctagagccattattgcacacctcctaccaccagttacttcaaagggcttccaacatccaacaaaacaagcctacaggctacaactagcgcatgcagccatcacattacaacaaccaatagcacaactgcaacaacaatccttagcacatctaaccctacaaaccatagcaacgcaacaacaacaacaacaacagcatctgccaccactgagccaactagccctggtgaaccaagtcacctacttgcaacaacaactgctagcatacaaaccac

SEQ ID NO: 776 - DNA, 279 bp, Zea mays
  Clone ID: LIB3061-058-Q1-K1-D8
caggactaccacctgcatcaaatgaatcgcactactcgcgactaaacactacgacccgcgagcataccacagccgctaagcactaatcaactacagagccatgcctctccaagaccaacacacaagaagccacaccaccaccgacgccgcctcagcaagcacaccaagaacaagtccgtcactgagactgatacccaggacgcatacagctgagctacaagctacgactccaacgagaacgccgatcccaaccacgagccacaggacgacgtcaagata

SEQ ID NO: 777 - DNA, 346 bp, Zea mays
  unsure (1)..(346): unsure at all n locations; Clone ID: LIB3061-058-Q1-K1-D9
gtcggcaccataccggtacaaatgctgctcgcatcgcggaacctccaaatcacgacctggggattctgcctgaattctggacttatgctgctactgcagttccagatatgggtctcatggcaatgaatcacatattacttattgccgctatgctagctgtgtgactgccatacggtgtctcggaacccgtgttaggcttcttacatacacctgttacgacacctgagttgctgtaacccttgctacatgagcctatgccgtnttacgtccatcattgataacaaatcagtctattacctaaagtacaaccattgaaacatggcatccggtctcaacgtccccagct

SEQ ID NO: 778 - DNA, 411 bp, Zea mays
  Clone ID: LIB3061-058-Q1-K1-E1
ccgaattcgcaggcacgcaggtcggcgaggagggcaggaagaccgaagaccgagccgtgcgggggctcagcacggggacgggacaggaccccaaaatctcacactcttcctgcccgcccggccgggcccgtcgacgcgtcggacttgccggccgagcctcacctccggcctctcctgatgcaaggggatcggatacgccacaggctacgcgacggtgctgcgggactacgagctacgaggtcgcaatctggaaccccggcttcgacttcgacgacaaaatcctcggcttcatcaagggctacaagcgcacctttaatctcacttgcattgaccacagaggcacaccggaacaatcggcgaggacctgcacgctcgaaaccgacgacgaggccataagctggggaaatgcat

SEQ ID NO: 779 - DNA, 444 bp, Zea mays
  Clone ID: LIB3061-058-Q1-K1-E11
attttgagcattcagaaacacaccaagcgaagcgcactagcaacgacctaacagcaatggctaccaagatattagccctccttgcgcttcttgccctttttgtgagcgcaacaaatgcgttcattattccacaatgctcacttgctcctagtgccattattccacagttcctcccaccagttacttcaatgggcttcgaacacctagctgtgcaagccaacatgcaacaacaagcgcttgcggcgagcgtcttacaacaaccaattgcccaattgcaacaacaatccttgccacatctaacaatacaagccatcacaacgcaacagcaacaacagttcctaccagcactgagccaactagccatggtgaaccctgccgcctacttgcaagagcagctgcttgcatccaacccacttgctctggcgaacgtagttgcaaaccagc

SEQ ID NO: 780 - DNA, 442 bp, Zea mays
  Clone ID: LIB3061-058-Q1-K1-E12
gcttcccttcttcccccgtacctctcaccagcggtgtcttcggtatgtgaaaacccaagtcttcaaccctacaggatccaacaggcaatcgcagctggcatcttacctttatcacccttgttcctccaacaatcatcagccctattacaacagttacctttggtgcatttattggcacaaaacatcagggcacaacaactacaacaacttgtgctagcaaaccttgctgcctactctcagcaacagcagtttcttccattcaaccaactaggttcattgaactctgcttcttatttgcaacaacaacaactaccattcagccagctacctgctgcctacccccagcaatttcttccattcaaccaactagcagcattgaactctcctgcttatttacagcagcaacaactactaccattcagccagctagctggtgtgagcc

SEQ ID NO: 781 - DNA, 268 bp, Zea mays
  Clone ID: LIB3061-058-Q1-K1-E2
gcaaaacagcaagagaaaggcaaccccaagacgagcaagacagcgacggacgacaagggccacataccaacgcgcacggacaatgacggaagcacaggtaacgcaaccagtaggccagactactcacacgacgcaatagctgcccgactgaactcagaacagcaatcacacagacctacagtatgggaaaaaccagggcgccagccataacgaaaccgtacaggacaaggaccacgaaaccgaaaagtgtcacacagaccacaacaac

SEQ ID NO: 782 - DNA, 411 bp, Zea mays
  Clone ID: LIB3061-058-Q1-K1-E3
gcaacatagaaagtggaatacagtagctaaaatagagcaacaatggcggccaagataggttggatccttatgctccttgctctttctgcatgtgttgctaacgcgaccatttttcctcaatactcacaagctcctatagctgcccttcttcccccataccttccatcaatgaccgctttagtatgtgaaaacccagcccttcaaccctacaggatccagcaagcaatcgcaacaagcaacttacctttatcacacctgttctttcaacaatcgccagccctatctttggtgcagtcattggtacaaaccatcaaggcagaacagttgcagcaactcgtgctaccagtgatcaaccaagtagctctggcaaacctttccccctactctcaacaacaacaatttcttccattc

SEQ ID NO: 783 - DNA, 432 bp, Zea mays
  Clone ID: LIB3061-058-Q1-K1-E5
tgtatttgcactcatgcatcacaaaacatccttctatcagtaccatcaatcatgattggtcttactagtataggcaccaaatcaaatctgcaacatcaattatctaactccaaaaaccatgaagctggtgcttgtggttcttgctttcattgctttagtatcaagtgtttcttgtacacagacaggcggctgcagctgtggtcaacaacaaagccatgagcagcaacatcatacacaacaacatcatccacaaaaacaacaacatcaaccaccaccacaacatcaccagcagcatcaacaccaacaacaacaagttcacatgcaaccacaaaaacatcagcaacaacaagaagttcatgttcaacaacaacaacaacaaccgcagcaccaccaccaacaacaacaacaacagcaccaacaacaacctcaatg

SEQ ID NO: 784 - DNA, 351 bp, Zea mays
  Clone ID: LIB3061-058-Q1-K1-E7
ctgcacaccctcaatcaccacacagtcctccactcctttagtagctcgtgattgggagggttactagaccactggtcgggtctctgacgacgacacatggtgcagggtcgcgtggccgcatcatggacggcagttccttctgctcgccggcgtgctgctggccgtcgcagacacggccggtgcggaggacagactggtcgaactaaaccgcccggcggacctgcggcggtgcaagcatgcagacaagtagcacaactgaaaggacaccccgaggaagagggaatgcgagagcgagtgccgcgagcggcaccatcaagatgacgcggtcgatgacagcaaccgcagcgacta

SEQ ID NO: 785 - DNA, 437 bp, Zea mays
  Clone ID: LIB3061-058-Q1-K1-E8
gttcaaccctacaggatccaacaggcaatcgcaacaggcatcttaccattatcgcccgggttcctccaacaaccgtcagccctattacagcagttacctttggtccatttggtggcacaaaacatcagggcacaacaactacaacaacttgtgctagcaaaccttgctgcatactctcagcaacatcagtttcttccattcaaccaactggctgcattgaactctgctgcttatttgcaacaacaattaccattcagccagctagttgctgcctacccccagcaatttcttccattcaaccaactagcagcattgaactctggtgcttatttacagcaacaacaactactaccattcagccagctagctgatgtgagccctgctgccttcttgacacaacaacagttggtggcgttctaccttgacgctatgcctaa

SEQ ID NO: 786 - DNA, 203 bp, Zea mays
  Clone ID: LIB3061-058-Q1-K1-E9
cgctgcggtctgatcgcgcccgcagcccgttcgaaccctcgactccccctgccgacgccgggatggacgacgaccgggaccacgaccactacccctacgcgtcacagccggccgtgccctgacgacggtccctgaagcggaagctgctcgcggacgcggaagtcgaggcggaccccgcggcgcggttcgaggccgacgacgag

SEQ ID NO: 787 - DNA, 358 bp, Zea mays
  Clone ID: LIB3061-058-Q1-K1-F1
gagcaaacgcaaggccgacgcttactcctcgtcgtccttctactccactccaccgaggtggcgccttgcgcttgccgtcgtgatggtcgcgtcactgctcgtgctcaccgtggcgttcttggttggctctgactccctgtggatcgatgggggcgcagcggctcccgtcaaggtggatggcaccgatgtggcctaccgtagcgcgatcaagctgatgcacgagaagaccaagcaccgtctgcactctcacgatgtgccctacggctcaggcaccagtcaccagcctgtcaccgggtctcctgaaggcgatgactcaaatagctactggatcataaggcccactccagattcatcgtct

SEQ ID NO: 788 - DNA, 345 bp, Zea mays
  Clone ID: LIB3061-058-Q1-K1-F10
gacgagggaggggaaaagagagatggtggaggcatcgccggagtccggcgccggggcgggcggaggtgcctctagtgcggcggcggtgcggaaggggaagtcatgcaagggctgcctctactactcgtcagtgctcatgtcccgcggttacaacccaatctgcgttgggatcccccgctccatcccccaagttcctaactacgtggtggatgaacctaaggaggaggcgactgctcaagggcatgaccttaggcggttcaagtactggtgcgcgggttactccatgttcgtggacaacagggacgagcagggtggtgagagcgagggcaagacgttgttgccata

SEQ ID NO: 789 - DNA, 376 bp, Zea mays
  Clone ID: LIB3061-058-Q1-K1-D5
agaagctcaactgctgaactcactgatccactatgactatggcaaacgcaggcgcgcggattgtatcaccggccggagctgctactctcgcactatcacttctctgcgctgacgacggtccggacgacgctcagaactactgctgccaaccaaacgtatgctgaaacaagtttggctactgcacgacgaccgacaagtactgcaactacatagagccagtacaggcccgtgcaaggtagttcgtcaagagcaagcaaatacctgccgaggagcgaacgtggctagcgtagacacagcatccttattaaacagtatcaagagccatgccggtagcgtatactagggcaagcacttatacaatctgaacgcgttcctg

SEQ ID NO: 790 - DNA, 416 bp, Zea mays
  Clone ID: LIB3061-058-Q1-K1-B9
ctggaacatctgctgatgctaattctactgccaaaagttcaatcagtggttcagctgcgaaggatgttggttctgctgaaaatgaaaaatcatatggacttgatgttgttgttgagataatgactgcattagaaagatctgcatatgaagctcttggaacagattttgggaaatataaccagaaactgcgacaactacagttcaacatcaacaatatctctaaacttctcaggaggctgatggacaaggagcttgatcctccagttcttctaaccatgtgccccgatgaattacaggctggcttgacttcagcagagaaaacatctgaaccagaagaatcaaggaaatctcagatgactgatactggatgtcaaagatgcagcgaacagaaagttggcatatctcatattatccat

SEQ ID NO: 791 - DNA, 446 bp, Zea mays
  Clone ID: LIB3061-058-Q1-K1-C1
ctgagccacctagccgtggtgaaccctgtcacctacttgcaacatcagctgcttgcatccaacccacttgctgtggcgaacgtaactgcataccagcaacaacaacagctgcaacagtttatgccagtgctcagtcaactagccatggtgaaccctgccgtctacctacaactactttcatctagcccgctcgcggtgggcaatgcacctacgtacctacaacaacagttgctgcaacaaattgtaccagctctgactcagctagctgtggcaaaccctgctgcctacttacaacagttgcttccattcaaccaactggctgtgtcaaactctgctgcgtacctacaacagcgacaacagttacttaatccattggcagtggctaacccattggtcgctaccttcctgcagcaacaacaacaattgctgccatacaaccagttctc

SEQ ID NO: 792 - DNA, 271 bp, Zea mays
  Clone ID: LIB3061-058-Q1-K1-C10
cgccgccatcgtctcgggctctcatctctaatcttcgggttcgcgtcgcagtggcttccgcccgggctaccgccatgccgaagcagatccacgagatcaaggacttcctgctgactgcgcggcggaaggacgcacggtcggtgcggatcaagcgggccaaggacgccgtcaagttcaaggtgcgctgctccaggtacctctacaccctctgcgtccacgacgccgacaaggccaacaagctcaagcagtcgctcccggcaggtctgactgt

SEQ ID NO: 793 - DNA, 445 bp, Zea mays
  Clone ID: LIB3061-058-Q1-K1-C11
gtttgtccattcgcattggtctgaatactgtagctactagcgcgagtgccactgtgccgcagctgcctgctcgccattactgcaagctgtgttcaatcaaagcttaattaggctccctctacatctgatccagctaagtagctagccagcactacagaagggcgtggcaagaatcaggagagagatagcaggggggctagctagctgagctcgtgcgacgaagaatggccggaattggcaggaacatggtggcgccgctcctggtgctcaacctcatcatgtacatcatcgtcatcggcttcgcgagctggaacctgaaccacttcatcaacgggcagaccaactaccccggcgtggccggcaacggcgcgacgttctacttcctggtgttcgccatcctggccggcgtggtgggcgcggctttcaaactggcgggcgtgcacca

SEQ ID NO: 794 - DNA, 382 bp, Zea mays
  Clone ID: LIB3061-058-Q1-K1-C2
gcttctgcttgctctggggggaaggagagagagagagcgagagagatctagtagagaggctagctaggtggtcctcgaacgaagatgttggcggtgttcagcggacaggtggtggaggtgccggcggagctggtggcggcgggcagccggacgccgtcgcccaagacgaaggcgtcgcagctggtggggcgcttcctggccggctccgagccggccgtgtccgtgcagctcgaccaccaacgacgcctcgtctactcccacatcaaccaggcgctcctacggcccaggtcgttcgcggcgaaggacgaagtgtccttgctgttcgagggggtgctggacaacctgggtcgctggaccagcagcactggctgtaaagcaaggg

SEQ ID NO: 795 - DNA, 418 bp, Zea mays
  Clone ID: LIB3061-058-Q1-K1-C3
caatccagcacacatcaaaccatacagaccattacagcgcagcaacaacaacaacaggggctgccatcactgaaccacctaatcatcttgaaccctgtcacctacttgcaacagcagctgctatcatacaacccacttgctctgccgaacgtagctgcataccaccaacaacaacagctgcaacagcatatgccagtgatcactcaactagccatgctgaaccctgccgtctacctacaactactatcatctagaccgctcgcagtaggcaatgcacctacctacctacaacaacagttgctacaacaaatagtaccacctctgactcacctagctgtcgcaaacccttcagcctacttacaacaattgattccattcaaccaactgaatcagtcaaactctgatgcatacctacaac

SEQ ID NO: 796 - DNA, 359 bp, Zea mays
  Clone ID: LIB3061-058-Q1-K1-C4
attttgagcatgcagcaacacacgaagctaagctacctagcaacgacttaacaacaagggctgccaagatattagccctgcttgcgcttcttgccctttatgagagcgcaacaaatgcgttcattattccacaatgctaacttgctcctagtgccattataccacagttccttcgaccagttacttcaatgggctttgaacacctagctgtgcaagcctacaggctacaacaagcgcttgcaaaaaccgcttacaacaaccaattaaccaattgcaacaacaattcttggcaaatctaaccatacaaaccaatcgcacacaacaagcacaacaatttctaccagcactgaaccaactag

SEQ ID NO: 797 - DNA, 336 bp, Zea mays
  Clone ID: LIB3061-058-Q1-K1-C5
cagaccagcaagcaacaacacacgtagaacacaatagcaacaacaacgcaacaagggggaccaaaacacttgcggggcgtacgcaacctagctaacactacatgcgttgctaacgcgacacaaatcccacaatgctcacaagctgctataacttacctcataccaccataccttccatcaattatagcgtcaccatgtgaacacccaactatacaaccatatacgcttcaacaagccatcgaagcaagcaacataccccaatcgaccatgctattacaacaataaccaaccatataagcgatgcaatcatcgctacaaacaatgagggcacaaaca

SEQ ID NO: 798 - DNA, 386 bp, Zea mays
  Clone ID: LIB3061-058-Q1-K1-C6
gagaccaactagcaacataaaaagcacaatactgtaccaacaatggcagccaaaatagggtgcctactaatgctgctgggacttactgcaagagctgctacggcgaccattatgctgcaatgctcgcaagctcctatagcttccctacttctcccgtacctctgaccagcagtgtcttcggtatgtgaaaacccaattattaaaccctacagcatccaacaagcaatcacagctggagtcagacctgtatcacacttgttcctacaacaatcatcagccctattacatcaacaacctttggtgcatatattggcacaacacatcagggcacaacaactacaacaactagtgctagcagaccttgctgcctactcttagcaacagca

SEQ ID NO: 799 - DNA, 346 bp, Zea mays
  Clone ID: LIB3061-058-Q1-K1-C7
cggacgcgtgggtagcaacatagaaagtacaatagtgtaccaacaatggcaggcaaaggattttgcctccttatgctccttggtctttctgcaagtgctgctacggcgaccattttcccgcaatgctcgcaagctcctatagcttcccttcttcccccgtacctctcaccagcggtgtcttcggtatgtgaaaacccaattcttcaaccctacaggatccaacaggcaatcacagctggcatcttacctttatcacccttgttcctacaacaatcatcagccctattacatcagttacctttggtgcatttattggcacataacatcagggcacaacaactacaac

SEQ ID NO: 800 - DNA, 431 bp, Zea mays
  Clone ID: LIB3061-058-Q1-K1-C8
cagcattcaaaaacacaccaagcgaagcgcactagcaacgacctaacaccaatggctagcaagatattagccctccttgcgcttcttgcccttttagtgagcgcaacaaatgcgttcattattccacagtgctcacttgctcctagtgccattattccacagttcctaccaccagttacttcaatgggcttcgaacatccagccgtgcaagcctacaggctacaactagcgcttgcggcgagcgccttacaacaaccaattgcccaattgcaacaacaatccttggcacatctaaccctacaaaccattgcaacgcaacaacaacaacaacaacagtttctgccatcactgagccacctagccgtggtgaaccctgtcacctacttgcaacagcagctgcttgcatccaacccacttgctctggcgaacgt

SEQ ID NO: 801 - DNA, 451 bp, Zea mays
  Clone ID: LIB3061-058-Q1-K1-C9
atttagaccaactagcaacatataaagcacaatagtgtaccaacaatggcagcgaaaatgttttgcctccttatgctccttggtatttctgcaagtgctgctacggcgaccattttcccgcaatgctcacaagctcctatagcttcccttcttcccccgtacctctcaccagcggtgtcttcggtatgtgaaaacccaattcttcaaccctacaggatccaacaggcaatcgcagctggcatcttacctttatcacccttgttcctacaacaatcatcagccctattacagcagttacctttggtgcatttattggcacaaaacatcagggcacaacaactacaacaacttgtgctagcaaaccttgctgcctactctcagcaacagcagtttcttccattcaaccaactagctgcattgaactctgcttcttatttgcaacaacaacaac

SEQ ID NO: 802 - DNA, 422 bp, Zea mays
  Clone ID: LIB3061-058-Q1-K1-D1
agatagttggttgaatggaagaaattgttgttgctgaaccctgctgcttatttgcagggacggctattaccattgagccagctagctactgcctactctcatcaacaacaacttcttccatttaaccaattggccgcactgaacctcgctgcttatttgcagcatcaaatattactaccatttagccagctagctgcagcaagccgtgcttccttcttgacacagcaacagttgctgcctttctaccagcagtttgcggctaaccccgcaaccctcttacaactacaacaattgttgccctttgtccaacttgctttgacaaacccagcagccttctaccaacaacacatcattggtggtgccctcttttagattgcttattagttgtaattcaataataaagttttttggatgatgtatgt

SEQ ID NO: 803 - DNA, 387 bp, Zea mays
  Clone ID: LIB3061-058-Q1-K1-D10
caactagctgcattgaactctgcttcttatttgcaacaacaacaactaccattcagccagctatctgctgcctagccccagcaatttgttccattcaaccaactgacagctttgaactctcctgcttatttacagcagcaacaactactaccattcagccagctagctggtgtgagccctgctaccttcttgacacaaccacaattgttgccgttctaccagcacgctgcgcctaacgctggcaccctcttacaactgcaacaattgctgccattcaaccaacttgctttgacaaacccaacagcattctaccaacaacccatcattggtggtgccctcttttagatttcttatgagttatagttcaataataaaggtttttgtctg

SEQ ID NO: 804 - DNA, 421 bp, Zea mays
  Clone ID: LIB3061-058-Q1-K1-D12
gattagctcaactctgccaaataggcttgggaaaatgttggctcctcttcactggcatgattataagaagcaatatgggaagcttgatgattttgtggctagtcgtccagagctgtttgtgattgagggagacttcattcaccttcgtgaaggagcacagcagatcatttctgctactacagctgctgcaaaaatagctgctgctacagcatcttctgccccttactcatccttactgccttctgttgctgttactcctgtggcacaaagcactcggcaaaagaagggccctgcagttgattccagatcatcaaatgcaattctttctggaaatggcttcacagatcaatttaacatcattcaaggggttagtgacgtacctgtttcaggcaaagtaagaaacaccctaaataatggcttc

SEQ ID NO: 805 - DNA, 107 bp, Zea mays
  Clone ID: LIB3061-058-Q1-K1-D2
ccgaacatccggggtggtaactataacagaggggcacctacattaaatacactggccctcgacatacaacgccatgactggcaaaaccctcacagaacctaacttaa

SEQ ID NO: 806 - DNA, 379 bp, Zea mays
  Clone ID: LIB3061-058-Q1-K1-D3
gaaaaggggcaggaagaaatcaagcctaacacgatccatcgcctagccgaagcacaggggaggccagcaacaccagggggatgaagctggacatatcctgactcgagaccaacttcgccaacctgacagaatactactgcgacgacacgtacttctccgcccaggcctccgacgtgccgtccatggtgctacccatctgcgactacttcaacggattacaaacggacaccaaggatatggagaagaataagaagggtacgaccacacttgccttcatattcaacaagggcatcatcgtcaccagtgattccaaagccaccatggacggatatatatcctcacaaaccgtgaagaaaattattgaaataaatccttacat

SEQ ID NO: 807 - DNA, 195 bp, Zea mays
  Clone ID: LIB3061-058-Q1-K1-B8
gatccaacaggcaatcgcagcaggcatcttacctttatcacccttgttctaccaacaagccatcattggtggtgccctcttttagatttcttatgagttatagttcaataataaagttttttgtctgaaaaaaaaaaaaaaacaaaaaaaaaaaaaaaataaataaaaaaaacagaaacataaaagaggccagca

SEQ ID NO: 808 - DNA, 224 bp, Zea mays
  Clone ID: LIB3061-058-Q1-K1-A3
gtgcagatgacggatcagaaataggtgctgccctgattgctgcctcgcaatctcagtggagagatgtccgagtggtatagaggtagcaagtagctatgatttgtttccaacgtcttaactgtccagcgtctgcagtttagcatgctagagctggatgcgatctgtaaccaaaaccaggcttggccaactggctgttcataattccaataacagcagggttgcag

SEQ ID NO: 809 - DNA, 419 bp, Zea mays
  Clone ID: LIB3061-058-Q1-K1-A4
ctttggatctgaaatcctcccaagagctgtactagatcatagtgtgcaggcatgcatggttacgggctattgggaggatgttggaacaatcaaatcattctttgatgcaaacttggccctcactgagcagccttccaagtttgatttttatgatccaaaaacacctttcttcactgcaccccgatgcttgcctccgacgcaattggacaagtgcaagatgaaagatgcatttatctcagatggttgcttactgagagaatgcaacatcgagcattctgtgattggagtctgctcacgtgtcagctctggatgtgaactcaaggactccgtgatgatgggagcggacacctatgaaactgaagaagaagcttcaaagctactgttagctgggaaagtcccagttggaatagggaggaaca

SEQ ID NO: 810 - DNA, 388 bp, Zea mays
  Clone ID: LIB3061-058-Q1-K1-A5
ctgagaggagccatttcgatgagaaggctaatcatctccatggctccgttcccattggtgagaaggctgaaaggcatgctataaacagagatagacccgatcgtggtgtatgggcagcttgacgctatgacaaatctacatctgcaggtagtacacatcctccgtcgtcagagttgcctcaaatgcagtcacattctggagataatattttgcaactagcagatggtcatggatacagaaagacagacacatgggatcaaggtggtagccagggtgttcctgttgaaaatggacataggcacgcctaccgatgtggaccttcacgttgaccaatggaaactgaaatctctgcaaatgtgcctgaatgcgagaattcaaagctgggctc

SEQ ID NO: 811 - DNA, 373 bp, Zea mays
  Clone ID: LIB3061-058-Q1-K1-A6
ctcacgcgtacgacgaggtatacaagatatagctaaaaaggattttgagaatcttaggcaagatagtgatgccagtgaaccagaaccggaaccagaacgagaacccaagccggaacccgaaccagaagaaccaaagccacagccttgccggtgcaggcctacaaacaagaataatgccaaacagaaagttgggaagccaccatcagaacgtgcaactgcagacttttctggtgcaacacttgctactgcggcaaatattgaacggcatgcacaggcagatgttgatctgtcacgaatagtaatggataaagcgatgattgcagatgtgttgagagcttcttttgacaacctaaagaatgagcacaactggtct

SEQ ID NO: 812 - DNA, 399 bp, Zea mays
  Clone ID: LIB3061-058-Q1-K1-A7
gttcgatgctcaaagaacatcataacaaccagtacgctctgctactgaagccccggtgaccgtggttcagagttgctgttaaattcacaaagctactcgtatctattagattgctgaaaccagcgagtacgatcctttatgggatttgatctggtctaattgttgttaagtggaggtattgctctcagttgttttgtgctctgtttgtcggcatatgccaagagctagggcttctcaagttctaagcttttagacgagtggattccttccattgaagagccggcaaaagttctgccctgcacctgctaaaaatagatcttaccctggtccaatgctaaataatatgacgtgtcgccttctagatgtggatattatgtgaatgtacaatatgtctagata

SEQ ID NO: 813 - DNA, 441 bp, Zea mays
  Clone ID: LIB3061-058-Q1-K1-A8
cacttgctccgagtgccattattccacagttcctccctccagttacttcaatgggcttggaacacccagctgtgcaagcctataggctacaacaagcgcttgcggcgagcgtcttagaacaaccaattgcccaattacaacaacaatccttggcacatctaaccatacaaaccatcgcaacgcagcagcaacaagcactgagccacctagccgtggtgaaccctatcgcctacttgcaacaacagctgcttgcatccaacccacttgctttggcaaacgtaactgcataccaacaacaacaacagttgcaacagtttctaccagcgctcagtcaactagccatggtgaaccctatcgcctacctacaacagcaacaacttctttcatctagcccgctcgctatgggcaatgcacctacatacctgcaacaactgttggtgc

SEQ ID NO: 814 - DNA, 441 bp, Zea mays
  Clone ID: LIB3061-058-Q1-K1-A9
ctcctagccggcgcctggggacctgctgtacaagccgacgacgctgctgagctcccgggtcatagagctatgacctcgaaggagcacgattcttcgaccaaaattcctgtccgtctcaagagtggcagcccgatatgctcagcctgagaaaacttcacgggcaaagctgtcagttatatcagtgacaaacagacgcaagataaggtcatgggatcccttcatgacgcttgctctcaatcattctcggttaaacagaagtgcgatgaaatgatggactcttactcaacccttctgtttgccaagatcacggagatcaaaccagaagcgttctgcaaacaggatggcctgtgcaggagcacaggtgcttgctctggtgtgacaagtgacaggccatgtgtgttctgccaccaactgcttgatgaaggtatggtcaaactgaaa

SEQ ID NO: 815 - DNA, 420 bp, Zea mays
  Clone ID: LIB3061-058-Q1-K1-B1
ccaactagcaacatagaaagcacaatagtgtaccaacaatggcagccaaaatattttgcttcgttatgctccttggtctttctgcaagtgttgctaccgcaaccattttcccacaatgctcacaagctcctatagcttcccttcttcccccatacctctcaccagcggtgtcttcaatgtgtgaaaccccaattgttcaaccctacaggatccaacaggcaatcgcaacaggcatcttaccattatcacccttgttcctccaacaaccgtcagccctattacagcagttacctttggtccatttggtggcacaaaacatcagggcacaacaactacaacaacttgtgctagcaaaccttgctgcatactctcagcaacatcaatttcttccattcaaccaactggctgcattgaactctg

SEQ ID NO: 816 - DNA, 179 bp, Zea mays
  Clone ID: LIB3061-058-Q1-K1-B10
cccccactgaagaaactatgtgctgtagtatagccgctggctagctagctaggggagtcgtttatcggcgatgattgagtaataatgtgtcacgcatcaccatgggtggcagtgtcagtgtgagcaatgacctgaatgaacaattgaaatgaaaagaaaaaaagtactccatctgttcc

SEQ ID NO: 817 - DNA, 448 bp, Zea mays
  Clone ID: LIB3061-058-Q1-K1-B11
caactagcaacatagaaagcacaatattgtaccaataatggcagccaaaatatgttgccggattatgctccttggtctttctgcaagtgctgctacggcgagcattttcccgcaatgctcacaagctcctatagcttcccttcttcccccatacctctcaccagcgatgtcttcagtatgtgaaaatccaattcttctaccctacaggatccaacaggcaatcgcagcaggcatcttacctttatcacccttgttcctccaacaatcatcagccctattacagcagttacctttggtgcatttattggcacaaaacatcagggcacaacaactacaacaactcgtgctagcaaaccttgctgcctactctcagcaacagcagttacctttggtgcatttgttggcacaaaacatcatggcacaacaactacaacaactcgtgctagca

SEQ ID NO: 818 - DNA, 439 bp, Zea mays
  unsure (1)..(439): unsure at all n locations; Clone ID: LIB3061-058-Q1-K1-B12
gtcagcctagcaattagctcatcgactccagattggagaactcgacaccatgaaggtggggatcgttgcccttgctctcctggcgctcgctgcgagcgccgcctccagtacaagcggcggctgtggctgccagacaccaccgtttcatctaccgcctccgttctatatgccgcctccgttctatctgccgccgcagcagcagccgcagccatggcaataccccactcaaccaccgcagctaagcccgtgccagcagttcggatcctgcggcgtcggcagcgtcggcagcccgttcctgggccagtgcgtcgagttcctgaggcaccagtgcagcccggcggcgacgccctacggctcgccacagtgccaggcgctgcagcagcagtgctgccaccagatcaagcangtggagccgctgcaccggtaccaggcgacatac

SEQ ID NO: 819 - DNA, 417 bp, Zea mays
  Clone ID: LIB3061-058-Q1-K1-B2
caactagcaacatagaaagcacaatagtgtaccaacaatggcagccaaaatattctggtgccttatgctccttggtctttctgcaagtgttgctaccgcaaccattttcccacaatgctcacaagctcctatagctttccttctttccccatacctctcaccagcggtgtcttcaatgtgtgaaaacccaattgttcaaccctacaggatccaacaggcaatcgcaacaggcatcttaccattatcacccttgttccttcaacaaccgtcagccctattacagcagttacctttggtccatttggtggcacaaaacatcaaggcacaacaactacaacaacttgtgctagcaaaccttgctgcatactctcagcaacatcaggttctttcattcaaccaactggctgcattgaactc

SEQ ID NO: 820 - DNA, 445 bp, Zea mays
  Clone ID: LIB3061-058-Q1-K1-B4
cccacgcgtccgtgagcattcagaaacacacctagcgaagcgcactagcaacgacctagcaacaatggctaccaagatattatccctctttgcgcttcttgccctttttgtgagcgcaacaaatgcgttcattattccacaatgctcacttgctcctagtgccattattccacagttcctccctccagttacttcaatgggcttcgaacacccagctgtgcaagcctacaggctacaacaagcgcttgcggcgagcgtcttacaacaaccaattgcccaattacaacaacaatccttggcacatctaaccatacaaaccatcgcaacgcaacagcaacaacaatttctaccagcactgagccaactagctgtggtgaaccctgtcgcctacttgcaacagcagttgcttgcatccaacccacttgctctggcaaacatagttgca

SEQ ID NO: 821 - DNA, 405 bp, Zea mays
  Clone ID: LIB3061-058-Q1-K1-B5
ggcgggaggagccagagccagagccagccagccagacacacaacctcggtcggcgcgggggctcaacccaatggctccttcctccctccgcccgccgcgccaccacccgtctcccctcgtcgtcctcgccatcgccgtcctcctcgtcttgcgcaccgacgatgggctgccggaggcgggaggaggaggaggaggcggcggtctgtaccgggagattctcagggacgagaccgtgcagaggctcaaggagctgggcaagatatctgatggggatggctaccttgaaaggacgtttctgagtccggcctttatcagagccactggtgtcatcgtcagctggatgaaagacgctgggcttacgacgtgggtcgatcagatggggaatattcatggtcgatatgagcc

SEQ ID NO: 822 - DNA, 436 bp, Zea mays
  Clone ID: LIB3061-058-Q1-K1-B6
gttggatatgacaacaaaaaattacctaaagcaacccgtgctattaatcgtgccaatcatatgaacggtggcagttccccaacaagtgctccacctcggttgcttgcagttgatattccaacaagcagctctagtatacctagattatcagcctctgcagcaagagaaaagatcagtagtctcgattctcttcccaagagcatgattggattgaagaggaagtttaatcctttcggtgctgtggcggccagtgctgatcaggatggactacatcatatggataaaatagatgtttctcaacgaagacggtttaatgaatacaaaactttgaccctggagaatgacaagttgcgaaatgaatgcttacaatacgagggatcagagaaacaacttgtcctgaaggaacaaaagctccgatctgaaattgctgaagtgg

SEQ ID NO: 823 - DNA, 421 bp, Zea mays
  Clone ID: LIB3061-058-Q1-K1-B7
cagacctattacatcaatcacctgcggtgcatttattgacccacaacatcagggcacagcaactacaacaacttgtgctagcaaaccttgctgcctactctcaccaacagcagtctcttccattcaaccaactatctgcattgaactctgcttcttatttgcaacaacaacaactaccattcagccagctacctgctgactacccccagcaacatcttccattcaaccaactggcatcatttaactctcctgcttatttacagcagcaacaactactaccattcagccaactagctggtgtgagccctgctaccttattgatacaaccacagttgttgccgttataacagcacgctgcacctaacgctggcaccctcttacaactgccacaattgctgccattcaaccaacttgctttgac

SEQ ID NO: 824 - DNA, 259 bp, Zea mays
  Clone ID: LIB3061-058-Q1-K1-A12
gcggcagtggagcttcattggcgtccaatatactttccctccttatgctccttgctctggctgcatgtgttgctaacgcgacaattttccctcaatgctcacaagctcctatagcttacctgcttcccccataccttccatcaatgatagcttcagtatgtgaaaacccagctcttcaaccctataagctccaacaagcaatcgcagcatgcaacatacctttatcacccttgtttcaaacatcgccaggcctatcttt

SEQ ID NO: 825 - DNA, 414 bp, Zea mays
  Clone ID: LIB3061-057-Q1-K1-G8
cagttacctttggtccatttggtggcacaaaacatcagggcacaacaactacgacaagttgtgctagcaaaccttgctgcatactctcagcaacatcagtttcttccattcaaccaactggctgcattgaactctgctgcttatttgcaacatcaattaccattcagccagctagttgctgcctacccccagcaatttcttccattcaaccaactagcagcattgaactctgctgcttatttacagcagcaacaactactaccattcagccagctagctgatgtgagccctgctgccttcttgacacaacaacagttgttgccgttctacctgcacgctatgcctaacgctggcaccctcttacaactgcaacaattgctgccattcaaccaacttgctttgacaaacccaaca

SEQ ID NO: 826 - DNA, 308 bp, Zea mays
  Clone ID: LIB3061-057-Q1-K1-G9
tcttcagatttagggtctcaaatcatcatggctcaacttctacaacaacttgttctatcaaacctggcttggatctctcatcaacagcgggtggttccattcaacctactaggttcattgaactctgcttcttatttgcaacaacaacaactaccattcacccagctacctgctgcctaccctcagcaatttcttccattcaaccaactatcagcattgaactctcctgcttatctacagcagcaacaactactaccattcagccatcttgctggtgtaaacccttctaccttctttacacaaccaca

SEQ ID NO: 827 - DNA, 432 bp, Zea mays
  Clone ID: LIB3061-057-Q1-K1-H1
tgattttggattcaagctgaaagaagaggctatgctgaataaagtactaaaggagacaggctggtcaaaagtagttgccagtgataaattgcaatctggtctggcatcttcacttcgcatccaagatgttatgagaaatgagatccaaagagtccaggatgaactttcttgcataacccacaaagctaatcagttggagcttcaggtattcaagatggatgagtcaatcgatgagatccaataggatttctaggaatctacgaaagagctggctgctcttcgaggaacactgaaaacggtgattgaagacagggacctgtcgtggcaggaggtgaagtagctgagaagaaacatcagcatcatgctagaacgaggttgtgtcgctgaagaagatcgaagccttggacaaagacatacttgtcaaggagggag

SEQ ID NO: 828 - DNA, 374 bp, Zea mays
  Clone ID: LIB3061-057-Q1-K1-H10
attttgagcattcagaaacacaccatgcgattcgcactagcaacgacctaacatcaagagctagcaagatattagcgctccttgcgcttcttgccctttttgtgagcgcaacaaatgcgttcattattccacaatgctcacttgctcctagtgccattattccacagttgctcccaccagttacttcaatgggcttcaaacacctagctgtgcaagccaacatgcaacatcaagcgcttgcggctagcgtcttacaacatccaattgcccaattgcaacaacaatacttgccacatctaacaatacaagccatcacaacgcatcagcaacaacagttcctaccagcactgaaccacctagccatggtgaaccct

SEQ ID NO: 829 - DNA, 431 bp, Zea mays
  Clone ID: LIB3061-057-Q1-K1-H11
ccaaaatattttgcctccttatgctccttggtatttctgcaagtgctgctacggcgacggttttgccgcaatgctcacaagctcctatagcttcccttcttcccccgtacctctcaccagcggtgtcttcggtatgtgaaaacccaattcttcaaccctacaggatccaacaggcaatcgcagctggcatcttacctttatcacccttgttccttcaacaatcatcagccctattacagcagttacctttggtgcatttattggcacaaaacatcagggcacaacaactacaacaacttgtgctagcaaaccttgctgcctactctcagcaacagcagtttcttccattcaaccaactagctgcattgaactctgcttcttatttgcaacaacaacaactaccattcagccagctacctgttgcctacccc

SEQ ID NO: 830 - DNA, 351 bp, Zea mays
  Clone ID: LIB3061-057-Q1-K1-H12
gaatttccgggtcggggctcgagtcacgcgtccgcgagtggccaacaatggacatggctttggcgtctaaagcctacccttcgtcatgcaatgacaccgacgtcgtgctgacaatttcaaagcgtgacaaatccgctgcaaatgattcaacatacctcaatcctcaagctcatgatagtgttcttggaatcattctgggaggtggtgctgggactagattgtaccccttgacaaagaagcgtgccaagcctgcagtgccattgggtgccaactatagactgattgatattcctgtcagcacttgtcttaacagcaacatatccacgatctatgtgctatacgcaatttaac

SEQ ID NO: 831 - DNA, 397 bp, Zea mays
  Clone ID: LIB3061-057-Q1-K1-H2
cccacgcgtccgggccacgagtgggagaagcacggcacctgcgcagccgacgtcttcggcgaggacggctacttggaggccgcgctgcgcctccgcgaccagctgggagtcctcggcgcgctcacctccgccggcgtcaagcccgacggcggctactacacgctgagccagatcaagggcgccatccgccagggcaccggcttcgagccctacgtggagtgcaaccgcgacgaggccggcaacagccagctctaccagctctacttctgcgtcgacgccgccggcgacagcttcgtcgactgccccgtcctccccagcggcaggccctgtggcaaccggatcgagttcccggctttctaagctaactcactcttcacgtcagttgctgcaatatact

SEQ ID NO: 832 - DNA, 428 bp, Zea mays
  Clone ID: LIB3061-057-Q1-K1-H4
tcccggctggacccgatcgtccgccaacaagcaacatagaaagtggaatccagtatcaacaacagagcaacaatggctacggacatgttttacctcctgatgcgccttgctctttctgcatgtgttgctaacgcgacaattttccctcaatgctcacaagctcctatagcttcccttcttcccccataccttccatcaatgatagcttcagtatgtgaaaacccagctcttcagccctataagctccaacaagcaatcacagcatgcaacatacctttatcacccttgttgtttcaacaatcgccagccctatctttggtgcagtcattggtacaaaccatcatggcacatcaactgcaacaactcgtgctacctgtgatcaaccaagtagctctagccaacctttctccctactctcagcaacaaca

SEQ ID NO: 833 - DNA, 454 bp, Zea mays
  Clone ID: LIB3061-057-Q1-K1-H5
gaattccggggaggaactagtcagcgaactagtagctagcttgcttgaaatataatgatttttagggtgggaaataaggcggatgggtatcctactacgtggtgcagatgacctgacgtatcccactgacgacctatctggaggtgcgtgggcattcggccctctttccgcgtggcgtttcttcgtgcctgaggcgacgacagtttggcaccggctctctgccgtcgagagaatggcaccagctcgtatcaccactgctggcatatgtggtctgttcctcttcagctcgctgcttatttaagaaaccgtgacagagaatgcctgaccttaaatctgttgaaccaatgtaccgggggaggtaaccagtgcatcagtactccctgtacacgcctactccggcccctcagctgcacttcagatcagatctcctgaattgcacgtttgagatcgagat

SEQ ID NO: 834 - DNA, 372 bp, Zea mays
  Clone ID: LIB3061-057-Q1-K1-H7
gggtcttcagaccattagctttatctactccagagcgcagaagaacccgatcgacacggtgagggtgttgctcggggccctcgctctcctggctctcgctgcgagcgccacctccacgcatacaagcggcggctgcggctgccagccaccgccgccggttcatctaccgccgccggtgcatctgccacctccggttcacctgccacctccggtgcatctcccaccgccggtccacctgccgccgccggtccacctgccaccgccggtccatgtgccgccgccggttcatctgccgccgacaccatgccactaccctactcaaccgccccggcctcagcctcatccccagccacacccatgcccgtgccaaca

SEQ ID NO: 835 - DNA, 381 bp, Zea mays
  Clone ID: LIB3061-057-Q1-K1-H8
ccaactagcaacatagaaagcacaatagtgtaccaacaatggcagccaaaatattttgcttccttatgctccttggtctttctgcaagtgttgctaccgcaaccattttcccacaatgctcacaagctcctatagcttcccttcttcccccatacctctcaccagcggtgtcttcaatgtgtgaaaccccaattgttcaaccctacaggatccaacaggcaatcgcaacaggcatcttaccattatcacccttgttcctccaacaaccgtcagccctattacagcagttacctttggtccatttggtggcacaaaacatcagggcacaacaactacaacaacttgtgctagcaaaccttgctgcatactctcagcaacatc

SEQ ID NO: 836 - DNA, 428 bp, Zea mays
  Clone ID: LIB3061-057-Q1-K1-H9
gcaacatacaaagcacaatattgtaccaataatggcagccaaaatattttgcctcatggtgctcgttgctctttctgcaagtgctgctactgcgagcattttcccgcaatgctcacaagctactatagcttaccttcttcccccatacctctcaccagcgatgtcttcagtatgtgaaaatccaattcttataccctacaggatccaacatgcaatcgcagcacgcatcttacctttatcacccttgatcctccaacaatcatcagccctattacagcagtcacctttgatgcatttatcgtcacaaaacatcagggctcaacaactacaacatctcgtgctatcaaaccttgctgcctactctcaacaacaacagttacctttggtgcatttgctggcacataacatcatggcacaacaactacaac

SEQ ID NO: 837 - DNA, 443 bp, Zea mays
  Clone ID: LIB3061-058-Q1-K1-A1
gtggaatacagtagcaacaatagagcatcaatggcggccaagatattttccatccttatgctccttgctctttctgcatgtgttgctaacgcgaccatttttcctcaatactcacaagctcctatagctgcccttcttcccccataccttccatcaatgaccgcttcagtttgtgaaaacccagcccttcaaccctacaggctccaacaagcaatcgcaacaagcaacttacctttatcacccctgttctttcaacaatcgccagccctatctttggtgcagtcattggtacaaaccatcagggcacaacagctgcaacaactcgtgctaccagtgatcagccaagtagctctggcaaacctttctccctactctcagcaacaacaatttcttccattcaacccaatgtctacactgaaccctgctggttatttacaacaaca

SEQ ID NO: 838 - DNA, 440 bp, Zea mays
  Clone ID: LIB3061-058-Q1-K1-A10
caattcgaaatcgagtcgggtactcgggtcggtcttgccgtgcgtgcgtggctgcgcgggaccagcccacgctcccactccccgcccgccaccgccgggtccctctagggttttgccgcgatgtcgctccggccgagcgagcgggagcagatgcggaagggcaactacaagcagacggtggacgccgaggagagccgccgccgccgcgagggccagatggtcgacatccgcaaggccaagcgagaggaaagcctccagaagaagcgccgcgatgggttccccgccggcggcgccgtgccgccgatgggccactccaccgcactccagcagaagctcgatggcttgccggcgatggtacaggccgttcactccaacgaccccactgtgcagcttgaggccaccacgcagttcaggaagctgctctccatagagcgtagtcc

SEQ ID NO: 839 - DNA, 426 bp, Zea mays
  unsure (1)..(426): unsure at all n locations; Clone ID: LIB3061-057-Q1-K1-G7
caactaccattcagccagctacctgctgcctacccccagcaatttcttccattgaaccgactggcagcattgaactctcctgcttatttacagcagcaacaactactaccattcagccagctagctggtgtgagccctgctaccttcttgatacaaccacagttgttgccgttctaccagcacgctgcgcctaacgctggcaccctcttacaactgcaacaattgctgccattcaaccaacttgctttgacaaacccaacagtgttctaccaacaacccatcattggtggtgccctcttttagattgcttatgagttatagttcaataatgaagttttttggatgatgtttgtggcgtcccagaaataagaaagtacatttctaaaaaaaaaaaanaagaagaaagaataaaatataatagaataa

SEQ ID NO: 840 - DNA, 331 bp, Zea mays
  Clone ID: LIB3061-057-Q1-K1-F2
cagctggagcgttaactccccaacatttaaggcagtttgctataaaccttgctgagggtagcggcagcagtggacgagacagtaatcgtaaatgggaaagtcagggccttgatcttaactcaggccctggaagtatagatttagaaggaaaggatgaacgggtacctttaccagtcagacaaaatttgatcccacccccacacggctttgtggaggatcaaggaagaatctaccagatgccacttgtaggaacaaagagaaaggaacctgatggcagctgggactcagaaaggtctacatacaagccattatccatggcaatgatggctct

SEQ ID NO: 841 - DNA, 424 bp, Zea mays
  Clone ID: LIB3061-057-Q1-K1-F3
tgtgtctgggttggctctttgacattggagctgtgattggtgaacgggtgacaacatggtggagtggcctgctgcttgttctgttggtgggttggttgtgttctattataaatgggggagctttatacagaagaaagagagtgagcatgctgatggccctgtccagctttccaagtttcttggacgggacaaagaaaaggaagaaggtactcaacggagtgcaatctctggtaaaaagataatgatgaagcttgagaagacaaaggaagacaaggcagcagagagcaagcgaaacgaactgttgaagtttctgaatgccagttacgattgatgtgttcgaatcgctggcgcagaaagtgcagaatgccctttttatcgtctttgcactggtgcttttggtgatacttaagttataaacgttttg

SEQ ID NO: 842 - DNA, 286 bp, Zea mays
  Clone ID: LIB3061-057-Q1-K1-F4
aactactacattaccacagtcactaccaatatttaggcagattctcttaagctcttggagttatcgctaccaataccatcattatacaacactgatcacctgctataacttccattataccacaatacctctcaccagctacttcaacaatgcttcaaacacctatctttccaaccctacaaactacaccaagcacttgaacagaccttttaacatcatcaaactaaccaattcaaccaccaatactcgtatcacataaccttacttaccatcatatcacatcaca

SEQ ID NO: 843 - DNA, 327 bp, Zea mays
  unsure (1)..(327): unsure at all n locations; Clone ID: LIB3061-057-Q1-K1-F5
tcgcatgaaacacatccaagctgaagcatcattatcaacatacctaacaacaatggnctacgcaagaggattatccctccttgcgtcttcttgcagctttttgcagagctcaacaatatgcagttcaattattccacaatgnctcatcttgctccatagttccattattacatctgttcctcccaccagttaccttcaatgggncttcgaacatcccagctgtgcatagcctatanggctacatacaagcaattagcggcgagcgtcttacaacataccaatttcccagttggcaacaacatatccttggcacatnnctaacaatac

SEQ ID NO: 844 - DNA, 399 bp, Zea mays
  Clone ID: LIB3061-057-Q1-K1-F6
aacaacaacagttgcaacagtttctgccagcgctcagtcaactagccatggtgaaccgtatcgcctacctacaacagcaacaacttctttcatctagcccgctcgctatgggcaatgcacctacatacctgcaacaacagttgatgcaacaacagttgctgcaacaaattgtaccagctcttactcagctagctgtggcaaaccctgctggctacttgcaacaactacttgcattcaaccaactgactgtgtcgaactctgctgcgtacctacaacagcgacatcagttacttaatccactagcggcggctaacccattggtcgctgacttgctacagcagcaacaattgctgccatacaaccagttctctctgatgaaccctgccttgtcgtggcagc

SEQ ID NO: 845 - DNA, 390 bp, Zea mays
  Clone ID: LIB3061-057-Q1-K1-F7
catctagccatttgcacacgatcatataatatattcgttcatgttagctgatgagtagccacagacttaattactaagtgggcactgggcatgccttgaacatctatcttggtgaattcattgaggctttagtggcattatatttgttgtataagcatcttgcatgagattctctctggctagtttagtgcacatgataattacagtatatgaatctgatgtgaagtctgtccatcctctgcaacggagtgcatagcatgattcactggtatatatccagcagttaaaatccatgccgtatttgcccgctgggaacctggaccaattaaaaatgggggttcctgaaccatgggccttgggccattagggttcaaaaaaccccccttggtt

SEQ ID NO: 846 - DNA, 412 bp, Zea mays
  Clone ID: LIB3061-057-Q1-K1-F8
agcaacatagaaagcacaatagtgtaccaacaatggcagccaaaatattttgcttccgtatgctccttggtctttctgcaagtgttgctaccgcaaccattttcccacaatgctcacaagctcctatagcttcccttcttcccccatacctctcaccagcggtgtcttcaatgtgtgaaaccccaattgttcaaccctacaggatccaacaggcaatcgcaacaggcatcttaccattatcacccttgttcctccaacaaccgtcagccctattacagcagttacctttggtccatttggtggcacaaaacatcagggcacaacaactacaacaacttgtgctagcaaaccttgctgcatactctcagcaacatcagtttcttccattcaaccaactggctgcattgaactc

SEQ ID NO: 847 - DNA, 386 bp, Zea mays
  Clone ID: LIB3061-057-Q1-K1-F9
atctacgggcacagcacatcagggcacaacatctacaacaacttgtgctagcaaacctgtgctgggtactctcagcatcagcgggttgttacattcaaccaactaggaccatggaactatgcttctaatgcgcaacttcttcaactacaattcagacaactacctgctgcataccgtgagcaatttcttgcattcaaccacctaacagcattgaactctgctgcttacatacagcaactacaactactaccattcaaacagctagctggcgtaagccctgctaccttcttgacacatccacagtcgctgccgatctaccatcacgttgtagcctaacgctggcacgctattacaagtgcaacaatcgctgccattcaaccaacttg

SEQ ID NO: 848 - DNA, 156 bp, Zea mays
  Clone ID: LIB3061-057-Q1-K1-G1
atagcttcactctctgttatcctttctcttcaaccatattatcttttagataagttcacatttaagttggtgcctgcatcacccttatcatttcaacaatcaccatccctatctttttttcattcatttgtacaaaccatcaattcacaacatctt

SEQ ID NO: 849 - DNA, 230 bp, Zea mays
  Clone ID: LIB3061-057-Q1-K1-G10
attctgacaaagttctaaccacagatatgttctatcaaggtataaaaaccttaatcgggggcgggatcctaagacttacgtgcaatttgtctgaatgcttcaaacctttgtggcggaacctttgtatgtttgaacctctgttgtggaagatctaatgtgctgtaattgtctatgactcgcgatgagaatgtagagtatgatgactcatctgtgtaccttaaataaacatc

SEQ ID NO: 850 - DNA, 429 bp, Zea mays
  Clone ID: LIB3061-057-Q1-K1-G11
accgagcaccatcaataactatggcatctgtctgcgctaccagagcaggactggttagcacaacgtgtacaaggagtaccgggacaccaccctgaacggcgcagtggatcagatgtacaacgagatggcctgacgccaccgcgtgaggtacctctgcatacagatcatcaagacagcgacggtccacttcaagctgtgcaagagggacaacaccaagcagttccacaactccgagatcaagttcccgcttgtgtaccgcatggtcaggccgtctaccaggaagctccggaccactttcaaggcttccaggcccaaccttttcatgtgagaggtatatcgtacccgtgttctgtgtctcgagcgcccgagagataaggattcttcctgtgcaagtttttggtgccctgttcgttgagcactttgtttgat

SEQ ID NO: 851 - DNA, 436 bp, Zea mays
  Clone ID: LIB3061-057-Q1-K1-G2
gtttgtctgcgccgtgcccgtgcaggggcgaggtggcattctgcagccaggagtgccgggagaagcagatcgagtacgacgacgacctcgacgagcgcatggagcagacctgctccgtgacctccatatgaaggaggccccgtccgtgtccggcgccagcggctccgaccagtccggcagcggcggtgagaccgtggccgccgcctaggagccccggtgggtggggtggcgcgcatgggggcgggcgcggtgtgtgttgttgcgccctggtggagcgggagcagcgacgccggccgatcggtcggcccggtccggtagattccgccatgctatagagcgcctgtgcatacagcttttagctctgaattccggcagtgatgcatgcgtcaatgatctattattattatagctgggtgatgcatgtgactctggaaac

SEQ ID NO: 852 - DNA, 446 bp, Zea mays
  Clone ID: LIB3061-057-Q1-K1-G3
cgacaccatgaaagtgctgatcgttgcccttgctctcctggcgctcgctgcgagcgccgcctccagtacaagcggcgggtgtggctgccagacaccaccgtttcatctaccgcctccgttctatatgccgcctccgttctatctgccgccgcagcagcagccgcagccatggcaataccccactcaaccaccgcagctaagcccgtgccagcagttcggatcctgcggcgtcggcagcgtcggcagcccgttcctgggccagtgcgtcgagttcctgaggcaccagtgcagcccggcggcgacgccctacggctcgccacagtgccaggcgctgcagcagcagtgctgccaccagatcaggcaggtggagccgctgcaccggtaccaggcgacatacggtgtggtcctgcagtccttcctgcagcagcagccgcagggcgagctcg

SEQ ID NO: 853 - DNA, 405 bp, Zea mays
  Clone ID: LIB3061-057-Q1-K1-G4
cgctgtcgctgtcgctgcccctcgtcctcgtctcgctgctcctgccggccgcccgcggggcggcggagacgccgcagtgcacgactgtgcacgcggagtcggacttcgaggtgcggctgtacggcgacaccgtctggatgtccgcccccaccccggacatcccttccttccacgtcgccaccaagctcggcttccacagattgttccagtacctgatgggcgcaaacctcaactcttcgaggatcaggatgaccacccctgtgctcacgagtgtggttccaggtgcagggcctctgcgctcctcggcctactccgttcggctgtacctgccggcgaagttccaggcttcccgttcggttcctctaccggagctgaacctgcatgcagatcggtggccaggccact

SEQ ID NO: 854 - DNA, 423 bp, Zea mays
  Clone ID: LIB3061-057-Q1-K1-G5
caattatagcttcagtatgtgaaaacccagctcttcaaccatataggcttcagcaaggagtcgcagcaagcaacatacctttatcgcccttgttgtttcaacaatcaccagccctatctttggtgcagtcattggtacaaaccatcagggcacaacagctgcagcaactcgtgctacctgtgatcaaccaagtagctctggcaaacctttctccctactctcagcaacaacaatttcttccattcaaccaactgtctacactgaaccctgctgcttatttgcagcatcaactattaccatttagccagctagctactgcctactctcagcaacaacaacttcttccatttaaccaattggccgcactgaaccccgctgcttatttgcagcagcaaatactactgccatttagcgagctagctg

SEQ ID NO: 855 - DNA, 435 bp, Zea mays
  Clone ID: LIB3061-057-Q1-K1-G6
cgaggcggaggtccatgcgaatgacgctccggcggctgctgctgaaacctcgtctgcgcaactggctgctggcaagacagtgcgtgttcgatttgtgctgaaaaggcagtgcacgttcgggcagagcgtctgccttgtcggcgacgaccctgcgctcggcctctgggatctgtcgaacgcgtttcctttgaagtgggcggaaagccacgactggaccttagagaaagatttgccggccaacaagctcattgagttcaagttcttgctccaagattccacaggaaagttgcattggcagggtgggccaaacagaagctttcagacaggtgaaaccgccgcaaacacattggttgtgtttgaagattgggatgatgtgaagaatcagaaaatagtagaagaggggggagtggcgtctgctgggatagaacaaactgg

SEQ ID NO: 856 - DNA, 432 bp, Zea mays
  Clone ID: LIB3061-057-Q1-K1-F12
attgagaccaactagcaacatagaaagcactctagcgtaccaacaatggcagccaaaatattgggtctccttatgctccttggtctttctgcaagtgctgctacggctaccattttcccgcaatgctcgcaagctcctatagcttcccttattcccccgtacctctcaccagcggtgtcttcggtatgtgaaaacccaattcttcaaccctacaggatccaacaggcaatcgcagctggcatcttacctttatcacccttgttcctccaacaatcatcatccctattacaacagttacctttggtgcatctattggcacaaatcatcagggcacaacaactacaacatcttgtgctagcaaaccttgctgcctactctcagcaacagcagtttcttccattcaaccaactaggttcattgaactctgcttct

SEQ ID NO: 857 - DNA, 405 bp, Zea mays
  Clone ID: LIB3061-057-Q1-K1-D7
aagcatcatagaaagtagaatccattatcaacaatagagcaacaatggcgaccaagaggttttccctccttatgctccttgctctttctacatgtgttgctaacgcgacaattttccctcaatgctcacaagctcctatagcttcccttcttcccccataccttccatcaattatagcttcagtatgtgaaaacccagctcttcaaccatataggcttcaacaagcaatcgcagcatgcaacatacctttatcgcccttgttgtttcaacaatcaccagccctatctttggtgcagtcattggtacaaaccatcagggcacaacagctgcagcaactcgtgctacctgtgatcaaccaagtagctctggcaaacctttctccctactctcagcaacaacaatttc

SEQ ID NO: 858 - DNA, 370 bp, Zea mays
  Clone ID: LIB3061-057-Q1-K1-D8
acgactcatacgatagcacaataaatagtcaaacaacgggacccacaatagacggccaggttattcgccttgttaggccgggctgtctttatacatataccattatcgtgaccatctcgccagcatgcataaatgcttatatatcttcgtatctctcactacccatctcaaaagactggtatagcacgtgaaaacacccatatataaaccaatacgctatcacacgcgcaatcacacctcgaattacacctttagcacaacagttatgaacaatatcaaatcacatattacatgcacaacctttggcacaccaattggcaccaacaattatggcacaacatgtgcaacatcatggaccaacatactttga

SEQ ID NO: 859 - DNA, 391 bp, Zea mays
  Clone ID: LIB3061-057-Q1-K1-D9
attcagaatcacacctatcgaagcgcactatctacgacctaacaacaatggctaccaagatatgagccctctttgcgcttgttgcccttattgtgagcgcaacaaatgcgttcattattccacaatgctcacttgctcctagtgccattattccacagttcctacctacagttacttcaatgggcttcgaacacccagctgtgcaagcctacaagctacaacatgcgcttgcggcgagcgtcttacaacaaccaatcgcccaattacaacaacaatccttggcacatgtaaccatacaaaccatcggaacgcaacagcaacaacaatttctaccagcactgagccaactagctgtggtgaaacctgtggcctacttgcaacagcaattgct

SEQ ID NO: 860 - DNA, 363 bp, Zea mays
  Clone ID: LIB3061-057-Q1-K1-E1
cgacaagcaggggagttaggtctcacatgcatgcttcatcacattgttgactgcatagcgaagcacatcgtcgtcggatcggagatgatgagttccgtcgtcgtggatgctgctgctaccagcagcagcgagaagaagacgtcgtggccggaggtggtgggcatgtccatcaaggaggcgacggagactattctcaaggacatgcccaacgcgtacatccaggtgctgcctgttgggtcgcccgtgacgctggaccttcgccccgaccgcgttcgtattttcggtggcaccgtcggcattacatcgaccggtgggtgataccttcccaatgccattaaccaacccttccttttaatttaaggt

SEQ ID NO: 861 - DNA, 163 bp, Zea mays
  Clone ID: LIB3061-057-Q1-K1-E10
aaaagttctccctgtttccctgtgtcgttggatgcatcggattgtagtccagaaccacgctacgaatatgcttaacactctcacttcttgttgatacagtgcaaagcatagtgtaattgtatgcttagcacacatttccttaatatcttcgtacgtttttttt

SEQ ID NO: 862 - DNA, 430 bp, Zea mays
  Clone ID: LIB3061-057-Q1-K1-E11
cttcaagcagctatagctagcataattaactcatgggtgcatagagatatgccgccgacgaccggtatctatgggtacctgcgcttgcactgcatcttcttcttactactcctcgacctccttcaattattcctagtgtttgcttctcccttacttgacctttgcttggaaccattgatagttacttattgggcatggagcacgtcatctcaatggaggagatcctcgggcccttctgggagctgctgccagcgccagcgccagagccagagccggagcagccttcggtaaccggcatcgtcgtcggcagtgtcatagacgttgctgctgctggtcacggtgacggtgagggtggcggcgacatgatggatcagcagcacgccacagagtggacctttgaaaggttactggaagaggatgctctgacgac

SEQ ID NO: 863 - DNA, 432 bp, Zea mays
  Clone ID: LIB3061-057-Q1-K1-E12
caactagcaacatagaaagcacaatagtgtaccaacaatggcagccaaaatattttgcttcctgatgctccttggtctttctgcaagtgttgctaccgcaaccattttcccacaatgctcacaagctcctatagcttcccttcttcccccatacctctcaccagcggtgtcttcaatgtgtgaaaccccaattgttcaaccctacaggatccaacaggcaatcgcaacaggcatcttaccattatcacccttgttcctccaacaaccgtcagccctattacagcagttacctttggtccatttggtggcacaaaacatcagggcacaacaactacaacaacttgtgctagcaaaccttgctgcatactctcagcaacatcagtttcttccattcaaccaactggctgcattgaactctgctgcttatttgca

SEQ ID NO: 864 - DNA, 418 bp, Zea mays
  Clone ID: LIB3061-057-Q1-K1-E2
actttggattggagccgcaccgccgcactcgccaccgcagccgccgcagtgccgcacagccgcgactcccgtcttggtcttgcggccagtcgccctcgggcctcgaccatcagcccctcgcccgctcgccgagacaccgagtcggcatcgaccgtcgtcgcgtctccgaggtccagcgcctagtggcccagctccaagcctccagccatcggcgcccgccctcctccgccgagacgccgagtgccgagcgcccgagcaccccggtccccagcgcccaacaagctagcaggctgcaggtatgcgctctttgttgatgcgtccaaggagttgagctgaatgcccagaaggctagcaggctgcagaaactgaaggaaaaggcggcattcaggaacccgggatgagtctattttaaaatgat

SEQ ID NO: 865 - DNA, 362 bp, Zea mays
  Clone ID: LIB3061-057-Q1-K1-E4
cgggttgtcggaatcatcaacacaccaagcgaagctacctatcaacgtcttaacaacaatggctaccaagatattatgggtccgttctcttctttgcctggttgttatccccacaaatgcggtcattatttcacaatgactgacttgcttctaatgccattataccacaaattctccaaccaactacttcaatgggctgtccaaaaaatatctgtgccaacctacaagctacaacaagcgcttgctgcgaacgtcttacaacaaccaatttaccaattgcaacaacaatccttggcacatctaaccatacaaaccattgcaacacaacagctacaacaattcctaccagcactgatccaact

SEQ ID NO: 866 - DNA, 209 bp, Zea mays
  Clone ID: LIB3061-057-Q1-K1-E5
gagacgatcttgcatcttcgatggcaccatactgcacctacactggcagacagaatagagtgccttgttatgctcgtcggtctttctgaacgtgctacttcctccaccattctacaacactgatcatgaagcttgtatatgttaccttcataacgacgtacctcacaccagtagtgcatacgctatatgaaaacccagttatttaacac

SEQ ID NO: 867 - DNA, 333 bp, Zea mays
  Clone ID: LIB3061-057-Q1-K1-E6
cactttctgaaggtctatctaggtccttgtctgtcttttcaatatatgctgagcacgctgactggcttcagatatgggctgatgttgagctttgttcatcacaggataagctgaaatctgaaatggaagatgagacaagttggtcatgtagtggtcagcatgaccaacatggtcacatggaaaattcaacgaaatttattctatctaccagagaagactaccaagcttcttccgtgtgcgaattcggtatcaaaactggtttgtcaatggttgaaagaagccgggttctggcaaacaggggaatgcaaatcccgtattacagatccttttcgg

SEQ ID NO: 868 - DNA, 422 bp, Zea mays
  Clone ID: LIB3061-057-Q1-K1-E7
gcaaagcggcagtgcgtagagaggatcgtcgaacagaacagcatgaagatggtgcataggtctcgtcgtgtgcctggctctgtcagctgccagcgcctctgcaatgcagatgccctgcccctgcgcggggctgcagggcttgtacggcgctggcgccggcctgacgacgatgatgggcgccagcgggctgtacccctacgcggagtacctgaggcagccgcagtgcagcccgctggcggcggcgccctactacgccgggtgtgggcagacgagcgccatgtaccagccgctccggcaacagtgctgccagcagcagatgacgatgatggacgtgcaatccgtcgcgcagcagctgcagatgatgatgcagcttgagcgtgccgctgccgccagcagcagcctgtactagccagctctgatgc

SEQ ID NO: 869 - DNA, 359 bp, Zea mays
  Clone ID: LIB3061-057-Q1-K1-E8
cagggctcacttgctcccagcgccagtattccacaggtgatcccaccagttacgtcaggatcctcgaacatccagccgcgcaagcctacaagctacaactagcgcttgcatgcagcgcctctacatctaccaattgcccaattgcaacaacaatcattggcacatgtaaccctacataccatcgcaacgcatcaacaacatcagctgtatctgccatcactgagccacctaaccgcggtgaaccctgtgacctactagcaacagcaggtgctagcatccaacccacttgctctggcgaacgtagctgcataccagcttcaacaacagctgcaacagtttatgccactgctcagtcaact

SEQ ID NO: 870 - DNA, 420 bp, Zea mays
  Clone ID: LIB3061-057-Q1-K1-E9
ggcaatctcgatctcgttcgttcccctgagcggcagtcagtgcgagcgagcgcgcacacatacggctcatcctctcccctgtctctgtcacacacacacattcatcatcccatccctgtgacgggcgatccgagggcctaccgacgatggtgtccgccgtgctccggaccatcctcgtgacggtcggcgccaggtacatcgtcagccacacggtgctgcagctgctgcatcagggcttccgcgtcgtcgtctgtgacaacctggacaaccccttcgatgccgccctcgtcctgcgtcgcgagctcgtcagtcacgacggcgccaacctcgtcttccacatggttgacctttgcgacaggcacgctttggtggacatgttctcgtcctacaagttcgaggctgtcattcactttgctgggc

SEQ ID NO: 871 - DNA, 409 bp, Zea mays
  Clone ID: LIB3061-057-Q1-K1-F1
tcggccaaccgcccttctcctcctcctggctcctcgtgcctcgcttgactcctcgcgccgatttggggaaacaggccatgccgggagacgggggagcagctggaagcgcgaggtgggtttgcgcggtcctttcggtgttcccgccgccgtccaaggccaagaacgccagcttcgagcagggcgccaacttcgccatcaccggcgccaccgcgctcgacaccgacttcttccggaagcgagggctcggcagcaccgtctggaactccggctccctccgcacgcaaatccagtggctgcgagacctcaagccatcgctctgcagctccgcgcaaggcacacgatgcaaggagttcttcgccgagtgcctgttcgtcgtaagcgaattcggtgggaacgactacaacgcccc

SEQ ID NO: 872 - DNA, 389 bp, Zea mays
  Clone ID: LIB3061-057-Q1-K1-F10
aagaaatttgcaggacaggaaaaattgctttgagacgtgaaaagattggtgcaacagggcgtggctggcgattttctgctggttcttatccagaccttatagaggcattaccaaaaaaaccgcttacatctgtaaataagacagtgaatggcagttttgttcgaccatccaatgctgggggtgatgtttatcctgtggaatcttacgagagctcatctaaccaagtacttgatgctcactggggtgttctggatgatgatgatgcaactggactttgctcgcataccctgtacatccttgggaatgatcgtcctggtgttatcaacattgtaacaagagtctttgctcgcaggggctacaatatacagagccttgctgttggctcatct

SEQ ID NO: 873 - DNA, 434 bp, Zea mays
  Clone ID: LIB3061-057-Q1-K1-F11
atcaaacgtacttgccaaccagcatcgccatcagccgcgacaggatcggcccaccctcggtcgggtagccatggtgagccgggccggatacatacatcatcgacggctgattaaatatacctcgttcgctgtgggctatgcacctacatacctgcaacaacaagacgatgcaacacattggacgatctctgactcaactaaatgttacaaaccctgttgtctacttgcaacagatgctcccattcaagcaactgactatgacgaactctgctgagtacgtacgactacgacatccattactgaatacaatggtagtggctaacccatcggtcgacgacttcctacagctagcacaatcgatgccatacaaacagttgcctttgactaatcctgtattgaagacgcatcaactaatacatggacgtgccatgttt

SEQ ID NO: 874 - DNA, 370 bp, Zea mays
  Clone ID: LIB3061-057-Q1-K1-D6
ccaactagcaacatacaaagcacaatagtgtaccaacaatggcagccaaaatagttgggttccttatgctccttggtctttctgcaagtgttgctaccgcaaccattttcccacaatgctcacaagctcctatagctacccttcttcccccatacctctcaccagcggtgtcttcaatgtgtgaaaccccaattgttcaaccctacaggatccaacaggcaatcgcaacaggcatcttaccattatcacccttgttcctccaacaaccgtcagccctattacagcagttaccttaggtccatttggtggcacaaaacatcaaggcacaacaactacaacaacttgcgctagcaaaccttgctgcatactc

SEQ ID NO: 875 - DNA, 424 bp, Zea mays
  Clone ID: LIB3061-057-Q1-K1-C2
accgcaccgccgccgccgtctcgcacacggggcacaggacgcgcgcgatcccctcgagtccggattgccatggccaccacggcgttcgccgccgccaggttcttccccgcccacctcgactcctccccacgcatcgcgccccaccgcgtcgggcccaccgcgaatctctccttctcaccgctttccgccaactcctcgtccctgctccgcctccattccccctgcccatccggccccgggggtaggctgcccccgccgccgcgatcgtacggcggcgccggcggatctggcgacgccgcgaactccggtggcggcgaaagccgccgcggaggcatcctcgggctcctcctcgccgggtgggccgtccgcgtcgctgcggacccgcagttccctttcaaggtgctcatggaggagctcgtcggcg

SEQ ID NO: 876 - DNA, 396 bp, Zea mays
  Clone ID: LIB3061-057-Q1-K1-C3
cgttcattattccacagtgctcactagctcctagtgccattattccacagttcctccgaccaggtacttcaatgggcttggaacatccagccgtgcaagcctacaggctacaactagcgcttgcggcgagcgccttacaacaaccaattgcccaattgcaacaacaatccttggcacatctaaccctacaaaccattgcaacgcaacaacaacaacaacaacagtttctgccatcactgagccacctagccgtggtgaaccctgtcacctacttgcaacagcagctgcttgcatccaacccacttgctctggcgaacgtagctgcataccagcaacaacatcagctgcaacagtttatgccagtgctcagtcaactagccatggtgaaccctggcg

SEQ ID NO: 877 - DNA, 437 bp, Zea mays
  Clone ID: LIB3061-057-Q1-K1-C4
ggcaaagtgcttcaagggcatatggaactactgagatgcagtttcactgttctgcctgtggagatccatcggagatgtttggttttgtgaaggaagtatttcgaacatgtgcacaacaatggaggatagacatgctggttagagagttacagtatgtagaaagaattttttctgcaagtgaagatgtaaggggcaagagggtccgggacttcgtgaagcagatgctaattaagtcagaaaacaaggcctatcatgctgaagttgtcagatgtgtcattgcattcttttctgatgatggtgctaaccttggcagtgatccatcagtaccactgaaaggcattccatgcagcatttctgaagctgttgatgggattcctagttcaagtcggaaagcatggataccatttaccttagagggacttccagttttagacaaa

SEQ ID NO: 878 - DNA, 402 bp, Zea mays
  Clone ID: LIB3061-057-Q1-K1-C5
attgagaccaactaccaacatacaaagcacaatagtgtaccaacaatggcagccaaaatattttgcttccttaggctccttggtctttctgcaagtgttgctaccgcaaccattttcccacaatgctcacaagctcctatagcttcccttcttcccccatacctctcaccagcagtgtcttcaatgtgtgaaaacccaattgttcaaccctacaggatccaacaggcaatcgcaacaggcatcttaccattatcacccttgttcctccaacaaccgtcagccctattacagcagttacctttggtccatttggtggcacaaaacatcagggcacaacaactacaacaacttgtgctagcaaaccttgctgcatactctcagcaacatcaatttcttccattc

SEQ ID NO: 879 - DNA, 430 bp, Zea mays
  Clone ID: LIB3061-057-Q1-K1-C6
ctcgcgccggctcaaggtacattgcgtgtcctagccaagacacgcagctcatctcagggtcacacgcacagcaagagcgaggcgtgattcgccatgggcggcctcactatggaccaggctttcgtgcaggcccccgagcaccgccccaagcccatcgtcaccgaggccaccggcattcctctcatcgacctctcgcctctggccgccagcggcggcgccgtggactcgctggccgccgaggtgggcgcgtcgagccgggactggggcttcttcgtggtcgtgggccacggcgtgcccgcagagaccgtggcgcgcgcgacggatgcgcagcgcgcgttcttcgcgctgccggcagagcggaaggccgccgtgcggaggaacgaggcggaaccgctcgggtactacgagtcggagcacaccaaggacgtga

SEQ ID NO: 880 - DNA, 426 bp, Zea mays
  Clone ID: LIB3061-057-Q1-K1-C7
ccacttgctgccccacgagcccattcccctcagcccttcaccatctccggcggtcgcggtggcatcagcagctcgggctcacgcgcagcaaaggaacgacaatatggcgaccatcgtaaacacgacggaggaggagccgatgctggccgtggtccgcttcaccgctgagctcgcctgggccgactcgggcccggaagtcgccgaccccgaggtcgcccgcctatgtctcgaggcgcaggagcatatcctcgcggggcggtggctcgacatggcctgccttatgctcgcctccgccgacctcctactcacctgcccgtcgcgcgtctcggacaaagacctggagtgcgttctctccgtcatctgcagcctcgtcaccaaggccggatccgaggaccaggcgctgcagatcaccgaactcatctgcgc

SEQ ID NO: 881 - DNA, 436 bp, Zea mays
  Clone ID: LIB3061-057-Q1-K1-C9
gtgaaggataagcttagacgtgacattgaggctcatgtagctcaagttcgagctgctagatcaggggaactttgtgccaaatatgaggcacaacttaccaaagctctggcggaaccagttgaatctattctagattcagccagtgaagatacgtggccagctattataaagcttcttcaacgcgagacaaaaactgccgtttcaagtcttcaatctgctgcgtcagcttttgaacttgatgaagcaactgagaaagaactgcttgtgaagctggagaagcatgcatggagtgttgctgagtcaaaggcaaaagaagaagctggaagggtttcgattcccatgaaggacaggtgttcaatgctgttcatccgagatgctgactctatgcccagggtgtggacaggtaacgaggacataaaagctataactaaaaccg

SEQ ID NO: 882 - DNA, 428 bp, Zea mays
  Clone ID: LIB3061-057-Q1-K1-D1
ctgccttcccagatccatcgactcgctcgggccgcccctcccgtcgtccccgttcgaaggtgcggcagccggcaggcgagcgatttcattcgacatgaatcccgagtacgactaccttttcaaacttctgcttattggtgattctggtgttgggaaatcatgcttgcttctcagatttgcagacgattcttatttggacagctatatcagcacaattggggttgatttcaaaattcgcacagtggagcaagatgggaagaccataaaacttcaaatttgggatactgctgggcaagagcgcttcaggacaatcactagcagctactaccgcggagctcatggaatcattattgtatatgacgtgacagaccaagaaagcttcaataatgtgaagcaatggttgaacgagatagaccgttatgcaagtg

SEQ ID NO: 883 - DNA, 424 bp, Zea mays
  Clone ID: LIB3061-057-Q1-K1-D10
acacagcgaaccgagaaaccaacacaacaagcaaagcagcgatccgacatccgagagatggacgcggtgatgttcgggctggagactcccctgatggccgcgctgcagcacctgctggacgtgcccgacggcgacgccggcgcgggcggcgacaacaagacgggcatcggcggcagcgccacgcgcacctacgtccgcgacgcgcgcgccatggcggccaccccggccgacgtgaaggagctgcccggcgcgtacgcgttcgtggtggacatgccggggctgggcacgggcgacatccgggtgcaggtggaggacgagcgggtgctggtggtcagcggctagcggcgccgggaggagcgcgaggactacgccaagtacctgcgcatggagcggctgatgggcacgttcatgcgcaagttcgtgc

SEQ ID NO: 884 - DNA, 402 bp, Zea mays
  Clone ID: LIB3061-057-Q1-K1-D11
gatgagcaagagccagcacattctattcggtctaacagataccatgtgtgacttgagagcttcgggcagtatgagcgcttgggtaggtgtgtacaggctatcgtattcagtgtctcgacctgatctattgagcttaccccatacctgcagcactcagtgtcaaattgcttttgagaatggtagtctttcaagcatgactatggctgccgataagtttgagagtgccctcatcgattgagccatagatcgcgtacacgatgattgatcagtcggcagtctgatcacgatgaattatcacgaggtcttccatgctgacagaaacggtttatgcaacaaacttgaatgctgtgagtataggcacttcggacggacctcatgagtcatgtatcagtggacatattg

SEQ ID NO: 885 - DNA, 432 bp, Zea mays
  Clone ID: LIB3061-057-Q1-K1-D12
attttgagcattcagaaacacaccaagcgaagcgcactagcaacaacctaacaacaatggctacgaagatattatccctccttgcgcttcttgcgctttttgcgagcgcaacaaatgcgtccattattccacaatgctcacttgctcctagttccattattccacagttcctcccaccagttacttcaatggccttcgaacacccagctgtgcaagcctataggctacaacaagcgattgcggcaagcgtcttacaacaaccaattgcccaattgcaacaacaatccttggcacatctaacaatacaaaccatcgcaacgcaacagcaacaacagttcctaccagcactgagccacctagccatggtgaaccctgtcgcctacttgcaacagcagctgcttgcatccaacccacttgctctagcatacgtag

SEQ ID NO: 886 - DNA, 402 bp, Zea mays
  Clone ID: LIB3061-057-Q1-K1-D2
ctcatttttatacagccgacgcagtaggctcgctgtcttcttctccatcgcgcaagggggatgccacgggagcggcagcacgccaacgcaaggagcttccctagcttgtcgacagcgcagggagcaggtagcatgcatggcgctcggcacccttgtagcacggacaacgcacttccttactccatgtttatgtccatggcgagcaggagtcattccgtcccatggccgacggcttgcatatccatcagccatcatggccgaactccattggagcaggcgcttactaccgtggcgcactgcttcatggcgcttgctacctgctggagagcaggaggtgacccattcaccaccgtacatgattggagcgcacaggggcagaagcttcaggtgccatggacgccc

SEQ ID NO: 887 - DNA, 422 bp, Zea mays
  Clone ID: LIB3061-057-Q1-K1-D3
gagaccaactagcaacatagaaagcacaatattgtaccaacaatggcagtcaaactagggtgcttccttatgctccttggtctttctgcaagtgttgctaccgcaaccattttcccacactgctcacaagctcctatagcttcccttcttcccccatacctatcaccagcggtgtcttcaatgtgtgaaaacccaattgttcaaccctacaagatccaacaggctatcgcaacaggcatattaccattatcacccttgttcctacaacaaccgtcaaccctattacagcagttacctttggtccatttgctggcactaaacatcagggcacaacaactactacaactagtgctagcaaaccttgctgcatactctcagcaacatcagattcttccattcaaccaactggctgcattgaactc

SEQ ID NO: 888 - DNA, 438 bp, Zea mays
  unsure (1)..(438): unsure at all n locations; Clone ID: LIB3061-057-Q1-K1-D4
gcagggagttgatttatccgctgcagccatgagtaagttgcagtctgagtctgtcaaggatgccatctcccagattgttggggatgccaaggagaagaataggaagttcactgagactgtggaacttcagattggtctgaagaattatgatccacagaaggacaagcgtttcagtggctctgttaagttgccccatatccctcgtcccaagatgaaggtgtgcatgcttggtgatgcccagcatgttgaggaggccgagaagatgggacttgactacatggatgttgaggctctcaagaaaatgaacaagaacaagaagcttgttaagaggcttgccaagaagtaccatgctttcttggcatcagaggccatcatcaagcagattccccgtctccttggtcctggtctcaacaaggcangcaagttcccgaccctggt

SEQ ID NO: 889 - DNA, 410 bp, Zea mays
  Clone ID: LIB3061-057-Q1-K1-C12
cccacgcgtccgtagcaacatagaatgcactttaatgtaccaacaatggcagccaaaaggtcagggctccttatgctccttggtctgtctgcaagtgctgctaccgcgaccattttcccgcaatgctcgcaagctactatagcttccattcttaccccgtacctctaaccagcggtgtattcggtatgtgaaaacccaattcttcaaccgtacaggatccaactggcaatcacagatggcatcttacctttatcacccttgttcctccaacaatcatcagccctattacatcagttacctcaggtgcatttattggcacaaaacatcatggcacatcaactgcaacaacttgtgctaacataccttgctgcctactctcagcaacatcattatgttgcattcaaccaact

SEQ ID NO: 890 - DNA, 420 bp, Zea mays
  Clone ID: LIB3061-057-Q1-K1-A6
gaccagcaagcaacatagaaagtagaatccattagcaacaatagagcaacaatggcgaccaagatattttccctccttatgctccttgctctttctacatgtgttgctaacgcgacaattttccctcaatgctcacaagctcctatagcttcccttcttcccccataccttccatcaattatagcttcagtatgtgaaaacccagctcttcaaccatataggcttcaacaagcaatcgcagcaagcaacatacctttatcgcccttgttgtttcaacaatcaccagccctatctttggtgcagtcattggtacaaaccatcagggcacaacagctgcagcaactcgtgctacctgtgatcaaccaagtagctctggcaaacctttctccctactctcagcaacaacaatttcttccattc

SEQ ID NO: 891 - DNA, 406 bp, Zea mays
  Clone ID: LIB3061-057-Q1-K1-A9
acctacctccatttactaattttccaatacaagcaccaaatcctccacggtttcagtaccttattaaactactgtaattgccattcatctcatcatctattctctagcataactactactactaccactctatctgctcactaaacacagctctgcaaactatcaccagcattcataactcagaatgtgcaagtttaatttacttcattaccacttaaccaataatatcaacataagcctattcgctcttaaagatccaaccttaaaaacacattcattccacttaatacctcctctaatagtgttacctcaaaccaattcactaaccttcaatttacaaacgtatctacttgtaaaaccctaacatttcccaaactaattgtactacaactaattcccctttttt

SEQ ID NO: 892 - DNA, 411 bp, Zea mays
  Clone ID: LIB3061-057-Q1-K1-B1
ccggactctctcgctcgagggtagggcagggcagggcagggcaggcggcgatccgaatgcaatggccggagggaggaagccaccggtggccgcagtgagggcggcggaggtagaggcaaagggatgacgcgcgggaagcagaagatcgacgcgcagcggcgtaacgcggagcgaaaccagaaatccaaggggtctcagctcgaggcccgcgccgtcggcctcaagatcgtctgctccatctgcaaggtacaattggcaaatgaaaaacagctgaccgatcactatggatcaaagcatccaaaggagaaaccttcgagcacatcgagcaccgaataaccatggctggtcgtgacgcagaaatatagatccttggctggtttgaggatctttaagtccgtctgatccatgcct

SEQ ID NO: 893 - DNA, 432 bp, Zea mays
  Clone ID: LIB3061-057-Q1-K1-B10
tttcagcattcaaaaacacaccaagcgaagcgcactagcaacgacctaacaccaatggctaccgggatattagccctccttgcgcttgttgcccttttagtgagcgcaacaaatgcgttcattattccacagtgctcacttgctcctagtgccattattccacagttcctcccaccagttacttcaatgggcttcgaacatccagccgtgcaagcctacaggctacaactagcgcttgcggcgagcgccttacaacaaccaattgcccaattgcaacatcaatccttggcacatctaaccctacataccattgcaacgcaacaacaacaacaacaacagtttctgccatcactgagccacctagccgtggtgaaccctgtcacctacttgcaacagcagctgcttgcatccaacccacttgctctggcgaac

SEQ ID NO: 894 - DNA, 435 bp, Zea mays
  Clone ID: LIB3061-057-Q1-K1-B12
caaccgccccggcctcagcctcatccccagccacacccatgcccgtgccaacagccggatccaagcccgtgccagctgcagggaacctgcggcgttggcagcaccccgatcctgggccagtgcgtcgagttcctgaggcatcagtgcagcccgacggcgacgccctactgctcgcctcagtgccagtcgttgcggcagcagtgttgccagcagctcaggcaggtggagccgcagcaccggtaccaggcgatcttcggcttggtcctccagtccatcctgcagcagcagccgcaaagcggccaggtcgcggggctgttggcggcgcagatagcgcagcaactgacggcgatgtgcggcctgcagcagccgactccatgcccctacgctgctgccggcggtgtcccccactgaagaaactatgtgctgtagtatagc

SEQ ID NO: 895 - DNA, 416 bp, Zea mays
  Clone ID: LIB3061-057-Q1-K1-B2
acatagtgaagtacactagcaacatcttagcaccaatggcagccaagatttttgccaggcttgccctccttgctctttcagcaagcgttgctaccgcgactattattccacaatgctcacaacaatacctctctccggtgacagccgcgagatttgaatacccaactatacaatcctacaggctacaagaggccatcgcagcaagcatcttacggtcgttagcattgaccgtccaacaaccatatgccctattgcaacaaccatccttaatgaatctatatctccaaagaatcgcagcacaacaactacaacaacagttgcttccaacaatcaatcaagtagttgcagcgaaccttgctgcttacctccagcaacaacaatttcttccattcaatcaactagctggggtgaaccct

SEQ ID NO: 896 - DNA, 287 bp, Zea mays
  Clone ID: LIB3061-057-Q1-K1-B3
accggttccagttcgacctagacccacgcgtgcggctcacactaagcgtcgctccttcacctcaaatcggcacccatggttaccaggatatgataccttcttgggcttcttgctctcgccagtagcctcgcgcactcgccgactgacgaccctgccttgaacgcgctggccagatgatcggcacaaggaatgcgaagcagtactccaacgtccttgacaagcccatctgcccaggcatgcaggatgccacatggagtgcatgtgcatcgtttgacatcagccaattt

SEQ ID NO: 897 - DNA, 433 bp, Zea mays
  Clone ID: LIB3061-057-Q1-K1-B4
cgaaagtaaacagaggtgaagacaaagtggctgtacccgttccaggttcaaggaaatgcgcgagcgcaattccagcctgccgtcgaggttttgtaccgtacaagaagtgcacagctcggagcaaggtgctggcgctgcagcctgtggcacctggcgaggaggcagatagagagctcacaaggctgtgcctgtagaattctgggcccttgccacccacctctactctgtggataatttttgctgctactcgaacacatatgactagtacagtacagcagtgcagtactgatgttttgcaggaagaccattctggttctctgctgctacttatgagaggcggattggaactgaagcagccttccacaaatggaggtgactgtgggttccggtctgccattgtatagttcgggactagtgtttccattttcatctc

SEQ ID NO: 898 - DNA, 240 bp, Zea mays
  Clone ID: LIB3061-057-Q1-K1-B7
aatcccatcataatcacacaatgctcactatctctcactggctctatttcacagaacctcactccaactactacaatgggcttcaaacacccagctatacaaacctatacgctacaacaagcgcttgcaagcaacgtcttaaaacaaccaatttcccaatttcaacaacaatccttggcacatctaaccatacataccatttcaaacgcatcatctacaaacaactgagccaccttttac

SEQ ID NO: 899 - DNA, 405 bp, Zea mays
  Clone ID: LIB3061-057-Q1-K1-B8
ttctcgtcgatgccctccgccgccgtctcgccgttcttcctcctctcatcgtcataggctccttgggtaggttctgtgagtttccaaaggtacagagcgtcgcgtaggctcgtagctaattgtcatttggtttcgtggttcttgctccgaatcgacaatcgtgttgtttctttgcaatttgtttgtcatctggtttcgtagttcttgctccgaattggcactcgtgttgtttctttgcaactgtggagcagaaatggcggtgcccgctgctgactcatgaggcctcacctcgacgactaagaatgccttgagttcttatccataattcttatctgaattctgaaatgatgcccgttgtatttgttgcagaccgtatcaatctgaatcttgattactgttttcatc

SEQ ID NO: 900 - DNA, 437 bp, Zea mays
  Clone ID: LIB3061-057-Q1-K1-B9
ccaactagcaacatataaagcacaatagtgtaccaacaatggcagccaaaatattttggctccggatgctccttggtatttctgcaagtgctgctacggcgaccattttcccgcaatgctcacaagctcctatagcttcccttcttcccccgtacctctcaccagcggtgtcttcggtatgtgaaaacccaattcttcaaccctacaggatccaacaggcaatcgcagctggcatcttacctttatcacccttgttcctccaacaatcatcagccctattacagcagttacctttggtgcatttattggcacaaaacatcagggcacaacaactacaacaacttgtgctagcaaaccttgctgcctactctcagcaacagcagtttcttccattcaaccaactagctgcattgaactctgcttcttatttgcaacaa

SEQ ID NO: 901 - DNA, 451 bp, Zea mays
  Clone ID: LIB3061-057-Q1-K1-C10
actgagaccaactagcaacatagaaagcacaatagtgtaccaacaatggcagccaaaatattttgcttccttatgctccgtggtctttctgcaagtgttgctaccgcaaccattttcccacaatgctcacaagctcctatagcttcccttcttcccccatacctctcaccagcggtgtcttcaatgtgtgaaaccccaattgttcaaccctacaggatccaacaggcaatcgcaacaggcatcttaccattatcacccttgttcctccaacaaccgtcagccctattacagcagttacctttggtccatttggtggcacaaaacatcatggcacatcaactacaacaacttgtgctagcaaaccttgctgcatactctcagcaacatcagtttcttccattcaaccaactggctgcattgaactctgctgcttatttgcaacaacaattac

SEQ ID NO: 902 - DNA, 434 bp, Zea mays
  Clone ID: LIB3061-057-Q1-K1-C11
cccacgcgtccgtagcaacatagaaagcacaatagtgtaccaacaatggcagccaaaatatttgggctccttatgctccttggtctttctgcaagtgctgctacggcgaccattttcccgcaatgctcgcaagctcctatagcttcccttcttcccccgtacctctcaccagcggtgtcttcggtatgtgaaaacccaattcttcaaccctacaggatccaacaggcaatcacagctggcatcttacctttatcacccttgttcctccaacaatcatcagccctattacatcagttacctttggtgcatttattggcacaaaacatcagggcacaacaactacaacaacttgtgctagcaaaccttgctgcctactctcagcaacagcagtttcttccattcaaccaactagctgcattgaactctgcttctta

SEQ ID NO: 903 - DNA, 403 bp, Zea mays
  Clone ID: LIB3061-057-Q1-K1-A5
ctcccagatctagcggccaccgactcccgcattcgagcgagcctccatggcggcgcacggccactgcctcccactgctgctcgtggccgccgccctcgccctcgccgccgtccctgctcgcgcggcgctgggcggcgggcgcggcccgctgctgggcgggtggaacccgatccctgacgtgagcgactcgcacatccaggagctaggcaggtgggcgctggggcaggcgaagcaccagaagctggccgacgacagtctgcggttccgccgcgtggtgcgcggcgagcagcaggtcgtgtccggcatgaactaccggctctacgtcgacgccgccgaccccgccgaccgcaccgtgccctacgtcggtcgcctgtacgagcaggtttggacccggacccgtcag

SEQ ID NO: 904 - DNA, 438 bp, Zea mays
  Clone ID: LIB3061-056-Q1-K1-H11
ccaactagcaacatagaaagcacaatactgttccaacaatggcggccaaaatatcttgcctcctgatgctgcttgatctttctgcaagtgctgctactgcgaccattttcccgcaatgctcgcaagctcctatagcttcccttcttcccccgtacctctcaccagcggtgtcttccgtatgtgaaaacccaattcttcaaccctacaggatccaacaggcaatcacagctggcatcttacctttatcacccttgttcctccaacaatcatcagccctattacatcagttacctttggtgcatttattggcacaaaacatcaaggcacaacaactacaacaacttgtgctagcaaaccttgctgcctactctcagcaacagcagtttctttcattcaaccaactagctgcattgaactctgcttcttatttgcaacaac

SEQ ID NO: 905 - DNA, 463 bp, Zea mays
  unsure (1)..(463): unsure at all n locations; Clone ID: LIB3061-056-Q1-K1-H12
cggtcctcagttcgggccacgcgtncggcgccgggaagtggccagcaatatggtctgacttcgtcgaccgcagcaccaccggcgtatgcaaggagtcggagatgcgcgcgaccaagatcctcggggtcgtctccgacgcctacgaggtcgtcccgtcggccagggccagggccagcggcgcggtgccccgcctcttcgacttcgcgctgcggcgcctggaggagcgctggcgcatcctgcgcgccaccgtggctgccaccggcgccttcagcctgccggaggagacctccggctactgcaacttcgccaagcaaaccgtgacagcttgccctgcgttcgcgtggctgcggtgtgagaaggatggcgtcgaggactgcgccgagttgctcgccggccacaatatcgtgggtagcggcggggagcaattcggaggagactcgcggtgcgtcaagatcaacatgct

SEQ ID NO: 906 - DNA, 437 bp, Zea mays
  unsure (1)..(437): unsure at all n locations; Clone ID: LIB3061-056-Q1-K1-H2
atacagtagcaacaatagagcaacaatggcggtcaagatattttccatccttatgctgcttggtctttctgcatgtgttgctaacgcgaccatttttactcaatactcacaagctcctatagctgcccttcttcccccataccttccatcaatgaccgcttcagtttgtgaaaacccagcccttcaaccctacaggctccaacaagcaatcgcaacaagcaacttacctttatcacccctgttctttcaacaatcgccagccctatctttggtgcagtcattggtacaaaccatcatggcacaacagctgctacaactcgtgctaccagtgatcagccaactagctctggcaaacctttactcctactctcagcaacaacaatnacttccattcaaccaactgtctacacttgaaccctgtgcttatttacaacaac

SEQ ID NO: 907 - DNA, 294 bp, Zea mays
  Clone ID: LIB3061-056-Q1-K1-H3
gctgtaaataaggtagcaaggctcacaccagctagctggctgaatggtactaacaattgtgggtctcactatatgtgcggctgcttcaaccactctccctcaatactcacactctcatatagctgcccttcttcctccataccaccaatcaatgacctattcacttcgtgaaatcttcaaccttcaacctaactgcctccaacacacaatcccaacacacaactttacttcactaaaccacctcatttaacacccgccaaccatatctgatcctcagtcattggcacaaaccat

SEQ ID NO: 908 - DNA, 267 bp, Zea mays
  Clone ID: LIB3061-056-Q1-K1-H4
cgaccgcacgcgtccgacgcatacattcggcgagggagaggaagaagtcagtaaagtaaattctgtcgctccagttggtacgaggagatgccgcggatccctctgatcaggttcctcaagcggaatctcaaagccccatctccatccgcgccagcggcgtcgcaacccgcagaccagcacgcgaccctcatgttccggttaggggctaaagcagaggcaccatcttctggagagattaaaaattaccgctttagatctgatgtgcct

SEQ ID NO: 909 - DNA, 404 bp, Zea mays
  Clone ID: LIB3061-056-Q1-K1-H5
ggacgtcagcctagcaattagctcatcgactccagattggagaactcgacaccatgagggtgctgatcgttgcccttgctctcctggcgctcgctgcgagcgccgcctccagtacaagcggcggctgtggctgccagacaccaccgtttcatctaccgcctccgttctatatgccgcctccgttctatctgccgccgcagcagcagccgcagccatggcaataccccactcaaccaccgcagctaagcccgtgccagcagttcggatcctgcggcgtcggcagcgtcggcagcccgttcctgggccagtgcgtcgagttcctgaggcaccagtgcagcccggcggcgacgccctacggctcgccacagtgccaggcgctgcagcagcagtgctgccaccagatc

SEQ ID NO: 910 - DNA, 395 bp, Zea mays
  Clone ID: LIB3061-056-Q1-K1-H8
cagatcagcaaagcggcagtgcgtagagaggatcgtcgaacagaacagcatgaagatggtcatcgttctcgtcgtgtgcctggctctgtcagctgccagcgcctctgcaatgcagatgccctgcccctgcgcggggctgcagggcttgtacggcgctggcgccggcctgacgacgatgatgggcgccggcgggctgtacccctacgcggagtacctgaggcagccgcagtgcagcccgctggcggcggcgccctactacgccgggtgtgggcagccgagcgccatgttccagccgctccggcaacagtgctgccagcagcagatgaggatgatggacgtgcagttcgtcgcgcaccacctgcagatgatgatgcagcttgagcgtgccgctgccg

SEQ ID NO: 911 - DNA, 302 bp, Zea mays
  Clone ID: LIB3061-056-Q1-K1-H9
acgggtagatgccactgccgtcccctacagaagttcgatacagttcggattcatatcgacgccgatgggaacgcacgaatgctcgagcgggggaacccgaccgagcgcggcagcgcaaacctccgatccctgctgcgagcaagggatggcggcggcatgggcagagctggcggctgtcctcgtcgcggcgcatgtggcgtctgcggcgccggtcactgagccagcgttcctgtgggcgcctaataactactgattccgctctgatgatgctaaagacgttgtccattatcaaacaatctcac

SEQ ID NO: 912 - DNA, 425 bp, Zea mays
  Clone ID: LIB3061-057-Q1-K1-A1
ggagaaagtagtgtgtatgatgagaggctacctaagagaaggaagcggaacattatgaatagtgagcaaatagatgaattagagaaggctctagtagatgagcctgagatgcacaggaaccctgttctattgcagggttggtcagagaagctaagtctgcagggcccagagatcacatcatcacaacttaaaaactggctgaacaatcggaaagctaagcttgctcgcattgcaaaagaaagagggacatttgagggagataatgctgataagccatctacccctcatcccggcgagtcttccgaaagtgctggggaggacaactatataccccctgcaagggtgatgactgctccatccaaaggcagactggtgagcccggacggcaatgagaaaacatcgcatgcagagctatcccccaacac

SEQ ID NO: 913 - DNA, 434 bp, Zea mays
  Clone ID: LIB3061-057-Q1-K1-A10
gcaacatagaaagcacaatagtgtaccaacaatggcagccaaatattttgcttccttatgctccgtggtctttctgcaagtgttgctaccgcaaccattttcccacaatgctcacaagctcctatagcttcccttcttcccccatacctctcaccagcggtgtcttcaatgtgtgaaaccccaattgttcaaccctacaggatccaacaggcaatcgcaacaggcatcttaccattatcacccttgttcctccaacaaccgtcagccctattacagcagttacctttggtccatttggtggcacaaaacatcagggcacaacaactacaacaacttgtgctagcaaaccttgctgcatactctcagcaacatcagtttcttccattcaaccaactggctgcattgaactctgctgcttatttgcaacaacaatt

SEQ ID NO: 914 - DNA, 377 bp, Zea mays
  Clone ID: LIB3061-057-Q1-K1-A11
gcaacatagaaagcacaatagcgtaccaacaatggcagccaaatattttgatctcttaaggctggttgtccttcctgaaggggctgctactgaaacaattttccagcattgttaaaaagctctaatggcttccattattccacataccctttaacaaacagggcttccatttcatgaacacccaatgcttaaaccttccggattcaacaagacatgtctacatggattataacattaataaccctgttaacttaaaaaccgatcaacctaataccaacactttcattaaatccatttataggcccaaactttaattcacaacaagcaacataaatttggccaaataaactttacttataatgttaaaaaaatccttt

SEQ ID NO: 915 - DNA, 379 bp, Zea mays
  Clone ID: LIB3061-057-Q1-K1-A12
gcaacatagaaagcacaatagtgtaccaacattggcagccaaaatattttgcctccttgggctcgttggtctttctgcaagggctgctacggcgaccattttcccgcaatgctcgcaagctcctatagcttcccttcttcccccgtacctctaaccagcggtgtcttcggtatgtgaaaacccaattcttcaaccctacaggatccaacaggcaatcgcagctggcatcttacctttatcacccttgttcctccaacaatcatcaaccctattacaacagttacctttggtgcatttattggcccaaaacatcaaggcacaacaactacaacaacttgtgctaacaaaccttgctggctaactttaacaacaacaattt

SEQ ID NO: 916 - DNA, 421 bp, Zea mays
  Clone ID: LIB3061-057-Q1-K1-A2
ctcttggactattgtatgaagcagagatctttggatagctccaaaaccgacagctatgtgaagagcatgcagatggaaggcaggagcacgagattagcgcgttgatgtacttagtactgcgaaatcaaactggaggaggctgcaattctgcattacacctacaaaaaattctcaaacctaacctcaagaagggatagatgtggctgcaaaccaactaaagaagatgtgaagcaatgttttatcttggaatttgaccgtttggtaccgggaacatgttgcatggaccgatagagacaccaacttgaaacttttaaggaaggatgtattaacacatatatatgtgcccatggcattcatcggtggcctcaaggaatccgacgtctatcaatgcaataacatcagcgaatgcacaatttaaaac

SEQ ID NO: 917 - DNA, 430 bp, Zea mays
  unsure (1)..(430): unsure at all n locations; Clone ID: LIB3061-057-Q1-K1-A3
acgcaacaagcaacatagaaagtggaatccagtagcatcaatagagcaacaatggcgaccaggatacgtttccctccttatgctccttgctctttctgcatgtgttgctaacgcgacaattttccctcaatgctcacaagctcctatagcttcccttcttcccccataccttccatcaatgatagcttcagtatgtgaaaacccagctcttcaaccctataagctccaacaagcaatcgcagcaagcaacatacctttatcacccttgtttcaacaatcgccagccctatctttggtgcagtcattggtacaaaccatcaaggcacagcagctgcagcaactcgtgctacctgcgatcaaccaagtagctctggcaaacctttctccctactatcagcaacaacaatntcttccattcaaccaactatct

SEQ ID NO: 918 - DNA, 427 bp, Zea mays
  Clone ID: LIB3061-057-Q1-K1-A4
cccacgcgtccgattgagaccagcaagcatcatagaaagtagaatccattagcaacagtggagcaacaatggcgaccaagatattttccctccttatgctccttgctctttctacatgtgttgctaacgcgacaattttccctcaatgctcacaagctcctatagcttcccttcttcccccataccttccatcaattatagcttcagtatgtgaaaacccagctcttcaaccatataggcttcaacaagcaatcgcagcaagcaacatacctttatcgcccttgttgtttcaacaatcaccagccctatctttggtgcagtcattggtacaaaccatcagggcacaacagctgcagcaactcgtgctacctgtgatcaaccaagtagctctggcaaacctttctccctactctcagcaacaacaatt

SEQ ID NO: 919 - DNA, 388 bp, Zea mays
  Clone ID: LIB3061-056-Q1-K1-H10
ggcgaagatgggcgagaaagagtggtacttcttctaccagaaggaccgcatgtacccgacgggggtgagggcgaaccgggccaccgaggccggttactggaaggcgacgggcaaggacaaggaggtctacaacgccgcggaaggggtggcggtactggtcggcatgaagaagacgctcgtcttctacaggggcagggctcccaggggtgacaagacaaactgggtcatgcacgagtacaggctcgaaggcagcggcaggctccccgccggcctcgcgtccgcaaccggctcagccgccgtcaacgccgcggcggccttgaaagcttctgcttataagcaggatgagtgggtggtatgtcgtgtgttccacaagaccactgggatcaag

SEQ ID NO: 920 - DNA, 409 bp, Zea mays
  unsure (1)..(409): unsure at all n locations; Clone ID: LIB3061-056-Q1-K1-F6
cccacgcgtccgcaacaacaacaaccgtagcaccaacaacaacaacaacaacagcaggaccaacaacaacatcaatgtgaaggccaacaacaacatcaccaacaatcacaaggccatgtgcaacaacacgaacagagccatgagcaacaccaaggacagagccatgagcaacaacatcaacaacaattccagggtcatgacaagcagcaacaaccacaacagcctcagcaatatcagcagggccaggaaaaatcacaacagcaacaatgtcattgccaggagcagcaacagactacaaggtgcagctataactactatagcagtagctcaaatctaaaaaattgtcatgaattcctaaggcagcagtgcagccctttggtaatngcctttctncaatcacgtttgatac

SEQ ID NO: 921 - DNA, 429 bp, Zea mays
  Clone ID: LIB3061-056-Q1-K1-F7
ttcagaaacacaccaagcgaagcgcactagcaacaacctaacaacaatggctaccaagatattatccctccttgcgcttcttgcgctttttgcgagcgcaacaaatgcgtccattattccacaatgctcacttgctcctagttccattattccacagttcctcccaccagttacttcaatggccttcgaacacccagctgtgcaagcctataggctacaacaagcgattgcggcgagcgtcttacaacaaccaattgcccaattgcaacaacaatccttggcacatctaacaatacaaaccatcgcaacgcaacagcaacaacagttcctaccagcactgagccacctagccatggtgaaccctgtcgcctacttgcaacagcagctgcttgcatccaacccacttgctctagcaaacgtagttgcaaa

SEQ ID NO: 922 - DNA, 382 bp, Zea mays
  Clone ID: LIB3061-056-Q1-K1-F8
cggacgcgtgggcgaggctcggcccattccttgcccacgtcatctctctgtgtctggctctcatcgccgcgtcacgcacagccgccgccgtcgtgcgcgtgtgccggaacggccgcgtggatcctccgccccgtcccagcggcgacttgtccgtgcgaagatgctggggttctcgaccggacagctgctggtcatcctcggggcctgctccgtcatgatgaagcccagtgatatggtgaagattgcgaggacggccgggcggatgactggaagagcggttgggcggctcatagtggctcgacggcagctggacgagattctgggccagtctgcagccacccaggttcataaggaggctaaagacgctatgacacaattagac

SEQ ID NO: 923 - DNA, 309 bp, Zea mays
  Clone ID: LIB3061-056-Q1-K1-G1
gaccaacaagcaacatagaaagtggaatccagtagcaacaatagagcaacaatggcgagcaagatattttccctgcttatgctccttgctctttctacatgtgttgctaacgcgacaattttccctcaatgctcacaagctcctatagcttcccttcttcccccataccttccatcaattatagcttcaatatgtgaaaacccagctcttcaaccatataggcttcaacaagcaatcgcagcaagcaacatacctttatcgcccttgttgtttcaacaatcgccagccctatctttggtgcagtcattg

SEQ ID NO: 924 - DNA, 417 bp, Zea mays
  Clone ID: LIB3061-056-Q1-K1-G10
aacaacttgtgctagcaaaccttgctgcctactctcagcaacagcagtttcttccattcaaccagctagctgcattgaactctgcttcttatttgcaacaacaacaactaccattcagccagctacctgctgcctacccccagcaatttcttccattcaaccaactggcagcattgaactctcctgcttatttacagcagcaacaactactaccattcagccagctagctggtgtgagccctgctaccttcttgatacaaccacagttgttgccgttctaccagcacgctgcgcctaacgctggcaccctcttacaactgcaacaattgctgccattcaaccaacttgctttgacaaacccagcagcgttctaacaacaacccatcattggtggtgccctcttttagatttcttatg

SEQ ID NO: 925 - DNA, 362 bp, Zea mays
  Clone ID: LIB3061-056-Q1-K1-G11
gaccaacaagcaacatataaagtggaatccattagcaacaatagagcaacaatggcgaccaagaggttttgcctccttatgctccttgcgtctttctacatgtgttgctaacgcgacaattttccctcaatgctcacaagctcctatagcttcccttctttccccataccttccatcaattatagcttcaatatgtgaaaacccagctcttcaaccatataggcttcaacaagcaatcgcagcaagcaacatacctttatcgcccttgttgtttcaacaatcgccagacctatctttggtgcacacattggtacaaaccatcagggcacaacagctgcaacaactcgtgctaactctgatca

SEQ ID NO: 926 - DNA, 419 bp, Zea mays
  Clone ID: LIB3061-056-Q1-K1-G12
gctcagtctgggtgcaccggactgtccggtagtgcaccggacagtgtccggtgcgccaggctaggtctggcgaactggctgctctcgggacttcgacggcggcatacggctaaaattcaccggactgtccggtggtgcaccggactgtccggtgagccaacagtcggccgggtcaacggtcggccacggaatccgcgcgcgacgcgtggcaagtgccaacggtcggatggggcaccggactgtccggtgtgcaccggacagtgtccggtgcgccaacggctccaagactgcaatggtcggcttcgccaaataaggaaagagatccgcaccggacagtgtccggtggtgcaccggactgtctggtgcgccaagcgacagaaggcaagaattgccttcctggaatgcactcaaacggctct

SEQ ID NO: 927 - DNA, 350 bp, Zea mays
  Clone ID: LIB3061-056-Q1-K1-G2
cgcgagagtcgctcaaggccgcggcgaggagaagcggcagcgcgtcacctctccaatggcatccccgtccctgctccgggcaacctgtgcgcttgtcgagtgctgaggctccctgtccctaagacaagcttgcgcgcgcgatggagggtttttcgagggacttgctgtgcgggattggcaagggggacgcgccgccaccggagaagaggccggggcagctgcgggaggagatggaggaggtggagcttagcctcgggctgtcgcttggcggccgattcgggctcgacaggaaggggagcaagctcccccggtcgtcgtccgtggcggccatgctgacaacgccggtggag

SEQ ID NO: 928 - DNA, 383 bp, Zea mays
  Clone ID: LIB3061-056-Q1-K1-G3
cattgctttagtatcaagtgtttattgtacacagacaggcggctgcagctgtcgtcggcaacggagccatgagcagtagcatcgttcacaacaacatcatccacaaaaacaacaacatcaaccactaccacatcatcaccagctgcagcaacaccaacaacaacaagtttacatgcaaccacaaaaacatcatcaacaacaagaagttcatgttcaacatcagctacaacaaccgcagcaccaacaacaacaacaacaacaacagcaccaacaacaacatcaatgtgaaggccaacatcaacatcaccaacaatcacaaggccatgtgcaacaacacgaacagagccatgagcaacatcaaggacagaaccatgagcaacaac

SEQ ID NO: 929 - DNA, 316 bp, Zea mays
  Clone ID: LIB3061-056-Q1-K1-G4
ggctatccaatagctcatcgactccagaatgcataacttgacaccatgatggcgctgatcggtgacctagctctcgtggagctagcttgaagcgccacctgacgtacacgctgcggatgtgactgccaaacaccaccgtgacatataacggcttcatcatatatgacgcctgcgttctatctgcagacgaaacagcagtcgcagccatggcaataccccactggatcaccgcaagtaactccgtgccagccgtacatatgctgcagggtcaagcgcttctatagtccatttatgggccaatacgatcagattctga

SEQ ID NO: 930 - DNA, 408 bp, Zea mays
  Clone ID: LIB3061-056-Q1-K1-G5
agcattcagaaacacaccaagcgaagcacattagcaacaacctaacaacaatggctgcgaagatattatccctgcttgcgcttcttgcgctttttgcgagcgcaacacatgcgttcattattccacaatgctcacttgctccaagttccattattacacagttcctcccaccagttacttcaatgggcttcgaacacccagctgtgcaagcctataggctacaacaagcaattgcggcgagcgtcttacaacaaccaatttcccagttgcaacaacaatccttggcacatctaacaatacaaaccatcgcaacgcaacagcaacaacaattcctaccagcactgagccacctagccatggtgaaccctgccggctacttgcaacagcagttgcttgcattaaacccac

SEQ ID NO: 931 - DNA, 439 bp, Zea mays
  Clone ID: LIB3061-056-Q1-K1-G6
gcagcccgacggcgacgccctactgctcgcctcagtgccagtcgttgcggcagcagggttgccagcagctcaggcaggtggagccgcagcaccggtaccaggcgatcttcggcttggtcctccagtccatcctgcagcagcagccgcaaagcggccaggtcgcggggctgttggcggcgcagatagcgcagcaactgacggcgatgtgcggcctgcagcagccgactccatgcccctacgctgctgccggcggtgtcccccactgaagaaactatgtgctgtagtatagccgctggctagctagctagttgagtcatttagcggcgatgattgagtaataatgtgtcacgcatcaccatgggtggcagtgtcagtgtgagcaatgacctgaatgaacaattgaaatgaaaagaaaaaaagtactccatctggtccaaat

SEQ ID NO: 932 - DNA, 453 bp, Zea mays
  unsure (1)..(453): unsure at all n locations; Clone ID: LIB3061-056-Q1-K1-G7
gcagaaacacaccaagcgaagcacattagcaacaacctaacaacaatggctaccaagatattatccctccttgcgcttcttgcgctttttgcgagcgcaacaaatgcgttcattattccacaatgctcacttgctccaagttccattattacacagttcctcccaccagttacttcaatgggcttcgaacacccagctgtgcaagcctataggctacaacaagcaattgcggcgagcgtcttacaacaaccaatttcccagttgcaacaacaatccttggcacatctaacaatacaaaccatcgcaacgcaacagcaacaacaattcctaccagcactgagccacctagccatggtgaaccctgccgnctacttgcaacagcagttgcttgcatcaaacccacttgctctggcaaacgtagttgcaaaccagccacaacaacagctgcaacaa

SEQ ID NO: 933 - DNA, 345 bp, Zea mays
  Clone ID: LIB3061-056-Q1-K1-G8
atagaacgcggaatccactagctacaatcgagcaacaatggcgaccaagatattctggctccttatgctccttgctctatctacatgtgttgctaacgcaacaatcatcgctcaatgcttacaagctccaatagctcaccttctttcccaatacctaccataaaggatagctaacatatgtgaaaacccagctattcaaccatataggctacagcaagcaatcgcagacagcaacatacctttatcgcccttgatgattcaacaatagacagacctatctttggtgcagtcattgatacacaccatcatggcacaacagctgcagcaacttatgctacctgagat

SEQ ID NO: 934 - DNA, 217 bp, Zea mays
  Clone ID: LIB3061-056-Q1-K1-G9
attctccgggtcgacgccactcgtccgctcactctttcgctcccttttttttttttttttgaaatctcactcttcattactagcacgccaggatcaggtcacacaacaccgtgggatagacctactactaactatatacctactacattctatcttccatcataacatcatcctcaaccattgcaatacctgactcaaccacctcaactaagcccat

SEQ ID NO: 935 - DNA, 398 bp, Zea mays
  Clone ID: LIB3061-056-Q1-K1-H1
gcaacatagaaagcacaatagtgtaccaacaatggcagccaaaatattttgcctccttatgcgccttggtctttctgcaagtgctgctacggcgaccattttcccgcaatgctcgcaagctcctatagcttcccttcttcccccgtacctctcaccagcggtgtcttcggtatgtgaaaacccaattcttcaaccctacaggatccaacaggcaatcacagctggcatcttacctttatcacccttgttcctccaacaatcatcagccctattacatcagttacctttggtgcatttattggcacaaaacatcagggcacaacaactacaacaacttgtgctagcaaaccttgctgcctactctcagcaacagcagtttcttccattcaccaactagc

SEQ ID NO: 936 - DNA, 350 bp, Zea mays
  Clone ID: LIB3061-056-Q1-K1-F5
gacccacgcgtccgctggttttttttttttttctcacgaagaatcataataggatagaacttaccaggccgggccttacatacactgatgctgacacatacaaacagacacacgcacatactgagagacacaagcatgtagacacacacatacgaccataatatataggaggcatacacactaaaacgaacacatgacatacaggaaattaaactaagtttaaatcgctcattttccacgagacgaaacacgagcacggaaaatggcaagacaagagagcgacaccaccaaacatgcatgcatgggtatgtagttcacatgacactgcacgagggcccgccgccctgact

SEQ ID NO: 937 - DNA, 378 bp, Zea mays
  Clone ID: LIB3061-056-Q1-K1-E10
atccactcacacgcgatccctagcagtggctctccctatcagccccgctactcagcttggttcggcgctgtagaagcatctgcgatgccatccgccgccacttgaggccatcatctccggattctgcagccggattcagagatcctctagatgtcttggtcccgctcccgacgacatcctcgtctgcacctacttcgacagcttcttggacacaaatgctgctctttaagatgcttgtgaacaagtgatcgctggggaacaatattgtgatgttcctattgggctgcacgtaatccgtggagagaacgatgctttactcggagaatcagatcgcgaaaaggatcaactccctggtcacatgacctgcggttcagaagc

SEQ ID NO: 938 - DNA, 357 bp, Zea mays
  Clone ID: LIB3061-056-Q1-K1-E11
atattatcgagaccaactagcaacatagaatgtacattagtgtaccaacaatggcagccaaaatgttctggctacttatgctccttgggctttctgcaagtgctgctacagcgaccattttcccgcaatgctcacaagctcccatagctatccttttttccccgtacctctaaccagcggtgtctctccgcatgtgaaaacccaattctctaaccctacaggatccaacaggctatcacagctggcatcttacctttataaccctctggtcttccacatatcattatccctattacatcaggtacccttggggcatttattgacacacaacattagggcacaacaaactcaacaacc

SEQ ID NO: 939 - DNA, 436 bp, Zea mays
  Clone ID: LIB3061-056-Q1-K1-E12
cccacgcgtccgcagctagctagcgtacagacgaataatctcttcttcacctcactagctaacggcagcgagcagctcgatcgctctgtcctgcaataatggccgctcgctcctcctcccagcagctggtcgcggcggcggtcctggcagcggcgctgctgctgctggcggcgggggccgggacggcgtcggcggcggtgagctgcggcgaggtgacgtcgtcggtggcgccgtgcctcgggtacgcgatgggcagcgcggcgtcgccctccgcggcgtgctgcagcggggtgcgctcgctcaacagccgcgcgtcgtcggcggcggaccggcaggccacctgcaactgcctcaagagcatgacgggccggctcggcggcggcgtcagcatggccaacgccgccaacatccccggcaagtgcggcgtctccgtcgg

SEQ ID NO: 940 - DNA, 339 bp, Zea mays
  Clone ID: LIB3061-056-Q1-K1-E2
gtaacagcagcggaggcagggtccccgcgctcgccggacctctacgatctctccgacgactccgactacgccgccgccgcttctgaccagacggcgatgcggaccgatcccgcggacagagcctcagaggagactgcgagggtggatgtggtatatgagaaggagcgtgtgaccatccacccgtcgcagtatggttccagtcgtatcagcgggaagctgcgtctgtttctgcagcagggatcattgttcctgagttgggagccaaacgaaggagccggctctttgtcaaccagttcagtcggtgtggaagtagaaaaatatagaaatctgtacactatc

SEQ ID NO: 941 - DNA, 356 bp, Zea mays
  Clone ID: LIB3061-056-Q1-K1-E3
cagacctattacagcagttacctttgttgcatttattgacacaaaacatcatgccacgacagctacaacacctggtgcgagcaaaccttgctgcctactctcagcaacagcagttccttccattcaaccaactagctgcattgaactctgctacttattagcaccaccaccaactaccattcagccagttatatgatgcctacccccagcaattccttccattcaaccaactgacagcattgaactctcctgcttatttacagcagcaccaactactaccattcagccagctagctggtgtgagccctgctaccttcttgacacaaccacagttgttgccgttctaccagcacgct

SEQ ID NO: 942 - DNA, 430 bp, Zea mays
  unsure (1)..(430): unsure at all n locations; Clone ID: LIB3061-056-Q1-K1-E4
cttggcacatctaacaatacaaaccatcgcaacgcaacagcaacaacaattcctaccggcactgagccacctagccatggtgaaccctgccgcctacttgcaacagcagttgcttgcatcaaacccacttgctctggcaaacgtagttgcaaaccagccacaacaacagctgcaacagtttctgccagcgctcagtcaactagccatggtgaaccctgccgcctacctacaacagcaacaactgctttcatctagcccgctcgctgtggccaatgcacctacatacctgcaacaacaattgttgcaacagattgtaccagctctgactcagctagttgtggcaaaccctgctgcctacttgcaacagctngcttcattcaaccaactgactatgtcgaactctgctgcgtacctaccacagcgacaccag

SEQ ID NO: 943 - DNA, 395 bp, Zea mays
  Clone ID: LIB3061-056-Q1-K1-E6
catgaagttcttcgccaccccgccggttcacggctcgctggcgaaccaggtggtgcacccggccgacctgtgcttcaagctccccgacggggtgagcctggaggagggcgccatgtgcgagccgctgagcgtgggcgtgcacgcgtgccgccgcgcgggggtggggcccgagacgggcgtgctcgtggtgggcgccggccccatcggcctggtgtcgctgctggcggcgcgggccttcggcgcgccgcgcgtggtggtcgtggacgtggacgagcaccgcctggccgtggtcaggtcgctgggcgcggacgcggcggtgcgggtgtcgccccgcgcggaggacctggcggacgaggtggagcgcatgcgcgcggtcatgggctcggacatcgacg

SEQ ID NO: 944 - DNA, 423 bp, Zea mays
  unsure (1)..(423): unsure at all n locations; Clone ID: LIB3061-056-Q1-K1-E7
caactagcaacatagaaagcacaatagtgtaccaacaatggcagccaaaatattttgcctccttatgctccttggtctttctgcaagtgctgctacggcgaccattttcccgcaatgctcgcaagctcctatagcttcccttcttcccccgtacctctcaccagcggtgtcttcggtatgtgaaaacccaattcttcaaccctacaggatccaacaggcaatcgcagctggcatcttacctttatcacccttgttcctccaacaatcatcagccctattacaacagttacctttggtgcatttattggcacanaacatcagggcacaacaactacaacaacttgtgctagcaaaccttgctgcctactctcagcaacagcagtttcttccattcaaccaactaggttcattgacctctgcttc

SEQ ID NO: 945 - DNA, 304 bp, Zea mays
  Clone ID: LIB3061-056-Q1-K1-E9
acgacaccagcaagcaacatagaaagtggaatcctttagcatcaatagagcaacaatggcgaccaagatacttgccctccttatgctccgtgctctttactgcatgtagatgctaacgcgacaattttccctcaatgatcacaagctcctatagctatcctttttgccccataccttacataaatgatagcttcagtatgtgaaaacccagctcttcaaccctatctgctccaacaagcaatcgcattaagcatcatacctttataacacttgtttcaacaatcggcagccctatttttggggc

SEQ ID NO: 946 - DNA, 338 bp, Zea mays
  Clone ID: LIB3061-056-Q1-K1-F1
gcgacgtaccatccagaaacacactcaagctgaatcgccactaacaactaacctaacgacaatagagctaccaagatgggacttcatatatgcgcttgttgagctatacgcgcgcgcacccgctgctactattagaccccagcgctcactcgctcatatacgaccattataaataggaggcatacacactactacgaacgcatgacgtacaggaaattgagctagcctaaaagcgacaatttgccatgacaccaaacagtatcacacaacctggcaggacatgagagcgacactaccagacatgtatgcatgggcatgccgtccacatgacactgcaa

SEQ ID NO: 947 - DNA, 433 bp, Zea mays
  Clone ID: LIB3061-056-Q1-K1-F10
agccaatcaacaagagcgatagaggggtcatatatagtgcttccacctcctgccgcttccatatgcagggcatctgcctctgaaggtggtgcacagctcacaccatcaggtgtaatctccagtagcccctcgctgggaaacaattctgggtttcactctagtgttactgtgctgaaaagggcctttgagattgctagctcgcaaactcaggttgaacagccactttgtctggaatgtatgagggttctttctgataagatggataaggagattgaagatgttaatgctgatattaaagcttatgaggcttgtcttcaacgtttggagcaggaaccttacaacatcctcagtgaaacagattttcaaaaggagaaacaaaagattgaggaagaggaaaagaaacttaaagctgctattgaagaagctgaaaaac

SEQ ID NO: 948 - DNA, 399 bp, Zea mays
  Clone ID: LIB3061-056-Q1-K1-F2
atcgcaacgcaacagcaacaacaatttctaccagcactgagccaactagctgtggtgagccgtgtcgcctacttgcaacagcagttgcttgcatccaacccacttgctctggcaaacatagttgcataccaacaacaacaacaattgcaacagtttctaccagcgctcagtcaactagccatggtgaaccctgccgcctacctacaacagcaacaactgatttcatctagccctctcgctgtggttaatgcacctacatacctgcaacaacagttgctgcaacagattgtaccagctctgactcagctagctgtggcaaaccctgctgcctacttgcaacagctgcttccattcaaccaactgactgtgtcgaactctgctgcgtacctacaacagcga

SEQ ID NO: 949 - DNA, 430 bp, Zea mays
  Clone ID: LIB3061-056-Q1-K1-F3
atcacgcgtccgctcaagtaattaactgaaaatatattccatcattgaagatgagtggcattggtttgggtgctactagtagggagaataagacatcatggcctgaggtggtgggcatgtccatcaaggaggcaagagagatcattcttaaagacttgcccaacgctaacattcaagttctaccggttggctcagttgtgacccaggattttcgccctgaccgtgttcgcatcttcgttgatattgttgcccaggctccaacagttggctgacaaggagattccttatctataggccaaataaacaaagcctacttttatgtatcatggctaataaaacctacatttcttggttatccttgattggtttagcttattagctatatcaccatcaaaaggaggaccgagaaattccatgtatgtctatcata

SEQ ID NO: 950 - DNA, 423 bp, Zea mays
  unsure (1)..(423): unsure at all n locations; Clone ID: LIB3061-056-Q1-K1-F4
atcgttctcgtcgtgtgcctggctctgtcagctgccagcgcctctgcaatgcagatggcctgcccctgcgcggggctgcagggcttgtacggcgctggcgccggcctgacgacgatgatgggcgccggcgggctgtacccctacgcggagtacctgaggcagccgcagtgcagcccgctggcggcggcgccctactacgccgggtgtgggcagccgagcgccatgttccagccgctccggcaacagtgctgccagcagcagatgaggatgatggacgtgcagtccgtcgcgcagcagctgcagatgatgatgcagcttgagcgtgccgctgccgncagcagcagcctgtacgagccagctctgatgcagcagcagcagcagctgctggcagcccagggtctcaaccccatggccatgatgatg

SEQ ID NO: 951 - DNA, 349 bp, Zea mays
  Clone ID: LIB3061-056-Q1-K1-E1
atcagctctcatctggcagtcgcaggtagctacagatcagagagcagaaagagaccgagatggcgccgatagctagcatgatggcgtccaaggcgctcctcgtgctaacgctcctgctcgtcgccaccttgctcgccgcctccgataacgagcaagcccaggcggccaacgaggagaagaaggtggaggtccaagactggcacggcggctgcggctacccgggtcacggcggctgtggcggttgctgatacccgcactgacgactgcgctgctgccaccgcgggtaccatagcggctgtcggtgctgctcgcaccctgatcagataccagagcccatgtaccgtgctga

SEQ ID NO: 952 - DNA, 344 bp, Zea mays
  Clone ID: LIB3061-056-Q1-K1-C5
caactagcaacatagaaagcacaatagtgtaccaacaatggcagccaaaatattttgcgctccttatgctccttggtctttctgcaagtgctgctacggcgaccattttcccgcaatgctcgcaagctcctatagcttcccttcttcccccgtacctctcaccagcggtgtcttcggtatgtgaaaacccaattcttcaaccctacaggatccaacaggcaatcacagctggcatcttacctttatcacccttgttcctccaacaatcatcagccctattacatcaattacctttggtgcatttattggcacaaaacatcagggcacaacaactaccacaactt

SEQ ID NO: 953 - DNA, 362 bp, Zea mays
  Clone ID: LIB3061-056-Q1-K1-C6
aaaaaaacttcaaaccctcgacaccattcatgcttcatttggtgtatgttttgctacgttttccttgaacgtaaaagcattcttctctgatatctgtaactgtaaaaagattattgttctataactatctgttatttattgttccatcgctacctcactacctatttcctatctgatgttttgctataacatcgccatcgctgtgttgttcagacttaagttatgtgatgcttgttctttttagatgtaaatcctacaattttcgcctccaaagtcacccattacaatattttttactgaatctatatcttttacttatgtgtcactctgcattttttaagattcaaaaaaacattccttat

SEQ ID NO: 954 - DNA, 361 bp, Zea mays
  Clone ID: LIB3061-056-Q1-K1-C7
gcaacatctaaagtccaatccattaactacagcagaacaacaatggcgaccaggatcgtttcccttgatatgctacgcgctcttcctacatgtgttgctaacgcgacagattatcgtcaatgctcacaagctcctatagcgtcccttctttacctatactatttcatcaattatagctgcagtatgtgaacacccagcatcttcaaccatatacgcattaacaagcaatcacactaggcaacataccatgatcgtcctagaagtttcaacaatcaccagccctatctctggagcagtcactggtacaaaccatcatagtacagcagctgtagcaactcgtgctaactgagatcaaccaagt

SEQ ID NO: 955 - DNA, 428 bp, Zea mays
  Clone ID: LIB3061-056-Q1-K1-C8
cccacgcgtccggcatacgctccactccgtagtgccttccagcgcgacgaaatcatcgagttcgtgaaggaggcagggcgtggcggaaagggaaaccttcctctgaacgatgcacctacagtagtcgcgtccgagccgtgggacggcaaagatggagaggtcattgaggaggatgaattctccctcgacgagctcatgggcgacagctcctcagcaaacgatgagttgtgattctgatgattcttggactgatctgcgtgtcgattagccagactgtaaatctgaggaactctgttttgaaaaatcattccttgagtgtcataattttccaggctatggatgctagaatggattaaggagaactgatgtgatagacattttctttaacgtttttttttatccctggagttaaggcaatttggaacggt

SEQ ID NO: 956 - DNA, 373 bp, Zea mays
  unsure (1)..(373): unsure at all n locations; Clone ID: LIB3061-056-Q1-K1-C9
cccacgcgtccgcgcccgtctacgaccacattatcgtcccgttcgcgcgccgcgtgacggggacgcgagacgggcatcacgcacctgcagcgcatcggcacggggctggtgatgtccgtcgtcgcgatggccgtggccgccgccgtcgaggtgaagcgcaaggacgtggcgtccagcagcgggatgctggaggactccgggaagccgctgcccatcaccttcttctggatcgcgttccagtacctgttcctggggtccgcggacctgttcacgctggcggggctgctcgagtttttcttcagcgaagcgccgncgcggatgaagtcgctggcgacgtcgctgtcgtgggcgtcgctggcgctggggtattacc

SEQ ID NO: 957 - DNA, 416 bp, Zea mays
  Clone ID: LIB3061-056-Q1-K1-D1
gaaggaaacggcagtgaagtcgccggctccgccgcgacaggaggaaggagggagtaggatcggcggggtaggtccggcgatctgggctgctgtggcgcggtaagggaggaagcggagccgcgacaggatgcactcgtttgggcaccgcgccaacgcggtggcaacgtttgcggtcaccatactggccgcgatgtgcttcgccgtctacttctccgacaattttaacaccctgacacccaccgcatccgtcaagatcttgaatataaactggttccagaaggaggccaacggcaatgacgaggtcagcatgacgctgaacatttcggctgacctttcatctcttttcacgttgaacacaaaacaggtatttagttgtgtggcagcagagtatgagactcgacaaaatgctttaaatc

SEQ ID NO: 958 - DNA, 343 bp, Zea mays
  Clone ID: LIB3061-056-Q1-K1-D10
gtgaggcgtcctccctggcatcaaggtcgacaagggcaccattgaggttgctggcaccgacaaggagacgaccacccagggccacgatgacctcggcaagcgctgcgctaagtactacgaggccggtgcccgctttgccaagtggcgtgctgttctcaagattggccccaacgagccgtcacagcttgccattgacctgaatgctcacggtctggctcgctacgccatcatctgccaggagaacggtctggtgccaattgttgagcctgagatccttggtgatggccctcatgacattgatcggtgcgcttacgtcactgagacagtccttgctggctggtac

SEQ ID NO: 959 - DNA, 435 bp, Zea mays
  Clone ID: LIB3061-056-Q1-K1-D11
aaaatattttgcctccttatgctccttggtctttctgcaagtgctgctacggcgaccattttcgggcaaggctcgcaagctcctatagcttcccttcttcccccgtacctatcaccagcggtgtcttcggcatgtgaaaacccaattcttcaaccctacaggatccaacaggcaatcacagctggcatcttacctttatcacccttgttcctccaacaatcatcagccctattacatcaattacctttggtgcatttattggcacaaaacatcagggcacaacaactacaacaacttgtgctagcaaaccttgctgactactatcaacaacagcagcttcttccattcaaccaactagctgcattgaactctgcttgttatttgcaacaacaacaactaccattcatccagctacctgctgtctacacccagcaa

SEQ ID NO: 960 - DNA, 394 bp, Zea mays
  Clone ID: LIB3061-056-Q1-K1-D12
cccacgcgtccggagaccaactagcatcatataaagcacaatagtgtaccaacaatggcagccagaatatggtgcctacttatgctccttggtctttctgcaagtgctgctacagcgaccattttcccgcaatgctcgcaagctcctatagcttcccttcttaccccgtacctctcaccagcggtgtcttcagtatgtgaaaacccaattcttcaaccctacaggatccaacaggcaatcgcagctggcatcttacctttatcacccttgttcctgcaacaatcatcagccctattacaacagttacctttggcgcatctattggcacaaaacatcaaggcacaactactacaacaacttgtgctagcaaaccttgctgactactctcaacaac

SEQ ID NO: 961 - DNA, 374 bp, Zea mays
  Clone ID: LIB3061-056-Q1-K1-D2
agaaagcacaatagtgtaccaacaatggcagccaaaatattttgcctccttatgctcgttgggctttctgcaagtgctgctacggcgaccattttcccacaatgctcacaagctcctatagcttcccttcttcccccgtacctctcaccagcggtgtcttcggtatgtgaaaacccaattcttcaaccctataggatccaacaggcaatcgcagctggcatcttacctttatcacccttgttcctccaacaatcatcagccctattacagcagttacctttggtgcatttattggcacaaaacatcagggcacaacaactacaacaacttgtgctagcaaaccttgctgcctactctcagcaacaacagtttct

SEQ ID NO: 962 - DNA, 439 bp, Zea mays
  Clone ID: LIB3061-056-Q1-K1-D3
accacgcgtacgcaaaaacacaccaagcgaagcgcactagcaacgacctatcaccaagggcgaccaagatattagccctgcttgcgcttcttgcccttttagtgagcgcaacatatgcagttcattattccacagtgctcacttgctactagtgccattattccacagttgctaccaccagttacttcaatgggctttgaacatccagccgtgcaagcctacaggctacaactagcgcttgcggctagcgccttacaacaaccaattgcccaattgcaacaacaatccttggcacatataaccctacaaaccattgcaacgcaacaacaacaacatcaacagattctgccatcactgatccacctagccgtggtgaaccctgtcacctacttgcaacatcagctgcttgcattcaaccccacttgctctggcgaacgta

SEQ ID NO: 963 - DNA, 348 bp, Zea mays
  Clone ID: LIB3061-056-Q1-K1-D4
accacgcgtactcataaacacaccatgttaagctcactatcaaccatctatcaccaagtgctgctaacatattagcgcttgcctgtgcgctatctatgcccttcatagtgagtcacaacactatgcatttcattattccacactgctcacttgctactagtgccattattccacagttactaccaccagttacttcaatgatcttataacatccatccttgcaagcctatatgctactacttacgcttgctgctagcaccttacatcaaccaattacacaattgcaacaacaatccttggcacatataaccctacaaaccattgcaactcaccaacaacatcttcaac

SEQ ID NO: 964 - DNA, 387 bp, Zea mays
  Clone ID: LIB3061-056-Q1-K1-D5
aaacacatcacgcgaagcgcactatcaacaacctaacatcaatggctaccaagatattatccgtgcttgcgcttcttgcgctttttgcgagcgcaacaaatgcgttcattattccacaatgctcacttgctactagttccattattccacagttccttccaccagttacttcaatggccttcgaacacccagctgtgcaagcctataggctacaacaagcgattgcagcgtgcgtcttacaacaaccaattgcacaattgctacaacaatcctcggcacatctaacaatacagaccatagcaacgcaacagcaacaacagttgctaccagtactgagccacctagccatggtgaaacctgtccactacttgcaacatgaactgcttg

SEQ ID NO: 965 - DNA, 406 bp, Zea mays
  Clone ID: LIB3061-056-Q1-K1-D6
agcaacatagaaagcacaatattgtaccaataatggcagccaaaatattttgggtcagtatgctccttggtctttctgcaagtgctgctacggcgagcattttcccgcaatgctcacaagctcctatagcttcccttcttcccccatacctctcaccagcgatgtcttcagtatgtgaaaatccaattcttctaccctacaggatccaacaggcaatcgcagcaggcatcttacctttatcacccttgttcctccaacaatcatcagccctattacagcagttacctttggtgcatttattggcacaaaacatcagggcacaacaactacaacaactcgtgctagcaaaccttgctgcctactctcagcaacagcagttacctttggtgcatttgttggcacaaaa

SEQ ID NO: 966 - DNA, 429 bp, Zea mays
  Clone ID: LIB3061-056-Q1-K1-D7
caacgctactaccgccgctagctggttcaagtgcggcgagcggagccggagaccgggagaggaaattaagaggcgtcgatcgggcatggggtgcgacgacaagtgcgggtgcgccgtgccgtgccccggcggcaaagactgcaggtgcacgtcggggagcggcgggcagcgggagcacacgacttgcggctgcggggagcactgcgagtgcagcccgtgcacgtgtggccgggccacgatgccgtccggccgcgagaacaggagggctaactgctcctgcggagcgtcctgcaactgcgcatcctgcgcctcggcctgatccgtgcgcctcgccctcgtgctaccgcgctgcctagtggagggagttgtctagtgaggctggagacgaagcaactagcactacttctaataaaaggcttgtgtcatgct

SEQ ID NO: 967 - DNA, 331 bp, Zea mays
  Clone ID: LIB3061-056-Q1-K1-D9
atcaggaccttcaatcatcattcatcccatttttatattcccctaatcaaatctgcaacatcaggtatctagctccattaaccatgaagctggggctagtagctattgctttgatagctttagtatcaagtgtttattgtacacatacaatccactgcagctgaagccaacaacaaactcatgagcagcaacataattcacaactacatcatccacaaaaacaacaacatgaaacaccaccacaacatttccagcatcatcatacccaacttcaacaagttcatattcaaactcaaaaacattctgctcaaccataaattcaatttcaaca

SEQ ID NO: 968 - DNA, 408 bp, Zea mays
  Clone ID: LIB3061-056-Q1-K1-C4
ccctatctttggtgcagtcattggtacaaaccatcagggcacaacagctgcagcaacgggtgctacctctgatcaaccaagtagctctggcaaacctttctccctactctcagcaacaacaatttcttccattcaaccaactgtctacactgaaccctgctgcttatttgcagcaacaactattaccatttagccagctagctactgcctactctcagcaacaacaacttcttccatttaaccaattggccgcactgaaccccgctgcttatttgcagcagcaaatactactaccatttagccagctagctgcagcaaaccgtgcttccttcttgacacagcaacagttgctgcctttctaccagcagtttgcggctaaccccgcaaccctcttacaactacaacaat

SEQ ID NO: 969 - DNA, 355 bp, Zea mays
  Clone ID: LIB3061-056-Q1-K1-A8
cagcaagcaacatagaaagaggtatccattcgcaacaatatagcaacaatggggaccgggatactttcccttcttatgctccttgctctttctgcatgtgttgctaacgcgactattgtccctcaatgctcacaagctactatagcttcccttctttccccataccttccatcaatgatagcttcagtatgtgaaaacccagctattcaaccctataggctacaacaagcaatcgcagcacgcaacataccatcatcacccttgttacaacaatcgacagccctatctctggtgcagtcattggtacaaaccatcaaggcacagccactgcatgcacttgtgctacctgagatca

SEQ ID NO: 970 - DNA, 264 bp, Zea mays
  Clone ID: LIB3061-056-Q1-K1-A9
aaacgccggcgcaaactctcgcccgagcccgtcagatcttcaattccccattccgcccaccgagcgaccttgacgccagtctcggtctcttccgaaggcgtcgcgcgcggttgtttgagaggagaggaggaagatgagggagtgcatctccgtccacatcgggcaggccggcatccaagtcggcaacgcgtgctgggaactttactgcctcgagcacggcatccagcctgatggccaagtgcctggagataagaaccggggaca

SEQ ID NO: 971 - DNA, 380 bp, Zea mays
  Clone ID: LIB3061-056-Q1-K1-B1
acgcataaaatagctgcacttactatgagtagatctgatacgtccctttttaaagaagctttagggagcttggcacaagattctggtcttcatcctttagttccttacttttcctacttcattgcagacgaggttacccggagtttgggtgatcttcctgttttacttgctctaatgagagtcgtccaaagtcttctccgtaatccacatattcatattgcaccttatttgcaccagctgatgccatcaatgatcacttgcattgttgcgaaaaggctacggcataagctctcagataaccactgggaactttaggacttctctgacaatttggatgccttggtatgtcaaacgcttggtcatgtctatcacacctttaa

SEQ ID NO: 972 - DNA, 376 bp, Zea mays
  Clone ID: LIB3061-056-Q1-K1-B10
ggacgtgagcctagcaattagctcatcgactccagattggagaactcgacaccatgaaggtgcggatcggtgcccttgctctcctggcgctcgctgcgagcgccgcctccagtacaagcggcggctgtggctgccagacaccaccgtttcatctaccgccttcgttctatatgccgcctgcgttctatctgccgccgcagcagcagccgcagccatggcaataccccactcaaccaccgcagctaagcccgtgccagcagttcggatcctgcggcgtcggcagcgtcggcagcccgttcctgggccagtgcgtcgagttcctgaggcaccagtgcaacccggcggcgacgccctacggatcgccacagtgccaagc

SEQ ID NO: 973 - DNA, 61 bp, Zea mays
  Clone ID: LIB3061-056-Q1-K1-B11
cttatgagttatacttcaataataaatctattagaattctgcaactctctatccacatcca

SEQ ID NO: 974 - DNA, 440 bp, Zea mays
  Clone ID: LIB3061-056-Q1-K1-B12
catagaaagcacaatagtgtaccaacaatggcagccaaaatattttgcttccttatgctccttggtctttgtgcaagtgttgctaccgcaaccattttcccacaatgctcacaagctcctatagcttcccttcttcccccatacctctcaccagcggtgtcttcaatgtgtgaaaccccaattgttcaaccctacaggatccaacaggcaatcgcaacaggcatcttaccattatcacccttgttcctccaacaaccgtcagccctattacagcagttacctttggtccatttggtggcacaaaacatcagggcacaacaactacaacaacttgtgctagcaaaccttgctgcatactctcagcaacatcagtttcttccattcaaccaactggctgcattgaactctgctgcttatttgcaacaacaattaccattcag

SEQ ID NO: 975 - DNA, 355 bp, Zea mays
  Clone ID: LIB3061-056-Q1-K1-B2
ggacgtcagcctagcaattagctcatcgactccagattggagaactcgacaccatgagggtgctgatcgttgcccttgctctcctggcgctcgctgcgagcgccgtctccagtacaagcggcggctgtggctgccagacaccaccgtttcatctaccgcctacgttctatatgccgcctccgttctatctgccgccgcagcagcagccgcagccatggcaataccccactcaaccaccgcagctaagcccgtgccagcagttcggatcctgcggcgtcggcagcgtcggcagcccgttcctgggccagtgcgtcgagttcctgaggcaccagtgcagcccggcggcgacgcccta

SEQ ID NO: 976 - DNA, 347 bp, Zea mays
  Clone ID: LIB3061-056-Q1-K1-B3
acgccaaggccaaggagcaccgctccccgtacgtgctcagcaggagagggagagagactgagaaggctgtgcgaagggaagaagacgcggcgggagagaagggcgacatggagaggccggcgcccgtgaggaagtcccacacgtcgacggcggacctgctggtctggccggaaggtgcgccgtaggagttgcccgccgggttcacgcctgcatccaaccggcggccgcaccagtcgtcagaggcgctcatgaaggcggcgttctgcggccaactgacgcatgctgaggccgagagcctcaacacgaggaaaccatgctctgattctgagtggaaggagatgacagga

SEQ ID NO: 977 - DNA, 406 bp, Zea mays
  Clone ID: LIB3061-056-Q1-K1-B4
gtgaaaacccaattcttcaaccctacaggatccaacaggcaatcgcagctggcatctgacctgtatcacccttgttcctgcaacaatcatcagccctattacaacagttacctttggtgcatttattggcacaaaacatcagggcacaacaactacaacaacttgtgctagcaaaccttgctgcctactctcagcaacagcagtttcttccattcaaccaactaggttcattgaactctgcttcttatttgcaacaacaacaactaccattcagccagctacctgctgcctacccccagcaatttcttccattcaaccaactagcagcattgaactctcctgcttatttacagcagcaacaactactaccattcagccagctagctggtgtgagccctgctacctt

SEQ ID NO: 978 - DNA, 402 bp, Zea mays
  Clone ID: LIB3061-056-Q1-K1-B5
ctcagcaacaacagtttcttccattcaaccaactagctgcattgaactctgcttctggtttgcaacaacaacaactaccattcagccagctatctgctgcctacccccagcaatttcttccattcaaccaactgacagctttgaactctcctgcttatttacagcagcaacaactactaccattcagccagctagctggtgtgagccctgctaccttcttgacacaaccacaattgttgccgttctaccagcacgctgcgcctaacgctggcaccctcttacaactgcaacaattgctgccattcaaccaacttgctttgacaaacccaacagcattctaccaacaacccatcattggtggtgccctcttttagatttcttatgagctatagttcaataata

SEQ ID NO: 979 - DNA, 350 bp, Zea mays
  Clone ID: LIB3061-056-Q1-K1-B6
aggtggtctcatgggacactttgccgtctacaagacgtacgaggtgctggccgcacagttcttttggccccagatgcgccgtgatgtcgagcgccttgttgcacgctgcactacttgtcagaaagccaagtcacgattgagcaaccatggtttgtatatgcctttgcctatccctacgttcccttggcttgatatttctatggacttcgttttgggtttgcctagaactaagaaggggagagatagcattattgtggttgttgatagattctccaaaatggctcattttataccctgtcataaaactgatgatgctagcaaggttgctgaattgttctttcgagagaata

SEQ ID NO: 980 - DNA, 409 bp, Zea mays
  Clone ID: LIB3061-056-Q1-K1-B7
gggcttcgcacgccggctcttggtacaccaacgatgccaggaagctggaagaggaacgcaatggttggctgggggcagccggtctaaccaagtctcctgatgttagggcagtaattgcaccccacgctggttattcatactcgggccgatgtgcagcttatgcttttggcaacatcgatccaactaacatttctcgggtgtttctgcttggcccttctcatcactactacactccaaaatgtgctttaaccagggcttctgtctactgtaccccaatcggggatttgccagtagaccaggaagtcattgaggaactcagtgctactggaaagtttgaatttatggaccttaatgtggatgaagctgaacatagcatggaaatgcatttgcccctacttgctaaagtatt

SEQ ID NO: 981 - DNA, 278 bp, Zea mays
  Clone ID: LIB3061-056-Q1-K1-B8
gggcagcaatcattgactatagtgctagaatcggagacagtgttctgatacaggatggtgacgatggtctggaggctgcactggtaaccgactgttactatattaaaggagtaattgtaacagagactaatgatgcataattggctagaggaacagttatatctagtgaacgtatgacatgcacttacatgtctcgacagtcgacaatgatcagtacttgtctatatgacagttctgcatatgattcagccagagatcatgtgtactgtacccgagtc

SEQ ID NO: 982 - DNA, 233 bp, Zea mays
  Clone ID: LIB3061-056-Q1-K1-B9
ctccgacacgggccgggacttctcggactgcaggcagccaggcacgcaccagcaacaccccccggccgccggctcggagcggggccccacccgaatcacacagatcgggacgccggaggaggagcaacgccgtcccgcatcaccggagcaacgcgggcgcggagaggccagccagcgcaggcgcagttcaagctttggattcccggatcccacaccaccgggctctctcgggg

SEQ ID NO: 983 - DNA, 175 bp, Zea mays
  Clone ID: LIB3061-056-Q1-K1-C1
acgctcagctgaagcgcgacaagcatgcgtataggtcatgcctgagcagcggataatattgacacgcctcttattctctggagcttgcttactgtgtaagtcttcagatattcttctagattgtgtgcctagaacgcattgcccccattattagtactgacttgtgagcatatgt

SEQ ID NO: 984 - DNA, 165 bp, Zea mays
  Clone ID: LIB3061-056-Q1-K1-C10
attctccgttcgacccactcgtccacccacacgtcctcacccttctaccaccctattatcattccattcacacaccttgtgactccataggcaagtttcatctttcacctggggctcatacactcacatctgctcacacctctcattatgatataccttctctac

SEQ ID NO: 985 - DNA, 323 bp, Zea mays
  Clone ID: LIB3061-056-Q1-K1-C11
tgcgctgtttgcgagcgcaacaaatgcgttcattattccacaatgctcacttgctccaagttccagtattgcacagttcctgccaccagttacttcaatgggcttcgaacacccagctgtgcaagcctataggctacaacaagcaattgcggcgagcgtcttacaacaaccaatttcccagttgcaacaacaatccttggcacatctaacaatacaaaccatcgcaacgcaacagcaacaacaatttctaccagcactgagccacctagccatggtgaacccttgcgcctacttgcaacagcagttgcttgcatcaaacccac

SEQ ID NO: 986 - DNA, 420 bp, Zea mays
  Clone ID: LIB3061-056-Q1-K1-C2
gctgcctactctcagcaacagcagtttcttccattcaaccaactagctgcattgaacgctgcgtcttatttgcaacagcgacaactaccattcagccagctacctgttgcctacccccaacaatttcttccattcaaccaactggcagcattgaactctcctgcttatttacagcagcaacaactactaccattcagccagctagctggtgtgagccctgctaccttcttgacacaaccacagttgttgccgttctaccagcacgctgcgcctaacgctggcaccctcttacaactgcaacaattgctgccattcaaccaacttgctttgacaaacctagcagtgttctaccaacaacccatcattggtggtgccctctttttagatttcttatgagttatagttcaataataaagtttt

SEQ ID NO: 987 - DNA, 424 bp, Zea mays
  Clone ID: LIB3061-056-Q1-K1-A7
ggcacaataaagaagtacgagttcgatgtgcaaaacaaggtttcagtaaactggctcgtaaaccttggcccttcactgggcattgtccgcgttcgaggcattgggctaatacatacagaactaatgtctggaatcccagctatcttctcccactttgtcaccaatctgcctgcgttccaccaggtactggtattcctatgtgtcaaatcagttcctgtgccacatgtgcaaccggaggaacgatttctggtgggtcgcattggtccaaaagagtataggctatacagggtcattgtcagatatggttatcgcgatgtgcagaatgatgacctgcagttcgagaaggagctagtcagcaacattgcaaagttcatccgcagcaatggggattatgacaagaatggcttcctggaggacacagata

SEQ ID NO: 988 - DNA, 383 bp, Zea mays
  Clone ID: LIB3061-056-Q1-K1-C3
ctaaccctgactgggttgttgtattaatatatacttaagtacatgggctgggccaaggcccattataacacatgatctgacatatatgacagtgctagcttattccattttttcatacaagcatcacatgccaataagctataggcctatagccttggaggttgtcgaaatgtcattttttggcattcatagaaggcgttagagtctaggctttgaaagttactggaggacttgcaactcgattacttacttaacagggttaaaaattgaaggtcaaaatagcacatagtgccttcagcaaatggtgtgtgtaccatggaggtaaaataatgacaagggggagaatctagatggacatctggattgggtcctttggactacta

SEQ ID NO: 989 - DNA, 421 bp, Zea mays
  Clone ID: LIB3061-055-Q1-K1-H2
atcagcctggacggatcgcacccggcactactgttcggctacggcggcttcggcgtgagcgtgacgccgcagttcagcgtcgcccgcgtggtcctgatgaggaacctggggttcgtggcgtgcgtcgccaacctcaggggcggcggggagtacggcgagggctggcacagggccgggtcgctcgccaagaagcagaactgcttcgacgacttcgtcgccgccgccgagttcctcgtgtccgctggctacaccagccccgcgaggctgtgcgtcgagggcggcagcaacgggggcctcctggtagctgcctgcgtgaaccagcgccctgatctgtttggctgtgccctggcccatgtcggagtgatggacatgctacggttccacaagttcaccattggtcgtgcatggacatgcgacttcg

SEQ ID NO: 990 - DNA, 360 bp, Zea mays
  Clone ID: LIB3061-055-Q1-K1-H3
tatgctgggtgtggtcttaccacatatgctgctacctatacaattttccctcaatgctaacaagctcctatagcttcccttattcccccataccttctatcaatcatagcttaagtatgtgaaaacccaattcttaacccctataagatccaacctgaaatcaaagcaagcaccatacctttaacacctttgtactttaaaaaacctcgagccctataatttaagcacccttgggtacaatccatttccacacattatctacaaaaaatcatgctccctctgatcaaccattcacatctgtcaaccctctctacctactatgagcacccatctttttcttgcatccaaaaaactgtctac

SEQ ID NO: 991 - DNA, 441 bp, Zea mays
  Clone ID: LIB3061-055-Q1-K1-H4
agccacgcgtcacgcgtagatcgcgagggccgccctttttttttttttttacacccagcgcacaagccaaagtattgaagcaaacaaggacataagtagaagacggtaagagtgcatgcatgaaacattaattctactcatgatcgaccacgacacacaacaattgagcacgcatgcaagctgtttttttattcagaagatcccgaggagcggggacgacgacgacgtcctgctgctcctgcatgcatgtagtcctctacgcacgacggcggtcgccgcagctcggcgcgggctcctcctcctcctcggcggccgggccggcgacgaggtgctcgtagacgacgccggagaggccggcgccgaccatgggccccacccagtacacccattggtgtctccagcgacgggagcccacgacggcgggcccgaacgcgcgcgccg

SEQ ID NO: 992 - DNA, 251 bp, Zea mays
  Clone ID: LIB3061-055-Q1-K1-H5
attgagaccaactagcaacatagaaagcacaatagtgtaccaacaatggcagccaaagattttgcctccttatgctccgtggtctttctgcaagtgctgctacggcgaccattttcccgcaatgctcgcaagctcctatagcttcccttcttcccccgtacctctcaccagcggtgtcttcggtatgtgaaaacccaattcttcaaccctacaggatccaacaggcaatcacagctggcatcttaccttta

SEQ ID NO: 993 - DNA, 423 bp, Zea mays
  Clone ID: LIB3061-055-Q1-K1-H8
gtccgaagccattgttggacgcgttcccctcctgcacgcaacctcatctcgtcctgcagatcgtggatggccgtcctccttgataccttgcctcgcgagtgctctcggtgagctactttgttttgatttatcaggaaatccgtttgcttcatgttatgcaggctcagatctgattgctggattcggcatcttacgggcttgaatagagctaggactgggagaaaacaacaaacccgcgttggatcctgtatcggttagtccttgccttcaaggttcatgttgttttgttttggtggtcgagcatcgcatgttctgcttctggttccagatctggagaaatttctaagtcgtcgtcgtcgtcgtcgttcggttcggagcggatctgaggcgacgatggctggaggcggcgggatctcttggtct

SEQ ID NO: 994 - DNA, 436 bp, Zea mays
  Clone ID: LIB3061-055-Q1-K1-H9
gaatacagtagcaaaaatagagcaacaatggcggccaagatattttccatccttatggtccttgctctttctgcatgtgttgctaacgcgaccatttttcctcaatactcacaagctcctatagctgcccttcttcccccataccttccatcaatgaccgctttagtatgtgaaaacccagcccttcaaccctacaggatccagcaagcaatcgcaacaagcaacttacctttatcacacctgttctttcaacaatcgccagccctatctttggtgcagtcattggtacaaaccatcagggcagaacagttgcagcaactcgtgctaccagtgatcagccaagtagctctggcaaacctttccccctactctcagcaacaacaatttcttccattcaaccaactgtctatactgaaccctgctgcttatttgcagc

SEQ ID NO: 995 - DNA, 338 bp, Zea mays
  Clone ID: LIB3061-056-Q1-K1-A1
cacaccaagcgaagcacattagcaacatcctaacaacaatggctaccaagatattatcgctcggtgcgcttcttgcgctgtttgcgagcgcaacaaatgcgttcattattccacaatgctcacttgctccaagttccattattacacagttcctcccaccagttacttcaatgggcttcgaacacccagctgtgcaagcctataggctacaacaagcaattgcggcgagcgtcttacaacaaccaattttccagttgcaacaacaatccttggcacatctaacaatacaaaccatcgcaacgcaacagcatcaacaattcctaccagcactgagccac

SEQ ID NO: 996 - DNA, 286 bp, Zea mays
  Clone ID: LIB3061-056-Q1-K1-A10
cagcaagcatcatataatgtccagtccattttcaacactagagcagcagtggcgaccaagatagtggccgtgcttatgctccatgcggtctctacatgtgatgctcacgcgacaattctccactaatgctcacacgctcctatagctactgttattaccccataccttccatcattaatagcttcagtatgtgataacccatctcttcaaccatataggcgttaacatgcattctcagctagcaacatacctttatcgcccttgtaagctcaacaatcaccaaccc

SEQ ID NO: 997 - DNA, 272 bp, Zea mays
  Clone ID: LIB3061-056-Q1-K1-A11
caacaagcatcatataatgccgaatccattttcaacattagaacaacaatggcgaccaagatagggcccgtgcttatactccatgcggcttctacatgcgatgctcactcgacacttatccctcaatgctcacaagctcctatagcttctcttattcccccataccttacatcaatgatagcttcactatatgaaaaccctgctcttcatccctataggcttcaacacgcaatcgcagcaagcaacatacctttatcacacttgtcatatca

SEQ ID NO: 998 - DNA, 453 bp, Zea mays
  Clone ID: LIB3061-056-Q1-K1-A12
gcaacatagaaagcacaatagtgtaccaacaatggcagccaaaatattttgcttccttatgctccttggtctttctgcaagtgctgctaccgcaaccattttgccacaatgctcacaagctcctatagcttcctttcttcccccatacctctcaccagcggtgtcttcagtatgtgaaaacccaattcttcaaccctacaggatccaacaggcaatcgcagcaggcatcttacctttatcacccttgttcctccaacaaccgtcagccctattacagcagttacctttggtgcatttgttggcacaaaacatcaaggcacaacaactacaacaacttgtgctaggaaaccttgctgcctactctcagcaacagcagtttcttccattcaaccaactggctgcattgaactctgctgcttatttgcaacaacaactaccattcagtcagctagc

SEQ ID NO: 999 - DNA, 393 bp, Zea mays
  Clone ID: LIB3061-056-Q1-K1-A2
gagaccaacaagcaacatagaaagtggaatacagtagcaacaatagagcaacaatggcggccgatatattttccatccttatgctccttgctctttctgcatgtgttgctaacgcgaccatttttcctcaatactcacaagctcctatagctgcccttcttcccccataccttccatcaatgaccgcttcagtttgtgaaaacccagcccttcaaccctacaggctccaacaagcaatcgcaacaagcaacttacctttatcacccctgttctttcaacaatcgccagccctatctttggtgcagtcattggtacaaaccatcagggcacaacagctgcaacaactcgtgctaccagtgatcagccaagtagctctggcaaacctttctccct

SEQ ID NO: 1000 - DNA, 386 bp, Zea mays
  unsure (1)..(386): unsure at all n locations; Clone ID: LIB3061-056-Q1-K1-A3
tcgacccacgcgtacgcatctatcagcttaatgtcatcatcatgattaatgtggacttatctagactgtttttggatagagtagtagttagtgatttctgaaccgactatcatcactgcaatctttcatgttctttttatttagtctcactttgctcctttttcattaatggtttattcgtggacattttcaacttctaccatcaaaccttctgaagttggaactttatgttctattcaattattttacccataaaaagaacttggatttattttataccttttatctctactactacttaagtgtctattgtaggcgtccacaaagacggatggtgcacggttctgccggttccgcatnccgccggattgggatgatttcggcat

SEQ ID NO: 1001 - DNA, 435 bp, Zea mays
  Clone ID: LIB3061-056-Q1-K1-A4
gtggcaacaatagagcaacaatggcgaccaagatactttccctccttatgctccttgctctttctgcatgtgttgctaacgcgacaattttccctcaatgctcacaagctcctatagcttcccttcttcccccataccttccatcaatgatagcttcagtatgtgaaaacccagctcttcaaccctataggctccaacaagcaatcgcagcaagcaacatacctttatcacccttgtttcaacaatcgccagccctatctttggtgcagtcattggtacaaaccatcaaggcacagcagctgcagcaactcgtgctacctgtgatcaaccaagtagctctggcaaacctttctccctactatcagcaacaacaatttcttccattcaaccaactatctacactgaaccctgctgctaattgcagcaacaactata

SEQ ID NO: 1002 - DNA, 420 bp, Zea mays
  unsure (1)..(420): unsure at all n locations; Clone ID: LIB3061-056-Q1-K1-A5
ccagactagcaacatagaaagcacaatagtgtaccaacaatggcagctaaaatattttgcctccttatgctccttggtctttctgcaagtgctgctacggcgaccattttcccacaatgctcacaagctcctatagcttcccttcttcccccgtacctctcaccaacggtgtcttcggtatgtgaaaacccaattcttcaaccctacaggatccaacaggcaatcgcaactggcattttacctttatcacccttgttccttcaacaatcatcaagcctattacagcagttaactttggtgcattaattgcacaaaacatcanggcacaacaactacaacaacttgtgctagcaaaccttgctgcctactctcagcaacagcagtttcttccattcaaccaactagctgcattgaactctg

SEQ ID NO: 1003 - DNA, 440 bp, Zea mays
  Clone ID: LIB3061-056-Q1-K1-A6
cgtacgcaggatccaacaggcaatcgcagctggcatcttacctttatcacccttgttcgtccagcaatcatcagccctattacaacagttacctttggtgcatttattggcacaaaacatcagggcacaacaactacaacaacttgtgctagcaaaccttgctgcctactctcagcaacagcagtttcttccattcaaccaactaggttcattgaactctgcttcttatttgcaacaacaacaactaccattcagccagctacctgctgcctacccccagcaatttcttccattcaaccaactagcagcattgaactctcctgcttatttacagcagcaacaactactaccattcagccagctagctggtgtgagccctgctaccttcttgacacaaccacagttgttgccgttctaccagcacgttgcgcctaacgctg

SEQ ID NO: 1004 - DNA, 415 bp, Zea mays
  unsure (1)..(415): unsure at all n locations; Clone ID: LIB3061-055-Q1-K1-H12
gcattattccacagttcctccctccagttacttcaatgggcttcgaacacccagctgtgcaagcctacaggctacaacaagcgcttgcggcgagcgtcttacaacaaccaattgcccaattacaacaacaatccttggcacatctaaccatacaaaccatcgcaacgcaacagcaacaacaatttctaccagcactgagccaactagctgtggtgaaccctgtcgcctacttgcaacagcagttgcttgcatccaacccacttgctctggcaaacatagttgcataccaacaacaacaacaattgcaacagtttctaccagcgctcagtcaactagccatggtgaaccctgccgnctacctacaacagcaacaactgatttcatctagccctctcgctgnggttaatgcacctac

SEQ ID NO: 1005 - DNA, 310 bp, Zea mays
  Clone ID: LIB3061-055-Q1-K1-F9
ctaccagacaacagtcaccggcacgcagacgctcagcaagagccaacaggacatcgtggctcagcaagaaacaaggggggcaataatggcggagtaccagggcgagtatggacacccgtacccgcgcgtcgaccagtacgggaaccccgtgccgccggtggaccagtacggcaacccgctcccgagggagccggcgtccggtttcggcgccatcgctcccccctacagcgctggcgacagcgccgcggggcacgtggcggcgcctgtcgagtacggtgccgacgccaagtattcgcacgatggcacgggg

SEQ ID NO: 1006 - DNA, 427 bp, Zea mays
  Clone ID: LIB3061-055-Q1-K1-G1
cagcctagcaattagctcatcgactccagattggagaactcgacaccatgaaggtgcggatcgttgcccttgctctcctggcgctcgctgcgagcgccgcctccagtacaagcggcggctgtggctgccagacaccaccgtttcatctaccgcctccgttctatatgccgcctccgttctatctgccgccgcagcagcagccgcagccatggcaataccccactcaaccaccgcagctaagcccgtgccagcagttcggatcctgcggcgtcggcagcgtcggcagcccgttcctgggccagtgcgtcgagttcctgaggcaccagtgcagcccggcggcgacgccctacggctcgccacagtgccaggcgctgcagcagcagtgctgccaccagatcatgcaagtggagccgctgcaccggtacca

SEQ ID NO: 1007 - DNA, 303 bp, Zea mays
  Clone ID: LIB3061-055-Q1-K1-G10
gggtgctgaaggttctcctgcaagatgcatcctcatcaagtgacatgggatggtgtgaggacccaataatatggagctgggctagtgctgatccaatcgacactaatatgagctgaagatactacataaaacatgaacaatatggagttttatatactggaccccagtccaggttttaaatccacccctgcaaggggtgagtttatgtttgtgtttgggagtgtatatttctatattgcaatttgaaaaaaaactatgtatgtaataaaataagaatacatcaattcattcacatgacaattg

SEQ ID NO: 1008 - DNA, 437 bp, Zea mays
  Clone ID: LIB3061-055-Q1-K1-G11
cagcaagcaacatagaaagaggaatccaatagcaacaatatagcaacaatggggacggggacattttcccttcttatgctccttgctctttctacatgtgttgctaacgcgacaattttaccttactgctcacaagctcctatagcttcccttcttcctccataccttccatcaattatagctccaatatgtgaaaacccagctcttcaaccatataggcttcaacaagcaatcgcagcaagcaacatacctttatcggccttggtggttcaacaatcgccagccctatctttggtgcagtcattggtacaaaccatcagggcacaacagctgcagcaactcgtgctacctgtgatcaaccaagtagctctggcaaaccttactccctactctcagcaacaacaatttcttgcattcaaccaactttctacactgaa

SEQ ID NO: 1009 - DNA, 432 bp, Zea mays
  Clone ID: LIB3061-055-Q1-K1-G12
attgagaccaactagcaacatagaaagcacaatagtgtaccaacaatggcagccagggtattttgcctccttatgctccttggtctttctgcaagtgctgctacggcgaccattttcccgcaatgctcgcaagctcctatagcttcccttcttcccccgtacctctcaccagcggtgtcttcggtatgtgaaaacccaattcttcaaccctacaggatccaacaggcaatcacagctggcatcttacctttatcacccttgttcctccaacaatcatcagccctattacatcagttacctttggtgcatttattggcacaaaacatcagggcacaacaactacaacaacttgtgctagcaaaccttgctgcctactctcagcaacagcagtttcttccattcaaccaactagctgcattgaactctgcttct

SEQ ID NO: 1010 - DNA, 424 bp, Zea mays
  Clone ID: LIB3061-055-Q1-K1-G2
aagatattagccctccttgcgcttcttgccctttttgtgagcgcaacaaatgcgttcgttatggcacaatgctcacttgctcctagtgccattattccacagttcctcccaccagttacttcaatgggcttcgaacacctagctgtgcaagccaacatgcaacaacaagcgcttgcggcgagcgtcttacaacaaccaattgcccaattgcaacaacaatccttgccacatctaacaatacaagccatcacaacgcaacagcaacaacagttcctaccagcactgagccacctagccatggtgaaccctgccgcctacttgcaagagcagctgcttgcatccaacccacttgctctggcgaacgtagttgcaaaccagcaacaacaacagctacaacagtttctgccaacgctcagtcaactag

SEQ ID NO: 1011 - DNA, 237 bp, Zea mays
  Clone ID: LIB3061-055-Q1-K1-G3
atgcggaggaggaggatgaggactgatccgacttcggagaggatgacaggaaaaaggggtagtgatcaacgttcttgggcaagaaggtggcaatgtcgtgaagcgaacttgaactggaaacggatggacaagtatatttagagttcgatgtggtgttaacggatcgggtgtctgtcttagatgatataaaatacattatttttagtccaatttaatcattgtccaatttgcctaaaa

SEQ ID NO: 1012 - DNA, 426 bp, Zea mays
  Clone ID: LIB3061-055-Q1-K1-G4
gaccaactagcaacatagaaagcacaatagtgtaccaacaatggcagctaaaatattgtgcctgcttatgctccttggtctttctgcaagtgctgctacggcgaccattttcccacaatgctcacaagctcctatagcttcccttcttcccccgtacctctcaccaacggtgtcttcggtatgtgaaaacccaattcttcaaccctacaggatccaacaggcaatcgcagctggcatcttacctttatcacccttgttcctccaacaatcatcagccctattacagcagttacctttggtgcatttattggcacaaaacatcagggcacaacaactacaacaacttgtgctagcaaaccttgctgcctactctcagcaacagcagtttcttccattcaaccaactagctgcattgaactctgcttc

SEQ ID NO: 1013 - DNA, 423 bp, Zea mays
  unsure (1)..(423): unsure at all n locations; Clone ID: LIB3061-055-Q1-K1-G5
ctccttggtctttctgcaagtgctgctaccgcaaccattttcccacaatgctcacaagctcctatagcttcctttgttgccccatacctctcaccagcggtgtcttcagtatgtgaaaacccaattcttcaaccctacaggatccaacaggcaatcgcagcaggcatcttacctttatcacccttgttcctccaacaaccgtcagccctattacagcagttacctttggtgcatttgttggcacaaaacatcaaggcacaacaactacaacaacttgtgctaggaaaccttgctgcctactctcagcaacagcagtttcttccattcaaccaactggctgcattgaactctgctgcttatttgcaacaacaactaccattcagtcagctagctgctgcctacccncagcaatttcttccattc

SEQ ID NO: 1014 - DNA, 435 bp, Zea mays
  Clone ID: LIB3061-055-Q1-K1-G6
cctgccacctccggtgcatctcccaccgccggtccacctgccgccgccggggcaccgggcaccgccggtccatgtgccgccgccggttcatctgccgccgccaccatgccactaccctactcaaccgccccggcctcagcctcatccccagccacacccatgcccgtgccaacagccgcatccaagcccgtgccagctgcagggaacctgcggcgttggcagcaccccgatcctgggccagtgcgtcgagtttctgaggcatcagtgcagcccgacggcgacgccctactgctcgcctcagtgccagtcgttgcggcagcagtgttgccagcagctcaggcaggtggagccgcagcaccggtaccaggcgatcttcggcttggtcctccagtccatcctgcagcagcagccgcaaagcggccaggtcgcggtgct

SEQ ID NO: 1015 - DNA, 396 bp, Zea mays
  unsure (1)..(396): unsure at all n locations; Clone ID: LIB3061-055-Q1-K1-G7
cagcggatcaagggcctgtccatcagccgcgacctgctggaggtgggcggccacgcgcgtcaagaccaacatcaccacgctggggcccctggtgctgcccttctccgagcagctgctcttcttcgcgggcgtgctgttccgccacctgttcccgtccaaggcctccacgccggcgccgccgaccaccccaggggacgcctcggccgccgcgccctacatcccggacttcaagcgcgcgttcgagcacttctgcatgcacgcggccagccgcgacgtgctggagcacctgcagagcaacctgngcctgcgcgacgccgacctggaggcctcccgcgccgcgctgcaccgcttcggcaacacctcaagcagcagcatctggtacgagctggcgtacct

SEQ ID NO: 1016 - DNA, 468 bp, Zea mays
  Clone ID: LIB3061-055-Q1-K1-G8
cggaattcggaatgcccggcttctgagttcatggattcaagtcctctaattcatgataaagaatcatgttctcctctagaacctgaggactcggttaatgaagataattttgcagctgtgctttcacaatatagcgatggccccaacgaaggaaatgaaggatatggagaaagtggacattacaagcatgaagaaaaatctctagatgaatcagtgggatcactaaccattggcattattgattctgagttcatggattcaagtcgtccaattcatgataaagaatcatgttctactggttctgcagctgaccaatgttcaaggactataccggctaaatatgaattaagttcagaagagtcagattccacaggcagtcatttggtgtttgacagtggcaagaattatctggagttgaacaatcattctgtcacagatttggaaaggatttacgatggacatgccacg

SEQ ID NO: 1017 - DNA, 433 bp, Zea mays
  Clone ID: LIB3061-055-Q1-K1-G9
attgagaccaactagcaacatagaaagcacaatagtgtaccaacaatggcagccaaagtattttgcttccttatgctccttggtctttctgcaagtgttgctaccgcaaccattttcccacaatgctcacaagctcctatagcttcccttcttcccccatacctctcaccagcggtgtcttcaatgtgtgaaaccccaattgttcaaccctacaggatccaacaggcaatcgcaacaggcatcttaccattatcacccttgttcctccaacaaccgtcagccctattacagcagttacctttggtccatttggtggcacaaaacatcagggcacaacaactacaacaacttgtgctagcaaaccttgctgcatactctcagcaacatcagtttcttccattcaaccaactggctgcattgaactctgctgctt

SEQ ID NO: 1018 - DNA, 408 bp, Zea mays
  Clone ID: LIB3061-055-Q1-K1-H1
tccattcaaccaactaggttcattgaactctgctggttatgtgcaacaacaacaactaccattcagccagctacctgctgcctacccccagcaatttcttccattcaaccaactagcagcattgaactctcctgcttatttacagcagcaacaactactaccattcagccagctagctggtgtgagccctgctaccttcttgacacaaccacagttgttgccgttctaccagcacgttgcgcctaacgctggcaccctcttacaactgcaacaattgctgccattcaaccaacttgctttgacaaacccagcagtgttctaccaacaacccatcattggtggtgccctcttttagatttcttatgagttatagttcaataataaagttttttatctgatgtttgtggc

SEQ ID NO: 1019 - DNA, 436 bp, Zea mays
  Clone ID: LIB3061-055-Q1-K1-H10
atgagcaacacgtacaaacacaccaagcgaagcacattagcaacaacctaacaacaatggctaccaggatatgatccctgcttgcgctgcttgcgctttttgcgagcgcaacaaatgcgttcattattccacaatgctcacttgctccaagttccattattacacagttcctcccaccagttacttcaatgggcttcgaacacccagctgtgcaagcctataggctacaacaagcaattgctgagagcgtcttacaacaaccaatttcccagttgcaacaacaatccttggcacatctaacaatacaaaccatcgcaacgcaacagcaacaacaattcctaccagcactgagccacctagccatggtgaaccctgccgcctacttgcaacagcagctgcttgcatcaaacccacttgctctggcaaacgtagttgc

SEQ ID NO: 1020 - DNA, 346 bp, Zea mays
  Clone ID: LIB3061-055-Q1-K1-H11
acgtaacaacaaactaagcacattcaacactcaacaatcacagacaatatatatgtactgtttatgcttgcgcgtggcccgctcttcacgtgctcataccactatcatactataatactactctcatactataacatctctattaccacccatctactcaccaccaactacgtaatatattttacaacacaattcttcaccactacatcatccaccacgagataacatctagcttaatatcaccattaccattgttcatcctccaatcaacatcaatactacaacagcttccttcacttcagcatattatcacttaacatcactgcacatcatctacaacaactta

SEQ ID NO: 1021 - DNA, 265 bp, Zea mays
  Clone ID: LIB3061-055-Q1-K1-F8
gtagcttcgatccattgctgactgttcactggcgctcaactagtgctgctgctgatgagcctagctagctaggcggtgttgtgatctattcgttaattaaatgatgtttttttttgctgttctcctggggtggcctacatgccaatgcatgtgtgtgttttcaggagaccagctgtggcgtggcagtcagtacaatggccgacctgccatgatgtaacatctctctgtacaatgtaccttttcgtttgttggattttctcctgct

SEQ ID NO: 1022 - DNA, 257 bp, Zea mays
  Clone ID: LIB3061-055-Q1-K1-E3
gtgctacctgtgatcaaccaagtagctctggcaaacctttctccctactctcagcaacgacaagttcttccattcaaccaactgtctacactgaaccctgctgcttatttgcagcaacaactattaccattcagccagctagctactgcctactctcagcaacaacaacttcttccatttaaccaattggccgcactgaaccccgctgcttatttgcagcagcaaatactactaccatttagccagctagctgcagc

SEQ ID NO: 1023 - DNA, 430 bp, Zea mays
  unsure (1)..(430): unsure at all n locations; Clone ID: LIB3061-055-Q1-K1-E5
gccattgccatctactgacctgtgacctccgcatttccaaacagcccgagcgagctggagctagcagagcggcaggcacctccctcctcaaggaacatggcccgcacgcagcagttggcagtagtggcgaccgccgtggtggccttggtgctgctggcggcggcggcgacctcggaggcggccatcagctgcgggcaggtggcgtcggccatcgcgccctgcatctcctacgcgcgcggccagggctcggggccctccgccggctgctgcagcggcgtcaggagcctcaacaacgccgtccgcaccaccgccgaccgccgcgccgcctgcaactgcctcaagaacgccgccgccggcgtcagcggcctcaacgccggcaacgccgncagcatccnctccaagtgcggcgtcagcatcccctacaccatca

SEQ ID NO: 1024 - DNA, 426 bp, Zea mays
  unsure (1)..(426): unsure at all n locations; Clone ID: LIB3061-055-Q1-K1-E6
ccggacgctcgctctcgccggggacaactcaatcacgaggccaggatggccggctaggatcgcgcgatcaccgtgttctcacccgacggccacctcttccaggtcgagtacgccctcgaggccgtccgcaagggcaacgccgctgtcggcgtccgcggcgtcgacaccgtcgtcctcggcgtcgagaagaagtccacccccaagctccaggactccaggtccgtgcgcaagatcgcgagcctggacacccacatcgcgctggcgtgcgcggagctcaaggccgacgcgcgcgtgctcatcaaccgcgctcgcgtggagtgccagagccaccgcctcacagtcgaggaccccgtcaccgtcgagtacatcacgcgctacatcgncggcctgcagcagaagtacacgccagagcggagggtgcgcccc

SEQ ID NO: 1025 - DNA, 413 bp, Zea mays
  Clone ID: LIB3061-055-Q1-K1-E7
attgaactctgctgcttatttgcaacaacaactaccattcagtcagctagctgctgggtacccccagcaatttcttccattcaaccaactggcagcattgaactctgctgcttatttacaacagcaacagctaccaccattcagccagctagctgatgtgagccctgttgccttcttgacacaacaacagttgttgccgttctacctgcacgctgcgcctaacgctggcaccctcttacaactgcaacaattgctgccattcaaccaacttgctttgacaaacccaacagcgttctaccaacaacccatcattggtggtgccctcttttagattgcttatgagttatacttcaataatgaagttttttggatgatgtttgtggcttcccagacataagaaagtacatttctag

SEQ ID NO: 1026 - DNA, 257 bp, Zea mays
  Clone ID: LIB3061-055-Q1-K1-E8
gtcgtgcttccttcttgacacagcaacagttgctgcctttctacaagcagtttgcgggtaaccccgcaaccctcttacaactacaacaattgttgccctttgtccaacttgctttgacaaacccagcagcctcctaccaacaacacatcattggtggtgccctcttttagattgattattagttgtaattcaataataaagttttttggatgatgtatgtggccaaccagaaataagaagttacatttccagattct

SEQ ID NO: 1027 - DNA, 264 bp, Zea mays
  Clone ID: LIB3061-055-Q1-K1-E9
attgagaccaacaagcaacatagaaagtggaatccagtagcaacaatagagcaacaatggcgaccaagatattttccctccttatgctccttgctctttctacatgtgttgctaacgcgacaattttccctcaatgctcacaagctcctatagcttcccttcttcccccataccttccatcaattatagcttcaatatgtgaaaacccagctcttcaaccatataggcttcaacaagcaatcgcaagcaagcaacataccttta

SEQ ID NO: 1028 - DNA, 436 bp, Zea mays
  Clone ID: LIB3061-055-Q1-K1-F1
cgttgatctagcccgctcgctatgggcaatgcacctacatacctgcaacaacagttgttgcaacaacagttgctgcaacaaattgtaccagctcttactcagctagctgtggcaaaccctgctgcctacttgcaacaactacttccattcaaccaactgactgtgtcgaactctgctgcgtacctacaacagcgacaacagttacttaatccactagcggtggctaacccattggtcgctgccttcctacagcagcaacaattgctgccatacaaccagttctctttgatgaaccctgccttgtcgtggcagcaacccatcgttggtggtgccatcttttagattacatatgagatgtactcgataatggtgccctcatagcggcatgtgtttcctaaaaataatcaatatattgattgagatttatctcgatata

SEQ ID NO: 1029 - DNA, 340 bp, Zea mays
  Clone ID: LIB3061-055-Q1-K1-F10
caacatacatagtgaagtacactagcaacatcttagcaccaatggcagccaagattggtgcgctccttgccctccttgctctttcagcaagtgttgctaccgcgactattattccacaatgctcacaacaatacctctctccagtgatagccgcgagatttgaatacccatctatacaatcctacaggctacaagaggccatcacagcaagcatcttacggtcgttagcattgaccgtccaacaaccatatgccctattgcaacaaccatccttagtgaatctgtatctccaaagaatcacagcacaacaactacaacaacggttgcttccaacaattaa

SEQ ID NO: 1030 - DNA, 436 bp, Zea mays
  Clone ID: LIB3061-055-Q1-K1-F11
ggcgagaggcgtcataaggagaacgtttcttgccgacacgagcggcgggaactccggggagcttgccgtggaggttctctgcccggtgttccgcccggcggcgtttggctcatcgtcgtcacagccagcagcaaaggacatcagctccaccgtcgtcgtcaccaaggtcggagtgtggggtggagagggagggtcggcgcaggacatcgcgacgacggagccgccgaggcgtctgcagagcctgaccgtccgcgccggcgttgccgtggactccatcgagttcacctacagtaccgacacaggtggtcagacgcgcaccgctgggcgatggggtggacttggcggcaacgtccggaagctcgatcttggcgacgctgaatacgtcaaggaagtttctggaacgtacggcgcattcgaaggtgcgactacccttacc

SEQ ID NO: 1031 - DNA, 318 bp, Zea mays
  unsure (1)..(318): unsure at all n locations; Clone ID: LIB3061-055-Q1-K1-F2
atagaaagcacaatagtgtaccaacaatggcagccaaaatattttgcctccttatgcgccttggtctttctgcaagtgctgctacggcgaccattttcccgcaatgctcgcaagctcctatagcttcccttcttcccccgtacctctcaccagcggtgtcttcggtatgtgaaaacccaattcttcaaccctacaggatccaacaggcaatcgcagctggcatcttacctttatcacccttgttcctccaacaatcatcagccctattacaacagttacctttggtgcatttattggcacaaaacatcanggcacaac

SEQ ID NO: 1032 - DNA, 429 bp, Zea mays
  Clone ID: LIB3061-055-Q1-K1-F3
cagccaagtagctctggcaaacctttctccctactctcagcaacaacaattggttccgttcaaccaactgtctacactgaaccctgctgcttatttgcagcaacaactattaccattcagccagctagctactgcctactctcagcaacaacaacttcttccatttaaccaattggccgcactgaaccccgctgcttatttgcagcagcaaatactactaccatttagccagctagctgcagcaaaccgtgcttccttcttgacacagcaacagttgctgcctttctaccagcagtttgcggctaaccccgcaaccctcttacaactacaacaattgttgccctttgtccaacttgctttgacagaccgagcggcctcctaccaacaacacatcattggtggtgccctcttttagattgcttattagtt

SEQ ID NO: 1033 - DNA, 365 bp, Zea mays
  Clone ID: LIB3061-055-Q1-K1-F4
cagccccaattgttcaaccgtacaggatccaacaggcaatcgcaacaggcatcttaccattatcacccttgttcgtccagcaaccgtcagccctattacagcagttacctttggtccatttggtggcacaaaacatcagggcacaacaactacaacaacttgtgctagcaaaccttgctgcatactctcagcaacatcagtttcttccattcaaccaactggctgcattgaactctgctgcttatttgcaacaacaattaccattcagccagctagttgctgcctacccccagcaatttcttccattcaaccaactagcagcattgaactcttgtggttaattacagcaacaacaactactacca

SEQ ID NO: 1034 - DNA, 360 bp, Zea mays
  Clone ID: LIB3061-055-Q1-K1-F5
atcatcagccctattacagcagttacctttggtgcatttattggcacaaaacatcagggcacagcaactacaacaacttgtgctagcaaaccttgctgcctactctcagcaacagcagtttcttccattcaaccaactagctgcattgaactctgcttcttatttgcaacaacaacaactaccattcagccagctatctgctgcctacccccagcaatttcttccattcaaccaactgacagcattgaactctcctgcttatttacagcagcaacaactactaccattcagccagctagctggtgtgagccctgctaccttcttgacacaaccacagttgttgccgttctaccagcacgc

SEQ ID NO: 1035 - DNA, 423 bp, Zea mays
  Clone ID: LIB3061-055-Q1-K1-F6
ctgcaaatgcatctgacgttatatgagctgcttcatataatttgaattgctgcattggtgccgacaatatattgcaaggtgtatctagtagttggaggagatatgcagtttgcacttgcattggacacgaactcaggtcctcaccagataagatcttgtgagggtgatgggattgacaggttggaaaaattaagtattgggggcagaaagcaggagaaagctttgagaaataggtgctttggtggtagagttgctgcaactacacaatgtattcttacctcagatgcttgtcctgaaactcttcattctcaaacacagtcctctaggaaaaattatgctgatgcaaaccgtgtatctgctatcattttgggcggaagcactggatctcagctctttcctctgacaagcacaagagctacgcct

SEQ ID NO: 1036 - DNA, 403 bp, Zea mays
  Clone ID: LIB3061-055-Q1-K1-F7
cccacgcgtccgagcattcagaaacacaccaagcgaagcgcactagcaacaacctaacgacagtggctaccaagatattatccctccttgcgcttcttgcgctttttgcgagcgcaacaaatgcgtccattattccacaatgctcacttgctcctagttccattattccacagttcctcccaccagttacttcaatggccttcgaacacccagctgtgcaagcctataggctacaacaagcgattgcggcgagcgtcttacaacaaccaattgcccaattgcaacaacaatccttggcacatctaacaatacaaaccatcgcaacgcaacagcaacaacagttcctaccagcactgagccacctagccatggtgaaccctgtcgcctacttgcaacagcagct

SEQ ID NO: 1037 - DNA, 393 bp, Zea mays
  unsure (1)..(393): unsure at all n locations; Clone ID: LIB3061-055-Q1-K1-C9
gcaatccccgctccgtctagcggccctgcgcaatcagtcaaggttccatggccaacagcaacgtnccgcgccgaatcatcaaagtcccgctcgcgttctggtcgcccttttctcgctctccccagatctatcgcgttcctgttctgctttgtggaatcggatactctgtctgctggcctctgctgacgattaatctggttcggatttggatctgggccaggagacgcagcggctcctcagcgaaccaggtgcctgactagtttcccgcgagctctctcggaattttggtgcaattcggagtgtgctgctactacaccggtctcggttctctagcatgttatttgattccgcttttcttcttcttctacgcgtgcagcgccggggattagcgcg

SEQ ID NO: 1038 - DNA, 436 bp, Zea mays
  Clone ID: LIB3061-055-Q1-K1-D1
attgagaccaacaagcaacatagaaagtggaatacagtagcaaaaatagagcaacaagggcgggcaagatattttccatccttatgctccttgctctttctgcatgtgttgctaacgcgaccatttttcctcaatactcacaagctcctatagctgcccttcttcccccataccttccatcaatgaccgctttagtatgtgaaaacccagcccttcaaccctacaggatccagcaagcaatcgcaacaagcaacttacctttatcacacctgttctttcaacaatcgccagccctatctttggtgcagtcattggtacaaaccatcagggcagaacagttgcagcaactcgtgctaccagtgatcagccaagtagctctggcaaacctttccccctactctcagcaacaacaatttcttccattcaaccaactgtc

SEQ ID NO: 1039 - DNA, 428 bp, Zea mays
  Clone ID: LIB3061-055-Q1-K1-D10
gaatcgagaagggggcctcttacgaggaaatcaagaaagctattaaggctgcttctgggggcccactcaagggtattatgggctacgtggaggaggatctggtttccaccgacttcaccggtgacagcaggtcgagcatcttcgacgccaaggccgggattgccctgaacgaccacttcatcaagctcgtctcttggtacgacaacgagtggggctacagcaaccgcgtcgtcgacctgatccgccacatgttcaagacccagtagagagagatatttctgcctccctatcgtgggtcgtccccaatggcctttggtcgcagaccatctttgctgcttgtctatgctgagaataaatgtgaacggtgcccctggacgctggatccatgctggttttggacacgttgtctttttgtgtttaacttatct

SEQ ID NO: 1040 - DNA, 337 bp, Zea mays
  Clone ID: LIB3061-055-Q1-K1-D11
gtgacaggagatgaaacattgcgggggctctcaataaaagcagctcaaagggcacttggaatggccaaagtaaaagctgaagatgttgaccttgttctcctttgtacatctactccagatgatttgtttggaggtgccactcaggtgctgacggacgtggggtgcacaaaggcttttggatttgatattacagctgcttgcagtgggtttatagttggcttaatcacagctactcgttttattcaaaggtggaggttttcagaatatcctagtagttggtgctgatgctctttcaaaatatgtggattggacagacagaggtacatgccttcctttt

SEQ ID NO: 1041 - DNA, 424 bp, Zea mays
  unsure (1)..(424): unsure at all n locations; Clone ID: LIB3061-055-Q1-K1-D12
cgtcagcagcttctgcttgctctggggggaaggagagagagagagcgagagagagagagagatctagtagagaggctagtaggtggtcctcgaacgaagatgttggcggtgttcagcgggcaggtggtggaggtgccggcggagctggtggcggcgggcagccggacgccgtcgcccaagacgaaggcgtcgcagctcgtggggcgcttcctggccgcgtccgagccggccgtgtccgtgcagctcggcgaccacggccacctcgcctacttccacaccaaccaggcgctcctccgncccaggtcgttcgcggccaaagacgaagtgttctgcctgttcgaaggggtgctggacaacctgggtcggctgagccagcagcacgggctgtcaagcaagggcgccaacgaggtgctcctcgtcatcg

SEQ ID NO: 1042 - DNA, 385 bp, Zea mays
  unsure (1)..(385): unsure at all n locations; Clone ID: LIB3061-055-Q1-K1-D4
gtccccgactctccgatactagtcgagtagtccgtccatcccaccgnctcgcaaccgcggccgtgttgacaccgcgcgtnctcaaggcttcgctgctccgctgcttgcgcgctaccgccgagctgcctccgttgcggcgaccccggatcctacctgtgcgggtttaccattccagaggctattctagtgggggaagctccaagtatgataggccaatgagacagttttccgaacagaatgagtcaacctctcagccattaatatattacattgctccatctgctctgcttgcttttgctgggatagccacatttgttcattacaatgatgagaggcgtgcaattccctttcgctaaagtaccaggacagaccaatgttcccaaaa

SEQ ID NO: 1043 - DNA, 356 bp, Zea mays
  Clone ID: LIB3061-055-Q1-K1-D6
aggagtcctgcctgttcgagggggtgctggacaacctgagtcgtctgagccagccagggggtctgtcaagcaaggtcgccaactaggtgctcctcgtcatcgaggcctacaagacgctgcgcgaccgcgcgccctacccggccagctacatgctcgcccagctcaccggctcctacgccttcgtcctcttcgacaagtccaccatctcactgctcgtcgcatccgaccccgatggcagggtgccgctcttctgacggatcaccgccgacggctgcgtagccttctacgacgacatcgacatgctcaaaggctcatgcaggatgtcgctcgagccgatcccgcaaggctgcttctac

SEQ ID NO: 1044 - DNA, 434 bp, Zea mays
  Clone ID: LIB3061-055-Q1-K1-D7
agcaagcaacatagaaagtagaatccattagcaacaatagagcaacaatggggaccgggatattttccctccttatgctccttgctctttctacatgtgttgctaacgcgacaattttccctcaatgctcacaagctcctatagcttcccttcttcccccataccttccatcaattatagcttcagtatgtgaaaacccagctcttcaaccatataggcttcaacaagcaatcgcagcaagcaacatacctttatcgcccttgttgtttcaacaatcaccagccctatctttggtgcagtcattggtacaaaccatcagggcacaacagctgcagcaactcgtgctacctgtgatcaaccaagtagctctggcaaacctttctccctactctcagcaacaacaatttcttccattcaaccaactgtctacactg

SEQ ID NO: 1045 - DNA, 431 bp, Zea mays
  unsure (1)..(431): unsure at all n locations; Clone ID: LIB3061-055-Q1-K1-D8
cgccggctgttgatcccaccaatagagccgtgtactataatgatagatctcgggcgggtgaattgaagcgagacatgccggtgggaactgaagctgccagctaccgcctacccgtttcagctccggacgctgctgcggcagctgcagccaccgccgcgacacaggcccctcctggatatgttcttgcccagatgcatgcgccttcgccaccgcagcagcctccaccacagcagcaaccacaacagccagctcctcagcagattgttgctgctgggaatcaacatttcatccacaaccctgccactggcacctttattccaatccaatcctattaccaccatcctgtccatcagcaggcaccccagaccatgcaaaggcagcaacaagcacctacgttcgacccaaatacagggatgtattatngtcctatg

SEQ ID NO: 1046 - DNA, 318 bp, Zea mays
  Clone ID: LIB3061-055-Q1-K1-D9
caacaacctaacaacaatggctaccaagatattatccctccttgcgcttcttgcgctgtttgcgagcgcaacaaatgcgttcattattccacaatgctcacttgctccaagttccattattacacagttcctcccaccagttacttcaatgggcttcgaacacccagctgtgcaagcctataggctacaacaagcaattgcggcgagcgttttacaacaaccaatttcccagttgcaacaacaatccttggcacatctaacaatacaaaccatcgcaacgcaacagcaacaacaattcctaccagcacttgaccacct

SEQ ID NO: 1047 - DNA, 428 bp, Zea mays
  Clone ID: LIB3061-055-Q1-K1-E1
gggtcttcagaccattagctttatctactccagagcgcagaagaacccgatcgacaccatgagggtgttgctcgttgccctcgctctcctggctctcgctgcgagcgccacctccacgcatacaagcggcggctgcggctgccagccaccgccgccggttcatctaccgccgccggtgcatctgccacctccggttcacctgccacctccggtgcatctcccaccgccggtccacctgccgccgccggtccacctgccaccgccggtccatgtgccgccgccggttcatctgccgccgccaccatgccactaccctactcaaccgccccggcctcagcctcatccccagccacacccatgcccgtgccaacagccgcatccaagcccgtgccagctgcagggaacctgcggcgttggcagcacccccg

SEQ ID NO: 1048 - DNA, 432 bp, Zea mays
  Clone ID: LIB3061-055-Q1-K1-E10
cccacgcgtccgcaacaagctgccccgcagcaacgaacacgaaccttggcagaacggagctgaagtagttcgttgtgaacccagtatggcaaacgcgccgaggatcctggccctcggcctgctgctagcgctcctgtgcgctgccgccggcccggccgccgcgcagaactgcggctgccagcctaacttctgctgcagcaagttcggctactgcggcacgaccgacgactactgcggcgacgggtgccagtcgggcccgtgccgctcgggcggcggcggcggcggcggcggaggcggaagcagtggcggtgcgaacgtggctaacgtggtcagcgacgcgttcttcaacggcatcaagaaccaggccgggagcgggtgcgagggcaagaacttctacacccggagcgcgttcctgagcgccgtcaacaagta

SEQ ID NO: 1049 - DNA, 430 bp, Zea mays
  Clone ID: LIB3061-055-Q1-K1-E12
agtccctgcacccggtgaatcttccggtgaatatgcggtctgtgacttattcgcagagccaaaattaccaacaagatgatttccataaaactggtgcacgggaccttgagccaaggatcaacaccgatgagcatggattttcatccacttcaacaaactcttcttcttgacaatggccacttctccccaagcgaaaaaaatctgctagaaaaccttaaagggctttaacattgggatggatatttgggcccttaccttgctttaagtggagattcagttttctgttttcacttaatatgacaactgaagagcgaaagactttgaagggcacagagtcttcagctccttctgttcctcctgatggaggagtcagcaaggaacctaaaaaagggggagattacccaatgggaggacaactggtccagcacgc

SEQ ID NO: 1050 - DNA, 435 bp, Zea mays
  Clone ID: LIB3061-055-Q1-K1-C8
cggacgcgtgggtcaatgtgtgaaaacccaattgttcaaccctacaggatccaacaggcaatcgcaacaggcatcttaccattatcacccttgttcctccaacaaccgtcagccctattacagcagttacctttggtccatttggtggcacaaaacatcagggcacaacaactacaacaacttgtgctagcaaaccttgctgcatactctcagcaacatcagtttcttccattcaaccaactggctgcattgaactctgctgcttatttgcaacaacaattaccattcagccagctagttgctgcctacccccagcaatttcttccattcaaccaactagcagcattgaactctgctgcttatttacagcagcaacaactactaccattcagccagctagctgatgtgagccctgctgccttcttgacacaacaa

SEQ ID NO: 1051 - DNA, 279 bp, Zea mays
  Clone ID: LIB3061-055-Q1-K1-B4
acgacatagatagcgcactattgtaccattaattgccagccaaatggttttcgctaaggataggcatgcttctctctgggggtgactatacggcgagcatattacgtaaatgctcacaagctactacagcttcccttattagctcataattctcaccatcgatgtcttcagtatgtgaaaatccaatgcttctaccctacaggatccaacatgcaatcacagcatgcatcttacctttatcacgcttgttcctccaacagtcatggatcctattacagc

SEQ ID NO: 1052 - DNA, 363 bp, Zea mays
  Clone ID: LIB3061-055-Q1-K1-B5
gccacgcgtccggggacatacaacgcacactatttcagttataataacagccaaatcaacacgggtaaagatgctttttgagctctctctgtgtcgctgtttcagcaagcatattaccgtaatgctcacaagctgctattgatgttctaagaaacccatacctgttactttcgatgtatcaactatgtgaaaatcaactgtttatactcatacatcatccatatggcaaacctagcgtgcatattacgtttatcatccttgtacctcccacaatcattatgcctactacagcacatacctatgcatcattaattgacacaaataatcagggtacatcaactacgacaacttgagctagcaaac

SEQ ID NO: 1053 - DNA, 314 bp, Zea mays
  Clone ID: LIB3061-055-Q1-K1-B7
gaggcgctgacttatcctaccactcttatcaagtcctgatcgagttaggggggcttggggtattgctaaggtgcgatggcagctgctgatgtcgagtacctttgcttcgtacgcggacatgcctgggccaccagcaacgagtcgctgcagaatgccttcgcctcctacggctagatcctcgactacaagatcatcaccgaccgtaacactgcgaggttccgcggtttagtatgcgttaccttctcctacgagaactccatgctcgacgctatcgagaacatgaacagcaatgagctctacgcacgtatcattac

SEQ ID NO: 1054 - DNA, 341 bp, Zea mays
  Clone ID: LIB3061-055-Q1-K1-B8
gcattcagaaacacaccaagcgaagcgcactagcaacgacctaacaacaatggctagcgagatattagccctccttgcgcttcttgccctttttgtgagcgcaacaaatgcgttcattattccacaatgctcacttgctcctagtgccattattccacagttcctcccaccagttacttcaatgggcttcgaacacctagctgtgcaagccaacatgcaacaacaagcgcttgcggcgagcgtcttacaacaaccaattgcccaattgcaacaacaatccttgccacatctaacaatacaagccatcacaacgcaacagcaacaacaagttctaccagcac

SEQ ID NO: 1055 - DNA, 463 bp, Zea mays
  Clone ID: LIB3061-055-Q1-K1-B9
accgatccgcaattccagccacgcctacgcagaaagcacaatagtgtaccaacaatggcagctaaaatattctgcctccttatgcgggttggtctttctgcaagtgctgctacggcgaccattttcccgcaatgctcgcaagctcctatagcttcccttcttcccccgtacctctcaccagcggtgtcttcggtatgtgaaaacccaattcttcaaccctacaagatccaacaagcaattcacagctggcatcttacctttatcacccttgatccttcaacaatcatcagccctattacatcagttacctttggtgcatttattggcccaaaacatcaaggcacaacaactacaacaacttgtgctagcaaaccttgctggctactttcagcaacagcagtttcttccattcaaccaactagctgcattgaactcttgctctaatttgcaacaacaacaacta

SEQ ID NO: 1056 - DNA, 419 bp, Zea mays
  Clone ID: LIB3061-055-Q1-K1-C1
atcagtgcagcccgacggcgacgccctactgctcgcctcagtgccagtcgttgcggcagcagtgttgccagcagctcaggcaggtggagccgcagcaccggtaccaggcgatcttcggcttggtcctccagtccatcctgcagcagcagccgcaaagcggccaggtcgcggggctgttggcggcgcagatagcgcagcaactgacggcgatgtgcggcctgcagcagccgactccatgcccctacgctgctgccggcggtgtcccccactgaagaaactatgtgctgtagtatagccgctggctagctagctagttgagtcatttagcggcgatgattgagtaataatgtgtcacgcatcaccatgggtggcagtgtcagtgtgagcaatgacctgaatgaacaattgaaatgaaaaga

SEQ ID NO: 1057 - DNA, 432 bp, Zea mays
  Clone ID: LIB3061-055-Q1-K1-C10
cccacgcgtccggcaacatagaaagcacaatagtgtaccaacaatggcagccaaaatgttttgcctccttatgctccttggtctttctgcaagtgctgctacggcgaccattttcccacaatgctcacaagctcctatagcttcccttcttcccccgtacctctcaccagcggtgtcttcggtatgtgaaaacccaattcttcaaccctataggatccaacaggcaatcgcagctggcatcttacctttatcacccttgttcctccaacaatcatcagccctattacagcagttacctttggtgcatttattggcacaaaacatcagggcacaacaactacaacaacttgtgctagcaaaccttgctgcctactctcagcaacaacagtttcttccattcaaccaactagctgcattgaactctgcttctta

SEQ ID NO: 1058 - DNA, 414 bp, Zea mays
  Clone ID: LIB3061-055-Q1-K1-C11
gtcggagggctagacccggtcccccaattgcaattcggccctcttgcgggcggcctggccagaggccgattcggatcccatctgctgctcagagcctcgattcgaccggcgggggcgacgattcgaccgggtcggtagccaggcagaggcagcggaaggagaggatgagcttccaggacctggaggcggggcacgtacggggggcgccgctcggcggcggccggaggaacggcaggggccccgcgggggcggggggcgccggcgccggcgcgtcgcaagccgtggcgtcaggcgtctttcagatcaacaccgcggttgccacgttccagcgcctcgtcaacacgctcggcacgcccaaggatacccccgaccttcgcgacaggatacataaaacacggctacacataacacaac

SEQ ID NO: 1059 - DNA, 430 bp, Zea mays
  Clone ID: LIB3061-055-Q1-K1-C12
attattgagaccaactagcaacatacaaagcacaatagtgtaccaacaatggcgccgaaaatattctgcctccttatgctccttggtctttctgcaagtgctgctacggcgaccattttcccgcaatgctcgcaagctcctatagcttcccttcttcccccgtacctctcaccagcggtgtctacggtatgtgaaaacccaattcttcaaccctacaggatccaacaggcaatcacagctggcatcttacctttatcacccttgttcctccaacaatcatcagccctattacatcagttacctttggtgcatttattggcacataacatcaaggcacaaccactacaacaaccttggctaacaaaccttgcttgctactctcagcaacagcagtttcttccattcaaccaactagctgcattgaactctg

SEQ ID NO: 1060 - DNA, 442 bp, Zea mays
  unsure (1)..(442): unsure at all n locations; Clone ID: LIB3061-055-Q1-K1-C2
gccggaacggatcacgaggatgacgaataggctggcgctaggctgttcggcgtctcgatcgggcggaaacgaatgcgggacgagagcgaccaccacgccggcgtctgcgcagcggaggtgaaagccgagccggtggacgcgcgtcccgaccagcagcggcagcgcaacgccacggagccgcagtcgtggcccatttaccggcccaggcctgtgtaccacccgctccgggcctgcaacggctcgggcagcgctgggagcgaccacgacgggtccaacgactcgaggtgacgggagcaatcgtcgatctgccctcagtaaattagtattacacttactaatggtactaggtaactatattacaggttaaactaggatgtgagctctaaatctctaattatgtggngatttactgaccgatcctatgtaaaaatctccagtgttt

SEQ ID NO: 1061 - DNA, 434 bp, Zea mays
  Clone ID: LIB3061-055-Q1-K1-C3
gtcgatcgcgtcgcgaccagtccatgtttccatgcatgaataacaagggtgtgctcggtctgggataaacaaatgtatgatcagagcgtccacaacccttccatctgcgcactagtagtgaaagtctaaccattgtactcccgttctaactacaatctggcatctgcatacatcatttcagccattatactatagacacattgtatcacgtccaagacctacatactactctctcagaaatttcaacgatttggtcattgctgagagcgaccacgacagatccaacgactagatgtgactgcatcaatcgtcgatctgacctcagtaaattagtattacacttactaatggtactaagtaactatattacacgttatactatgatgtgagctctaaatctctaattatgtgaaaatttactgaccgatcctata

SEQ ID NO: 1062 - DNA, 319 bp, Zea mays
  Clone ID: LIB3061-055-Q1-K1-C4
gagcatgcagtatcttttgaaaatacgtggttaagggtggcattaggactggtggtctgctgctgctgatttcaaactgtgcagacatttgttggaactgcctactggatggtacctgaggttattcaaaattctgaagggtacaatgagaaggcagatatctggtctttaggtatcactgccattgaaatggctaaaggtgaaccccctgtggcagatattcataccatgagagttcttttcatcatacctagtgaaaatactgcacagctcgatgagcatttgttgaaaccaatgcatgagtgtgtctcactatgtt

SEQ ID NO: 1063 - DNA, 403 bp, Zea mays
  Clone ID: LIB3061-055-Q1-K1-C5
gcaacatagaaagtggaatccagtagcaacaacagagcaacaatggcgaccaagatggtttccctccttatgctccttgctctttctgcatgtgttgctaacgcgacaattttccctcaatgctcacaagctcctatagcttcccttcttcccccataccttccatcaatgatagcttcagtatgtgaaaacccagctcttcagccctataggctccaacaagcaatcgcagcaagcaacatacctttatcacccttgttgtttcaacaatcgccagccctatctttggtgcagtcattggtacaaaccatcaaggcacagcagctgcagcaactcgtgctacctgtgatcaaccaagtagctctggcaaacctttctccctactctcagcaacaacaatttc

SEQ ID NO: 1064 - DNA, 400 bp, Zea mays
  unsure (1)..(400): unsure at all n locations; Clone ID: LIB3061-055-Q1-K1-C6
gagaccaacaagcaacatagaaagtggaatacagtagcaaaaatagagcaacagtgggggccaagatattttccatccttatgctccttgctctttctgcatgtgttgctaacgcgaccatttttcctcaatactcacaagctcctatagctgcccttcttcccccataccttccatcaatgaccgctttagtatgtgaaaacccagcccttcaaccctacaggatccagcaagcaatcgcaacaagcaacttacctttatcacacctgttctttcaacaatcgccagccctatctntggtgcagtcattggtacaaaccatcaaggcagaacagttgcagcaactcgtgctaccagtgatcagccaagtagctctggcaaacctttccccctactctca

SEQ ID NO: 1065 - DNA, 389 bp, Zea mays
  Clone ID: LIB3061-055-Q1-K1-C7
cagaaactttactgatatcataaaaaatcctggtcctaagacaactttcgaagttggggtgttagctggtgattcatggaataaggtcaagagcgacaaatgaaaggaccacagcaatgccaatgacattaccaataaatccaaaataccggttccttctattgtagacccacagactaagcaacaggatcacaattccgattcagattctgaggaagagatggttgaaggcaacttgaccatccctgacagaaaggagagctatgaacttccatcgcaagctgatctcatacgtcaggcttttgctggtgatgatgttgaagctgaatttgcgaaagacaaaatggatgctataaatgatgagaatcctgaacctgaaaagcctgctc

SEQ ID NO: 1066 - DNA, 433 bp, Zea mays
  Clone ID: LIB3061-055-Q1-K1-B3
agttcccctctcctgatcgtcctgttcctcacagcagcagccatggcggccgagccggagaagcaggcggcccccgcggcacaggagacggccgtgcacatcgtgtacgttgaccgccccgaggacgccgaccctgaggagttccacatccgcaccctcacccccgtcctcggcagcgaacagaaggccagggacgcagtgctctaccactacaagaacgccgccagcggcttctccgcgaagctcaccccccagcaggtcaaggatctcaaggagcaaccaggtgttctccaggttgtgccgagccagacttaccagctacatggccctgggtctggcactcaccagggcacgacacacaccttgggccttatgtgaaggcgtatgagaatcaagaagactttgtttagtatggctgtatggcacaggtctg

SEQ ID NO: 1067 - DNA, 416 bp, Zea mays
  Clone ID: LIB3061-055-Q1-K1-A10
acagccgcagaatctcaatacccagctatacaatcctacatggtacaggaggccatcgaagcaagcatcttacggacattagcattaaccctccatcaaccatatgctctattgcaacagccatccttagtgcatatgtatctccaaagaatcgcggcacaacaactacaacaacagttgctaccaacaatcaaccaagtatttgcagcgaaccttgctgcttacctacagcaacaacagtttcttccattcaatcaactagctggtgcgaaccctgctatctacttgcaggcacaacagctactaccatttaaccaacttgtcgggagcccttatgccttcttactgcaacaacagcttatggcattccatctccaagctgtggcaaacattgacgctttcttgagacaacaaca

SEQ ID NO: 1068 - DNA, 473 bp, Zea mays
  Clone ID: LIB3061-055-Q1-K1-A11
taccgatctcggaattccgaggctacgacgtacgcacataagtgacgcgcagtgtcgaacgaactggaaactatggactaccttgacaacttagaggcggaggaacgtttcacagagcaaggcgatgctattgtttttgaatcagaagttgacaaagtttaccttgctgcaccctccaaaattgctatcattgatcatgagaagaaaagaacatttgtcgtgacaaaagaagggctttctgatgctgatgtttggaacccttgggacaagaaggcaaaagcaatgcaagattttggggatgcagaatacaagagcatgctgtgtgtggagcctgcatctgttgagaggcctattactctgaaacctggtgaagagtggaaaggaaggcttgtgctctcagctgttccctcgagttactgtagtggacagttagatccattgaaggtccttcacggctgaaaatccttactttc

SEQ ID NO: 1069 - DNA, 429 bp, Zea mays
  unsure (1)..(429): unsure at all n locations; Clone ID: LIB3061-055-Q1-K1-A3
agccacgcgtcacgccgtccttgacctccgccgccgaatcctagactctgatctcgggttcaccgcagcgcgcanagcgacccccgactcccgtgccgatccgcgctctcctctacgacgcttcagtcatggcaggaatggcacccgagggttctcagtttgatgctaagcactatgattctaaaatgcaggagctgctgagcactggtgagactgaggagttcttcacttcatatgatgaagtttttgaaagcttcgatgacatgggccttcaagagaatctcttgagaggcatttatgcatatggctttgagaaaccatctgcaattcagcagagaggaattgttcccttctgcaaggcgctagatgtcattcagcatgcacaatctggtacaggaaagacagcaaccttctgttctgggatcttgc

SEQ ID NO: 1070 - DNA, 420 bp, Zea mays
  Clone ID: LIB3061-055-Q1-K1-A4
cagaccattagctttatctactccagagcgcagaagaacccgatcgacaccatgagggtgttgctcgttgccctcgctctcctggctctcgctgcgagcgccacctccacgcatacaagcggcggctgcggctgccagccaccgccgccggttcatctaccgccgccggtgcatctgccacctccggttcacctgccacctccggtgcatctcccaccgccggtccacctgccgccgccggtccacctgccaccgccggtccatgtgccgccgccggttcatctgccgccgccaccatgccactaccctactcaaccgccccggcctcagcctcatccccagccacacccatgcccgtgccaacagccgcatccaagcccgtgccagctgcagggaacctgcggcgttggcagcaccccg

SEQ ID NO: 1071 - DNA, 429 bp, Zea mays
  unsure (1)..(429): unsure at all n locations; Clone ID: LIB3061-055-Q1-K1-A5
aacangcaacatagaaagtggaatccagtagcaacaatagagcaacgatggcgaccaagatactttccctccttatgctccttgctctttctgcatgtgttgctaacgcgacaattttccctcaatgctcacaagctcctatagcttcccttcttcccccataccttccatcaatgatagcttcagtatgtgaaaacccagctcttcaaccctataggctccaacaagcaatcgcagcaagcaacatacctttatcacccttgtttcaacaatcgccagccctatctttggtgcagtcattggtacaaaccatcaaggcacagcagctgcagcaactcgtgctacctgtgatcaaccaagtagctctggcaaacctttctccctactatcagcaacaacaatttcttcctttcaaccaactatctacac

SEQ ID NO: 1072 - DNA, 437 bp, Zea mays
  Clone ID: LIB3061-055-Q1-K1-A7
cacgcgtccggctccttggtctttctgcaagtgctgctacggcgaccattttcccgcaatgctcgcaggctcctatagcttcccttcttcccccgtacctctcaccagcggtgtcttcggtatgtgaaaacccaattcttcaaccctacaggatccaacaggcaatcgcagctggcatcttacctttatcacccttgttcctccaacaatcatcagccctattacaacagttacctttggtgcatttattggcacaaaacatcagggcacaacaactacaacaacttgtgctagcaaaccttgctgcctactctcagcaacagcagtttcttccattcaaccaactaggttcattgaactctgcttcttatttgcaacaacaacaactaccattcagccagctacctgctgcctacccccagcaatttcttccattc

SEQ ID NO: 1073 - DNA, 419 bp, Zea mays
  Clone ID: LIB3061-055-Q1-K1-A8
cgctgcttatttgcagcaacaactattaccaattaacccggttggttccggctaattctcagcaccaacggcttgttccatttaaccaatgggccgaactgaaccccgctgctaattggcagcagcaaatactactaccattaagccagttagctgcagcaaaccgcgcttccttctggacacagcaacagttgctgcctttataccagcagtttgcggttaaccccgaaaccctcttacaactacaacaattgttgccctttgtccaacttgctttgacagacccagcggtcttataccaacaacacatcatgggtggtgccctctttaagattgcttattagttgaaattcaataataaagttttttggatgatgtatgtggccaaccagaattaagaagttacatttccagattct

SEQ ID NO: 1074 - DNA, 390 bp, Zea mays
  unsure (1)..(390): unsure at all n locations; Clone ID: LIB3061-055-Q1-K1-A9
aattattcagttcttgcaagaatgacatgattttgttactaaatagtgttccttttatgcanaaatgaccaagacaatgcaagtgcttaatgaagcaagctggcatgaaacatttaaagctctttggatttccacccttcgtcttgtacaacgggctagagaacctcttgaaggaccgattcctcatctagatgcaaggttatgcatgttgttagctcttataccattatcaattgctgcgaatcttcaagaggaaagtgatatgtttggagttgaagggaacaaaattcttncacaaatgacagggcttatatcatctctccagaatctgatccaatattcaggacttcttgtaccaccttcatcagtggtgaatgcagctaatgttgc

SEQ ID NO: 1075 - DNA, 435 bp, Zea mays
  Clone ID: LIB3061-055-Q1-K1-B1
caacaagcaacatagaaagtggaatccagtagcaacaacagagcaacaatggcgaccgagatagtttccctccttatgctccttgctctttctgcatgtgttgctaacgcgacaattttccctcaatgctcacaagctcctatagcttcccttcttcccccataccttccatcaatgatagcttcagtatgtgaaaacccagctcttcagccctataggctccaacaagcaatcgcagcaagcaacatacctttatcacccttgttgtttcaacaatcgccagccctatctttggtgcagtcattggtacaaaccatcagggcacagcagctgcagcaactcgtgctacctgtgatcaaccaagtagctctggcaaacctttctccctactctcagcaacaacaatttcttccattcaaccaactgtctacactg

SEQ ID NO: 1076 - DNA, 426 bp, Zea mays
  Clone ID: LIB3061-055-Q1-K1-B10
gggaccgaagcgaatgagttggcaatgttgatggcccggctgtatagtgggaatctgggtatggttgcgctcagaaatgcatatcatggcggaagtgccggtacgattggattgactggtttgcagacgtggaaatacccaattcctcagggtgaaatacatcatgtcatgaaccctgatccttatcgggggactttcgggtctgatgctgcagcttatgctaaggaagtcgaagaacacataacttatggaagttcaggaagggttgcaggcttcattgcagaaacattccaaggtgtgggaggtgctgttgaactagctcctggatacctaaagttagcttatgacattgtgcgcaaggctgggtggcgttgtattgctgatgaagtccaaagtgggtttggccgtactggcagtcattactgg

SEQ ID NO: 1077 - DNA, 423 bp, Zea mays
  unsure (1)..(423): unsure at all n locations; Clone ID: LIB3061-055-Q1-K1-B11
agtgtaccaacaatggcagccaaaatattttgcttccttaagctccttggtctttctgcaagtgttgctaccggaaccattttcccacaatgctcacaagctcctataagcttccttcttcccccatacctctcaccagcggtgtcttcaatgtgggaaaccccaattgttcaaccctacangatccaacaggcaatcgcaacaggcatcttaccattatcacccttgttccttcaacaaccgtcagccctattacagcagttacctttggtccatttggtggcacanaacatcagggcacaacaactacaacaacttgtgctagcaaaccttgctgcatactctcagcaacatcagtttcttccattcaaccaactggctgcattgaactctgctgcttatttgcaacaacaattaccattc

SEQ ID NO: 1078 - DNA, 437 bp, Zea mays
  Clone ID: LIB3061-055-Q1-K1-B12
gtcgcttccagccgccgccgcgtccgcctcgccaagcgcagcagccgccgcagcacagcgctctcttgatctcagccatggcggaggtggagcagcaacaggacacgccgaagctcttcaaccgctggaccttcgatgatgtccaggtgaacgacatctcgctgaacgactacctcgctgtgaacgcgacgaagcacgcgatgtacctgccgcacaccgcggggcgctactccaagaagcggttccgcaaggcgcagtgcccgatcgttgagcgccttacaaactccctcatgatgcacgggcgcaacaacggccagaagggtcatggctggcccgatcatcaagcataccctggagatcattcacctgctcaccgatgccaaccccatccaggtcgtcgtcgacgcgatcatcaacagtggcccccgtgaggatgc

SEQ ID NO: 1079 - DNA, 416 bp, Zea mays
  unsure (1)..(416): unsure at all n locations; Clone ID: LIB3061-055-Q1-K1-B2
cggacacgcacgccaacgcctcatccacctgtgctgtgacctcatatttgtcctctgtgcctgcgtctcatgatctctgcgcctctgcggctgtcggcgccgagggctgccgtcgggggatcgttcctgctcggcaagtccaagtccaagcccagcaggatccgctgcgccgcgggggtggggaggggcgccgncgccgncacactgtacgagatcctgggcctgcgcgccggcgcgacgggccgggagatcaaggccgcgtaccggcgcctggcgcgggagcggcacccggacgtggcgcccgcgcccggggccgctgccgagttcgtccgcttgcacgacgcctacgccacgctctccgacccggacagccgcgcgcgctacgaccgcagcgccgtaaccgcggtggccgtggc

SEQ ID NO: 1080 - DNA, 436 bp, Zea mays
  unsure (1)..(436): unsure at all n locations; Clone ID: LIB3061-055-Q1-K1-A1
gcgaagcggcagtgcgtagagaggatcgtcgaacagaacagcatgaagatggtcatcggtctcgtcgtgtgcctggctctgtcagctgccagcgcctctgcaatgcagatgccctgcccctgcgcggggctgcagggcttgtacggcgctggcgccggcctgacgacgatgatgggcgccggcgggctgtacccctacgcggagtacctgaggcagccgcagtgcagcccgctggcggcggcgccctactacgccgggtgtgggcagacgagcgccatgtaccagccgctccggcaacagtgctgccagcagcagatgaggatgatggacgtgcagtccgtcgcgcagcagctgcagatgatgatgcagctngagcgtgccgctgccgccagcagcagcctgtacgagccagctctgatgcagcagcagcagcagc

SEQ ID NO: 1081 - DNA, 339 bp, Zea mays
  unsure (1)..(339): unsure at all n locations; Clone ID: LIB3061-054-Q1-K1-G6
atctactccagagcgcagaagaacccgatcgacaccatgagggtgttgctcgttgcccgtggctctcctggctctcgctgcgagcgccacctccacgcatacaagcggcggctgcggctgccagccaccgccgccggttcatctaccgccgccggtgcatctgccacctccggttcacctgccacctccggtgcatctcccaccgccggtccacctgccgccgccggtccacctgccaccgncggtccatgtgccgccgccggttcatctgccgncgncaccatgccactaccctactcaaccgcgccgggctcagactcatacccagacacacccatg

SEQ ID NO: 1082 - DNA, 428 bp, Zea mays
  Clone ID: LIB3061-054-Q1-K1-G8
ggacgtcagcctagcaattagctcatcgactccagattggagaactcgacaccatgaaggtgctgatcgttgcccttgctctcctggcgctcgctgcgagcgccgcctccagtacaagcggcggctgtggctgccagacaccaccgtttcatctaccgcctccgttctatatgccgcctccgttctatctgccgccgcagcagcagccgcagccatggcaataccccactcaaccaccgcagctaagcccgtgccagcagttcggatcctgcggcgtcggcagcgtcggcagcccgttcctgggccagtgcgtcgagttcctgaggcaccagtgcagcccggcggcgacgccctacggctcgccacagtgccaggcgctgcagcagcagtgctgccaccagatcaggcaggtggagccgctgcaccgg

SEQ ID NO: 1083 - DNA, 359 bp, Zea mays
  Clone ID: LIB3061-054-Q1-K1-G9
caacgcggccccctcgcggcgtggagtggattgggccgacgccgatcgagaggagaggagaggagcgccgtcgggtagggtttgtctgggtgaagttttgagcgagagcgcaaggcgagggaaggaagaagaggaagaggactggctcctggaggaagaagccggccggggcttggatggtcgcggagcgctcccgtaggtggtgtccatgggaaggtcgttcagggactcgctcaaggtgctcgaagccgacatccagcacgccaactccattgcttctgaatttcggaaggaatatgatggcgccttccttcaaatgaagatggcatattgccctgctgcccactttttcctttttc

SEQ ID NO: 1084 - DNA, 433 bp, Zea mays
  Clone ID: LIB3061-054-Q1-K1-H1
ctagcaacatagaaagcacaatagtgtaccaacaatggcagccaaaatattttgcctccgtatgctgcttggtctttctgcaagtgctgctacggcgaccattttcccgcaatgctcgcaagctcctatagcttcccttcttcccccgtacctctcaccagcggtgtcttcggtatgtgaaaacccaattcttcaaccctacaggatccaacaggcaatcacagctggcatcttacctttatcacccttgttcctccaacaatcatcagccctattacatcagttacctttggtgcatctattggcacaaaacatcaaggcacaacaactacaacaacttgtgctagcaaaccttgctgcctactctcagcaacagcagtttcttccattcaaccaactagctgcatagaactctgcttcttatttgcaacaa

SEQ ID NO: 1085 - DNA, 432 bp, Zea mays
  Clone ID: LIB3061-054-Q1-K1-H10
caagcaacatagaaagtggaatccagtatcaacaatagagcaacaatggcgaccaagatgttctccctccttatgctccttgctctttctacatgtgatgctaacgcgacaattttccctcaatgctcacaagctcctatagcttcccttcttgccccataccttccatcaattatagcttcaatatgtgaaaacccagctcttcaaccatatatgcttcaacaagcaatcgcagcaagcaacatacctgtatcgcccttgttgcttcaacaatcgccagccctatctttggtgcagtcattggtacaaaccatcagggcacaacagctgcagcaactcgtgctacctctgatcaaccaagtaactcttgcaaacctttcctcctactctcagcaacaacaatttctttcattcaaccaactgtctacactg

SEQ ID NO: 1086 - DNA, 231 bp, Zea mays
  Clone ID: LIB3061-054-Q1-K1-H11
atcatggccgctgacaccctatatgaggatgctactaaagcatagtgccttcggcaaactagctaacagccgtcatgatagacttactttgaaatgggcatcgcatgtatatcccgaggacgtgacgcatgtctatccttatccagctggtgaagatcccaatggctatgagcttgcaagcgaacgatggacaccactgcacacgagcgaaagtatagctctgagcatcat

SEQ ID NO: 1087 - DNA, 410 bp, Zea mays
  unsure (1)..(410): unsure at all n locations; Clone ID: LIB3061-054-Q1-K1-H12
ccactctgctactctaactatttaccggatcccggatacaacgacgaacagcaatcttactcagagatcatatactgtagagtcccggagtgctacatctttccggcacgacaagctcccacaggccaaggccacctcagcgactgtctccctgaccatcgtggacctgtacctcaggcgcgaccaggtgccgcacgccatactcgaggccagcaaggagatcggcttatttcaggtggcgaaccacggcgtctccctagaggcgatgcatgacatggagaccgtgtgccaggagctcttccggctgccggcggatgacaaagccgggctgtactcggaggacacggggagggcgaccccgatctactccaacaccatgttcgacacggncggcccagaagtactggcgc

SEQ ID NO: 1088 - DNA, 439 bp, Zea mays
  unsure (1)..(439): unsure at all n locations; Clone ID: LIB3061-054-Q1-K1-H2
gcccgaggcggcgccggcgggcaacgcgggggccgaccgccccgacggcaacggggcccccgcggaggagcccgaggaccacgacatgccgcagctggtggaggcggacgtggagaaggcgctctgggcccagatcggcatcttgcatggcggcggcggcctgttcggggacagcaggtacggggcgcaggaggaacttgacgaggaagaggtcaaggagatcgacagcgcccgcgcgcggcgccggaaggcggcctacgagatggccatcgcctcaggcggcgccagctcgctcatcctgtccaactacgcgcagctcctgtacgagttcgacaaggacatcgagagggcggagatgtacttcaagcaagcggtggccgncgagccggcggacggcgaagcgatgccgaggtacggcatgttcctgtggcacgcccgc

SEQ ID NO: 1089 - DNA, 441 bp, Zea mays
  Clone ID: LIB3061-054-Q1-K1-H3
tgagaccaactagcaacatagaaagcacaatagtgtaccaacaatggcagccaaaatatgttgcctccttatgctccttggtctttctgcaagtgctgctacggcgaccattttcccgcaatgctcgcaagctcctatagcttcccttcttcccccgtacctctcaccagcggtgtcttcggtatgtgaaaacccaattcttcaaccctacaggatccaacaggcaatcgcagctggcatcttacctttatcacccttgttcctccaacaatcatcagccctattacaacagttacctttggtgcatttattggcacaaaacatcagggcacaacaactacaacaacttgtgctagcaaaccttgctgcctactctcagcaacagcagtttcttccattcaaccaactaggttcattgaactctgcttcttatttgcaaca

SEQ ID NO: 1090 - DNA, 454 bp, Zea mays
  unsure (1)..(454): unsure at all n locations; Clone ID: LIB3061-054-Q1-K1-H4
gaccgacgcggtacgcgagcaacacgcaacttaaagggtggactacagtagcaaaaatagagcaccaatggcggccaagatattttccatccttatgctccttgctctttctgcatgtgttgctaacgcgaccatttttcctcaatactcacaagctcctatagctgcccttcttcccccataccttccatcaatgaccgctttagtatgtgaaaacccagcccttcaaccctacaggatccagcaagcaatcgcaacaagcaacttacctttatcacacctgttctttcaacaatcgccagccctatctttggtgcagtcattggtacaaaccatcagggcagaacagttgcagcaactcgtgctaccagtgatcagccaagtagctctggcaaacctttccccctactctcagcaacaacaatntcttccattcaaccaactgtctatactg

SEQ ID NO: 1091 - DNA, 451 bp, Zea mays
  Clone ID: LIB3061-054-Q1-K1-H5
cattttgagcattcagaaacacaccaagcgaagcgcactagcaacgacctaacaacaatggctaccaagatattagccctccttgcgcttcttgccctttttgtgagcgcaacaaatgcgttcattattccacaatgctcacttgctcctagtgccattattccacagttcctcccaccagttacttcaatgggcttcgaacacctagctgtgcaagccaacatgcaacaacaagcgcttgcggcgagcgtcttacaacaaccaattgcccaattgcaacaacaatccttgccacatctaacaatacaagccatcacaacgcaacagcaacaacagttcctaccagcactgagccacctagccatggtgaaccctgccgcctacttgcaagagcagctgcttgcatccaacccacttgctctggcgaacgtagttgcaaaccagcaacaac

SEQ ID NO: 1092 - DNA, 429 bp, Zea mays
  unsure (1)..(429): unsure at all n locations; Clone ID: LIB3061-054-Q1-K1-H6
atctgggaggtaacgacctggttgtgaggcgagacgtgagggagaaaaacatatttacgctacgcgctgtcacgcttcgcgcgtgacgcacgacacacgaaactcgtgctttaaaggagtagagatatacagtttttgtgtataacataaaccaacatgagctgcagcggttagagactagtgctttgttcctagagaccatagttcgaatcccagtgggggtgcctttttgatatttcgtgatattttgctgagcgtgtgagaaactttggcaacgcgcgtggaggagggcgcgtggaggaggngagcggttgcatcgagcgggcgtaccaagggagatacttccgttntatattagtagagatgtttatgaagcaagcattggatttttccttcctgatcccagaataacttcagcttatgctctgc

SEQ ID NO: 1093 - DNA, 434 bp, Zea mays
  Clone ID: LIB3061-054-Q1-K1-H7
ggaaaaaaaaagaccagactgagggctcctctcccgttccgatcgccaattggccttccaccgcctgcaaccctttcttcccttctcggtcatcgtgacggcatcacgcgcgcgctctcctcttccacgagtccgtcagcctgctaagtcttaagatggcgtcaagcaatggtcagacagaagctccagcaccatctgtccccaaaaatcctgctatggcatcatgccggaagaagaaaacagatgatgctaccttccttgaagatctgaaagaccacatggatgagttcattcacgcctccatggatgagcacaagagctgctttaagaagacaattcagaagatgtttgggatgtcgaaggctgttgcagagagatccgcggcggaagcaaacaaagctgaagttgaaagtgctttgccacttcagaccagt

SEQ ID NO: 1094 - DNA, 429 bp, Zea mays
  Clone ID: LIB3061-054-Q1-K1-H8
atggaaagcatgctatccaaaattttaatgtggggacttttttccttttttttaagggaaaattgtaatggtatatggtgatatgcctcgttgaatcaggtctatgtaggcaaagagaaacaaactgttgcagaaatgcttccttatttgagattaggatacatttcagatccagacgaaatgcagtctatactctcttctgaaggagatacatgtccagttagtccatgtacagagcgagctgtacttgatcagcttggtggttacctggaatctcggttggctggttatccaacaacattgaatgaagatgaagctatgttggcagatggcagtttggaaccaaagcaggaagttgctactaggcttgtgaggttggagaagaagatgctccatgcctgtctccaggccacaaatgagtttataact

SEQ ID NO: 1095 - DNA, 428 bp, Zea mays
  Clone ID: LIB3061-054-Q1-K1-G5
aaggtcatccgcaagaatcttgtcaagaagtgcgttgagctgttttttgagattgcggagaacaaggaggactacaacaagttctatgaggccttctccaagaacctcaagcttggcatccacgaggactccacgaacaggaccaagattgctgagctcctgaggtaccactcgaccaagagcggggatgagctgaccagcctcaaggattatgtgaccaggatgaaggagggccagaacgacatcttctacatcactggtgagagcaagaaggctgtggagaactccccgttccttgagaagctgaagaagaggggctatgaggtgctgttcatggtggatgccattgacgagtattctattggacagctgaaggagtttgagggcaagaagctcgtctctgccaccaaagagggcctgaagctgga

SEQ ID NO: 1096 - DNA, 316 bp, Zea mays
  Clone ID: LIB3061-054-Q1-K1-F12
gaccaccggtgtcttcagtatgtgaaaacccaatttttaaaccctacaggatccaacaggcattggcagcatgctttttaccttaatcacccttggtcctccaacacccgtcatgccctattacagcagttacctttgcagcatttgttggcccaaaacttcaaggcccaacatctacatcaactcgggctaggaaaccttgctgcctactttagacaccagaagtttcttccattcaaccaactggctgattagaactctggtgcttattggcaacagaacttaccattaagtcagttagctgctgcctaccccc

SEQ ID NO: 1097 - DNA, 428 bp, Zea mays
  Clone ID: LIB3061-054-Q1-K1-F2
cgctcatttctgcatccccctcccgccgcgccgcctcaccgccgccggagaagatgggtcgcgtgagccgcgcgcagcgtaagggtgcggggtccgtgttcaagtcccacacccaccaccgcaagggccccgcccgcttccgctccctcgacttcggcgagcgcaacgggtacctcaagggcgtcgtcaccgacgtcatccacgaccccggccgtggcgcgccgctcgccaaggtcactttccgccacccattcaggtacaagcaccagaaggagctctttgtcgcagccgagggcatgtacacgggccagttcgtctactgcggtcgccgcgccaccctctccatcggcaacgtgctgcccctccgcgggatccctgagggtgccgtcgtctgcaacgtcgagcaccacgtcggtgaccgcggtgtc

SEQ ID NO: 1098 - DNA, 435 bp, Zea mays
  unsure (1)..(435): unsure at all n locations; Clone ID: LIB3061-054-Q1-K1-F3
ttcatcatcactccactagccagtcagctactggcctaaagctaggccgcttcttttcgtttaagccaatccatctcatctccgacaagcgaagcagagcactggcatgagcatggaccgcatggcgcggcgttccgtgtccttgctcctcgctctggctctcctggccgccgcggcgtcggcggactcgtggctgtacgagaagttcacgacggagggcaacgtgcgcgcggactacaacgcgcaggggcagcaggtgacgtctctgatcctgacgcagcagtccggcggcgccttcagctcgcggcagaagtacctgtacggggagttcagcatccagatgaggctgatcccgggcaactccgcgggcaccgtgacctncttctacctgtcgtcgggcgacgggcccgggcacgacgagatcgacatggagtt

SEQ ID NO: 1099 - DNA, 433 bp, Zea mays
  unsure (1)..(433): unsure at all n locations; Clone ID: LIB3061-054-Q1-K1-F6
cgtcggattcggaggctcagttattactgaaaagataatacagtacctatggcttctggggacgccgtgcgaggagacctcgccctgctgattctgtacctgaacaaggccgaggcgcgggacaagatctgccgagcgatccagtacgggtccaagttcatcagcaacggcgagccagggcctgcgcagaacgtcgacaagtccaccagcctggcccggaaagtgttacggctctgtaagttcgtcaacgatctgcacgctttgatcagccctactgccaaggggactccgctcccgctgatcctactcgggaagtccaagaacgcgatgctgtcgactttgctcttcctggaccagatcgtgtgggcggtgaggacaggaatatacatgaacaaggagcgggcggagtttctcggnaggatagcgttctact

SEQ ID NO: 1100 - DNA, 274 bp, Zea mays
  Clone ID: LIB3061-054-Q1-K1-F7
gcattcaaaaaccccctaatgaaacgcaattaccaccaactaaccaccatgggttcccagaaaataatccttttttgggctcttggcctttttgggaaccccaccaaaggcgtcaatatttcacacaggttaattggttctataggccatatttcacaagttctctcttcacagtacactaagtggctttaacacacacatgtgcaagactatacggtataaaaagcgctcttggcgagcgcgtttcaacaacccaatgtgcaaattcaacaac

SEQ ID NO: 1101 - DNA, 329 bp, Zea mays
  unsure (1)..(329): unsure at all n locations; Clone ID: LIB3061-054-Q1-K1-F8
gggacagcacanatcagcccatcgattgtgttatttgcatgactacaatcgagcttacggaaagaacaagtgaatacatggtggcaccttgcgagcatatatttcactcaggctgtttacagcgttggatggacattaagatggagtgccctacttgccggcgctccctaccaccagcttagatgaggctttgtatcatatataatagtgaacaagaagtaggtagctcagcttatacaaggtgggggaactgatgtacaataaggtgaggctgcaatcgtgtgaaagctatgaacagaactgtagaaaagttttatactattgatttc

SEQ ID NO: 1102 - DNA, 408 bp, Zea mays
  Clone ID: LIB3061-054-Q1-K1-F9
gtcattcttggtcaaatcaaaaactggagattctgtgaaatgggaaggtattgaccggggggaattggaatctaagggccctttggatggtcctgggaagagggccacccttgccttcattacctgccagggcctggaccacctttaagttggggggggttaatcaagtggatacctatgcggttcctttgggaaaggatgctcaagtggtccccgacctcagggtttttttaaaaggttgcaatgctgccttacatgttatcgtaaaattggaaggtgcaaactccatccccaactaacattcaatcatcacagcatctgatggggctatggttgccaggggtgaccttggagctgagctgcccattgaggaggtgccgctgttgcaggaagaaattatagaatgtg

SEQ ID NO: 1103 - DNA, 419 bp, Zea mays
  Clone ID: LIB3061-054-Q1-K1-G1
gctgcagcaactcgtgctacctgtgatcaaccaagtagctctggcaaacctttctccctactctcagcaacaacaatttcttccattcaaccaactgtctacactgaaccctgctgcttatttgcagcaacaactattaccatttagccagctagctactgcctactctcagcaacaacaacttcttccatttaaccaattggccgcactgaaccccgctgcttatttgcagcagcaaatactactgccatttagcgagctagctgcagcaagtcgtgcttccttcttgacacagcaacagttgctgcctttctacaagcagtttgcggctaaccccgcaaccctcttacaactacaacaattgttgccctttgtccaacttgctttgacaaacccagcagccttctaccaacaacaca

SEQ ID NO: 1104 - DNA, 282 bp, Zea mays
  Clone ID: LIB3061-054-Q1-K1-G10
aaggcaaccaatccatctggactcgtggggaagtttcgatctcgcccgggtcgacttacgaaggttctaggaacgttcctccgtccgtccggagaaggagcaagcaggaggcggtgatgatccaggttggtctcaacgaccgactggctataaaagggcagctcaagtgcaacgatgacgacaccatcggagacctcaagaaagctggcgttgtgcatacggtgacgcgccccgagaagatccgcatccagatgtgctacaacatctacacggaccacatta

SEQ ID NO: 1105 - DNA, 435 bp, Zea mays
  Clone ID: LIB3061-054-Q1-K1-G11
ctagcaacatagaaagcacaatagtgtaccaaccatggcaggccaaatattttggcttcgtaagcttcttggtctttctggaaggggcttgttccgggaacatttttccggaatggttccaaggcttctaatagcttcctttcttcccccgtacttctcaccagcggtgtcttcggtatgtggaaaccccaatttttaaaccctacaggatccaacaggcaatcgcagctggcatcttacctgtatcacccttggttcttcaacaatcatcagccctattacaacagttacctttggtgcatttattggcacagaacatcagggcacaacaactacaacaacttgtgctagcaaaccttgctgcctactctcagcaacagcagtttcttccattcaaccaactaggttcattgaactctgcttcttatttgcaac

SEQ ID NO: 1106 - DNA, 410 bp, Zea mays
  unsure (1)..(410): unsure at all n locations; Clone ID: LIB3061-054-Q1-K1-G12
cccacgccttcgcgggcgccttggttcagaaacacaccaagcgaaacacatttgccaccggctaaccaccatgggttccaagaaattaatccttcctgggcctcttgggccttttggcaacgccaccaaaggcgtcaataattccacatggctaattggctccaagttcaataataccacagttcctccaacaagtaccttaaaggggcttcgaccaccaagtgggcaaagcctttaggctacaacaggcaatggcggcgaccgttttacaccaaccaatttcccagttgcaacaacaatcctgggcacatctaacattccaaaccatcgaaccgcaccagcaacaacaattcctaccagcactgagccacctagccatggtgaaccctgccgnctacttgcaacagcag

SEQ ID NO: 1107 - DNA, 321 bp, Zea mays
  unsure (1)..(321): unsure at all n locations; Clone ID: LIB3061-054-Q1-K1-G2
gtagcagcatcgagagcacactgtggtcaacccagtggcagtcacaaaattntgcctggtaatggagcaaggacaatgtgtaagattcgatacagtgaccacactgaagcatggcgcgcatgcgcagatacatctactaccatttaggcagctagcaacagccgactcttaggaacgagaacacccaacacttaaacaatacaggatacagcacgcacgctacagatggcaagcaacctatactaccgtcgttcatcgagcaagcatgagccctgacacactagctacctgacacagcatacagttggcacacaacataca

SEQ ID NO: 1108 - DNA, 442 bp, Zea mays
  unsure (1)..(442): unsure at all n locations; Clone ID: LIB3061-054-Q1-K1-G3
nntccgcaagaaggcccgacaagggccggacccccaacgagggcgcccccttttgggccttaacctgctgcgcggctctccggggagcccctcgccgcgcccgccgtcgccgaccgcctcgggaacctctacaacaaggagccgctcgttgaggcgctgctccacaagcgcctgcccagggcgctgtcccacatccggggcctgcgcgacatggtccccatccacctgcaccccaggccgggcgccgacgccgccggggacgaggtccggttccagtgccccgtcaccggcctcgagttcaacggcaagtaccagttcctcgcgctccgtgggtgcggccacgtgctcagcgtcaaggcgctcaaggaggtcaagacgtccgcgtgcttggtctgccacgaggagttcggcgaggccgacaagatgcccatcaacgggactg

SEQ ID NO: 1109 - DNA, 439 bp, Zea mays
  Clone ID: LIB3061-054-Q1-K1-G4
ctagcaacatagaaagcacattagtgtaccaacaatggcagccaaaatattttgcttccttatgcgccttggtctttctgcaagtgctgctaccgcaaccattttcccacaatgctcacaagctcctatagcttcctttcttcccccatacctctcaccagcggtgtcttcagtatgtgaaaacccaattcttcaaccctacaggatccaacaggcaatcgcagcaggcatcttacctttatcacccttgttcctccaacaaccgtcagccctattacagcagttacctttggtgcatttgttggcacaaaacatcaaggcacaacaactacaacaacttgtgctaggaaaccttgctgcctactctcagcaacagcagtttcttccattcaaccaactggctgcattgaactctgctgcttatttgcaacaacaacta

SEQ ID NO: 1110 - DNA, 444 bp, Zea mays
  Clone ID: LIB3061-054-Q1-K1-F11
attcaaaaacacacctaacgaaacgcactaaccaccgaccaaccaccatgggttcccagggtttagccctttttgggctttttggcctttttggtgagcgcaacaaaatgcgtttccattatttccaacaatggctcactttgcttcctagtgccctttattgcacagttccttccctccaggtacttcaatgggcttcgaacacccagctgtgcaagcctacaggctacaacaagcgcttgcggcgagcgtcttacaacaaccaattgcccaattacaacaacaatccttggcacatctaaccatacaaaccatcgcaacgcaacagcaacaacaatttctaccagcactgagccaactagctgtggtgaaccctgtcgcctacttgcaacagcagttgcttgcatccaacccacttgctctggcaaacatagttgcatacca

SEQ ID NO: 1111 - DNA, 426 bp, Zea mays
  unsure (1)..(426): unsure at all n locations; Clone ID: LIB3061-054-Q1-K1-D9
ttgcaaaccatggacatggctttggcgtctaaaggctncccttcggcatgggatggcagcggcggcgagcagccaattccaaagcgtgacaaagccgctgcaaatgattcaacatacctcaatcctcaagctcatgatagtgttcttggaatcattctgggaggtggtgctgggactagattgtaccccttgacaaagaagcgtgccaagcctgcagtgccattgggtgccaactatagactgattgatattcctgtcagcaattgtctcaacagcaacatatccaagatctatgtgctaacgcaatttaactctgcttccctcaaccgtcacctctcaagagcctacgggagcaacattggagggtacaagaatgaagggtttgttgaagtcttagctgcacagcagagcccagataatccaaac

SEQ ID NO: 1112 - DNA, 433 bp, Zea mays
  Clone ID: LIB3061-054-Q1-K1-E1
gtcagcctagcaattagctcatcgactccagattggagaactcgacaccatgaaggtgctgatcgttgcccttgctctcctggcgctcgctgcgagcgccgcctccagtacaagcggcggctgtggctgccagacaccaccgtttcatctaccgcctccgttctatatgccgcctccgttctatctgccgccgcagcagcagccgcagccatggcaataccccactcaaccaccgcagctaagcccgtgccagcagttcggatcctgcggcgtcggcagcgtcggcagcccgttcctgggccagtgcgtcgagttcctgaggcaccagtgcagcccggcggcgacgccctacggctcgccacagtgccaggcgctgcagcagcagtgctgccaccagatcaggcaggtggagccgctgcaccggtaccaggcc

SEQ ID NO: 1113 - DNA, 425 bp, Zea mays
  Clone ID: LIB3061-054-Q1-K1-E12
cttacctttataacctggttcttccaccaataataagccctataacagaagttacctggggtggcattaattggcacaaaacatcagggcacaacaactacaacaacttgtgctagcaaaccttgctgcctactctcagcaacagcagtttcttccattcaaccaactagctgcattgaactctgcttcttatttgcaacaacaacaactaccattcagccagctatctgctgcctacccccagcaatttcttccattcaaccaactgacagcattgaactctcctgcttatttacagcagcaacaactactaccattcagccagctagctggtgtgagccctgctaccttcttgacacaaccacagttgttgccgttctaccagcacgctgcgcctaacgctggcaccctcttacaactgcaac

SEQ ID NO: 1114 - DNA, 406 bp, Zea mays
  Clone ID: LIB3061-054-Q1-K1-E2
agatacccaaagaggtgatgattttataagtaaagagaagatggcattggcatggaacaaagttggccagagctccccatttcttaacaagcccttgctgccgtttgaggaatggaacatagatttctctgagataacaattggcacgcgggttggaataggattcttcggagaagttttccgtggtatatggaatggaaccgatgttgccatcaaagtatttctagaacaggacttgacaactgaaaacatggaagatttttgcaacgagatatacatcctgagccggttgcgacattcaaacgttatattgcttctcggtgcatgcattacacctgcacacttgtcaatggttactgaatatatggaaatgggatcactgtattatctcatccatatgagtggt

SEQ ID NO: 1115 - DNA, 436 bp, Zea mays
  Clone ID: LIB3061-054-Q1-K1-E3
cggaatgaccgacgcgacccacgcgatcgcgccaaccttacatggccgtcacgccgctacagccgcctcagctccaagggagcccaagcgaaaccactctgcagaccaccatgaactatgccagctagctggttacagtgccgccctcccgcgtgtgcacgaccaccgcgtaagaggtagtcgccttatgaccggccaagaacagcggctcgctcgccgctgcacgccagcgccaaggatcccatcacggagtgagggcagaagtcaatgaatctggaagtgcatagactgttgatgcactctgacgaagctgacatgatctgcttccaagacttgatcgcaacagtgacctttctgagagcacatgacaggctgcagtgactacagcttcgatgagcacgaagtatagagcagatatcactgtagatgatattga

SEQ ID NO: 1116 - DNA, 439 bp, Zea mays
  unsure (1)..(439): unsure at all n locations; Clone ID: LIB3061-054-Q1-K1-E4
attgataccaactagcaaaatacatagtgaagtacactagccacttcttaacccaatgggagccgagaattttttccctccttgccctccttgctctatcagcaagcgctgctacctctactattattccacaatgctcacaacaatacctctctccggtgacagccgcgggatttcaacacccaactatacaatcctacatgctacatgaggccatcgtagcaagcatcttacggtcattagcattaaccctccaacagccatatgccctattgcaacaaccatccttagtgcatctgtatctccaaagaatcgcgacacaacaactacaacaacagttgctaccaacaatcaatcaagtagttgcagcgaaccttgctgcttatctccagcaacaacaatttcttccattcaatcaactagcntgggtgaaccctgc

SEQ ID NO: 1117 - DNA, 438 bp, Zea mays
  Clone ID: LIB3061-054-Q1-K1-E5
agccttcggccacgccttcggccaagccttccgccaatccttccggaaggcaggacaaaatggtggcggccgtggcgtcgccttcgtcggcggaaccttccgccggccgtccccatccgacatacaaggaggaccttcggcaaggtaggtcacaacaacaacgatcaatgatagggctacgggagggcccgcccataggcgtgcctgtgaggccgagaagaagatcaccgtgctgatcaaggatgtttgaatcggggtcaccatgcttgatcaactgtgtggtgagcatgacaaactagtggatatcatcaccgtactcagcgcagagcatgacatagtcgtgcgccgaccaatgatatggaaaaggatctcgttggttcgtcatctctatcactttgcaaaaatctatgctcaaggcatattcaccatgcttctggc

SEQ ID NO: 1118 - DNA, 428 bp, Zea mays
  Clone ID: LIB3061-054-Q1-K1-E6
ggcaatcacagctggcatcttacctttatcacccttgttcctccaacaatcatcagccgtattacatcagttacctttggtgcatttattggcacaaaacatcagggcacaacaactacaacaacttgtgctagcaaaccttgctgcctactctcagcaacagcagtttcttccattcaaccaactagctgcattgaactctgcttcttatttgcaacaacaacaactaccattcagccagctacctgctgcctacccccagcaatttcttccattcaaccaactggcagcattgaactctcctgcttatttacagcagcaacaactactaccattcagccagctagctggtgtgagccctgctaccttcttgatacaaccacagttgttgccgttctaccagcacgctgcgcctaacgctggcaccc

SEQ ID NO: 1119 - DNA, 433 bp, Zea mays
  Clone ID: LIB3061-054-Q1-K1-E7
aaagcacaatagtgtaccaacaatggcagccaaaatattttgcttccttatgctccttggtctttctgcaagtgttgctaccgcaaccattttcccacaatgctcacaagctcctatagcttcccttcttcccccatacctctcaccagcggtgtcttcaatgtgtgaaaacccaattgttcaaccctacaggatccaacaggcaatcgcaacaggcatcttaccattatcacccttgttcctccaacaaccgtcagccctattacagcagttacctttggtccatttggtggcacaaaacatcagggcacaacaactacaacaacttgtgctagcaaaccttgctgcatactctcagcaacatcagtttcttccattcaaccaactggctgcattgaactctgctgcttatttgcaacaacaattaccattc

SEQ ID NO: 1120 - DNA, 411 bp, Zea mays
  Clone ID: LIB3061-054-Q1-K1-E8
gcgacgcggacggtctcagccgcaacgtggcgctaatccgggagctcaacactaatatggcccgcgtcgtggacctctacggcgacatgtcagggtccttcgcccgcgccgtcgccgccaagaaagacgccgcaggcgacaagtcgggccctaagaggccccgctccgccggcgctggagggcagcagcagtagagccggcgtcttatccagttaatccatcagaggaggctccgtcgtgattgacggcgggggtcaggaaacttcggggttggggtgggtgcactgcattggaaacctcctttttttttttctccgtccggtgaaaggtgacttgaatgatgtactgctggattaactagtttggtgttgagaattgagatggacatggcgtggacacctttctggtgtc

SEQ ID NO: 1121 - DNA, 397 bp, Zea mays
  Clone ID: LIB3061-054-Q1-K1-E9
gtgtggcaaaagtgaagaacctctacaaagaacttgacctagaggcggtatttcaggagtacgagaatgagagctacaagaagctgattgcagacattgaagcccagccaagcattgcggttcagaaagtgctgaaatccttcttgcacaagatctacaagaggcagaagtagggtgctcttggataaacgagctcaggagtcgttactccttcgcatgcttgacataaccggacttcctcacctggttgctctagtatgatgtggagcgtctagttaaaaaaaatcgatgtagtatgaagcaccttgctgctctgaatattaacaggcaattaaggcaaggtgctgtttcggtttggtggaccgcatgttgcagataataaattagttgttttgtc

SEQ ID NO: 1122 - DNA, 415 bp, Zea mays
  Clone ID: LIB3061-054-Q1-K1-F1
cgcaaattgcaccaagaaatccatcgagaggccgtcgacaggggaattaatggcgtcgtcgtctagcagcagccaccgtcgcctcatcctcgcagccgccgtcctgctctccgtgctcgcggctgccagcgccagcgccgggacctcctgcgtgccggggtgggccatcccgcacaacccgctcccgagctgccgctggtacgtgaccagccggacctgcggcatcgggccgcgcctcccgtggccggagctgaagaggagatgctgccgggagctggcggacatcccggcgtactgccggtgcacggcgctgagcatcctcatggacggcgcgatcccgccgggcccggacgcgcagctggagggccgcctagaggacctgccgggctgcccgcgggaggtgcagaggggattc

SEQ ID NO: 1123 - DNA, 422 bp, Zea mays
  unsure (1)..(422): unsure at all n locations; Clone ID: LIB3061-054-Q1-K1-F10
agcaaagcggcagtgcgtaaagaggatcgtcgaacagaacaagctggagatggtcatcggtctcgtcgggtgcctggctctgtcagctgccagcgcctctgcaatgcagatgccctgcccctgcgcggagctgcagggcttgtacggcgctggcgccggcctgacgacgatgatgggcgccggcgggctgtacccctacgcggagtacctgaggcagccgcagtgcagcccgctggcggcggcgccctactacgccgggtgtgggcagacgagcgccatgtaccagccgctccggcaacagtgctgccagcagcagatgaagatgatggacgtgcagtccgtcgcgcagcagctgcagatgatgatgcagcttgagcgtgccgctgccgncagcagcagcctgtacgagccagctctgatgc

SEQ ID NO: 1124 - DNA, 447 bp, Zea mays
  Clone ID: LIB3061-054-Q1-K1-D8
ctgacagcatggtcggcggcggcggcggtgatgcttccgcgaaaggcggacgaggctccaagcagagcggcggcggagtggagggtgagtcgagcaatgccacagaaaggcgaagagatgaagcaactgagaatgccctcgccgtgaaagggaatacccctagcaggggaacaatggcgatgacaccggggcagcttagcgcacgccaaaataggcagaacaggatcatgcaaaccctagctctgatccctccatcaggatctccgtttggcaggaatgaagaggttgcagccagccgtcaaaaactctaattcacttatgagcgccctaagaaacagtccgtgagcccccctagcgttttgcagtcctggcctcctctccgcaccatgcctagtatcgctgctgccattcagcttttgggagacgcctatataatgcgcctgatct

SEQ ID NO: 1125 - DNA, 435 bp, Zea mays
  Clone ID: LIB3061-054-Q1-K1-C5
cagaaacacaccaagcgaagctacctagcaacgacttaacaacaatggctaccaagatattagccctccttgcgcttcttgccctttttgtgagcgcaacaaatgcgttcattattccacaatgctcacttgctcctagtgccattataccacagttcctccgaccagttacttcaatgggcttcgaacacctagctgtgcaagcctacaggctacaacaagcgcttgcggcgagcgtcttacaacaaccaattaaccaattgcaacaacaatccttggcacatctaaccatacaaaccatcgcaacacaacagcaacaacagttcctaccagcactgagccaactagatgtggtgaaccctgtcgcctacttgcaacagcaggtgcttgcatccaacccacttgctctggcaaacgtagctgcataccaacaac

SEQ ID NO: 1126 - DNA, 426 bp, Zea mays
  Clone ID: LIB3061-054-Q1-K1-C6
ctttagtatgtgaaaacccagcccttcaaccctacaggatccagcaagcaatcgcaacaggcaacttacctttatcacacctgttctttcaacaatcgccagccctatctttggtgcagtcattggtacaaaccatcagggcagaacagttgcagcaactcgtgctaccagtgatcagccaagtagctctggcaaacctttccccctactctcagcaacaacaatttcttccattcaaccaactgtctatactgaaccctgctgcttatttgcagcaacaacaactactaccattcatgcagctagctactgcctactctcagcagcaacaatttcttccatttaaccaattggccgcactgaacccctatgcttatttccagcagcaaatactactaccatttggccagctagctacaacaagcc

SEQ ID NO: 1127 - DNA, 322 bp, Zea mays
  Clone ID: LIB3061-054-Q1-K1-C7
agatggctcaagatcgcacgcacaccatcaagccggcatgcatgcgctgtgctgtcgcggccctggtgaccgtgaccatctgccaaggctacgtcgagcggcagatgctcatggacctgcagtgctggcaggaggtccaggagagcccgatcgacgcgtgccgtcaggtcctcgaccgccagttaaccggcagctgcatcagcggcccgttccagtggtgcaccgggctccggatgcagtgctgcacagcagctccagtacatgagccgcgagtgccgatgcgccgacatccggagcatggtcaggagctacgaggaagcca

SEQ ID NO: 1128 - DNA, 437 bp, Zea mays
  Clone ID: LIB3061-054-Q1-K1-C8
caacatacaaagcacaatcgtgtaccaacaatggcagccaaaatattgtgcttccttatgctccttggtctttctgcaagtgctgctaccgcaaccatttttccacaatgctcacaagctcctatagcttactttcttaccccatacctctcaccagcggtgtcttcagtatgtgaaaacccaattcttcaaccctacaggatccaacaggcaatcgcagcacgcatcttacctttatcacccttgttcctacaacaaccgtcagtcctattacagcagttacctttgctgcatttgctggcacagaacatcaaggcacaacaactacaacaacttgtgctacgaaaccttgctgtctactctcagcaacagcagtttcttccattcaaccaactggctgcattgaactctgctgcttatttgcaacaacaactacc

SEQ ID NO: 1129 - DNA, 429 bp, Zea mays
  unsure (1)..(429): unsure at all n locations; Clone ID: LIB3061-054-Q1-K1-C9
ggcgaaagagtagcagcagcaggccgggccgagtaacggcttcccacctcgagcttgccaccatggctagaggattgaagaagcatttgaagaggctcaatgcgcccaagcattggatgctggacaagcttggcggagcttttgctcccaagccatcttctggacctcacaagtctagggagtgcctgccactgatcctcatcatcaggaacaggctcaagtatgctcttacataccgtgaggtcatttccatcctgatgcaacgccatgtacttgttgatggcaaggtcaggacagacaagacctaccctgctgggttcatggatgtcatttccatccccaagaccaatgagaactacaggctgctgtacgataccaagggccgcttncgncttcacccaatcagggatgaggatgctaagttcaagc

SEQ ID NO: 1130 - DNA, 428 bp, Zea mays
  Clone ID: LIB3061-054-Q1-K1-D1
atttagaccaactagcaacatagaaagcacaatagtgtaccaacaatggcagccaaaggattttgcctccttatgctccttggtatttctgcaagtgctgctacggcgaccattttcccgcaatgctcacaagctcctatagcttcccttcttcccccgtacctctcaccagcggtgtcttcggtatgtgaaaacccaattcttcaaccctacaggatccaacaggcaatcgcagctggcatcttacctttatcacccttgttcctccaacaatcatcagccctattacagcagttacctttggtgcatttattggcacaaaacatcagggcacaacaactacaacaacttgtgctagcaaaccttgctgcctactctcagcaacagcagtttcttccattcaaccaactagctgcattgaactctgc

SEQ ID NO: 1131 - DNA, 431 bp, Zea mays
  Clone ID: LIB3061-054-Q1-K1-D10
aaaacacaccaagcgaagcgcactagcaacgacctaacaccaatggctaccaagatattagccctgcttgcgcttcttgcccttttagtgagcgcaacaaatgcgttcattattccacagtgctcacttgctcctagtgccattattccacagttccttccaccagttacttcaatgggcttcgaacattcagccgtgcaagcctacaggctacaactagcgcttgcggcgagcgccttacaacaaccaattgcccaattgcaacaacaatccttggcacatctaaccctacaaaccattgcaacgcaacaacaacaacaacaacagtttctgccatcactgagccacctagccgtggtgaaccctgtcacctacttgcaacagcagctgcttgcattcaacccacttgctctggcgaacgtagctgcata

SEQ ID NO: 1132 - DNA, 411 bp, Zea mays
  unsure (1)..(411): unsure at all n locations; Clone ID: LIB3061-054-Q1-K1-D11
ggcagccaaaatattttggcttcttaagcttcttgggctttctgcaagtgctggttccgggaccatttttccaccatggttaacaggttctaatggtttccttttttccccggaccttttaacaaccggggtttcgtatggggaaaccccattctttaaccctataggatccaacaagcaatcgcagctggcatcttacctttatcacccttgttcctccaacaatcatcagccctattacagcagttacctttggtgcatttattggcacanaacatcagggcacaacaactacaacaacttgtgctagcaaaccttgctgcctactctcagcaacaacagtttcttccattcaaccaactagctgcattgaactctgcttcttatttgcaacaacaacaactaccattc

SEQ ID NO: 1133 - DNA, 432 bp, Zea mays
  Clone ID: LIB3061-054-Q1-K1-D12
caacaagcaacatagaaagtggaatccagtagcaacaatagagcaacaatggcgaccaagatactgtccctccttatgctccttgctctttctgcatgtgttgctaacgcgacaattttccctcaatgctcacaagctcctatagcttcccttcttcccccataccttccatcaatgatagcttcagtatgtgaaaacccagctcttcaaccctataggctccaacaagcaatcgcagcaagcaacatacctttatcacccttgtttcaacaatcgccagccctatctttggtgcagtcattggtacaaaccatcaaggcacagcagctgcagcaactcgtgctacctgtgatcaaccaagtagctctggcaaacctttctccctactatcagcaacaacaatttcttccattcaaccaactatctacactg

SEQ ID NO: 1134 - DNA, 427 bp, Zea mays
  unsure (1)..(427): unsure at all n locations; Clone ID: LIB3061-054-Q1-K1-D3
ctctcaaccactcatcatcgcctacgcaggcatcgccctgtcgccgggccgtacgattgcgccatggcttccgatgagagcaaaaattcaaaaccagagaagccatcttcagcagctggtgcaggcctgcccaatccgtttgatttttcttctatgagcaacttgctcaatgacccatcgataagagagatggctgagcaaattgcaagtgaccctgtgttcaaccagatggctgaacagcttcagaaaagtgctcagggtgctggagaacagggtattcctgcattggatcctcaacagtatatggaaacaatgcaacaagtcatgcaaaaccctcagtttgagtcaatggcagagcgtcttgtgaatgcccttatgcaggatcctgctatgtccagtatgctngagaacttgaccagtccagctc

SEQ ID NO: 1135 - DNA, 225 bp, Zea mays
  Clone ID: LIB3061-054-Q1-K1-D4
ctctcatcgacagagatagagcgagagtaacatgcgcgcgtggctgcagcgcacacgtgcggcgcggatcacaacaacagctgatcctcagaggtagggaagccatgttcagaaagtcgtgcaagaatgaagaattcgagaaatcctacgtgtatgacgaggcagatgagtggcagaaggacgacaaggataagtgagtaagttgcaagtgagactaggttaaag

SEQ ID NO: 1136 - DNA, 434 bp, Zea mays
  unsure (1)..(434): unsure at all n locations; Clone ID: LIB3061-054-Q1-K1-D5
gcagcttctgcttgctctggggggaaggagagagagagagcgagagagagagagagatctagtagagaggctagtaggtggtcctcgaacgaagatgttggcggtgttcagcgggcaggtggtggaggtgccggcggagctggtggcggcgggcagccggacgccgtcgcccaagacgaaggcgtcgcagctcgtggggcgcttcctggccgcgtccgagccggccgtgtccgtgcagctcggcgaccacggccacctcgcctactcccacaccaaccaggcgctcctccgccccaggtcgttcgcggccaaggacgaggtgttctgcctgttcgaaggggtgctggacaacctgngtcggctgagccagcagcacgggctgtcaagcaagggcgccaacgaggtgctcctcgtcatcgaggcctacaagacgc

SEQ ID NO: 1137 - DNA, 434 bp, Zea mays
  Clone ID: LIB3061-054-Q1-K1-D6
agcaaagcggcagtgcgtagagaggatcgtcgaacagaacagcatgaagatggtcatcggtctcgtcgtgtgcctggctctgtcagctgccagcgcctctgcaatgcagatgccctgcccctgcgcggggctgcagggcttgtacggcgctggcgccggcctgacgacgatgatgggcgccggcgggctgtacccctacgcggagtacctgaggcagccgcagtgcagcccgctggcggcggcgccctactacgccgggtgtgggcagacgagcgccatgtaccagccgctccggcaacagtgctgccagcagcagatgaggatgatggacgtgcagtccgtcgcgcagcagctgcagatgatgatgcagcttgagcgtgccgctgccgccagcagcagcctgtacgagccagctctgatgcagcagcagcagc

SEQ ID NO: 1138 - DNA, 436 bp, Zea mays
  unsure (1)..(436): unsure at all n locations; Clone ID: LIB3061-054-Q1-K1-D7
cggacgcgtggngtgccatcaatgtacatagagctataatttctgagattggaagacggattactgcggcattatctttaccaagtctggcaaccatggtggcgtccttattcattatattctatctgagatgcaggggaattcatcccacaacagtttctactaagaaggaaatacatggttctactttctcatcttggcctttctccccaaatcggactgttctgctgtctgggcctgaaattttgcatggtatttcctgtgaactagttgtgtataggggcaaaaagagtgtcgtgtaagctgtgttttttcgtgacgaaaaatgtcgcaccgcctgttgtgttatgagtcgggttgtaccaaattttgcgaaacggcagcggtttttttgcacccnctgttgccatctggggtgatgtacatattttttttt

SEQ ID NO: 1139 - DNA, 448 bp, Zea mays
  unsure (1)..(448): unsure at all n locations; Clone ID: LIB3061-054-Q1-K1-C4
caactagcnaacttagaaagcaccattagtggtcccaccaatggcaggcaaaaatatttggcgtgccttaggctcccttggtctttctgcaagtgttgctaccgcaaccattttcccacaatgctcacaagctcctatagcttcccttcttcccccatacctctcaccagcggtgtcttcaatgtgtgaaaacccaattgttcaaccctacaggatccaacaggcaatcgcaacaggcatcttaccattatcacccttgttcctccaacaaccgtcagccctattacagcagttacctttggtccatttggtggcacaaaacatcagggcacaacaactacaacaacttgtgctagcaaaccttgctgcatactctcagcaacatcagtttcttccattcaaccaactggctgcattgaactctgctgcttatttgcaacaacaatta

SEQ ID NO: 1140 - DNA, 432 bp, Zea mays
  Clone ID: LIB3061-054-Q1-K1-B12
attgagaccaactagcaacatagaaagcacaatagtgtaccaacaatggcagccaaaatgattttgcctccttatgctccttggtctttctgcaagtgctgctacggcgaccattttcccgcaatgctcgcaagctcctatagcttcccttcttcccccgtacctctcaccagcggtgtcttcggtatgtgaaaacccaattcttcaaccctacaggatccaacaggcaatcacagctggcatcttacctttatcacccttgttcctccaacaatcatcagccctattacatcagttacctttggtgcatttattggcacaaaacatcagggcacaacaactacaacaacttgtgctagcaaaccttgctgcctactctcagcaacagcagtttcttccattcaaccaactagctgcattgaactctgcttc

SEQ ID NO: 1141 - DNA, 364 bp, Zea mays
  Clone ID: LIB3061-054-Q1-K1-B3
ggacggcggaggagatggcggaggcggcgaggcaggccgtcgcggcgctggagacgctggagcaggcgttcagggagtgctccaaggggaaggccttcttcggaggggacagggggctcgtcgactcggctcggggcttgtgggtggctgtacgccaccgagccatctgcggtgaagccctgaccgcggagccgtgtgcgggcgacggttgcgctgagggcaggctgtccgacggacagtttgagataccaagcagcgccgattggctgcgccgtccgccttagcatagtggacatggttcttttctttttttttaaaaaaaaattatatgttctatgtttgtttgaaataaagtactgttatg

SEQ ID NO: 1142 - DNA, 441 bp, Zea mays
  unsure (1)..(441): unsure at all n locations; Clone ID: LIB3061-054-Q1-K1-B4
ggagacttcggccttagcaagatcatcaaagctcagcatgcgaatgatgtatacaagatgactggagagacaggaagctatcggtacatggcccctgaagttttcaagcaccggaaatatgacaagaaagttgatatcttctcttttgccatgattctatatgagatgctggaaggtgattcacccttctccaactacgaaccttatgaggctgctaagtacgtggcagatgggcatcgtccggttttccgtaaaaatcataccactgagttgaaagatttggttgagctatgttggtctggggatatcagtctgagaccatctttcttggagatcctcaagaggcttgagaagctcaaggagcattattcacacgagaaccactggcatttgttccagtagcagtgcgcatataatcatacagtatatnnttttactatg

SEQ ID NO: 1143 - DNA, 312 bp, Zea mays
  Clone ID: LIB3061-054-Q1-K1-B6
caatagtgtaccaactatggcagccaaaatattttgcctacttatgctcctgggtctttctgcaagtgctgctacggcgaccatattgccacaatgctcacaagctcctatagcttaccttcttccatcgtacctgtcaccagctgtgtctaacgtatgtgaaaacccaatgcttcatctatataggatccaactggtattcgcagtttgcatcttacctttatcactctagttcctacagcaatcatcagctatattacagcacttacctatggtgcatagattgacccaaaacattaggtctcatcaact

SEQ ID NO: 1144 - DNA, 435 bp, Zea mays
  Clone ID: LIB3061-054-Q1-K1-B7
ggaaagccgctcacctgaaagaactggaagaccaggtagcacagctaaaagccgagaatgcttgcctgctgaggcgcattgccgctctgaaccagaagtacaacgacgctaacgtcgacaacagggtgctgagagcggacatggagaccctaagagctaaggtgaagatgggagaggactctctgaagcgggtgatagagatgagctcatcagtgccgtcgtccatgcccatctcggcgccgacccccagctccgacgctccagtgccgccgccgcctatccgagacagcatcgtcggctacttctccgccacagccgcagacgacgatgcttcggtcggcaacggtttcttgcgactgcaagctcatcaagagcctgcatccatggtcgtcggtggaactctgagcgccacagagatgaaccgagtagcagcag

SEQ ID NO: 1145 - DNA, 438 bp, Zea mays
  Clone ID: LIB3061-054-Q1-K1-B8
cagaaacacaccaagcgaagcacattagcaacaacctaacaacaatggctaccaagatgttatccctccttgcgcttcttgcgctttttgcgagcgcaacaaatgcgttcattattccacaatgctcacttgctccaagttccattattacacagttcctgccaccagttacttcaatgggcttcgaacacccagctgtgcaagcctataggctacaacaagcaattgcggcgagcgtcttacaacaaccaatttaccagttgcaacaacaatccttggcacatctaacaatacaaaccatcgcaacgcaacagcaacaacaattcctaccagcactgagccacctagccatggtgaaccctgccgcctacttgcaacagcagttgcttgcatcatacccacttgctctggcacacgtagttgcaaaccagccacaac

SEQ ID NO: 1146 - DNA, 435 bp, Zea mays
  Clone ID: LIB3061-054-Q1-K1-B9
ggctaccaagatattagccctccttgcgcttcttgcccttttagtgagcgcaacaaatgcgttcattattccacagtgctcacttgctcctagtgccattattccacagttcctcccaccagttacttcaatgggcttcgaacatccagccgtgcaagcctacaggctacaactagcgcttgcggcgagcgccttacaacaaccaattgcccaattgcaacaacaatccttggcacatctaaccctacaaaccattgcaacgcaacaacaacaacaacaacagtttctgccatcactgagccacctagccgtggtgaaccctgtcacctacttgcaacagcagctgcttgcatccaacccacttgctctggcgaacgtagctgcataccagcaacaacaacagctgcaacagtttatgccagtgctcagtcaact

SEQ ID NO: 1147 - DNA, 430 bp, Zea mays
  Clone ID: LIB3061-054-Q1-K1-C1
attggcacaaaacatcagggcacaacaactacaacaacttgtgctagcaaaccttgctgcctactctcagcaacagcagtttcttccattcaaccaactagctgcattgaactctgcttcttatttgcaacaacaacaactaccattcagccagctacctgctgcctacccccagcaatttcttccattcaaccaactggcagcattgaactctcctgcttatttacagcagcaacaactactaccattcagccagctagctggtgtgagccctgctaccttcttgatacaaccacagttgttgccgttctaccagcacgctgcgcctaacgctggcaccctcttacaactgcaacatttgctgccattcaaccaacttgctttgacaaacccagcagcgttctaccaacaacccatcattggtggtgcc

SEQ ID NO: 1148 - DNA, 433 bp, Zea mays
  unsure (1)..(433): unsure at all n locations; Clone ID: LIB3061-054-Q1-K1-C10
caactagcaacatagaaagcacaatagtgtaccaacaatggcagccaaaatattntgccgccttatgctccttggtctttctgcaagtgctgctacggcgaccattttcccgcaatgctcgcaagctcctatagcttcccttcttcccccgtacctctcaccagcggtgtcttcggtatgtgaaaacccaattcttcaaccctacaggatccaacaggcaatcacagctggcatcttacctttatcacccttgttcctccaacaatcatcagccctattacatcagttacctttggtgcatttattggcacaaaacatcagggcacaacaactacaacaacttgtgctagcaaaccttgctgcctactctcagcaacagcagtttcttccattcaaccaactagctgcattgaactctgcttcttatttgcaa

SEQ ID NO: 1149 - DNA, 429 bp, Zea mays
  unsure (1)..(429): unsure at all n locations; Clone ID: LIB3061-054-Q1-K1-C11
gccacgcgttcggcttccccttccggttcggttccggttcctgaaggttttccggggtcgggttgtgtggttaaccggatcaagatggcggcttcggattgtgaataccgctgcttcgtcggcggcctcgcctgggccacggacgaccactcccttcacaacgccttcagcacctacggcgaggtcctcgagtccaagatcatcctcgatcgggagacgcagaggtcccgcggcttcggcttcgtcaccttctccacggaggaggcgatgcggaacgccatcgagggcatgaacggcaaggagctggacggccgcaacatcaccgtcaacgaggcccagtcccgcggcggccgtggaggcggcggcggcggcgggtacggtggtggccgtggaggcggcggctacggcngtggcgggcgccgtgatggc

SEQ ID NO: 1150 - DNA, 430 bp, Zea mays
  Clone ID: LIB3061-054-Q1-K1-C12
gtctcttaaaagtgctagcagggatcgacacaaacttcacggtcacatcaaaggcaaccgatgatgatggtgattttgctgagctgtatgtgttcaagtggacaactcttctgatcccccccaccactgtgcttgtgattaacctggttggtatagtggctggagtgtcgtatgctatcaacagtggctaccaatcatggggtccactattcgggaagctgttctttgcaatctgggtgatcctccacctctaccctttcctgaagggtctcatggggaagcagaaccgcacaccgaccatcgtcatcgtttggtccgtccttcttgcttccatattctcgctgctgtgggtgaagatcgaccccttcatatcccctacccagaaggctctttcccgtgggcagtgtggtgtaaactgctgaaatgatcc

SEQ ID NO: 1151 - DNA, 424 bp, Zea mays
  unsure (1)..(424): unsure at all n locations; Clone ID: LIB3061-054-Q1-K1-C2
acagtaactagctagcagatcaaacaagtagcgacagctcgacaaagatttgtgagagtgatccggcgctgagaagagatggctaagatcgccgcagccgccgcggcggcggcggcgctgtgcttcgcggccctggtggccgtggccgtctgccaaggcgaggtcgagcggcagaggctcagggacctgcagtgctggcaggaggtccaggagagcccgctcgacgcgtgccgtcaggtcctcgaccggcagctaaccggcggcggcgtcggcggcccgttccggtggggcaccgggctccggatgcggtgctgccagcagctccaggacgtgagccgcgagtgccgctgcgccgacatccggagcatggtcaggggctacgaggaggccatgccgnctctggagaaaggctggtggccatggg

SEQ ID NO: 1152 - DNA, 430 bp, Zea mays
  Clone ID: LIB3061-054-Q1-K1-C3
agaccattagctttatctactccagagcgcagaagaacccgatcgacaccatgagggtgttgctcgttgccctcgctctcctggctctcgctgcgagcgccacctccacgcatacaagcggcggctgcggctgccagccaccgccgccggttcatctaccgccgccggtgcatctgccacctccggttcacctgccacctccggtgcatctcccaccgccggtccacctgccgccgccggtccacctgccaccgccggtccatgtgccgccgccggttcatctgccgccgccaccatgccactaccctactcaaccgccccggcctcagcctcatccccagccacacccatgcccgtgccaacagccgcatccaagcccgtgccagctgcagggaacctgcggcgttggcagcaccccgatcctgggcca

SEQ ID NO: 1153 - DNA, 425 bp, Zea mays
  unsure (1)..(425): unsure at all n locations; Clone ID: LIB3061-054-Q1-K1-B11
tgcatttattggcacanaacatcagggcacaacaactacaacaacttgtgctagcaaacgttgctgcctactctcagcaacagcagtttcttccattcaaccaactagctgcattgaactctgcttcttatttgcaacaacaacaactaccattcagccagctatctgctgcctacccccagcaatttcttccattcaaccaactgacagcattgaactctcctgcttatttacagcagcaacaactactaccattcagccagctagctggtgtgagccctgctaccttcttgacacaaccacagttgttgccgttctaccagcacgctgcgcctaacgctggcaccctcttacaactgcaacaattgctgccattcaaccaacttgctttgacaaacccagcagcattctaccaacaacccatc

SEQ ID NO: 1154 - DNA, 383 bp, Zea mays
  Clone ID: LIB3061-053-Q1-K1-H8
gagcatacagaaacacaccaagcgaagcgcactagcaacgacctaacaacaagggctaccaagatattagccctccttgcgcttcttgccctttttgtgagcgcaacaaatgcgttcatgattccacaatgctcacttgctcctagtgccattattccacagtgcctgcgaccaggtacttcaatgggcttcgaacacctagctgtgcaagccaacatgcaacaacaagcgcttgcggcgagcagacttacaacaaccaattgcccaattgcaacaacaatgcttggcgcaactaacaatacaagccatgagcacgcaacagcaacaacagttcctaccagcactggaccaactagccatggtgaaccctggcgactacttgc

SEQ ID NO: 1155 - DNA, 442 bp, Zea mays
  unsure (1)..(442): unsure at all n locations; Clone ID: LIB3061-053-Q1-K1-H9
cccacgcgtccggggtctacaaatatacactactactccactaatgtcacatatcgacaaccaggtgatctcaagtaattaacagaaaatatattccatcattgaaaatgagttccgttgttttgggtgctactggtagggagaataagacatcatggcctgaggtggtgggcatgtccatcaaggaggcaagagagatcattcttaaagacatgcccaacgctaacattcaagttctaccggttggctcgcttgtgacccaagactttcgccctgatcgtgttcgcatcttcgttgatattgttgcccagactccaacagttggctgacaaggatatgccttatctataggccaaataaacaaagcctacttttatgtatcatggctaatacatcctacatttcttggtatccttgattggtttagctnattagctatatc

SEQ ID NO: 1156 - DNA, 282 bp, Zea mays
  Clone ID: LIB3061-054-Q1-K1-A1
ttatgcaccacgcactgccactgattcgctcactcgcccatcggactgctggcgtcctcatctatcgcgtcttgaccagtccatggctccatgcatgaataacaagggtgtgcgcggatctgtgatgccaaattctatcctcttcaagtgtcgaagcgttcgatcgtaggtctagtattgagcctgtgagcagcacacttactgttgcacatacatcagactctgcttcatgattcatcattatacatagcacaatgcatgcctactgatctacatcatact

SEQ ID NO: 1157 - DNA, 427 bp, Zea mays
  Clone ID: LIB3061-054-Q1-K1-A10
gcatatcatcatactggtcaaaccaagggcggccaggcacatttttcaaggtttggccctggacctttttaagggaataattggaaccaacctggaatttggcgtgatagagccatcgatgagcagagtctagatcattcactttgccacggaggctgccattactatcctgaggattgacgacatgatcaagcttaccaaggaagaagagggtaacgaagagtaagcagcccaccagtagtgggctagtggactcccatgggatggttgccatagcatgtagcacttgctgtttcacttatcgtgcacttatgcttgctgtgagcattcgttcgtaggaaaagtgaaaacggatgtgtatcaatccgtgctgggtgactatgactcacggatgaatcaaataattgcgtatattggggccaaaaca

SEQ ID NO: 1158 - DNA, 368 bp, Zea mays
  Clone ID: LIB3061-054-Q1-K1-A11
tcccgggcaccaacgcacattgcaccgagaaatccatcgagaggccgtcgacaggggaattaatggcgtcgtcgtctagcaggagaccgcgacgtctcatcctcgcaggcggcgtgctgctctgcgtgctcgcggctgccagcgccagcgccgggacctcctgcgtgccggagtgggccatcccgcacaacccgctcccgagctgccgctggtacgtgaccagccggacctgcggcatcaggccgagccgtccgtggccggagctgaagaggagatgctgccgggagctggcggacatcccggcgtactgccggtgcacggtgctgagcatcctcatggacggcgcgatcccgccgggcccggacgcg

SEQ ID NO: 1159 - DNA, 432 bp, Zea mays
  Clone ID: LIB3061-054-Q1-K1-A12
agaccaactagcaacatagaaagcacaatagtgtaccaacaatggcagccaaaatattttgcctcgttatgctccttggtctttctgcaagtgctgctacggcgaccattttcccgcaatgctcgcaagctcctatagcttcccttcttcccccgtacctctcaccagcggtgtcttcggtatgtgaaaacccaattcttcaaccctacaggatccaacaggcaatcgcagctggcatcttacctttatcacccttgttcctccaacaatcatcagccctattacaacagttacccttggtgcatttattggcacaaaacatcagggcacaacaactacaacaacttgtgctagcaaaccttgctgcctactctcagcaacagcagtttcttccattcaaccaactaggttcattgaactctgcttcttatt

SEQ ID NO: 1160 - DNA, 441 bp, Zea mays
  Clone ID: LIB3061-054-Q1-K1-A2
caacaagcaacatagaaagtggaatccagtagcaacaacagagcatcaatggcgaccaagatattctccctccttatgctccttgctctttctgcatgtgttgctaacgcgacaattttccctcaatgctcacaagctcctatagcttcccttcttcccccataccttccatcaatgatagcttcagtatgtgaaaacccagctcttcagccctataggctccaacaagcaatcgcagcaagcaacatacctttatcacccttgttgtttcaacaatcgccagccctatctttggtgcagtcattggtacaaaccatcagggcacagcagctgcagcaactcgtgctacctgtgatcaaccaagtagctctggcaaacctttctccctactctcagcaacaacaatttcttccattcaaccaactgtctacactgaaccct

SEQ ID NO: 1161 - DNA, 439 bp, Zea mays
  Clone ID: LIB3061-054-Q1-K1-A4
gcaacatagacagcacaatagtgtaccaacaatggcagtcaaaatattttgcctccttatgctccttggtatttctgcaagtgctgctacggcgaccattttcccgcaatgctcacaagctcctatagcttcccttcttcccccgtacctctcaccagcggtgtcttcggtatgtgaaaacccaattcttcaaccctacaggatccaacaggcaatcgcagctggcatcttacctttatcacccttgttcctccaacaatcatcagccctattacagcagttacctttggtgcatttattggcacaaaacatcaaggcacaacaactacaacaacttgtgctagcaaaccttgctgcctactctcagcaacagcagtttcttccattcaaccaactagctgcattgaactctgcttcttatttgcaacaacaacaacta

SEQ ID NO: 1162 - DNA, 339 bp, Zea mays
  Clone ID: LIB3061-054-Q1-K1-A5
gcgccaacgtctgcaggaccgaggggttccccggcggcaggtgccgcggcttccgccggcgctgcttctgcaccacgcactgccactgattcgctcgctcgcccagcggccggctggcgtcgccgtcgatcgcgtcgcgaccagtccatggctccatgcatgaataacaagggtgtccgcggtttgtgatgccaaattgtatcctcgtcgtgtgttgaagcgttcgatcgtcggtctagtagtgtgcctgtgagcagcggcgtgctgttgtacgtacgtctgcctctgttccatgtttcgggattttccatagcaaatgcatgcgtcgagatctacatc

SEQ ID NO: 1163 - DNA, 430 bp, Zea mays
  Clone ID: LIB3061-054-Q1-K1-A6
catcagtgcagcccgacggcgacgccctactgctcgcctcagtgccagtcgttgcggcagcagtgttgccagcagctcaggcaggtggagccgcagcaccggtaccaggcgatcttcggcttggtcctccagtccatcctgcagcagcagccgcaaagcggccaggtcgcggggctgttggcggcgcagatagcgcagcaactgacggcgatgtgcggcctgcagcagccgactccatgcccctacgctgctgccggcggtgtcccccactgaagaaactatgtgctgtagtatagccgctggctagctagctagttgagtcatttagcggcgatgattgagtaataatgtgtcacgcatcaccatgggtggcagtgtcagtgtgagcaatgacctgaatgaacaattgaaatgaaaagaaaaaagtatt

SEQ ID NO: 1164 - DNA, 337 bp, Zea mays
  Clone ID: LIB3061-054-Q1-K1-A7
acgttgagaaacacagcaagcgaaacggacttacaacggccttaaaaccattggctcccatggggttacccggccttgcgctaagtgccctttatgtgaccgcatcacaggcgtgcataattccacattgctcacttgctcctagtgccataatttcacagtttgtgccaccagttacttcaatgcgcttcgaacaactagctgtgcatgccaacatgcatcaacatgcgcttgctgccagcgtcttactacaactaattgcctaattgcgacaactatacttggcacatctagcaatacaagctatcacaacgcatcaggaacaacagctactacc

SEQ ID NO: 1165 - DNA, 425 bp, Zea mays
  Clone ID: LIB3061-054-Q1-K1-A9
attgagaccaacaagcaacatagaaagtggaatccagtagcaacaacagagcaacaatggcgaccaagatattttccctccttatgctccttgctctttctgcatgtgttgctaacgcgacaattttccctcaatgctcacaagctcctatagcttcccttcttcccccataccttccatcaatgatagcttcagtatgtgaaaacccagctcttcagccctataggctccaacaagcaatcgcagcaagcaacatacctttatcacccttgttgtttcaacaatcgccagccctatctttggtgcagtcattggtacaaaccatcagggcacagcagctgcagcaactcgtgctacctgtgatcaaccaagtagctctggcaaacctttctccctactctcagcaacaacaatttcttccattc

SEQ ID NO: 1166 - DNA, 429 bp, Zea mays
  unsure (1)..(429): unsure at all n locations; Clone ID: LIB3061-054-Q1-K1-B1
cactcatcagctattcttctcttctcctggacaactcaagctcaaaacccaagatcgaccttgtcgacccggatccgagctaggcacccgcacgaccacccgcctcctgccggtcaccgggacctagcatcgccgggcggcggcgggggaggggaaggtaggcgatgaggaaacgtgagcgggagaacccgtgcgggatctgcgggcactaccacaagtacgaggagggggaggtatgcggngtgtgcggtcaccgctggaaaccgtcggacggagagggcgccctgtcgaggcacgagtccgtcttccccacagaggtgctcaaggactttctcttcctcgggagctacgacaacgcctcacgctccgaggtcctcagaacgctcagtatctcccacatgcttaatactgtgcctgattgccacaatc

SEQ ID NO: 1167 - DNA, 450 bp, Zea mays
  Clone ID: LIB3061-054-Q1-K1-B10
cgggacctacttggatgtaccccgttccaggtggccaatgcacctacgtccctacaccaacagatgctgcaccaaattggcccaggtctgactcaactagctgcggcaaaccctgctgactacttacaacagttgcttacattcaaccaactggctgtgtcaaactctgctgcgtacctacaacagcgacaacagttacttaatccatagccagtggctaacccattggtcgctaccttactgcagcagcaacaacaattgctgccatacaaccagttctctttgatgaaccctgccttgcagcaacccatcgttggaggcgccatctttcagattacatatgagatgtactcgacaatggtgccctcataccgacatgtgattgctagaaataatcaatatattgactgagatctatctcgatatattcctgaactatgatcatcatat

SEQ ID NO: 1168 - DNA, 442 bp, Zea mays
  Clone ID: LIB3061-053-Q1-K1-H7
cagcattcaaaaacacaccaagcgaagcgcactagcaacgacctaacaccaatggctacgaagatattagccctccttgcgcttcttgcccttttagtgagcgcaacaaatgcgttcattattccacagtgctcacttgctcctagtgccattattccacagttcctcccaccagttacttcaatgggcttcgaacatccagccgtgcaagcctacaggctacaactagcgcttgcggcgagcgccttacaacaaccaattgcccaattgcaacaacaatccttggcacatctaaccctacaaaccattgcaacgcaacaacaacaacaacaacagtttctgccatcactgagccacctagccggggtgaaccctgtcacctacttgcaacagcagctgcttgcatccaacccacttgctctggcgaacgtagctgcatacc

SEQ ID NO: 1169 - DNA, 428 bp, Zea mays
  Clone ID: LIB3061-053-Q1-K1-G2
gtaagatgcctgttgcgattatcacccttgttcctccaacaaccgtcagccctattagagcagttacctttggtccatttggtggcacaaaacatcagggcacaacaactacaacaacttgtgctagcaaaccttgctgcatactctcagcaacatcagtttcttccattcaaccaactggctgcattgaactctgctgcttatttgcaacaacaattaccattcagccagctagttgctgcctacccccagcaatttcttccattcaaccaactagcagcattgaactctgctgcttatttacagcagcaacaactactaccattcagccagctagctgatgtgagccctgctgccttcttgacacaacaacaattgttgccgttctacctgcacgctatgcctaacgctggcaccctcttacaact

SEQ ID NO: 1170 - DNA, 443 bp, Zea mays
  unsure (1)..(443): unsure at all n locations; Clone ID: LIB3061-053-Q1-K1-G3
caacaacctaacaacaatggctaccaagatattatccctccttgcgcttcttgcgcttggggcgagcgcaacaaatgcgttcattattccacaatgctcacttgctccaagttccattattacacagttcctcccaccagttacttcaatgggcttcgaacacccagctgtgcaagcctataggctacaacaagcaattgcggcgagcgtcttacaacaaccaatttcccagttgcaacaacaatccttggcacatctaacaatacaaaccatcgcaacgcagcagcaacaacaatgtctaccagcactgagccacctaaccatggtgaaccctgccgnctacttgcaacagcagttgcttgcatcaaacccacttgctctggcaaacgtagttgcaaaccagccacaacaacagctgcaacagtttctgccagcgctcagtc

SEQ ID NO: 1171 - DNA, 357 bp, Zea mays
  Clone ID: LIB3061-053-Q1-K1-G4
attttcagcattcaaaaacacaccaagcgaagcgcactagcaacgacctaacaccaatggctaccaagatattagccgtccttgcgcttcttgcccttttagtgagcgcaacaaatgcgttcattattccacagtgctcacttgctcctagtgccagtattccacagttcctcccaccaattacttcaatgggcttcgaacatccagccgtgcaagcctacaggctacaactagcgcttgcagcgagcgccttacaacaaacaattgcccaattgcaacaacaatccttggcacatctaaccctacaaaccattgcaacgcaacaacaacaacaacagtttctgccatcactgaacc

SEQ ID NO: 1172 - DNA, 409 bp, Zea mays
  Clone ID: LIB3061-053-Q1-K1-G5
ctcctggctctcgctgcgagcgccacctccacgcatacaagcggtagctgcggctgccagccaccgccgccggggcatctaccgccgccggtgcatctgccacctccggttcacctgccacctccggtgcatctcccaccgccagagcacctgtcgtcgccgatccacctgccaccggcgatccatgtgccgtcgacggctcatctgccagcaggcaccatgccactaccgctactcaaccagcccggcctcagagatcatccgcagtcacacccatgcccaggccaacagttcatttactataccgtgccaactgcatggaacctgcgaagttggcggcaccccgatcctgggccaatgcgtctagtctgtgaggcatcacggcagcccgacggcgacgccctactga

SEQ ID NO: 1173 - DNA, 392 bp, Zea mays
  Clone ID: LIB3061-053-Q1-K1-G6
agaaagcacaatagtgtaccaacaatggcagccaaaatattttgcctccttatgctccttggtctttctgcaagtgctgctacggcgaccattttcccgcaatgctcgcaagctcctatagcttcccttcttcccccgtacctctcaccagcggtgtcttcggtatgtgaaaacccaattcttcaaccctacaggatccaacaggcaatcacagctggcatcttacctttatcacccttgttcctccaacaatcatcagccctattacatcagttacctttggtgcatttattggcacaaaacatcagggcacaacaactacaacaacttgtgctagcaaaccttgctgcctactctcagcaacaacaggttctttcattcaacccactaac

SEQ ID NO: 1174 - DNA, 443 bp, Zea mays
  Clone ID: LIB3061-053-Q1-K1-G7
agcaacatagaaagcacaatagtgtaccaacaatggcagccaaaatattttgcctccttatgctccttggtctttctgcaagtgctgctacggcgaccattttcccgcaatgctcgcaagctcctatagcttcccttcttcccccgtacctctcaccagcggtgtcttcggtatgtgaaaacccaattcttcaaccctacaggatccaacaggcaatcacagctggcatcttacctttatcacccttgttcctccaacaatcatcagccctattacatcagttacctttggtgcatttattggcacaaaacatcagggcacaacaactacaacaacttgtgctagcaaaccttgctgcctactctcagcaacagcagtttcttccattcaaccaactagctgcattgaactctgcttcttatttgcaacaacaacaactacca

SEQ ID NO: 1175 - DNA, 447 bp, Zea mays
  Clone ID: LIB3061-053-Q1-K1-G8
gggcgctagggtttaaccccccaactgttcggtctctctctctccccgaatccaattgagcgtcatctagtccgggagccggcgacatggggtacctccaggaggcccgggagaatcacgtcaagaagaaggtcgaggaagctttgcggagcaaaatgaaacaaaaggctcttcaggaatgcgatttctattgttcaaaatatgctgagtgtgcacggggaagaacattttctgtggtatggcaatgccgcaaacaagcaaaagagttgaatgagtgccttcatcaatacacaaatgatgcaatcctggaagaaatgaagaaggcttatatgattgagcaaaagagcaaggagaataatcaataagcaaaaatccattgcacaatgtgcatcacgatcaccctggttgtatggatactgttggctttgatagaaactattcatgggt

SEQ ID NO: 1176 - DNA, 397 bp, Zea mays
  Clone ID: LIB3061-053-Q1-K1-G9
gggcgtcagcctagcaattagctcattgactccagattgcagaactggacaccatcgaggtgctgatcgttgcccttgctctcctggcgctcgctgcgagcgccgcctccagtacaagcggcggctgcggctgccagacaccaccgtttcatctaccgactccgttctatatgccgcctccgttctatctgccgccgcagcatcagccgtatccatggcaataccccactcaaccaccgcagctaagcccgtgccagcagttcggatcctgcggcgtcggcagcgtcggcagcccgttcctgggccagtgcgtcgagttcctgaggcaccagtgcatcccggcggctacgccctacggctcgccacagtgccaggcgctgcagtagcaatgctgcca

SEQ ID NO: 1177 - DNA, 79 bp, Zea mays
  unsure (1)..(79): unsure at all n locations; Clone ID: LIB3061-053-Q1-K1-H10
cgcgtncgggataataaagttttttgtacgatgtttgtggcttaccagaaatgagaaagttcaggactagattcttaac

SEQ ID NO: 1178 - DNA, 387 bp, Zea mays
  Clone ID: LIB3061-053-Q1-K1-H11
caacaacccatcattggtggtgccctcttttagatttcttatgaggtatagttcagtgaataaagttttatgtctgaaaaaaaaaaaaaaaaaaaataaaaaataaaaaataaaatacaaaaaaataaataaatactaaaaaaaataaaaaaacatcaaaatcaagaagtgatggccatgaatatacaacgatgcaatcatagatcaactcttacagacatgcccatcgctaacattgaaatactaccgactgtctcgttctggacccaatactaacacgctgatcctgatcgcatcttccttcatattgtcagccagactgcaacatgggacttacactgatatgccttatcaatagcccaaattgacaaaagttagtgctatgta

SEQ ID NO: 1179 - DNA, 349 bp, Zea mays
  unsure (1)..(349): unsure at all n locations; Clone ID: LIB3061-053-Q1-K1-H12
ccaactagcaacatagaaagcacaatagtgtaccaacagtggcagctaagatattttgcctccttatgctccttggtctttctgcaagtgctgctacggcgaccattttcccacaatgctcacaagctcctatagctttccttcttcccccgtacctctcaccaacggtgtcttcggtatgtgaaaacccaattcttcaaccctacaggatccaacaggcaatcgcagctggcatcttacctttatcacccttgttccttcaacaatcatcagccctattacagcagttacctttggtgcatttattggcacanaacatcanggcacaacaactacaacaacttgtgct

SEQ ID NO: 1180 - DNA, 387 bp, Zea mays
  Clone ID: LIB3061-053-Q1-K1-H2
atcgcgagggccgccctttttttttttttttttttttttttttttttttttttttttggtggggaccatattgtgaaatgggacttagtaagcattcctcggtacaggaggtgaacaaaacctgcgctctaagagcgttgccgtcctaaaaattattatgcatcaagcgcaaacttttcccagcgcaaaaaagacctatttcgcctgttaaatgagttcctctcatcataaggatgacggacaagagttttccgttacgattaaaaaaggatgctggaactaatctttagaatggctgatacaattcccctgttccaaatatgatctcagggaacactgaacaaaaaaatcaggccctggctttaaatccagcctttgcttgtgggg

SEQ ID NO: 1181 - DNA, 445 bp, Zea mays
  Clone ID: LIB3061-053-Q1-K1-H3
gcgctccgccgccatccgccggcgagatggcgttgtacctgctgttcgagtcggcctggggctacggcctattccatgcgtacggtatcgatgagatcgggcagagcgatgaggccgtgcgctcctacgtgctggacctcgaccgcttaggcaaggccgtcaagctcactggcttcaatcctttctgctctgccgtcgacgcgctcaaccagtgcaacgctatctctgaaggaatcatgaccgatgagttgaggagcttgctggagctgaacctgccgaagcctaatgaggggaagaaggccaaatacagcctcggcgttgtcgagcccaaggtcggctcccacatctccgaagtcaccggcatcccctgtcagagcaacgagttcgtacaggaactggttcgcggtgtacggcttcactttgaccgtttcatcaacgagcttaa

SEQ ID NO: 1182 - DNA, 380 bp, Zea mays
  Clone ID: LIB3061-053-Q1-K1-H5
gtcagctagctgctgcctacccccagcaatttcttccattcaaccaactggcagcgggggactctgctgcttatttacaacagcaacagataccaccattcagccagctatcttgtgtgagccctgttgccttcttgacacaacgacagttgttgccagtctacctgcacgctgcgcctaacgctggcaccctagtacaactgcagcaatagctgacattcaaccaacttgctttgaaagacccaactactagtctaccaacaacccatcattggaggtgacctatattagattgcttatgagttgtacttcaataatgaactttttcggatgatgtttgtggctgcccagaaataagaatgttcatttctagattctta

SEQ ID NO: 1183 - DNA, 418 bp, Zea mays
  Clone ID: LIB3061-053-Q1-K1-H6
cagcattcaaaaacacaccaagcgaatcgcactagcaacgacctaacaccaatggctgcgaagatattagccctccttgcgcttcttgcccttttagtgagcgcaacaaatgcgttcattattccacagtgctcacttgctcctagtgccattattccacaagtcctaccaccagttacttcaatgggcttcgaacatccagtcgtgcaagcctacaggctacaactagcgcttgcggcgaaaagccttacaacaaccaattgcccaattgcaacaacaatccttggcacatctaaccctacaaaccattgcaacgcaacaacaacaacaacaacagtttctgccatcactgagccacctagccgtggtgaaccctgtcacctacttgcaacagcagctgcttgcattcaacccactt

SEQ ID NO: 1184 - DNA, 442 bp, Zea mays
  Clone ID: LIB3061-053-Q1-K1-G11
gatcagcaaagcggcagtgcgtagagaggatcgtcgaacagaacagcatgaagatgggcatcgttctcgtcgtgtgcctggctctgtcagctgccagcgcctctgcaatgcagatgccctgcccctgcgcggcgctgcagggcttgtacggcgctggcgccggcctgacgacgatgatgggcgccggcgggctgtacccctacgcggagtacctgaggcagccgcagtgcagcccgctggcggcggcgccctactacgccgggtgtgggcagacgagcgccatgtaccagccgctcacgcaacagtgctgccagcagcagatgaagatgatggacgtgcagtccgtcgcgcagcagctgcagatgatgatgcagctcgagcgtgccgctgccgccagcagcagcctgtacgagccagctctgatgcagcagcagcagcagct

SEQ ID NO: 1185 - DNA, 328 bp, Zea mays
  Clone ID: LIB3061-053-Q1-K1-E5
gcggcggctgtggctgccagacaccaccgtttcatctaccgcctccgttctatatggcgcctccgttctatctgccgccgcagcagcagccgcagccatggcaataccccactcaaccaccgcagctaagcccgtgccagcagttcggatcctgcgacgtcggcagcgtcggcagcccgttcctgggccagtgcgtcgagttcctgaagcaccagtgcagcccggcggcgacgcccgtacggctcgccacagtgccaggcgctgcagcagcagtgctgccaccggatcaggcaggtggagccgctgcaccggtaccaagcgaaatacg

SEQ ID NO: 1186 - DNA, 436 bp, Zea mays
  unsure (1)..(436): unsure at all n locations; Clone ID: LIB3061-053-Q1-K1-E6
gctagggtttctcccacccgtcgccgccgccggctgcacccgccgtcgtccacggccggtccctccagctcccgccgcgcgcgctcccgccgctggacgctccagctcttgcacgcattctcggccgccgtcgcgcctgcacgccgctcctctgcggccgctccagcttgcccgcgcgtgctcccctcgactgctctagcttctgcacgccgtcggtcaccaatcgtcgcctactacgacttcggccttcaagcggcagcttcatccgcgacgtccgcgtcgccgtcttgcgccacgacctcacccgagcgctctgcctactcccgaagccctcctccggggcgcccggcccagcagttcctccttcgcagcgcccgccccatcagttcctcctncgcggtgcccgtcgacccgncgagcaccagcagcagcgtcg

SEQ ID NO: 1187 - DNA, 459 bp, Zea mays
  Clone ID: LIB3061-053-Q1-K1-E7
ccaagcgaagcgcactagcaacaacctaacaacaatggctaccaagatattatccctccttgcgcttcttgcgctttttgcgagcgcaacaaatgcgtccattattccacaatgctcacttgctcctagttccattattccacagttcctcccaccagttacttcaatggccttcgaacacccagctgtgcaagcctataggctacaacaagcgattgcggcgagcgtcttacaacaaccaattgcccaatggcaacaacaatccttggcacatctaacaatacaaaccatcgcaacgcaacagcaacaacagttcctaccagcactgagccaactagccatggtgaaccctgtcgcctacttgcaacagcagctgcttgcatccaacccacttgctctagcaaacgtagttgcaaaccagcaacaacaacaactgcaacagtttctgccagcgcttaa

SEQ ID NO: 1188 - DNA, 412 bp, Zea mays
  unsure (1)..(412): unsure at all n locations; Clone ID: LIB3061-053-Q1-K1-E9
gcgacgcggacggtctcagccgcaacgtggcgctaatccgggagctgaacactaaggtcgcccgcgtcgtggacctctacngcgacatgtcagggtccttcgcccgcgccgtcgccgccaagaaagacgccgcaggcgacaagtcgggccctaagaggccccgctccgccggcgctggagggcagcagcagtagagccggcgtcttatccagttaatccatcagaggaggctccgtcgtgattgacggcggcggtcaggaaacttcggcgttggggtgggtgcactgcattggaaacctccttatttttttctccgtccggtgaaaggtgacttgaatgatgtactgctggattaactagtttggtgttgagaattgagatggacatggcgtggacaccttcttgttgtcaa

SEQ ID NO: 1189 - DNA, 443 bp, Zea mays
  unsure (1)..(443): unsure at all n locations; Clone ID: LIB3061-053-Q1-K1-F1
ggcatatgtgaagactcctcgtggccttcgcacactcaactctgtttgggcccaacatgttagcgaagaagtgaggagaaggttctacaagaactggtgcaagagcaagaagaaggctttcacaaagtatgctctcaaatatgaaaatgatgctggcaagaaggaaattcagctgcagcttgagaagatgaagaaatatgcttctgttatccgtgtcattgctcatacccagattaggaagatgaagggtttgaagcagaagaaggctcacctgatggagattcangtcaatggtggtaccattgctgacaaggtggactatggctacaaattctttgaaaaagaggtcctgttgatgctgtcttccagaaagatgagatgattgacatcattggtgtgaccaaggggaaaggttatgagggtgtggtcactcgttggggtgt

SEQ ID NO: 1190 - DNA, 307 bp, Zea mays
  Clone ID: LIB3061-053-Q1-K1-F10
attgagaccaactagcaacatagaaagcacaatagtgtaccaacaatggcagccagaatattttgcctccttatgctccttggtctttctgcaagtgctgctacggcgaccattttcccacaatgctcacaagctcctatagcttcccttcttcccccgtacctctcaccagcggtgtcttcggtatgtgaaaacccaattcttcaaccctataggatccaacaggcaatcgcagctggcatcttacctttatcacccttgttcctccaacaatcatcagccctattacagcagttacctttggtgc

SEQ ID NO: 1191 - DNA, 343 bp, Zea mays
  Clone ID: LIB3061-053-Q1-K1-F11
gtcgaactctgctgcgtacctacaacagcgacaacagttacttaatccattggtaggggctaacccattggtcgccgccttcctacagcagcaacaattgctgccatacaaccagttctctttgatgaatcctgtcttgtcgaggcagcaacccatcgttggaggtgccatcttttagattacatatgagatgtactcgataatggtgccctcataccgacgtgtgtttcctagaaataatcaatatattgattgagatttatctcgatataaaaaaattttaaaaaaaaaaaataaaatctgaagaaaaaatagaaactaaacaatcagtcacaacaacgac

SEQ ID NO: 1192 - DNA, 361 bp, Zea mays
  Clone ID: LIB3061-053-Q1-K1-F12
catcagcaacaacaagaagttcatgttcaacaacaacaacaacaaccgcagcaccggcaccaacaacaacaacaacagcaccaacaacaacatcaatgtgaaggccaacaacaacatcaccaacaatcacaaggccatgtgcaacaacacgaacagagccatgagcaacaccaaggacagagccatgagcaacaacatcaacaacaattccagggtcatgacaagcagcaacaaccacaacagcctcagcaatatcagcagggccaggaaaaatcacaacagcaacaatgtcattgccaggagcagcaacagactacaaggtgcagctataactactatagcagtagctcaaatctaaaaa

SEQ ID NO: 1193 - DNA, 455 bp, Zea mays
  Clone ID: LIB3061-053-Q1-K1-F2
gtatcaagtgtttcttgtacacagacaggctgctgcagctgtggtcaacaacaaagcggtgagcagcaacatcatccacaacaacatcatccacaaaaacaacaacatcaaccaccaccacaacatcaccagcagcagcaacaccaacaacaacaagttcacatgcaaccacaaaaacatcagcaacaacaagaagttcatgttcaacaacaacaacaacaaccgcagcaccaccaccaacaacaacaacaacagcaccaacaacaacatcaatgtgaaggccaacaacaacatcaccaacaatcacaaggccatgtgcaacaacacgaacagaacccttaaccacaacaaagacagaaccatgaacaacaaccatcaccacaatttcagggtcatgacaagcagcaacaaccacaacaagctcagcaatatcaagcaggccaggaaaaatcaca

SEQ ID NO: 1194 - DNA, 184 bp, Zea mays
  Clone ID: LIB3061-053-Q1-K1-F5
gtcttgatcgccatggcagagctttttagctatacgtgtggatgaacctgctgggaggcgttaccgcttatgtggacgatcttattggcgtgatcatgagtttatggatattgatactggtgggttaattactttgtcatagtgtcactcgtttgtatttgtagagcttgccgttaccactact

SEQ ID NO: 1195 - DNA, 442 bp, Zea mays
  unsure (1)..(442): unsure at all n locations; Clone ID: LIB3061-053-Q1-K1-F6
attgagaccaactagcaacatagaaagcacaatagtgtaccaacaatggcagctaaaatattttgcctccttatgctccttggtctttctgcaagtgctgctacggcgaccattttcccacaatgctcacaagctcctatagcttcccttcttcccccgtacctctcaccaacggtgtcttcggtatgtgaaaacccaattcttcaaccctacaggatccaacaggcaatcgcagctggcatcttacctttatcacccttgttcctccaacaatcatcagccctattacagcagttacctttggtgcatttattggcacanaacatcagggcacaacaactacaacaacttgtgctagcaaaccttggtggctactctcagcaacagcaggttcttccattcaaccaactagctgcattgaactctgcttcttatttgcaac

SEQ ID NO: 1196 - DNA, 438 bp, Zea mays
  unsure (1)..(438): unsure at all n locations; Clone ID: LIB3061-053-Q1-K1-F7
gccgcgggatttcaatacccaactatacaatcctacatggtacaagaggccatccgagcaagcatcttacggtcattagcattaaccctccaacaaccatatgctctattgcaacagccatccttagtgcatctgtatctccaaagaatcgcggcacaacaactacaacaacagttgctaccaacaatcaatcaagtagttgcagcgaaccttgctgcttacctncagcaacaacagtttcttccattcaatcaactagctggggtgaaccctgctatctacttgcaagcacaacagctactaccatttaaccaacttgtcgggagcccttatgccttcttactgcaacaacagcttctgccattccatctgcaagctgtggcaaacattgntgctttcttgagacaacaacatttgttgccattttacccacaagtt

SEQ ID NO: 1197 - DNA, 429 bp, Zea mays
  unsure (1)..(429): unsure at all n locations; Clone ID: LIB3061-053-Q1-K1-F8
gaagaaactccgaccggccggtgggcggtggcggcagccggcaggatctgtgccgcgatggcgacgtcgaacacggcgcggatggaggacggcggcggcgacctgcggagcaccatcaagaagtggaatatcatctaccctgtctacctcaactccaagaagacggtcgccgagggccgccgcatcgccgctgccaaggcctgcccggaccccacctgcatcgagatcgctgactgctgttcgcacctcaagatcccccacgccatcgagttggataaggcgtaccctcgggatttcttccaggtggggagggtcagggtgcagcttangaaagatgacggctcccccgtcaatcctgctattaaaacgaagaagcagctgatgatccaagtagcagagctagttcccaagcatcacggaaggacaaag

SEQ ID NO: 1198 - DNA, 274 bp, Zea mays
  Clone ID: LIB3061-053-Q1-K1-F9
cccacgcgtacgcgacaacagttacttaatccactagcggaggctagcccattgggcgttgccttcctacagcagcaacaattgctgccatacaaccagatctctttgatgaaccctgccttgttgtggcagcaacccatcggtggaggtgccatcttttagattacatatgagatgtactcgataatggtgccctcatagcggcatgtgtctcctagaaataatcaatatatagactgagatttatctcggatgaacaataaggtgaggctac

SEQ ID NO: 1199 - DNA, 392 bp, Zea mays
  Clone ID: LIB3061-053-Q1-K1-G1
caagtagcaacatagaaagcacaatagtgtaccaacaatggcagccaaaatattttgccgccttatgctccttggtctttctgcaagtgctgctacggcgaccattttcccgcaatgctcgcaagctcctatagcttcccttcttcccccgtacctctcaccagcggtgtcttcggtatgtgaaaacccaattcttcaaccctacaggatccaacaggcaatcacagctggcatcttacctttatcacccttgttcctacaacagtcatcagccctattacatcagttacctttggtgcatttattggcacaaaacatcagggcacaacaactacaacaacttgtgctagcaaaccttgctggctactctcagcaacaagcagttcttccat

SEQ ID NO: 1200 - DNA, 338 bp, Zea mays
  Clone ID: LIB3061-053-Q1-K1-G10
ggctgtcataagtgccggtatcatcgctcctttgttgcaactgcttcaaacagcagagtttgatatcaagaaggaggctgcttgggccatctcaaatgctacctctggtggttctcatgagcaaatcaagtacttggtgtctgagggctgcatcaagccattgtgtgaccttcttgtctgccctgatccgagaattgtaacagtttgtctggagggtcttgagaatattcttaaagtagggcagcatgacaagaccatgggtgcaacaggtgacactaacgtcttagctcagatgatcgatgaagcggaaggcctggaaaagatcgagaacctacaga

SEQ ID NO: 1201 - DNA, 422 bp, Zea mays
  Clone ID: LIB3061-053-Q1-K1-E4
ccttgctctttctgcatgtgttgctaacgcgacaattttccctcaatgctcacaagctgctatagcttcccttcttcccccataccttccatcaatgatagcttcagtatgtgaaaacccagctcttcaaccctataggctccaacaagcaatcgcagcaagcaacatacctttatcacccttgtttcaacaatcgccagccctatctttggtgcagtcattggtacaaaccatcaaggcacagcagctgcagcaactcgtgctacctgtgatcaaccaagtagctctggcaaacctttctccctactatccacaacaacaatttctttcattcaaccaactatctacactggaccctgctgcttaattgcagcaacaactattaccattcagccaggtagcttctgcctactctcatcaac

SEQ ID NO: 1202 - DNA, 441 bp, Zea mays
  Clone ID: LIB3061-053-Q1-K1-D1
ttgaaaaacacaccaagcgaagcgcactatcaacgacctaacaccaatggctaccaaggtgattagccctccttgcgcttcttgcccttttagtgagcgcaacaaatgcgttcattattccacagtgctcacttgctcctagtgccattattccacagttcctcccaccagttacttcaatgggcttcgaacatccagccgtgcaagcctacaggctacaactagcgcttgcggcgagcgccttacaacaaccaattgcccaattgcaacaacaatccttggcacatctaaccctacaaaccattgcaacgcaacaacaacaacaacaacagtttctgccatcactgagccacctagccgtggtgaaccctgtcacctacttgcaacagcagctgcttgcatccaacccacttgctctggcgaacgtagctgcataccagc

SEQ ID NO: 1203 - DNA, 346 bp, Zea mays
  unsure (1)..(346): unsure at all n locations; Clone ID: LIB3061-053-Q1-K1-D10
atcgcaagaatccctggaagaactttatgtgatgaatgatggcatatcagaggaagctgcagaagctctatgggagcttattcctgcaactgagaagcttaaggttcttcacttccacaacaatatgactggagatgaaggtgctatgtatattgctgaaatggttaagcgttctccaaatgtagagagtttcaggtgctcagcaacaaggataggatctgatggtggagtcgcattgtctgaggcattggggacatgcactcgtctgaagaaacttgatcttagggacaactttgttggtgttgatgcanggttagctctcaccgaaacccttccaaactacctg

SEQ ID NO: 1204 - DNA, 123 bp, Zea mays
  Clone ID: LIB3061-053-Q1-K1-D11
ggttgaatggcagcaacccatcattggtggtgccctcttttagatgtcttatgagggatagttcaataataaagttttttgtctgatgtttgtggcttcccagaaataagaaagtacatttct

SEQ ID NO: 1205 - DNA, 124 bp, Zea mays
  Clone ID: LIB3061-053-Q1-K1-D12
atgacctgaatgaacaatcatcgccgctagttgagtcatttagcggcgatgattgagtaataatgtgtcacgcatcaccatgggtggcagtgtcagtgtgagcaatgacctgaatgaacaattg

SEQ ID NO: 1206 - DNA, 304 bp, Zea mays
  Clone ID: LIB3061-053-Q1-K1-D2
ttcaccaggttgagatcaagcctgagatgatcggccactaccttgctgagttctcggggtcctacaagccggtcaagcacggcaggcccggtatcggtgccacccactcctcgcggtttattcctctgaaatgagctggtactcggctctttagtatcccaagacattttgtgttgttccattccagctcaagaattcaaagctaagcattgcacaattatgctgttttgttggaaggatttgagttaatcatatctaaagctgagttgtaaaaaaaaaaaaaaaaagggccggcggttttaaa

SEQ ID NO: 1207 - DNA, 374 bp, Zea mays
  Clone ID: LIB3061-053-Q1-K1-D3
cggacgcgtgggcggacgcgtgggaactagcaacatagaaagcacaatagtgtaccaagaatggcagccaaaatattttgcctccttatgctccttggtctttctgcaagtgctgctacggcgaccattttcccgcaatgctcgcaagctcctatagcttcccttcttcccccgtacctctcaccagcggtgtcttcggtatgtgaaaacccaattcttcaaccctacaggatccaacaggcaatcgcagctggcatcttacctttatcacccttgttcctccaacaatcatcagccctattacaacagttacctttggtgcatttattggcacaaaacatcagggcacaacaactacaacaacttgtgctagc

SEQ ID NO: 1208 - DNA, 85 bp, Zea mays
  Clone ID: LIB3061-053-Q1-K1-D5
gttctagatcgcgagcgatcgccctgttctttgtccggcacatatacaaatcaagcggttggcaatgaactctctctgggagact

SEQ ID NO: 1209 - DNA, 445 bp, Zea mays
  Clone ID: LIB3061-053-Q1-K1-D6
tcaatattcctcagcataatggaaggagaggaatcattgtcacgttattctcctgaaattgttgcaaagacgtcaagtgctgaaaccatagctcttctgcctcttgttgttcttatgcatggaactgaagattattcaataccatcatcttccagtcaaacttttgctgacgtcctccaacaagctggtgctcaagcaaggttactattgtacgaagggaaaacacatacagatatctttgtacaggaccctctaaggggtggaagagatccattggttgaagacctgttggctattattcatgctgatgatgcaaatgcatgtcaaaagaatgctttagcaccaactcctaagaaaatagttttcgagtggcaattaaagttggcacgcaaaattagtccattctagcagtatgaaccatggagaagcttggagctatggattt

SEQ ID NO: 1210 - DNA, 440 bp, Zea mays
  Clone ID: LIB3061-053-Q1-K1-D7
gcaacatagaaagcacaatagtgtaccaacaatggcagccaaaatattttgcctccttatgctccttggtctttctgcaagtgctgctacggcgaccattttcccgcaatgctcgcaagctcctatagcttcccttcttcccccgtacctctcaccagcggtgtcttcggtatgtgaaaacccaattcttcaaccctacaggatccaacaggcaatcgcagctggcatcttacctttatcacccttgttcctccaacaatcatcagccctattacaacagttacctttggtgcatttattggcacaaaacatcagggcacaacaactacaacaacttgtgctagcaaaccttgctgcctactctcagcaacagcagtttcttccattcaaccaactaggttcattgaactctgcttcttatttgcaacaacaacaactac

SEQ ID NO: 1211 - DNA, 442 bp, Zea mays
  Clone ID: LIB3061-053-Q1-K1-D8
gccatcactgagccacctagccgtggtgaaccctgtcacctacttgcaacagcagctgcttgcatccaacccacttgctctggcgaacgtagctgcataccagcaacaacaacagctgcaacagtttatgccagtgctcagtcaactagccatggtgaaccctgccgtctacctacaactactttcatctagcccgctcgcggtgggcaatgcacctacgtacctacaacaacagttgctgcaacaaattgtaccagctctgactcagctagctgtggcaaaccctgctgcctacttacaacagttgcttccattcaaccaactggctgtgtcaaactctgctgcgtacctacaacagcgacaacagttacttaatccattggcagtggctaacccattggtcgctaccttcctgcagcagcaacaacaattgctgccatac

SEQ ID NO: 1212 - DNA, 450 bp, Zea mays
  unsure (1)..(450): unsure at all n locations; Clone ID: LIB3061-053-Q1-K1-D9
ggacttctggagaaggtatgggaatacttggatttggttaggatatacacaaaacgtaaagggctgaacccagattatgaggatcctgttatcgtatcatctaagaagaaaaccgtggaagatttctgcgacagaatccacaaggacatggtcaaacaatttaaatacgctctggtatggggttccagtgtgaaacataagcctcagagagttggcaaggagcatgagcttgacgatgaggacgtcgttcagatcattaagaaaatataggcgtatcatgtggtggaacaaaacctgtcttttctggaaaactgggagcgttgaggattttgttgagtagtagcctcgcgagaagagcttgaactcggnctttgcttgttggtgaggctcatatgtaatgttccctgttctcagaaaatttgctttgatccaaagacaatgtgagtcggc

SEQ ID NO: 1213 - DNA, 265 bp, Zea mays
  Clone ID: LIB3061-053-Q1-K1-E1
cccacgcgtccggcttcgaggtccacgccgacaggaacgagaaggtgttcctggccggggcgcgcaacgtgctgcagaagctcgaccgggtcgccaaggcgctgtcattcgccttcaaggcggaggatgtggacgaggtgctcggctcgcggcgcgagaaggggttccttgctggccccaaggagagcggcggccacgaggagcgtgagcaagaggaggaggaggaacgcgaaaaacgccacagcgtggcgtgtgagagggaacg

SEQ ID NO: 1214 - DNA, 416 bp, Zea mays
  unsure (1)..(416): unsure at all n locations; Clone ID: LIB3061-053-Q1-K1-E11
ggcaaacctttctccctactctcagcaacaacaatttcttccattcggccaactgtgtacactgaaccctgctgcttatttgcagcaacaactattaccattcagccagctagctactgcctactctcagcaacaacaacttcttccatttaaccaattggccgcactgaaccccgctgcttatttgcagcagcaaatactactaccatttagccagctagctgcagcaaaccgtgcttccttcttgacactgcaacaattgctgccattcaaccaacttgctttgacaaacccagcagcattctaccaacaacccatcattggtgtgccctcttttagatntcttatgagttaatagtcaataataaagtttttggctgatgttcgggctttccagaattaagaagtacatttct

SEQ ID NO: 1215 - DNA, 439 bp, Zea mays
  Clone ID: LIB3061-053-Q1-K1-E12
gcgaaccgagaaaccaacacaacaagcaaagcagcgatccgacatgcgagagatggacgcggtgatgttcgggctggagactcccctgatggccgcgctgcagcacctgctggacgtgcccgacggcgacgccggcgcgggcggcgacaacaagacgggcagcggcggcagcgccacgcgcacctacgtccgcgacgcgcgcgccatggcggccaccccggccgacgtgaaggagctgcccggcgcgtacgcgttcgtggtggacatgccggggctgggcacgggcgacatccgggtgcaggtggaggacgagcgggtgctggtggtcagcggcgagcggcgccgggaggagcgcgaggacgacgccaagtacctgcgcatggaacggcggttgggcaagttcatgcgcaagttcgtgctgccggacaacgccgacgtc

SEQ ID NO: 1216 - DNA, 274 bp, Zea mays
  Clone ID: LIB3061-053-Q1-K1-E2
cagatcagcaaagcggcagtgcgtagagaggatcgtcgaacagaacagcatgaagatggtcatcgttctcgtcgtgtgcctggctctgtcagctgccagcgcctctgcaatgcagatgccctgcccctgcgcggggctgcagggcttgtacggcgctggcgccggcctgacgacgatgatgggcgccggcgggctgtacccctacgcggagtacctgaggcagccgcagtgcagcccgctggcggcggcgccctactacgccgggtgtgggcag

SEQ ID NO: 1217 - DNA, 453 bp, Zea mays
  Clone ID: LIB3061-053-Q1-K1-C9
gtcgacaagcaggggagttaggtctcacatgcatgcttcatcacattgttgactgcataacgaaacacatcgtcgtcggatcggagatgatgagttccgtcgtcgtggatgctgctgctaccagcagcagcgagaagaagacgtcgtggccggaggtggtgggcatgtccatcaaggaggcgacggagactattctcaaggacatgcccaacgcgtacatccaggtgctgcctgttgggtcgcccgtgacgctggaccttcgccccgaccgagtccgaatcttcgttgacaccgtcgccatgacttcgacagttgggtgatacataccaaatgcattaaacagaccctactgtgtatttaatgtttccagttaataataaaccaggccttagcttcttggttgtccttccttggttggtgttagcttctaagctactagtacaccattaaaaa

SEQ ID NO: 1218 - DNA, 372 bp, Zea mays
  Clone ID: LIB3061-053-Q1-K1-E3
ctgtttgtgagcgcaacaaatgcgttcattattccacaatgctcacttgctcctagtgcgagtattccacagttcctcccaccagttacttcaatgggcttcgaacacctagctgtgcaagccaacatgcaacaacaagcgcttgcggcgagcgtcttacaacaaccaattgcccaattgcaacaacaatccttgccacatctaacaatacaagccatcacaacgcaacagcaacaacgagttcctaccagcacttaaccccctagccatggtgaacccttgccggctacttgcaagaaccagctgcttggattcaacccacttgctctggcgaaccgtagtgcaaaacagcaacaacaaccgctaccacag

SEQ ID NO: 1219 - DNA, 274 bp, Zea mays
  Clone ID: LIB3061-053-Q1-K1-B12
agccttcaagccgaccatcgcgcggcgacgacacacacagacacaggccacactagggcacctttcgctctcggggagcgcgcctaaacccacgcttactccatcatgctatccatccgatacgatcataacgtccaagatcttggtgacatctactccacaggtctgagaacacgaagctgcgcaagcctatatggctacaaacagcgattgccgccagcgccatactataaccaattgccaaattgctacaacaatcctgtgcacatctaac

SEQ ID NO: 1220 - DNA, 441 bp, Zea mays
  Clone ID: LIB3061-053-Q1-K1-B2
gcgagagccatggaggacatcggcgagggccccgccgagaaccttccggagcccctgtgtccagccgtggaggccgaggacgaggacggcgacgagttcagcttccccgttcctccggtcgccgccgacgcgtgcatcgtgcccgtgtacccgatcttcggccggcccccgtccccgcctcggggggaggaggaggagccggagacggccaccgtgcgggtgccgctgagccggctcctgctggaggagcgggagttccgcgcgcgggagccggacgggcgatcggcgagtgcgcaggcgtggcaggacgaggacgaagacgacgcctcgggcggcgccggggacgaggatctgcaaggtgtgccggcggagagctactgcctgtgggcgcccggcgggcagtcgccggcgcccgcgtccccgcgccggtgccggaagagc

SEQ ID NO: 1221 - DNA, 396 bp, Zea mays
  Clone ID: LIB3061-053-Q1-K1-B3
cccacgcgtccggaaagctcttcagagtatgcatcaaatctaactcctgcttctgcaagtgcagctacattaacagcaggagtagcacctccattgcctgcaggaactcaaaacatattaccatatatagagtcattttttgtgacatgtgagaagttgcgtcctgggcaacctgatgctgtacaagaggcttcgacttctgatatggaagatgcttcaacatctagtggtgggcagatatcatattcctgtcaagctagtcttgacgagaagcaaaatgcttttgtgaaattctcagagaagcacagaagattgctgaatgcattcatccatcaaaaccctggattactggagaagtcattctcgctgatgttaaaaattcctcgcctgattgat

SEQ ID NO: 1222 - DNA, 436 bp, Zea mays
  Clone ID: LIB3061-053-Q1-K1-B5
caggcaggcagatgcctgcgctgttgccccaccagcagatttgcgccaccgcggcgaaggggcctgatcccgatgtggttgctattgttgagaggttggctactgtgaaacacaaattgttagttttgtctggaaagggaggtgttggaaaaagcacattctcagcccaactctcgtttgccctagctgaaatggaccatcaggttggccttcttgacatagatatatgtggacctagcatccctaaaatgctacgccttgaaggacaagatattcatcaaagcaaccttggctggtcacctgtgtatgttgagtgcaaccttggtgtgatgtcgattggtttcatgctgcctaatccagacgatgctgtcatatggaggggtccgagcatgaatggactgatcaagcagttctttaaagatgtcgattgtgggga

SEQ ID NO: 1223 - DNA, 443 bp, Zea mays
  Clone ID: LIB3061-053-Q1-K1-B7
gagaccaactagcaacatagaaagcacaatagtgtaccaacaatggcagccaaaatatgttgcttccttatgctccttggtctttctgcaagtgctgctaccgcaaccattttcccacaatgctcacaagctcctatagcttcctttcttcccccatacctctcaccagcggtgtcttcagtatgtgaaaacccaattcttcaaccctacaggatccaacaggcaatcgcagcaggcatcttacctttatcacccttgttcctccaacaaccgtcagccctattacagcagttacctttggtgcatttgttggcacaaaacatcaaggcacaacaactacaacaacttgtgctaggaaaccttgctgcctactctcagcaacagcagtttcttccattcaaccaactggctgcattgaactctgctgcttatttgcaacaaca

SEQ ID NO: 1224 - DNA, 445 bp, Zea mays
  Clone ID: LIB3061-053-Q1-K1-B8
cacctacccggacgcgcgcacgcaaagcagaacgctcccctcccggccttcccttcctgcccgccctccgaagtccgaaggccagaagcttccggaagccagcccaagccatgaacgccgccagcaccgccgccgcggcccccgcgcctgccgcgaccgtgcaggtgccgcgcgggcaggtggatctgatcgacttcatcgactggaccggcgtcgagtgcctcaaccaggactcgtaccacagcatcgtcaacgcgctcaagcagagtttgagagacgacgaggggctgtacctcgccagcgattcggacgagcagctgctgatctacatccccttcatgcaggtagtcaaactgcattccgcgctattcaaaggtcccgaggaagagggccccaaaacagtaaaactcttctccaacaaagagcatatgggtttcagcaatgt

SEQ ID NO: 1225 - DNA, 458 bp, Zea mays
  Clone ID: LIB3061-053-Q1-K1-C1
gcaacatagaaagtggaatccagtagcaacaatagagcaacaatggcgaccaagatattttccctccttatgctgctggctctttctacatgtgttgctaacgcgacaattttccctcaatgctcacaagctcctatagcttcccttcttcccccataccttccatcaattatagcttcaatatgtgaaaacccagctcttcaaccatataggcttcaacaagcaatcgcagcaagcaacatacctttatcgcccttgttgtttcaacaatcgccagccctatctttggtgcagtcattggtacaaaccatcagggcacaacagctgcagcaactcgtgctacctctgatcaaccaagtagctctggcaaacctttctccctactctcagcaacaacaatttcttccattcaaccaactggctacactgaaccctggtgcttatttgcagcacaacta

SEQ ID NO: 1226 - DNA, 257 bp, Zea mays
  Clone ID: LIB3061-053-Q1-K1-C10
ctcacgcatccgtcgacgcttgcgattctgaaactgttcaccatcgagatgacggggctagtcaacatcatgatcaagccgcctctgagatggattctagagctgttgatgctgtggcctctagaatactcacggataacatcgatcctacgcctgcagagatcattgatcctaagactgcagaggataatgtagttatgatatcgaccaatgcttgcattaggccactgaccacaacatctgtattgacgcatctc

SEQ ID NO: 1227 - DNA, 282 bp, Zea mays
  Clone ID: LIB3061-053-Q1-K1-C11
gtcacgcatccggccacccatgatcttctggcattcttcaccatcgggatcactgggttacttaacacctttagctagcttcctctatcattgcttctacagctgttgctgccttgccttctagaatactcaccgacaacaccgtccctctgcctgcagatatcattgatactaagacttcagacgatactatactaagctcttgccacctgcttgcatctagtcactgaccacaccatctggattctcgaacatgactccatctgcttaaaaccatactac

SEQ ID NO: 1228 - DNA, 214 bp, Zea mays
  Clone ID: LIB3061-053-Q1-K1-C3
ggtcagtcgggactacccgctgagtttaagcatatatataaaatagcggaaggagagtgagggtaagtctgtaactgtaacccatagctgagatgctgtctgcaagcagcaatgccaatgccaatgccatctggttttcgtgcaaaaaaaaaaaaaaaaaaaaaaagaaagaaaaaaaaaaaaaaaaaaaaaaaaataagaaaaaaaaagaaaa

SEQ ID NO: 1229 - DNA, 328 bp, Zea mays
  Clone ID: LIB3061-053-Q1-K1-C4
gttcagcttcggttggctcgccgtactcgggtttgttcctcgcctcgcttccttcctggggagtcctcgtctcgaattcgctcgcggtgggagaaatcggggcgcgaggatgaccgtgatcgacatcctcacccgggtggacgcgatctgccagaagtacgacaggtacgacgtcgacaagctcaacggcgcgaacgtcgccggcgacgacccgttcgcccgcctctacgcgtccgtcggcgcggacatcaaccaatgcgtcgattaagcgggaaacggcgaaacaaggagagaaccgggccgcgggagtggcgcttaacgccgagat

SEQ ID NO: 1230 - DNA, 441 bp, Zea mays
  Clone ID: LIB3061-053-Q1-K1-C5
caacgacctaacaccaatggctaccaagatattagccctccttgcgcttcttgccctgggagtgagcgcaacaaatgcgttcattattccacagtgctcacttgctcctagtgccattattccacagttcctcccaccagttacttgaatgggcttcgaacatccagccgtgcaagcctacaggctacaactagcgcttgcggcgagcgccttacaacaaccaattgcccaattgagaacaacaatccttggcacatgtaaccctacaaaccattgcaacgcagcaacaacaacaacaacagtgtctgccatcactgagccacctagccgtggtgaaccctgtcacctacttgcaacagcagctgcttgcatccaacccacttgctctggcgaacgtagctgcataccagcaacaacaacagctgcaacagtttatgccag

SEQ ID NO: 1231 - DNA, 444 bp, Zea mays
  Clone ID: LIB3061-053-Q1-K1-C6
aacaggcaatcacagctggcatcttacctttatcacccttgttcctccaacaatcatcagccctattacatcagttacctttggtgcatttattggcacaaaacatcagggcacaacaactacaacaacttgtgctagcaaaccttgctgcctactctcagcaacagcagtttcttccattcaaccaactagctgcattgaactctgcttcttatttgcaacaacaacaactaccattcagccagctacctgctgcctacccccagcaatttcttccattcaaccaactggcagcattgaactctcctgcttatttacagcagcaacaactactaccattcagccagctagctggtgtgagccctgctaccttcttgatacaaccacagttgttgccgttctaccagcacgctgcgcctaacgctggcaccctcttacaactgc

SEQ ID NO: 1232 - DNA, 440 bp, Zea mays
  Clone ID: LIB3061-053-Q1-K1-C7
tgagcattcagaaacacaccaagcgaagcgcactagcaacaacctaacaacaatggctaccaagatattatccctccttgcgcttcttgcgctttttgcgagcgcaacaaatgcgtccattattccacaatgctcacttgctcctagttccattattccacagttcctcccaccagttacttcaatggccttcgaacacccagctgtgcaagcctataggctacaacaagcgattgcggcgagcgtcttacaacaaccaattgcccaattgcaacaacaatccttggcacatctaacaatacaaaccatcgcaacgcaacagcaacaacagttcctaccagcactgagccacctagccatggtgaaccctgtcgcctacttgcaacagcagctgcttgcatccaacccacttgctctagcaaacgtagttgcaaaccagc

SEQ ID NO: 1233 - DNA, 315 bp, Zea mays
  Clone ID: LIB3061-053-Q1-K1-C8
cccacgcgtccggcttccctcaaccgtcacctctcaagagcctacgggagcaacgggggatggtacaagaatgaagggtttgttgaagtcttagctgcacagcagagcccagataatccaaactggtttcagggtactgcagatgctgtaaggcagtacttgtagttgtttgaggagcataatgtgatggaatttctaattcttgctggcgatcacctgtaccggatggactatgaagagttcattcatgcacacagataaacagatgctgatattaccgtaggtgccctaccgatggatgaggaacgtgcaact

SEQ ID NO: 1234 - DNA, 472 bp, Zea mays
  Clone ID: LIB3061-053-Q1-K1-B11
cagaaacacaccaagcgaagcgcactagcaacaacctaacaacaatggctaccaagatattatccctccttgcgcttcttgcgctttttgcgagcgcaacaaatgcgtccattattccacaatgctcacttgctcctagttccattattccacagttcctcccaccagttacttcaatggccttcgaacacccagctgtgcaagcctataggctacaacaagcgattgcggcgagcgtcttacaacaaccaattgcccaattgcaacaacaatccttggcacatctaacaatacaaaccatcgcaacgcaacagcaacaacagttcctaccagcactgagccacctagccatggtgaaccctgtcgcctacttgcaacagcagctgcttgcatccaacccacttgctctagcaaacgtagttgcaaaccagcaacaacaacaactgcaacagtttctgccagcgcttagtca

SEQ ID NO: 1235 - DNA, 380 bp, Zea mays
  Clone ID: LIB3061-052-Q1-K1-H4
ccgggttggaccaagccttccggagtattaggccccaattcaaatttgatccttcatttttttaattccaaaaccctggggcttggtcctgggggttctggctttaatggttttaatttcaatggttcttggtacacagaacaggcgctgcagctttggtcaacaacaagccatgagcagcaacatcatccacaacaacatcatccacaaaaacaacaacatcaaccaccaccacaacatcaccagcagcagcaacaccaacaacaacaagttcacatgcaaccacaaaaacatcagcaacaacaagaagttcatgttcaacaacaacaacaacaaccgcagcaccaacaacaacaaacacaacaacagcaccaacaaca

SEQ ID NO: 1236 - DNA, 452 bp, Zea mays
  unsure (1)..(452): unsure at all n locations; Clone ID: LIB3061-052-Q1-K1-H5
agacgttgttggagcaccttggagttaaacgaaatgaggtgaccagtgatggtttattttctgttggagaaatggagtgcatgggttgctgtgtgaatgctcctatgattgctgtggctgactactcgaaaggctcagagggttacacatataactactatgaggacctcactccaaaacgagttgttgagattgttgagatgcttagaagaggtgaaacaccccctcgaggtacacagcacccagagcgaaaaaactgtggccctgccggggggaacaccaccttgcacggagagccgaaacctnctncatgcaaggatctggatgcctgctaagtttgcttcggagcattacgagcacgcgcataacttggctcgtactgtaaagtgtgcaaactgcacacagcggaggctgtgttatttgtattctgaaagcttcttgtgtntcgtcaa

SEQ ID NO: 1237 - DNA, 294 bp, Zea mays
  Clone ID: LIB3061-052-Q1-K1-H6
gaccaagccttcggttttaataccattcatcaatattcattttaattattttagccccaaattcaatttggcaccttcattatatttacttcaaaaaccacttaacttgtgcctgtggttctttggttcattgcgctagattctaatgtgtcttgtgcacacacacgcgggtttacatgtggggaacaacacagacctgtgcagcagcatcattatacacaacatcatcctccacaacaacaacatcatccaccaccaccacatcatcagcagcagcaacaacaacaacaacaa

SEQ ID NO: 1238 - DNA, 477 bp, Zea mays
  unsure (1)..(477): unsure at all n locations; Clone ID: LIB3061-052-Q1-K1-H7
taccgtttcggaattccgggttcatgttcaacaacaacaacaacaaccgcagcaccaccaccaacaacaacaacaacagcaccaacaacaacgtcaatgtgaaggccaacaacaacatcaccaacaatcacaaggccatgtgcaacaacacgaacagagccatgagcaacaccaaggacagagccatgagcaacaacatcaacaacaattccagggtcatgacaagcagcaacaaccacaacagcctcagcaatatcagcagggccaggaaaaatcacaacagcaacaatgtcattgccaggagcagcaacagactacaaggtgcagctataactactatagcagtagctcaaatctaaaaaattgtcatgaattcctaangcagcagtgcagccctttggtaatggcctttctccaatcacgtttgatacaaccaagtagctgccaagtattgcagcaacaaatgtgtcatgatct

SEQ ID NO: 1239 - DNA, 418 bp, Zea mays
  Clone ID: LIB3061-052-Q1-K1-H9
acgcgtccgcccacgcgtccggcagctggccgtggccgtggaagggtacgacagcgacgagggcgtggtgacaggggaagaggttgctgccaaggtgcgatggctcttggagtccgatggcgtgaggatgctacggaagcgcacgctggcggccatgcggcaggccaaggactcgctgcgtgatggcggcgagtctgaggccacactgaccggattggtggacgagtggaaacgcatttgacgcggtacgtggggattgggaacgggtgacgttacgcgactgatgaagtgccagtcataattacttttcaatcaatatatattactaatatatgcatgtatagatcattgacagatactacctattgcaacaaatgcagatgatgatgcagcttgagcgtgctcgtgccgcaacaat

SEQ ID NO: 1240 - DNA, 441 bp, Zea mays
  unsure (1)..(441): unsure at all n locations; Clone ID: LIB3061-053-Q1-K1-A1
agcaacatagaaagcacaatagtgtaccttcaatggcagccaaaatattttgcctcctgtatgctccttggtctttctgcaagtgctgctacggcgaccattttcccgcaatgctcgcaagctcctatagcttcccttcttcccccgtacctctcaccagcggtgtcttcggtatgtgaaaacccaattcttcaaccctacaggatccaacaggcaatcgcaactggcatcttacctttataacccttgttcctccaacaatcatcagccctattacaacagttaccgttggtgcatttattggcacagaacatcagggcacaacaactacaacacctngtgctagcaaaccttggtgcctactttaagcaacagcagtttcttccattcaacccactaggttcattggactctgcttcttatttgcagcaacaacaacta

SEQ ID NO: 1241 - DNA, 282 bp, Zea mays
  Clone ID: LIB3061-053-Q1-K1-A10
tgctgcgtacctacaacagcgacaacagctacttaatccactaccggtggctaacggataggtcgatgccttcctacagcagcaacaattgctgccatacaaccagttctcttagatgaaccctgccttgctgcgacagcaacccatcgttggaggtgccatctttgatatcacatatgagatgtactcgatgatggcgccctaatagcgcgatgtgcctactacaaatactcaatatcttgagtgacatttatctcgatacaaccaacttgctttgacgga

SEQ ID NO: 1242 - DNA, 457 bp, Zea mays
  unsure (1)..(457): unsure at all n locations; Clone ID: LIB3061-053-Q1-K1-A11
gcaacatagaaagcacaatagtgtaccaacaatggcagccaaaatattttgcctcggtatgctccttggtctttctgcaagtgctgctacggcgaccattttcccacaatgctcacaagctcctatagcttcccttcttcccccgtacctctcaccagcggtgtcttcggtatgtgaaaacccaattcttcaaccctataggatccaacaggcaatcgcagctggcatcttacctttatcacccttgttcctccaacaatcatcagccctattacagcagttacctttggtgcatttattggcacataacatcagggcacatcaactaccacaacttgtgctagcaaaccttgctgnctactctcagcaacaacagtttcttccattcaaccaactagctgcattgaactctgcttcttatttgcaacaacaacaactaccattcagccagctatct

SEQ ID NO: 1243 - DNA, 450 bp, Zea mays
  Clone ID: LIB3061-053-Q1-K1-A12
ggatttgctcacaacacaggaaaagaatatggccagatgcttaatgctgaggttcgagatcagataaataataatgggacaaaaaatgttttgcctagtcgaatcgaggatctttcaggaaaggtccagtttttgccatgttctcatgactgaaattggtcgcttcagcaaagatatgaaacaactattacaagagaaggtttttgtcattgctgtcttaggttatatctcctacaacttcgtcattggtgcttattcctactggggcccaaaggcaggtcaagagatctacaatatggcgagtgcggatcttatgtttggtggaattactatagtgtgtggaattgttggaacactagcatgaggtttcatccttgacaagatagggtctactattcctaatgctttcaagcttctttctggtgcgacattcgtaggggcaatattctg

SEQ ID NO: 1244 - DNA, 263 bp, Zea mays
  Clone ID: LIB3061-053-Q1-K1-A4
aattcccggcattgagaccaactagcaacatagaaagcacaatagtgtaccaacaatggcagccaaaatattttgcctccttatgctgcttggtctttctgcaagtgctgctacggcgaccattttcccgcaatgctcgcaagctcctatagcttcccttcttcccccgtacctctgaccagcggtgtcttcggtatgtgaaaacccaattcttcaaccctacaggatccaacaagcaatcgcagctagcatcttacctttat

SEQ ID NO: 1245 - DNA, 419 bp, Zea mays
  Clone ID: LIB3061-053-Q1-K1-A6
ttcccgggcttgaagaatcttatgacttatagcacaatacttacgtcgttagtacgacggctgctgcgtgccagatacgagggactacatttctaacctacacaccgacgacggcctcaagtcccatcgaggctcacctcgccggcaaaacctatgtgcctggcgactccattactaaggatgacattatagtcttcgcacgcggtgccgtcaaatcctgtcgctgagcttcctaatgccgcccgctggtacgagaccccctgtgcggctgcagcctcaacattccgtggtacggctgctgttgtacatctgcctgcatgatcagctgctgcggcagctgctccttcgccagaagctgagcatcatgaatgaccttgatctttgctcccatgaaactgacgaagacacgacggcagctg

SEQ ID NO: 1246 - DNA, 352 bp, Zea mays
  Clone ID: LIB3061-053-Q1-K1-A7
ccgcctcgctgctgccggtgctcctcctcacaagcatgctgctgctgctgtgtcagacgccgtgaggggtccagatctgcagagcgagccatcattcaatgcgtgctgcacctgcatgcatgcatgcgctgtttctagtttctacaaggcggtgatcgatccagctggcgattcaattgtggttgggggtggcctgtgtattctaccggtactaaattgtaattgttgtttttttttacgattcggttcatttcctcgtcctctttcttcttctctttcggattcgtagcacagattgtacaaggaggggggcagcagttagtaataatctatagcatacccatttcatgtc

SEQ ID NO: 1247 - DNA, 353 bp, Zea mays
  Clone ID: LIB3061-053-Q1-K1-A9
gtgatctgcgtacacgggctccctcttcctgtcagtaatagagtgagagtgaggcagcgaggaggagacaaggggaaatggggaagggagcgcaagggagcgatgcggcggcggcgggcggcgaggtggaggagaacatggcggcgtggctggttgccaagaacaccctcaagatcatgcccttcaagctcccgcccgtcggcccttatgatgtccgcgtgcgcatgaaagcagttgggatttgcggcagcgatgtgcactaccttagggagatgcgcatcgcgcactttgtggtgaaggagccgatggtgatcggacacgagtgcgcgggcgtggtctaggaggtgggcgcc

SEQ ID NO: 1248 - DNA, 371 bp, Zea mays
  Clone ID: LIB3061-053-Q1-K1-B1
aaagtggtgtggaattcacatcaaccagtgagaagcccgctgctcgctgcaactgcaagccgtcacgggctgagctgaggctgtgtcgaactgtcgatccatccgtattctcagcaaaacaacgccaatcaatccactccagaggaagggcgatggccgccgctaggatcgccgcttgcaccacctccgcccgcaccgccctcgccttggcagacgaccccgcgccgccggacacgcttgacgtggtgcgccggcagcgccagctcctacgccgcgccgccgcgctctgcctcgaccccatcgccgaggagtccgacggtggcatcgactctgcctccgacgtccaccccttgggtcggagccggggccag

SEQ ID NO: 1249 - DNA, 448 bp, Zea mays
  Clone ID: LIB3061-053-Q1-K1-B10
caacaacaacaactgcaacagtttctgccagcgcttagtcaactagccatggtgaagcctgccgcctacctacaacagcaacaactgctttcatctagcccgctcgctgtggccaatgcacctacatacctgcaacaagaattgttgcaacagattgtaccagctctaactcagctagctgtggcaaaccctgttgcctacttgcaacagctgcttccattcaaccaactaactatgtcgaactctgttgcgtacctacaacagcgacaacagttacttaatccattggcagtggctaacccattggtcgctgccttcctacagcagcaacaattgctgccatacaaccggttctctttgatgaatcctgtcttgtcgaggcagcaacccatcgttggaggtgccatcttttagattacatatgagatgtactcgataatggtgccct

SEQ ID NO: 1250 - DNA, 450 bp, Zea mays
  unsure (1)..(450): unsure at all n locations; Clone ID: LIB3061-052-Q1-K1-H3
gagcagcctccgcgccaagtggccgacgctggcgtgcccgtccaacgacgggctgcgcttctggggccacgagtgggagaagcacggcacctgcgcagccgacgtcttcgacgagcacggctacttccaggccgcgctgcgcctccgcgaccagctgggagtcctcggcgcgctcacctccgccggcgtcaagcccgacggcggctactacacgctgagccagatcaagggcgccatccgccagggcaccggcttcgagccctacgtggagtgcaaccgcgacgaggccggcaacagccagctctaccagctctacttctgcgtcgacgccgncggcgacagcttcgtcgacttgcccgtcctncccaagcgcaggccctgtggcaaaccggatcgagttcccggctttctaagctaactcactcttcacgtcagttgctgcaatatact

SEQ ID NO: 1251 - DNA, 454 bp, Zea mays
  Clone ID: LIB3061-052-Q1-K1-G11
gcaacatagaaagcacaatagtgtaccaacaatggcagctaaaatattttgcctccgtatgctccgtggtctttctgcaagtgctgctacggcgaccattttcccacaatgctcacaagctcctatagcttcccttcttcccccgtacctctcaccaacggtgtcttcggtatgtgaaaacccaattcttcaaccctacaggatccaacaggcaatcgcagctggcatcttacctttatcacccttgttcctccaacaatcatcagccctattacagcagttacctttggtgcatttattggcacaaaacatcagggcacaacaactacaacaacttgtgctagcaaaccttgctgcctactctcagcaacagcagtttcttccattcaaccaactagctgcattgaactctgcttcttatttgcaacaacaacaactaccattcagccagcta

SEQ ID NO: 1252 - DNA, 439 bp, Zea mays
  Clone ID: LIB3061-052-Q1-K1-G12
caacatagaaagcacaatagtgtaccaacaatggcagccaaaatgttttgcctcggtatgctccttggtctttctgcaagtgctgctacggcgaccattttcccgcaatgctcgcaagctcctatagcttcccttcttcccccgtacctctcaccagcggtgtcttcggtatgtgaaaacccaattcttcaaccctacaggatccaacaggcaatcacagctggcatcttacctttatcacccttgttcctccaacaatcatcagccctattacatcagttacctttggtgcatttattggcacaaaacatcagggcacaacaactacaacaacttgtgctagcaaaccttgctgcctactctcagcaacagcagtttcttccattcaaccaactagctgcattgaactctgcttcttatttgcaacaacaacaactac

SEQ ID NO: 1253 - DNA, 439 bp, Zea mays
  Clone ID: LIB3061-052-Q1-K1-G2
agcttcccttcttcccccgtacctctcaccaacggtgtcttcggtatgtgaaaaccgagttcttcaaccctacaggatccaacaggcaatcgcagctggcatcttacctttatcacccttgttcctccaacaatcatcagccctattacagcagttacctttggtgcatttattggcacaaaacatcagggcacaacaactacaacaacttgtgctagcaaaccttgctgcctactctcagcaacagcagtttcttccattcaaccaactagctgcattgaactctgcttcttatttgcaacaacaacaactaccattcagccagctatctgctgcctacccccagcaatttcttccattcaaccaactgacagcattgaactctcctgcttatttacagcagcaacaactactaccattcagccagctagctggtgtg

SEQ ID NO: 1254 - DNA, 271 bp, Zea mays
  Clone ID: LIB3061-052-Q1-K1-G3
gctagctgcagcaaaccgtgcttccttcttgacacagcaacagttgctgcctttctaggagcagtttgcggctaaccccgcaaccctcttacaactacaacaattgttgccctttgtccaacttgctttgacagacccagcggcctcctaccaacaacacatcattggtggtgccctcttttagattgcttattagttgtaattcaataataaagttttttggatgatgtatgtggccaaccagaaataagaagttacatttccagattct

SEQ ID NO: 1255 - DNA, 445 bp, Zea mays
  Clone ID: LIB3061-052-Q1-K1-G4
gcaacatagaaagcacaatagtgtaccaacaatggcagctaaaatattttgcctccggatgctccttggtctctctgcaagtgctgctacggcgaccattttcccacaatgctcacaagctcctatagcttcccttcttcccccgtacctctcaccaacggtgtcttcggtatgtgaaaacccaattcttcaaccctacaggatccaacaggcaatcgcagctggcatcttacctttatcacccttgttcctccaacaatcatcagccctattacagcagttacctttggtgcatttattggcacaaaacatcagggcacaacaactacaacaacttgtgctagcaaaccttgctgcctactctcagcaacagcagtttcttccattcaaccaactagctgcattgaactctgcttcttatttgcaacaacaacaactaccattc

SEQ ID NO: 1256 - DNA, 468 bp, Zea mays
  unsure (1)..(468): unsure at all n locations; Clone ID: LIB3061-052-Q1-K1-G5
caacaagcaacatagaaagtggaatccagtagcaacaacagagcaacaatggcgaccaagatattttccctccgtatgctccttgctctttctgcatgtgttgctaacgcgacaattttccctcaatgctcacaagctcctatagcttcccttcttcccccataccttccatcaatgatagcttcagtatgtgaaaacccagctcttcagccctataggctccaacaagcaatcgcagcaagcaacatacctttatcacccttgttgtttcaacaatcgccagccctatctttggtgcagtcattggtacaaaccatcagggcacagcagctgcagcaactcgtgctacctgtgatcaaccaagtagctctggcaaaccttttctcctactctcagcnnacacaatttcttccattcaaccaactgtctacactgaaccctgcctgctaattgcagcaacaactatta

SEQ ID NO: 1257 - DNA, 426 bp, Zea mays
  Clone ID: LIB3061-052-Q1-K1-G7
gctactaccgccgctagctggttcaagtgcggcgagcggagccggagaccggtagaggaaattaagaggcgtcgatcgggcatggggtgcgacgacaagtgcgggtgcgccgtgccgtgccccggcggcaaagactgcaggtgcacgtcggggagcggcgggcagcgggagcacacgacttgcggctgcggggagcactgcgagtgcagcccgtgcacgtgtggccgggccacgatgccgtccggccgcgagaacaggagggctaactgctcctgcggggcgtcctgcaactgcgcatcctgcgcctcggcctgatccgtgcgcctcgccctcgtgctaccgcgctgcctagtggagggagttgtctagtgaggctggagacgaagcaactagcactacttctaataaagggcttgtgtcatgctc

SEQ ID NO: 1258 - DNA, 449 bp, Zea mays
  unsure (1)..(449): unsure at all n locations; Clone ID: LIB3061-052-Q1-K1-G8
ttcaggagctggatggtgaaggtgttaaagctagcacggatgttgatacaactggggcagatgtccagcacgggagcattgaagctactaaagccaacgctgctggtgatgcacctggagcattttttcaaaagcagtgtgctaaagctgctgatgttattaccattgacgacgatgacgaggacaacagtcatcgttgttataaagaagaacaaacagcagtagttgatcttgaagctgattatgctggggataaccatcccgtgcagcttgaggcaaatagtcgaggccataaacacgtgaaggtgaaggagcgcatttggtattacattgatcctcagggtgatgagcaagggccatttacaatgcagcatctgagcatctggtggagcaatggcttctntcccggcgacttcagggtctggagaacaggccaaactagtaatgac

SEQ ID NO: 1259 - DNA, 459 bp, Zea mays
  unsure (1)..(459): unsure at all n locations; Clone ID: LIB3061-052-Q1-K1-G9
ttttgagcattcagaaacacaccaagcgaagcgcactagcaacgacctaacaacaggggctaccaagatattagccctccttgcgcttattgccctttttgtgagcgcaacaaatgcgttcattattccacaatgctcacttgctcctagtgccattattccacagttcctaccaccagttacttcaatgggcttcgaacacctagctgtgcaagccaacatgcaacaacaagcgcttgcggcgagcgtcttacaacaaccaattgcccaattgcaacaacaatccttgccacatctaacaatacaagccatcacaacgcatcagcaacaacagttcctaccagcactgagccacctagccatggtgaaccctgccgnctacttgcaagagcagctgcttgcatccaacccacttgctctggcgaacgtagttgcacaccagcaacaacaacagctaca

SEQ ID NO: 1260 - DNA, 409 bp, Zea mays
  Clone ID: LIB3061-052-Q1-K1-H1
tgatgcgccatgcttctggaccagtaaccgctgcaaaaacgatatacgaggacagcaggggctacttgatcatcgttagcctgcctttcgctgattttcagaaggtgaaggtttcatggaagaacactctcacaaatgggattgttaaggtatcatgcactagcgttggtcggatgccactcctgaaaaggcatgatcggactttcaggttggtggatcctgctcctgagcattgcccgccgggagagtttgtccgggagatcccactccctacccgaatccctgaagacgccactctggaagcatactgcgatgaaacagggacagggctggagatcattgtcccgaaattccgcgttggccctgaagaacacgaggtgcatgtgtccatgaggccaccctcgtcgtg

SEQ ID NO: 1261 - DNA, 456 bp, Zea mays
  Clone ID: LIB3061-052-Q1-K1-H10
gcaacatataaagcacaatagtgtaccaacaatggcagccaaaatattttgcttccgtatgctccttggtctttctgcaagtgctgctaccgcaaccattttcccacaatgctcacaagctcctatagcttcctttcttcccccatacctctcaccagcggtgtcttcagtatgtgaaaacccaattcttcaaccctacaggatccaacaggcaatcgcagcaggcatcttacctttatcacccttgttcctccaacaaccgtcagccctattacagcagttacctttggtgcatttgttggcacaaaacatcaaggcacaacaactacaacaacttgtgctaggaaaccttgcttgctactctcagcaacagcaagttcttccattcaaccaactggctgcattgaactctgctgcttatttgcaacaacaactaccattcagtcagctagctgc

SEQ ID NO: 1262 - DNA, 253 bp, Zea mays
  Clone ID: LIB3061-052-Q1-K1-H11
cggcaagcaacatagaaagtcgaatccattaccaccaattgcgctacaatggcgatcaggatacatatcgtccttatgctgattgctcttactacatgtgttgctaacgcgtcattgaaaactaaatgctcacaagctcctactactggccttgttactccatacttatcatcaattgtagcttccatgtgcgaaaacgaagctatacagccctatatgctagacctggccatcgctgacagcaacatactac

SEQ ID NO: 1263 - DNA, 302 bp, Zea mays
  Clone ID: LIB3061-052-Q1-K1-H12
accgacgcgtgcggtaaaaacctaatggatgcatgcacatcacatgcactccaccatgcaaatttgagttctgctggctatgtcttggtccatggtcagagcatggagagaggactggtggattttatgcttgtaaccgctatgagtcagcaaggcaagaaggagcgtatgatgaatctgaaaggagaagagaaatggcaaagaactcccttgagagatacacacattattatgaacgatgggcagccaatcagtcgtcgaggcaaaaggcactgggggaccttcaaagcctacagaatgac

SEQ ID NO: 1264 - DNA, 415 bp, Zea mays
  unsure (1)..(415): unsure at all n locations; Clone ID: LIB3061-052-Q1-K1-H2
gtcgccgacccgcagtcgggcaaggcgctggcgacgctgcgcgggcacctggactggtgccttcgcgtcggcgtggcaccccgacagccgcgtcctggcgacggggaaccaggacgcgacgtgccggctgtgggacgcgcgcagcctgtcggagccgttcgccgtgctcggggcccggatcggcgccgtccggggcctccgcttctcccccgacggcaggttcctggccgcggccgaggccgccgacttcgtgcacgtgtacgacgccgcggccgggtacgccggcgccgcgcaggaggtggacgtgttcggngaggtcgccggcgccgcgttcagccccgacggcgaggcgctgttcgtgagcgtcgccgaccgtacctacggcggcctgctcgagttccggcgccggcgggcg

SEQ ID NO: 1265 - DNA, 306 bp, Zea mays
  Clone ID: LIB3061-052-Q1-K1-G1
ctgatttgcagcagcaaatactactgccatttagcgagctagctgcagcaagtcgtggggccttcttgacacagcaacagttgctgcctttctacaagcagtttgcggctaaccccgcaaccctcttacaactacaacaattgttgccctttgtccaacttgctttgacaaacccagcagcctcctaccaacaacacatcattggtggtgccctcttttagattgattattagttgtaattcaataataaagttttttggatgatgtatgtggccaaccagaaataagaagttacatttccagatt

SEQ ID NO: 1266 - DNA, 430 bp, Zea mays
  Clone ID: LIB3061-052-Q1-K1-E7
attttcagcattcaaaaacacaccaagcgaagcgcactagcaacgacctaacaccgggggctaccaagatattagccctccttgcgcttcttgcccttttagtgagcgcaacaaatgcgttcattattccacagtgctcacttgctcctagtgccattattccacagttcctcccaccagttacttcaatgggcttcgaacatccagccgtgcaagcctacaggctacaactagcgcttgcggcgagcgccttacaacaaccaattgcccaattgcaacaacaatccttggcacatctaaccctacaaaccattgcaacgcaacatcaacaacaacaacagtttctgccatcactgagccacctagccgtggtgaaccctgtcacctacttgcaacagcagctgcttgcatccaacccacttgctctggc

SEQ ID NO: 1267 - DNA, 445 bp, Zea mays
  Clone ID: LIB3061-052-Q1-K1-E8
cccacgcgtccgtgagcattcagaaacacaccaagcgaagcgcactagcaacagccgaacaacaatggctaccaagatattatccctccttgcgcttcttgcgctttttgcgagcgcaacaaatgcgtccattattccacaatgctcactcgctcctagttccattattccacagatactcccaccagttacttcaatggccttcgaacacccagctgtgcaagcctataggctacaacaagcgattacggcgagcgtcttacaacacccaattgcccaattgcaacagcaatccttggcacatctaacaatacaaaccatcgcaccgcaacagcaacaacagttgctaccagcactgagccacctagccatggtgaaccctgtcgcctacttgcaacagcagttgcttgcatccaacccatttgctctagcaaacgtagttgca

SEQ ID NO: 1268 - DNA, 357 bp, Zea mays
  Clone ID: LIB3061-052-Q1-K1-E9
agcataccaactatcaaaatacatatccaattacactatcaacatcttatcaccagtgcattccaggatttttacccttcttgccctccttgctatctcaccaagctctcctacctctactattattccacaatactcacaacaacacctctctccattcacaacctcattatatcaacacccaactatactatcctacatactacattatatccatcttatcatgcatcttaccctcattaccattaaccctccaacagccatataccctattgcaacaaccatacttaatacacttgaatctccaacaaatctctacacatcaactactacaacacttgctaccaacaatcaatc

SEQ ID NO: 1269 - DNA, 272 bp, Zea mays
  Clone ID: LIB3061-052-Q1-K1-F1
ttcagccagctagctggtgtgagccctgctaccttcttgatacaaccacagttgttggcgttctaccagcacgctgcgcctaacgctggcaccctcttacaactgcaacaattgctgccattcaaccaacttgctttgacaaacccagcagcgttctaccaacaacccatcattggtggtgccctcttttagatttcttatgagttatagttcaataataaagttttttgtctgatgtttgtggcttcccagaaataagaaagtacatttct

SEQ ID NO: 1270 - DNA, 426 bp, Zea mays
  Clone ID: LIB3061-052-Q1-K1-F10
atggcagccaaaatattctgcctacttatgctccttggtctttctgcaagtgctggtacagcgacgatcttcccgcaatgctcgcaagctcctatagcttcccttcttcccccgtacctctcaccagcggtgtcttcggtatgtgaaaacccaattcttcaaccctacaggatccaacaggcaatcgcagctggcatcttacctttatcacccttgttcctccaacaatcatcagccctattacaacagttacctttggtgcatttattggcacaaaacatcagggcacaacaactacaacaacttgtgctagcaaaccttgctgactactctcagcaacagcagcttcttccattcaaccaactaggttcattgaactctgcttattatttgcaacaacaacaactaccattcagccagctacct

SEQ ID NO: 1271 - DNA, 458 bp, Zea mays
  unsure (1)..(458): unsure at all n locations; Clone ID: LIB3061-052-Q1-K1-F11
gtaagagaaggaatttctttgctgcttgagctcatagatacctacaatagcatgatggttcctgcctctggaaaaagaccaaactttgaccctgttatttctgcattattggatccaataattcaggtgtgtgagcaagctgcagaggcacagaagtcaaaaggatcacttgcgcggcgtggtagaacaagctctgatcctagtggaaatagcagggattctatatcagttgatgctattctgtctaagaatttatctacatcgattctgagtgccgaatcttcatccaaagtctacctcatcaactgcttgtcagctattcaggagccattgatgggccangaggtcgctacaagctatgtaaacaacctgcgctctatgattgaagcacatatttgtgtccttgtcgataaagaagttgactgcattcttaggaaatgtggactatcaaataagat

SEQ ID NO: 1272 - DNA, 439 bp, Zea mays
  unsure (1)..(439): unsure at all n locations; Clone ID: LIB3061-052-Q1-K1-F12
gcaaaccttgctgcctactctcagcaacagcagtttcttccattcaaccaactaggtgcattgaacgctgcttcttatttgcaacaacaacaactaccattcagccagctacctgctgcctacccccagcaatttcttccattcaaccaactggcagcattgaactctcctgcttatttacagcagcaacaactactaccattcagccagctagctggtgtgagccctgctaccttcttgatacaaccacagttgttgccgttctaccagcacgctgcgcctaacgctggcaccctcttacaactgcaacaattgctgccattcaaccaacttgctttgacanacccagcagcgttctaccaacacccatcattggtgttgccctctttagatnntctatgagttatagttcaaatataaagttttttgtctgatgttt

SEQ ID NO: 1273 - DNA, 454 bp, Zea mays
  Clone ID: LIB3061-052-Q1-K1-F2
atcacaacgaacaaaagctctcgatctcaccgacaccgaggaagaagagatcaatggcgtccgagcagggagtcgtgatcgcgtgccacagcaaggctgagtttgacgcccacatgaccaaggcccaggaagccggcaagctggtggtcatcgacttcactgccgcctggtgcggtccatgccgcgccatcgccccactgttcgtcgaacacgccaagaagttcactcaggtcgtcttcctgaaggtggacgtggacgaagtgaaggaagtcaccgcggcctacgaggtcgaggcgatgccgaccttccacttcgtcaagaacggcaagacggtcgcgaccatcgtgggtgccaggaaggacgagctcctggccctgatcgagaagcatgccgcgcctgcgcctgcgactgcgtctgcctaaatgagatcagatcagtcgtcgccgtcaataag

SEQ ID NO: 1274 - DNA, 400 bp, Zea mays
  Clone ID: LIB3061-052-Q1-K1-F3
gaccattagctttatctactccagagcgcagaagaacccgatcgacaccatgagggtggtgctcgttgccctcgctctcctggctctcgctgcgagcgccacctccacgcatacaagcggcggctgcggctgccagccaccgccgtcggttcatctaccgccgccggtgcatctgccacctccggttcacctgccacctccggtgcatcttccaccgccggtccacctgccgccgccggtccacctgccaccgccggtccatgtgccgccgtcggttcatctgccgacgccaccatgccactaccctactcaaccgccccggcctcagcctcatccccagccacacccatgcgcgtgccaacagccgcatccaagcccgtgccagctgcagggaacctgc

SEQ ID NO: 1275 - DNA, 423 bp, Zea mays
  Clone ID: LIB3061-052-Q1-K1-F4
cccacgcgtccgccaaacggagctgctgctggagttggtgctcaacactcacagtgggatgcagcttggtttgcacatgttccaggacttaaggttctcacaccatactcttcagaagatgctcgaggcttgctcaaagctgctatcagggaccctgatcctgttattttcctggaaaatgaattgctttatggagaatctttcccagtttctgctgaagtgcttgattctagtttttgcctaccgattggcaaagctaagatagaacgtgagggtaaagatgttaccattactgcattctccaagatggttggctatgctctccaggctgcagagatactgtccaaggaaggaatcagcgctgaggtgatcaaccttcgatcaatcagaccacttgatagagctgctattaatgcatctgtc

SEQ ID NO: 1276 - DNA, 450 bp, Zea mays
  Clone ID: LIB3061-052-Q1-K1-F5
aactagcaacatacatagtgaagtacactagcaacatcttagcaccaatgggagccgagatttttgccctccttgccctccttgctctttcagcaagcgctgctacctcgacttttattccacaatgctcacaacaatacctctctccggtgacagccgcgggatttcaatacccaactatacaatcctacatggtacaagaggccatccaagcaagcatcttacggtcattagcattaaccctccaacaaccatatgctctattgcaacagccatccttagtgcatctgtatctccaaagaatcgcggcacaacaactacaacaacagttgctaccaacaatcaatcaagtagttgcagcgaaccttgctgcttacctacagcaacaacagtttcttccattcaatcaactagctggggtgaaccctgctatctacttgcaggcacaac

SEQ ID NO: 1277 - DNA, 447 bp, Zea mays
  unsure (1)..(447): unsure at all n locations; Clone ID: LIB3061-052-Q1-K1-F6
caacaatcatcagccctattacagcagttacctttggtgcatttattggcacagaggatcatggcacaacaactacaacaacttgtgctagcaaaccttgctgcctactctcagcaacaacagtttcttccattcaaccaactagctgcattgaactctgcttcttatttgcaacaacaacaactaccattcagccagctatctgctgcctacccccagcaatttcttccattcaaccaactgacagctttgaactctcctgcttatttacagcagcaacaactactaccattcagccagctagctggtgtgagccctgctaccttcttgacacaaccacaattgttgccgttctaccagcacgctgcgcctaacgctggcaccctcttacaactgcaacaattgctgccattcaaccaactngctttgacaaacccaacagcattc

SEQ ID NO: 1278 - DNA, 418 bp, Zea mays
  Clone ID: LIB3061-052-Q1-K1-F7
cgaccgatcgatcgccacagccaacactcacccgccgaggcgacgcgacagccgccggaaggaaggaataaactcactgccagccagtgaagggggagaagtgtactgctccgtcgaccagtgcgcgcaccgcccggcagggctgctcatctcgtcgacgaccagtggattaatcggcatggcggctctggccacgtcgcagctcgtcgcaacgcgcgccggcctgggcgtcccggacgcgtccacgttccgccgcggcgccgcgcatggcctgaggggggcccgggcgtcggcggcggcggacacgctcagcatgcggaccagcgcgcgcgcggcgcccaggcaccagcagcaggcgcgccgcggtggcaggttcccgtcgctcgtcgtgtgcgccagcgcccgcatgaacgtcgtc

SEQ ID NO: 1279 - DNA, 446 bp, Zea mays
  Clone ID: LIB3061-052-Q1-K1-F8
caatcgccagccctatctttggtgcagtcattggtacaaaccatcaaggcacagcagctgcagcaactcgtgctacctgtgatcaaccaagtagctctggcaaacctttctccctactatcagcaacaacaatttcttccattcaaccaactatctacactgaaccctgctgcttatttgcagcaacaactattaccattcagccagctagctactgcctactctcatcaacaacaacttcttccatttaaccaattggccgcactgaacctcgctgcttatttgcagcagcaaatattactaccatttagccagctagctgcagcaagccgtgcttccttcttgacacagcaacagttgctgcctttctaccagcagtttgcggctaaccccgcaaccctcttacaactacaacaattgttgccctttgtccaacttgctttgac

SEQ ID NO: 1280 - DNA, 487 bp, Zea mays
  Clone ID: LIB3061-052-Q1-K1-F9
attcccggtgcggcgcccgtggggcccaccacggcgccgccggcagcgtcaccaacccccacccccacctccggcctcccagcggcactccgctcgcctgctccacgacgcttatgcgctcgcgttccgctctcgccgcccacctccggcgcctgctcctcctctctccctccggccacctcatcatcatccgccgcgccatggcatccgccgccgccgcgcaggcgcagccaggtggcgccccgctggcgaccgcggagtacgaggaggtgctggggcggctctcctcgctcatcacgcagaaggtgcgcgcgaacaccgtcaaccgcggcaaccagtgggacctcatggagcactacgtcaagattctggagctggaggagtcgatcgcgcggatgaaagtgattcacgtcgcggggaccaaggggaagggttccacatgcacattcaccgagtcaatcctgcgatcgtgtggcttccatactgg

SEQ ID NO: 1281 - DNA, 427 bp, Zea mays
  unsure (1)..(427): unsure at all n locations; Clone ID: LIB3061-052-Q1-K1-E6
ggcactcgcagtcagactcgccacagtagcttcagtggttcaaatggcaggatggtcaagggtgggcgcatgatcaagttggttgagtgcttgcgaaattctgacgacaatgaaggcgagcgtgatgtacatctttgtctgcttccacttgatggacaaacggcaccaaatctggagtcatatctgtgttgcggcccaactctgtccatcaaacaactttgtcaggtcagtacttgttgaaacacttgtgtccatcgtcagaaatcagaacttacagacgaatgtctctgtgtagtttgtcgccagtcagacatctcacanagatgaagaagttgagatgtatgcgctgaagccttcttgtagcaagcctgtcagcactaatacatgcngtcctgacaaagcaaggctcgcaagggaggaacgcctt

SEQ ID NO: 1282 - DNA, 343 bp, Zea mays
  Clone ID: LIB3061-052-Q1-K1-D12
acgccttctatcaatgccatcaatcatcattcatcttagtagtataagcaccaaatcaagtctgcaacagcaattatctaactccaaaaaccatgaaactggtgcttgtggttcttgctttcattgctttagtatcaagtgtttcttgtacacagacaggctgctgcagctgtggtcaacaacaaagccatgagcagcaacatcatccacaacaacatcattcacaaaaacaacaacatcaaccaccaccacaacattaccagcaacagcaacaccaacaacaacaagttcacatgcaaccacaaaaacatcagctacaaccaggaagtttatgttcaacaac

SEQ ID NO: 1283 - DNA, 167 bp, Zea mays
  Clone ID: LIB3061-052-Q1-K1-D2
gctcgacccacgcatccgatcatacaccatacatctaaccagctttttttcaaccttcatctcctctactcacctgaccctctatatagtctccaatgcctctcacttctatcattttatcttacctcacaaactttcttaatcaaacatttcacaacattcacata

SEQ ID NO: 1284 - DNA, 414 bp, Zea mays
  unsure (1)..(414): unsure at all n locations; Clone ID: LIB3061-052-Q1-K1-D3
ggcgcgcgccgtggtgctgtccgccgcgggcccgcacttctgcgcgggcatcgagctggggggccccggggacccgctgtccgccgcctccgccgatcccgtggccgccgcggaggggctccgccgcgcggtcctcgacatgcaggcggcgctcacggccatcgagcggtgccggaagcccgtcgtcgcggcggtgcacggcgcctgcgtcggcggcggcgtcgacctcgtggccgcctgcgacatcaggtgctgctccagggacgcctncttcgtgctcaaggaggtggacatggccatcgtcgccgacctcgggcgcgctgcagcgcctccgcggatcgtcggctacggcaacgctgctgacctcgcgctcaccggacgcaagatcaacgccatggaggccaaggacatggg

SEQ ID NO: 1285 - DNA, 375 bp, Zea mays
  Clone ID: LIB3061-052-Q1-K1-D4
gtccgataccccaagcaccagcgcggcggcggcgaccatggctgtcggaaagaacaagaggatctccaagggaaagaagggtggcaagaaaaagaccgtcgaccctttctctaagaaggattggtatgacatcaaggcaccgtcggtgttcagtgtgcgcaacatcgggaagactctcgtatccaggacacagggtaccaggattgcttctgagggtctgaagcacagagtctttgaggtttgcctagctgatcttcagggcgacgaggatcaagcttacaggaaaatcaggctccgtgctgaagatgtgcagggcaggaatgtgctcacaaacttttggggtatgaattttaccactgataaactgagatccct

SEQ ID NO: 1286 - DNA, 438 bp, Zea mays
  Clone ID: LIB3061-052-Q1-K1-D5
ggcgtggacgccgcggcccgaggcggcggcggcctgcgccgcgcgggagccgtctggtctcaccgcgacctgcgccgcagccacctacagcgcggcggcggcaggggacgtcccgtccgtggcgttcgtggtcgccagctacggcgcgctcctgcttctgctgcgctccctgcgcgcctacgagctggcgccgccggaggcggctgcacgcagggaagcgctcacgcgcagggtctgggcgctctgcacgctactcagcgtgatgttcgcgtggaaggttgcgagcgtcgtcgcgacgccgtgaccggtcgctgtcagcgtttgggccgcggcggccgtcacatctgacgctgggttcgttctgctgttacgacagcagcagcgttgccaatgaacgagtgatcggtggatgtgtgttccgtctgtaacttgtaagct

SEQ ID NO: 1287 - DNA, 430 bp, Zea mays
  Clone ID: LIB3061-052-Q1-K1-D6
gtgggttggcttctcctccccctccggttcgggttcgggttcgtgaggttctccggggttcggtttcgtgggtgagcggatcgagatggcggcgtcggatgttgagtaccgctgcttcgtcggcggcctcgcctgggccacggacgaccactccctccacaacgccttcagcacctacggcgaggtcctcgagtccaagatcatcctcgatcgggagacgcagaggtcccgcggcttcggcttcgtcaccttctccacggaggaggcgatgcggaacgccatcgagggcatgaacggcaaggagctggacggccgcaacatcaccgtcaacgaggcccagtcccgcggcggccgtggaggcggcggcggcggcggttacggtggtggccgtggaggcggctgctacggcggtggcgggcgccgtgatggc

SEQ ID NO: 1288 - DNA, 445 bp, Zea mays
  Clone ID: LIB3061-052-Q1-K1-D7
gcaacatagaaagcacaatagtgtaccaacaatggcagccaaaatattttgcctgcggatgctccttggtctttctgcaagtgctgctacggcgaccattttcccgcaatgctcgcaagctcctatagctacccttcttcccccgtacctctcaccagcggtgtcttcggtatgtgaaaacccaattcttcaaccctacaggatccaacaggcaatcacagctggcatcttacctttatcacccttgttcctccaacaatcatcagccctattacatcaggtacctttggtgcatttattggcacaaaacatcaaggcacaacaactacaacaacttgtgctagcaaaccttgctgcctactctcagcaacagcagtttcttccattcaaccaactagctgcattgaactctgcttctaatttgcaacaacaacaactaccattc

SEQ ID NO: 1289 - DNA, 406 bp, Zea mays
  Clone ID: LIB3061-052-Q1-K1-D8
atgcaacagcagcccccctcccatggagctgacgaccgagccctcccaagctccacgctcaccttggcaagctctcccatggcgtctcccccacctctacggcagtaaggtgtaggactgagagatgacgatcgtgcaagtgatgtggtgccaaccacaagatgcagttggtggacgatctgaagagatgatggacttatccagtggatgctcgccaagcgagtacccaccccagcaaacactatctaagtgtaaaaataaaggcaagccccggttttatgcataaccgttatatatgctattttactgcacttaatgtttgtaggcttgtaatgtgcacttaagttgtaatacccaatttgtaaacattgagaaaagagtaaatctccttatatattttgcctct

SEQ ID NO: 1290 - DNA, 307 bp, Zea mays
  Clone ID: LIB3061-052-Q1-K1-D9
gagcaccctcaaccctcactacccggcagccggtacaagctcatacgtcgattcaacgccatcaagcgaccggctaacagaagacatggcgcaatagctggcaggttcgatggcggcagccgcgagtcggcagccgcggccgtgggttccacggtggtagaggccagagactggacagaggaggcagaggttgcaggacccccagaagcggccgttacggcggtcacaagcatggccgctatggtcgcatgaacaccggcagccatgacgtcgtggtctaccacaagctcgaccatgtcttcatctg

SEQ ID NO: 1291 - DNA, 327 bp, Zea mays
  Clone ID: LIB3061-052-Q1-K1-E1
gggacacggcacagctttgaacaggttttgagcgatctgagacgacgatatataccaggtgcttatgggagactgcgatgaatgtcgaatctagactcccaacagagcacacagagaggctaacactggtactgcactatatacacattattctcttggtcataagcctacgtagtacaagccccataccctaaatactgaccgagctcgacagaaagagagaaaaggtactagacgaatacaacctgcagatcacatcgatcaacacaatctatgtactaacaaaggcaatcatggacgagcgaatataccacgatgggcaaaaga

SEQ ID NO: 1292 - DNA, 221 bp, Zea mays
  unsure (1)..(221): unsure at all n locations; Clone ID: LIB3061-052-Q1-K1-E10
agcgaaaaacggggcgaccgagcctgctcggcctcggtttccggttcccttcccttcgtgcaataaccggtgcccttacccccaactacncgcgcccccgggggcccccgccggggtccttcttcctccgctcgctcggaaccagaggcctcgcgacgtctccgcctgcggnctcgcgactgctaggtttcttcgggggcgcggccatgtcgtcggcggcg

SEQ ID NO: 1293 - DNA, 459 bp, Zea mays
  Clone ID: LIB3061-052-Q1-K1-E11
ccaacaagcaacatagaaagtggaatccagtagcacaatagaccaccatggcgagcaaaatcgtgtccttcttatgctccttgctctttctgcatgtgttgctaacgcgacaattttccctcaatgctcacaagctcctatagcttcccttcttcccccataccttccatcaatgatagcttcagtatgtgaaaacccagctcttcaaccctataggctccaacaagcaatcgcagcaagcaacatacctttatcacccttgtttcaacaatcgccagccctatctttggtgcagtcattggtacaaaccatcaaggcacagcagctgcagcaactcgtgctacctgtgatcaaccaagtagctctggcaaacctttctccctactatcagcaacaacaatttcttccattcaaccaactatctacactgaaccctgctgcttatttgcagcaacaact

SEQ ID NO: 1294 - DNA, 465 bp, Zea mays
  Clone ID: LIB3061-052-Q1-K1-E12
tgtacatctatcatctaatctgatatatagctcataatcgcacgtatggacgaacacaacattatcgcgtgatacttggacctaataatacatgcatggtcataataaagtgttgctaactcgacaattttccctcaatgctcacaagctcctatagcttcccttcttcccccataccttccatcaatgatagcttcagtatgtgaaaacccagctcttcaaccctataggctccaacaagcaatcgcagcaagcaacatacctttatcacccttgtttcaacaatcgccagccctatctttggtgcagtcattggtacaaaccatcaaagcacagcagctgcagcaactcgtgctacctgtgatcaaccaagtagctctggcaaacctttctccctactatcagcaacaacaatttcttccattcaaccaactatctacactgaacccttctgcttatttgcag

SEQ ID NO: 1295 - DNA, 449 bp, Zea mays
  unsure (1)..(449): unsure at all n locations; Clone ID: LIB3061-052-Q1-K1-E3
gggagaaggcaaagcttggaagagttagagaggagtatgagaagatgatggagaccagggccgaatgggaaactgagaagaaggtgaaggcgagacgccaaaaagagcagaaagaggttttaacactgctactgcactattaattcattatttccttcgtcgaaagcatccgtagtacaagccccaaaccctaaaaaatgaccgagctggacagaaagagagaaaaggcactagaagaatacaacctggagatgacaaggatcagcaaaatctctggaggagcaagggcaatggcggaggagcgaaaatacaacgatgggaaaaagatcagagagaaagcgcgcaagatgcgatccacaggaaagcctnaccgcacgtgtgcttgcttttgagaacagctgcatacgctgaaatttgaaccaaaaccaaatgaaggacgtcattttgga

SEQ ID NO: 1296 - DNA, 336 bp, Zea mays
  Clone ID: LIB3061-052-Q1-K1-E4
gcaacatagaaagcacaatagtgtaccaacaatggcagccaaaatattttgcctcctgatgctccttggtctttctgcaagtgctgctacggcgaccattttcccacaatgctcacaagctcctatagcttcccttcttcccccgtacctctcaccagcggtgtcttcggtatgtgaaaacccaattcttcaaccctataggatccaacaggcaatcgcagctggcatcttacctttatcacccttgttcctccaacaatcatcagccctattacagcagttacctttggtgcatttattggcacaaaacatcagggcacaacaactacaacaact

SEQ ID NO: 1297 - DNA, 448 bp, Zea mays
  unsure (1)..(448): unsure at all n locations; Clone ID: LIB3061-052-Q1-K1-E5
tcagaaacacaccaagcgaagcgcactagcaacgacctaacaacaatggctaccaagatattagccctccttgcgcttcttgccctttttgtgagcgcaacaaatgcgttcattattccacaatgctcacttgctcctagtgccattattccacagttcctcccaccagttacttcaatgggcttcgaacacctagctgtgcaagccaacatgcaacaacaagcgcttgcggcgagcgtcttacaacaaccaattgcccaattgcaacaacaatccttgccacatctaacaatacaagccatcacaacgcaacagcaacaacagttcctaccagcactgagccacctagccatggtgaaccctgccgnctacttgcaagagcagctgcttgcatccaacccacttgctctggcgaacgtagttgcaaaccagcaacaacaacagctac

SEQ ID NO: 1298 - DNA, 463 bp, Zea mays
  Clone ID: LIB3061-052-Q1-K1-D11
cccgtgccagcagttcggatcctgcggcgtcggcagcgtcggcagcccgttcctgggccagtgcgtgcgagttcctgaggcaccagtgcagcccggcggcgacgccctacggctcgccacagtgccaggcgctgcagcagcagtgctgccaccagatcaggcaggtggagccgctgcaccggtaccaggcgacatacggtgtggtcctgcagtccttcctgcagcagcagccgcagggcgagctcgcggcgctgatggcggcccaggtagcgcagcagctgacggcgatgtgcggtctgcagctgcagcagccaggtccctgcccttgcaacgcagctgccggcggtgtctactactgaggaaactatgtactgtagtaataatgtaatggagccgctgactagctacctatagggctatagctagttcactcgtttagcggcgatgagtaacggagtgtcac

SEQ ID NO: 1299 - DNA, 457 bp, Zea mays
  Clone ID: LIB3061-052-Q1-K1-B9
ctagcaacatagaaagcacaatagtgtaccaacaatggccgctaaaatattttgccggcttatgctgcttggtctttctgcaagtgctgctacggcgaccattttaccacaatgctcacaagctcctatagctatccttcttgcaccgtacctctcaccaacggtgtcttcggtatgtgaaaacccaattcttcaaccctacaggatccaacaggcaatcgcagctggcatcttacctttatcacccttgttcctacaacaatcatcagccctattacagcagttacctttggtgcatttattggcacaaaacatcagggcacaacaactacaacaacttgtgctagcaaaccttgctgcctactcttagcaacagcagtttcttgcattcaaccaactagctgcattgaactctgcttattatttgcaacaactgcaactaccattcagccagcta

SEQ ID NO: 1300 - DNA, 358 bp, Zea mays
  Clone ID: LIB3061-052-Q1-K1-C1
attatttagaccaactagcaacatagaaagcacaatagtgtaccaacaatggcagccaaaatattttgcctggttatgctccttggtatttctgcaagtgctgctacggcgaccattttcccgcaatgctcacaagctcctatagcttcccttcttcccccgtacctctcaccagcggtgtcttcggtatgtgaaaacccaattcttcaaccctacaggatccaacaggcaatcgcagctggcatcttacctttatcacccttgttcctccaacaatcatcagccctattacagcagttacctttggtgcatttattggcacaaaacatcagggcacaacaactacaacaacttgggc

SEQ ID NO: 1301 - DNA, 458 bp, Zea mays
  Clone ID: LIB3061-052-Q1-K1-C10
caagcaacatagaaagtggaatccagtagcaacaatagagcaacaatggcgaccaagatactttccgtccttatgctccttgctctttctgcatgtgttgctaacgcgacaattttccctcaatgctcacaagctcctatagcttcccttcttcccccataccttccatcaatgatagcttcagtatgtgaaaacccagctcttcaaccctataggctccaacaagcaatcgcagcaagcaacatacctttatcacccttgtttcaacaatcgccagccctatctttggtgcagtcattggtacaaaccatcaaagcacagcagctgcagcaactcgtgctacctgtgatcaaccaagtagctctggcaaacctttcttcctactatcagcaacaacaatttcttccatttcaccaactatctacactgaaccctgctgctaatttgcagcaacaact

SEQ ID NO: 1302 - DNA, 438 bp, Zea mays
  Clone ID: LIB3061-052-Q1-K1-C11
ggaagagcgcagaaaaaggaagcagcagctttgatcgggtggagtttcttgctcacggatcgtcgagtgaagcctttgtggtccgtgacgatgtcgaggagagccgcagcgttgttgctcgcgtgcctcgtcgccgtgacagcggcggcgctggcggacggcgcgctgctcccgtggttcggcgacggccggcgcgggctcgacgaggcagcggtgaccgacgtgggccttctggcggccgacccgttccggatcctggagcacgtccccttcggcttcgaccgggacgacgtggccatggtctccatggcgcgcgtggactggcgcgagacccccgacgcgcacgagatcgtggtcgacgtgcccgggatgcgcatggaggacctcaggatcgaggtcgaggacaacagggtgctgcgcgtcagcggcgagcggcgg

SEQ ID NO: 1303 - DNA, 217 bp, Zea mays
  Clone ID: LIB3061-052-Q1-K1-C12
acagaaacccaggcccgctccagtttgaaggaccaggtgtcgattcaaatcctattgcattgtgcgttgaggatcaagactatatgggcagaataaaaaagttgcaagaatacttggagaaggcaaaacttatactggtgaggagtatatcgataatgcatctcaatcctctctgcattgtaaactcctacattgaagttagacaaaagtctcatct

SEQ ID NO: 1304 - DNA, 354 bp, Zea mays
  Clone ID: LIB3061-052-Q1-K1-C2
caactagcaaaatacatagtgaagtacactagcaacatcttagcaccaatgggagccaagattttttccctccttgccctccttgctctttcagcaagcgctgctacctctactattattccacaatgctcacaacaatacctctctccggtgacagccgcgggatttcaacacccaactatacaatcctacatgctacatgaggccatcgtagcaagcatcttacggtcattagcattaaccctccaacagccatatgccctattgcaacaaccatccttagtgcatctgtatctccaaagaatcgcgacacaacaactacaacaacagttgctaccaacaatcaatcaagta

SEQ ID NO: 1305 - DNA, 450 bp, Zea mays
  Clone ID: LIB3061-052-Q1-K1-C3
aacatagaaagcacaatagtgtaccaacaatggcagccaaaatattttgcctccttgtgctccttggtctttctgcaagtgctgctacggcgaccattttcccgcaatgctcgcaagctcctatagcttcccttcttcccccgtacctctcaccagcggtgtcttcggtatgtgaaaacccaattcttcaaccctacaggatccaacaggcaatcacagctggcatcttacctttatcacccttgttcctccaacaatcatcagccctattacatcagttacctttggtgcatttattggcacaaaacatcagggcacaacaactacaacaacttgtgctagcaaaccttgctgcctactctcagcaacagcagtttcttccattcaaccaactagctgcattgaactctgcttcttatttgcaacaacaacaactaccattcagccagc

SEQ ID NO: 1306 - DNA, 409 bp, Zea mays
  Clone ID: LIB3061-052-Q1-K1-C4
gtgaaaacccagctcttcagccctatatgctccaacaagcaatcgcagcaagcaacatacctttatcacccttgttgtttcaacaatcgccagccctatctttggtgcagtcattggtacaaaccatcagggcacagcagctgcagcaactcgtgctacctgtgatcaaccaagtagctctggcaaacctttctccctactctcagcaacaacaatttcttccattcaaccaactgtctacactgaaccctgctgcttatttgcagcaacaactattaccattcagccagctagctactgcctactctcagcaacaacaacttcttccatttaaccaattggccgcactgaaccccgctgcttatttgcagcagcaaatactactaccatttaaccagctagctgcagc

SEQ ID NO: 1307 - DNA, 448 bp, Zea mays
  Clone ID: LIB3061-052-Q1-K1-C5
cccacgcgtccgggatcctgcggcgtcggcagcgtcggcagcccgttcctgggccagggcgtcgagttcctgaggcaccagtgcagcccggcggcgacgccctacggctcgccacagtgccaggcgctgcagcagcagtgctgccaccagatcaggcaggtggagccgctgcaccggtaccaggcgacatacggtgtggtcctgcagtccttcctgcagcagcagccgcagggcgagctcgcggcgctgatggcggcccaggtagcgcagcagctgacggcgatgtgcggcctgcagctgcagcagccaggtccctgcccttgcaacgcagcttgccgcggtgtctactactgaggaaactatgtactgtagtaataatgtaatggagccgctgactagctacctagctcgctagtttactcatttagcggcgatgagtaacgtagtg

SEQ ID NO: 1308 - DNA, 399 bp, Zea mays
  unsure (1)..(399): unsure at all n locations; Clone ID: LIB3061-052-Q1-K1-C6
aataaatacatgccactcacatggtgctcctccatcttccaagtcaccaacgcaaattgcaccaagaaatccatcgagaggccgtcgacaggggaattaatggcgtcgtcgtctagcagcagccaccgccgcctcatcctcgcagccgccgtcctgctctccgtgctcgcggctgccagcgccagcgccgggacctcctgcgtgccggggtgggccatcccgcacaacccgctcccgagctgccgctggtacgtgaccagccggacctgcggcatcgggccgcgcctcccgtggccggagctgaagaggagatgctgccgggagctggcggacatccccgcgtactgccggtgcacggcgctgagcatcctcatggacggcgcgatcccgncgggcccg

SEQ ID NO: 1309 - DNA, 450 bp, Zea mays
  unsure (1)..(450): unsure at all n locations; Clone ID: LIB3061-052-Q1-K1-C7
ggtaaatgaagtattatttgaggttggtattgtatctgaaggtaaatgaagtattatttgaggtttgtgttgtatctgaaggaagtgaagtttattgataaatgtagcatgccatatacattgcatgactcatttgcatatgaagttttgtcgtgacctatggtccgaccgtaccggtacaacttagcatcgtacgttgcccgagaaggggtacgatgcggcttcatacccttagaggtatgaaggcagaggacatatgcattgcactcatatgcattcattgaagtgatatttgcagatgatgtggttttatacccccagaggtatgaagatagagtacctacacattgcattcctatgcatacattgaagtgatatttgcaggtattgttgacgcanggaagtgttatagaacctattgtggttgttcgaggaaatgagatggtgctt

SEQ ID NO: 1310 - DNA, 304 bp, Zea mays
  Clone ID: LIB3061-052-Q1-K1-C8
ggatccgcggcgagagggcctaatcgccacctcaaacatcgtgacaaaaaaatgaagtcctggggttattgttaatctggtgccattgtaaggacatatgagtagggtttgttttgtggatcgcaagtttctcttctgctactgttgctgctacctttgctggtgttattgctagggttgaatacttaagttaactatgcgctgacagtctggactagcagtgttatgtgcgctgctggaccttgcgcgcgatgctgtggccgattttgttcgttaatgtcaagaattgtgttacagtgcgtgt

SEQ ID NO: 1311 - DNA, 461 bp, Zea mays
  unsure (1)..(461): unsure at all n locations; Clone ID: LIB3061-052-Q1-K1-C9
gattagagaggctttcaggagcatggtcgacttttactccttcaggtctggcttttgggcgcctggaggccagacaatttgttgcaggtcgatgctcgtgctggtcgccgaacaaagcatgcaggggtagccatgtccaccggcccgaaagcacgcaggcccagccggggatacatgcaatgaggcaacgcgcttgaaaggctttccagtttggtcgtgcatgtaattggcagtgtctgatgcctaaaccaccgtgagcagacgtctggataattggaggctagcacccggtctgctgctgctcagtggggtacctgggttcatggtgccctagggctgagctgcaagacgtgaagacgacggtgggataacgcgaggaaaagaaaaatcttgggccttcttgcngcgtgagcttgtcgtggcaggagggaaagcacatgtcaagatgcactagcatgact

SEQ ID NO: 1312 - DNA, 435 bp, Zea mays
  Clone ID: LIB3061-052-Q1-K1-D1
agcagccgcagtccaccgaccccgccgtcggtcgccctccatctcctcgccgccgggcgccctccatctcctcgccgctgcctctcggttgtatcagtttatcttgcctcaggagctttgttaattaagaatttgacatcattggcatatggcgtcccagaagagttgtcttctgatcactttctcccacgagattgtagatggggtgcctctgtctgtttcatcaaactgccttactgtaaaagctttgaaatatgaacctgctggttattcgttccatgctgcggcaatgaagctgcttggtcttgcggagcatgaagatatagaaactgatgatcacagcgtttcatcggatgacaaaagccaagattttaatactgcttctgatacctttagcagcaaaggggaagaagaagtcatctggcagtcaacagc

SEQ ID NO: 1313 - DNA, 439 bp, Zea mays
  Clone ID: LIB3061-052-Q1-K1-D10
gaattccccattctataaattccagttaaacttaattcgtaagatcaatcataattgtcgagttgcaaaccatggacatggctttggcgtctaaagcctcccctccgccatggaatgccaccgccgccgagcagccaattccaaagcgtgacaaagccgctgcaaatgattcaacatacctcaatcctcaagctcatgatagtgttcttggaatcattctgggaggtggtgctgggactagattgtaccccttgacaaagaagcgtgccaagcctgcagtgccattgggtgccaactatagactgattgatattcctgtcagcaattgtctcaacagcaacatatccaagatctatgtgctaacgcaatttaactctgcttccctcaaccgtcacctctcaagagcctacgggagcaacattggagggtacaagaatga

SEQ ID NO: 1314 - DNA, 408 bp, Zea mays
  Clone ID: LIB3061-052-Q1-K1-B8
tttttatttactccaccactacaggtccatttatttactcgcaatataaaattaccgatcggtacttaactacacacgcaagcaattagttcatgcgcttattaggttgtgccactggccaccactacactacattacactagcacaagcaagcagctacacatacttgtccatatcacataaacgaaacagcatatataagaagatgtcccaacatctttgcaccacgcgcgagatcaggggccctgcaggccgaactcttcagggcgcggccacgttctccttggcgagcggcgcgatctcctcgccttcgacccctggctcgccgccggcgaccccgaggctgagcagcacgttctcccagttcttggcaggggccttccaggagagatcctggatcatgcagtt

SEQ ID NO: 1315 - DNA, 381 bp, Zea mays
  Clone ID: LIB3061-052-Q1-K1-A6
tttcagcattcaaaaacacaccaagcgaagcgcactagcaacgacctaacaccaatggctaccaagatattagccctccttgcgcttcttgcccttttagtgagcgcaacaaatgcgttcattattccacagtgctcacttgctcctagtgccattattccacagttcctcccaccagttacttcaatgggcttcgaacatccagccgtgcaagcctacatgctacaactagcgcttgcagcgagcgccttacaacaaccaattgcccaattgcaacaacaatccttggcacatctaaccctacaaaccattgcaacgcaacaacaacaacaacaacagtttctgccatcactgagccacctagcccgtgtgaaccctgtc

SEQ ID NO: 1316 - DNA, 445 bp, Zea mays
  unsure (1)..(445): unsure at all n locations; Clone ID: LIB3061-052-Q1-K1-A7
ggggcagaaagcaggagaaagctttgagaaataggtgctttggtggtagagttgctgcaactacacaatgtattcttacctcagatgcttgtcctgaaactcttcattctcaaacacagtcctctaggaaaaattatgctgatgcaaaccgtgtatctgctatcattttgggcggaggcactggatctcagctctttcctctgacaagcacaagagctacgcctgctgtacctgttggaggatgttacaggcttattgatatccctatgagtaactgcttcaacagtggtataaataagatatttgtgatgagtcagttcaattctacttcgcttaaccgccatattcatcgtacataccttgaaggcgggatcaactntgctgatggatctgtacaggtattagcggctacacaaatgcctgaagagccagctggatggttcca

SEQ ID NO: 1317 - DNA, 433 bp, Zea mays
  Clone ID: LIB3061-052-Q1-K1-A8
tgcagccctttggtaatgccttttctccaatcacgtttgatacaaccaagtagctggcaggtattgcagcaacaatgttgtcatgatcttaggcagattgagccacaatacattcaccaagcaatctacaacatggttcaatccataatccaggaggagcaacaacaacaaccatgtgagttatgtggatctcaacaagctactcaaagtgcggtggcaatcttgacagcagcacaatacctaccatcaatgtgcggcttgtaccactcatactaccaaaataatccatgcagcagcaatgacattagtggtgtttgcaattgaagaatgtgtctacctagccgttatactcctataacggtgttaagcaataaagtaccatacattatgatgtttgtactatgatatttgaataagaatactaattgtaatt

SEQ ID NO: 1318 - DNA, 471 bp, Zea mays
  unsure (1)..(471): unsure at all n locations; Clone ID: LIB3061-052-Q1-K1-A9
gccacgcgtncgcagaaacacaccaagcgaaacacattagcaacaacctaacaacagtggctaccaagatattatccctccttgcgcttcttgcgctttttgcgagcgcaacaaatgcgttcattattccacaatgctcacttgctccaagttccattattacacagttccttccaccagttacttcaatgggcttcgaacacccagctgtgcaagcctataggctacaacaagcaattgcggcgagcgtcttacaacaaccaatttcccagttgcaacaacaatccttggcacatctaacaatacaaaccatcgcaacgcaacagcaacaacaattcctaccagcactgagccacctagccatggtgaaccctgccgnctacttgcaacagcangtgcttgcatcaaacccacttgctctggcaaacgtagttgcaaaccagccacaacaacagctgcaacagtttctgc

SEQ ID NO: 1319 - DNA, 443 bp, Zea mays
  Clone ID: LIB3061-052-Q1-K1-B1
cagcaagcatcttacggtcgttagcattgaccgtccaacaaccatatgccctattgcgacaaccatccttagtgaatctgtatctccaaagaatcacagcacaacaactacaacaacggttgcttccaacaattaatcaagtagttgcagcgaaccttgctgcttaccttcagcaacaacaatttcttccattcaatcaactagctggggtgaaccctgctgcttacttgcaggcacaacagctactaccattcaaccaacttgtcgggagccctgctgccatcttattgcagcaacagttgctgccattccgtctacaagttgttgcaaacattgctgctttcttgcaacaacaacaattgctgccattttacccacaggttgtgggaaacattaacgccttcttgcaacaacaacaattgctgccattctacccacaggat

SEQ ID NO: 1320 - DNA, 454 bp, Zea mays
  unsure (1)..(454): unsure at all n locations; Clone ID: LIB3061-052-Q1-K1-B10
cagccctattacatcagttacctttggtgcatttattggcacaaaacatcagggcagaacaactacgaacaacttgtgctagcaaaccttgctgcctactctcagcaacagcagtttcttccattcaaccaactagctgcattgaactctgcttcttatttgcaacaacaacaactaccattcagccagctacctgctgcctacccccagcaatttcttccattcaaccaactggcagcattgaactctcctgcttatttacagcagcaacaactactaccattcagccagctagctggtgtgagccctgctaccttcttgatacaaccacagttgttgccgttctaccagcacgctgcgcctaacgctggcaccctcttacaactgcaacaattgctgccattcaaccaacttgctntgacaaacccagcagcgttctaccaacaacccatca

SEQ ID NO: 1321 - DNA, 455 bp, Zea mays
  unsure (1)..(455): unsure at all n locations; Clone ID: LIB3061-052-Q1-K1-B12
gcaattagctcatcgactccagattggagaactcgacaccatgaaggtgctgatcggtgcccttgctctcctggcgctcgctgcgagcgccgcctccagtacaagcggcggctgtggctgccagacaccaccgtttcatctaccgcctccgttctatatgccgcctccgttctatctgccgccgcagcagcagccgcagccatggcaataccccactcaaccaccgcagctaagcccgtgccagcagttcggatcctgcggcgtcggcagcgtcggcagcccgttcctgggccagtgcgtcgagttcctgaggcaccagtgcagcccggcggcgacgccctacggctcgccacagtgccaggcgctgcagcagcagtgctgccaccagatcaggcaggtggagccgctgcaccggtaccaggcgacatacggtgtgggcctgcagtccttnctgc

SEQ ID NO: 1322 - DNA, 260 bp, Zea mays
  Clone ID: LIB3061-052-Q1-K1-B2
cggattctaatcttggacgggacaatagagctgcatcactaggagacaagatattttggctccttatgctcctctggctggatctggcaatgctaaatacagcaacgcctcatacgcgcagcgatcagaaagctgcacacttgtcgagcttgttgacgtctggacgaatgacgcccaacagtcatgctgtatggtcaaaaccaccatggaacactgctactggatacgactcgctaatcacatctggcatcttaccttta

SEQ ID NO: 1323 - DNA, 441 bp, Zea mays
  unsure (1)..(441): unsure at all n locations; Clone ID: LIB3061-052-Q1-K1-B3
ctggtgcccttgcattggctggggctgaagcctactgcaaatactataacttgaaaggagaaactgtggttgcagataactagtggggcaaatatgaactttgatcgacttagactagtaaccgagctagctgatgttggccgaaaacgggaagcagtgttagctacatttctgccagagcagcagggaagcttcaaaaaattcacagaattggttggcaggatgaatattactgaattcaaatacagatacaattctaatgcaaaagatgcccttgttctttacagtgttggcatctacactgacaatgagcttggagcaatgatggatcgcatggaatctgcgaaactgaggactgttaaccttactgacaatgatttggcaaaagaccaaccttagatactntattggaggaagatcagaaataaaagatgaactggt

SEQ ID NO: 1324 - DNA, 434 bp, Zea mays
  Clone ID: LIB3061-052-Q1-K1-B5
gaaagcacaatagtgtaccaacaatggcagccaaaatattttgcttccttatgctccttggtctttctgcaagtgttgctaccgcaaccattttcccacaatgctcacaagctcctatagcttcccttcttcccccatacctctcaccagcggtgtcttcaatgtgtgaaaccccaattgttcaaccctacaggatccaacaggcaatcgcaacaggcatcttaccattatcacccttgttcctccaacaaccgtcagccctattacagcagttacctttggtccatttggtggcacaaaacatcagggcacaacaactacaacaacttgtgctagcaaaccttgctgcatactctcagcaacatcagtttcttccattcaaccaactggctgcattgaactctgctgcttatttgcaacaacaattaccattc

SEQ ID NO: 1325 - DNA, 428 bp, Zea mays
  unsure (1)..(428): unsure at all n locations; Clone ID: LIB3061-052-Q1-K1-B6
cccacgcgtccgacccgaagcgccctcatcacagaggcgcgtcgatacctcacaacggcgtcaagtatgggtgcaaaggaggttacaagtggagggacacaaagaaggcaaaccctaacatccttgtcggagcaatggtggctggccccgacaggcgcgatggctacaaagatgtccgcacgaactacaactacacggagcctactctcgcagcgaatgctggtctggttgcagcgctgatctctatatccgatatcaaaaccggacggttcggcatcgataagaacaccatcttctctgcgattcctccgatgttcccaacacccncgccgccgccatcagcatggaaaccatagagaagcaatacatctgaatgttttccaaagcatcgaacggggaagtggagcaaacgtgcgatcatttggtac

SEQ ID NO: 1326 - DNA, 451 bp, Zea mays
  Clone ID: LIB3061-052-Q1-K1-B7
attgagaccagcaagcaacatagaaagtagaatccattagcaacaatagagcaacagtggcgaccaagatattttccctccttatgctccttgctctttctacatgtgttgctaacgcgacaattttccctcaatgctcacaagctcctatagcttcccttcttcccccataccttccatcaattatagcttcagtatgtgaaaacccagctcttcaaccatataggcttcaacaagcaatcgcagcaagcaacatacctttatcgcccttgttgtttcaacaatcaccagccctatctttggtgcagtcattggtacaaaccatcagggcacaacagctgcagcaactcgtgctacctgtgatcaaccaagtagctctggcaaacctttctccctactctcagcaacaacaatttcttccattcaaccaactgtctacactgaaccctgc

SEQ ID NO: 1327 - DNA, 460 bp, Zea mays
  Clone ID: LIB3061-052-Q1-K1-A5
gtcgaccagcgtccgcaccatgaagtgctgatcgttgcccttgctctcctggcgctcgctgcgagcgcggcctccagtacaagcggcggctgtggctgccagacaccaccgtttcatctaccgcctccgttctatatgccgcctccgttctatctgccgccgcagcagcagccgcagccatggcaataccccactcaaccaccgcagctaagcccgtgccagcagttcggatcctgcggcgtcggcagcgtcggcagcccgttcctgggccagtgcgtcgagttcctgaggcaccagtgcagcccggcggcgacgccctacggctcgccacagtgccaggcgctgcagcagcagtgctgccaccagatcaggcaggtggagccgctgcaccggtaccaggcgacatacggtgtggtcctgcagtccttcctgcagcagcagccgcagggcgagctcgcgg

SEQ ID NO: 1328 - DNA, 51 bp, Zea mays
  Clone ID: LIB3061-051-Q1-K1-H10
tcttgcgcgtacgcgtacacagccccgatccgaatcgtcctcctcgcgagc

SEQ ID NO: 1329 - DNA, 417 bp, Zea mays
  Clone ID: LIB3061-051-Q1-K1-H11
cggacgcgtgggtttaagcattcagcaacacaccatgcgaaccgcactaccaacgaggtaacaccaatggctaccatgatattactccttgttgcgctagttgccctttcagtgaccgcaacaaatgcatacattatactacagtgctcactcgctactagtgacattattccacagttccttccaccagtcacttaactgggcttcgaacatgcatacgtgctagcctacacgctacaactagcgcttgcagagagcgccttacaacaaccaattgaccaattgcaacaacaattcttggtacatataaccgtacagaccattgcaccgcaacaacagcaactgcaacagcttatgccattactgagccagctagccgtggtgaaccctgtcaactacttgcaacaatagctgctt

SEQ ID NO: 1330 - DNA, 415 bp, Zea mays
  Clone ID: LIB3061-051-Q1-K1-H12
agaccattagctttatctactccagagcgcagaagaacccgatcgacaccatgagggggttgctcgttgccctcgctctcctggctctcgctgcgagcgccacctccacgcatacaaaccgcggcttccgcttgcaaccaacggccgccggtcatttaacggccgccgtgccttttgccacttccggttaacctgccacttccggggcatttccaaccgccggtccacctgccgccgccggtccacctgccaccgccggtccatgtgccgccgccggttcatctgccgccgccaccatgccactaccctactcaaccgccccggcctcagcctcatccccagccacacccatgcccgtgccaacagccgcatccaagcccgtgccagctgcaaggaacctgcggcgttggcagca

SEQ ID NO: 1331 - DNA, 362 bp, Zea mays
  Clone ID: LIB3061-051-Q1-K1-H2
gggtaccttcttcagcatcatggcatgatcttaaggaccatatgcggcgagctggggatggctgtttcactgatgtgtatcgtgaggctggagcaactattggaatagctgattatactaactatgaagatatgaaacacgcgataaggaagctagatgattctgagttccgtaatgctttttcaaggacatatgtccgggtgagggagtatgatgctaggcgcagccgttctcgctccataggcagaaaccgctctaagtcaagaagcagaagccacagccattcgtactcaagaagcagaagccgcagttatagcaagagcacgagcccaagatctagatctgcttcagagtcaaaatca

SEQ ID NO: 1332 - DNA, 389 bp, Zea mays
  Clone ID: LIB3061-051-Q1-K1-H3
attcctctgagctttgtagcttctgttggcactagagtacatggattagcttgttgggttgatgtattgtttaatgggagcactgtgcaaaggtggcttaccactgctccaggatcccctacaactcactggtaccaactacgatgtgtgctttcacagccattgtatgtcatggccggccaagaaataactggccatcttcgtctcgtagcccatagtgctcaaagctacacaatatacttgacaatgtcagctaaaatgtggggtgtgggtgcggagcaaggcggtatcctacagacatctactgggaaacttgaactgaaggagccatactacaggttgtctcagccacaatcatgcacgttgccacaagatcagcaacagcagca

SEQ ID NO: 1333 - DNA, 424 bp, Zea mays
  unsure (1)..(424): unsure at all n locations; Clone ID: LIB3061-051-Q1-K1-H4
aaccaaccaaaaccacgggaaggagacgagactgggggaaaaacactgcgcaggcacaggcagggagagacgtaaagccgccgcttcgtgcgcgtcgacgtcacctcgtcgacggggcccgtctcgccgcggggtcccttagagctcccttccgtcgccggactgggcggtcgccggacggatcgggaagcgacgacctgaggggactggctgggatggccgggaagaagcgcaaggcggaggcggcacgcctggaggagacggaccgggcgctctacggggccttccggggcgccgacaactcgctctcgcagctctacacgctcggcatgggcgcgcaaaaagcctncttccacgccggcgaacgtcacgccatggaaaaactttatgaatggatcctgaggcagcacgaaaaatggtttga

SEQ ID NO: 1334 - DNA, 418 bp, Zea mays
  Clone ID: LIB3061-051-Q1-K1-H6
cgaagatcattgaagttgacaacagtgtgagagaggatcgtgctctgctgagtggtgcacaaaagttgcttggtatcctgattgctattggggaagctgaggcatatgtcctgtctggaatgtatggcagtgtaagccaacttggaacagggaatgctatcctcattatacttcagcttttctttgctggcatcattgtcatctgtctggatgaacttctccagaaaggttatggcttgggatctggcatttctctgttcattgctaccaatatatgcgagaatatcatctggaaggcatttagccccacaaccatgaacagtggtcgtggtgctgaatttgaaggggctgtcattgcactgtttcatctgttgattactagaacccgataagtccgtgctcttcgtgaggctttcta

SEQ ID NO: 1335 - DNA, 453 bp, Zea mays
  unsure (1)..(453): unsure at all n locations; Clone ID: LIB3061-051-Q1-K1-H8
attgagaccaactagcaacatacaaagcacaatagtgtaccaacaatggcagctaaaatattttgcctgcttaggctccttggtctttctgcaagtgctgctacggcgaccattttcccacaatgctcacaagctcctatagcttcccttcttcccccgtacctctcaccaacggtgtcttcggtatgtgaaaacccaattcttcaaccctacaggatccaacaggcaatcgcagctggcatcttacctttatcacccttgttcctccaacaatcatcagccctattacagcagttacctttggtgcatttattggcacanaacatcaaggcacaacaactacaacaacttgtgctagcaaaccttgctgcctactctcagcaacagcagtttcttccattcaaccaactagctgcattgaactctgcttcttattngcaacancaacaacta

SEQ ID NO: 1336 - DNA, 367 bp, Zea mays
  Clone ID: LIB3061-052-Q1-K1-A1
cgacggttttgtgtggacaatcgatagcaccgtcactgggaggtttgtgattgagatagagtttcttgacctgaaggtcgctgatccgtctggcggggagccggcctcgatttgggcctcccgccaggtcaagcagtgctcggacagcacggccctgtcgtccctggctcggatgctgcacgaggacgtcctcaccgacatcaccatcaacgcggcggacggcagcgtgggcgcgcaccgcgcggtcctggcgacgcggtcgccggtgttccggagcatgttctcgcacgacctgagggagaaggagctctccaccgtggacatcaccgacatgtccctggacgcgtgccgcgccttctcagctaca

SEQ ID NO: 1337 - DNA, 441 bp, Zea mays
  Clone ID: LIB3061-052-Q1-K1-A10
ctggactatttcaaatattactgctggaaacaaagatcagatacaggctgtcataagtgccggtatcatcgctcctttgttgcaactgcttcaaacagcagagtttgatatcaagaaggaggctgcttgggccatctcaaatgctacctctggtggttctcatgagcaaatcaagtacttggtgtctgagggctgcatcaagccattgtgtgaccttcttgtctgccctgatccgagaattgtaacagtttgtctggagggtcttgagaatattcttaaagtatggcagcatgacaagaccatgggtgcaacaggtgacactaacgtcttagctcagatgatcgatgaagcggaaggcctggaaaagatcgagaacctacagagccacgataacaatgaaatctatgaaaaggctgtgaagcttcttgagacatactggat

SEQ ID NO: 1338 - DNA, 425 bp, Zea mays
  Clone ID: LIB3061-052-Q1-K1-A11
tgacacctgcggttcacctgccacctgcggtgcatctcccaccgccggtccacctgccgacgccggtccacgtgccaccgcgggtccatgtgccgccgccggttcatctgccgccgccaccatgccactaccctactcaaccgccccggcctcagcctcatccccagccacacccatgcccgtgccaacagccgcatccaagcccgtgccagctgcagggaacctgcggcgttggcagcaccccgatcctgggccagtgcgtcgagtttctgaggcatcagtgcagcccgacggcgacgccctactgctcgcctcagtgccagtcgatgcggcagcagtgttgccagcagctcatgcaggtggagccgcagcaccggtaccaggcgatcttcggctaggtcctccagtccatcctgcagcagcag

SEQ ID NO: 1339 - DNA, 459 bp, Zea mays
  Clone ID: LIB3061-052-Q1-K1-A12
tgcaattttaggccataccaatatgtcattgagttgcttggcacactgctactgaggaaaaagaccaggtcaaccacttagcctagctttagctccaccaatgcttacaaaagttagaaatatacagctcattgatttatgtatccatgccaaaaaaaatttgtaactaaaaatataattatacaaggttcgccacaccatcatcatgtgccacggtatgaacagaaaaataatatacaatggataaaagcaccaaacgttatggtcaaatgaacttaaccaaaagcaggcataagtgtttggatgcaaagagaaggattagagaaatggtatatcctatttttctgatattccaatactctcgaaaaggttgaatatccaaacttcccacttgcttttactatttcatgattattgcaaactaaggctgccaaacttaaaagacttctgatctcacat

SEQ ID NO: 1340 - DNA, 454 bp, Zea mays
  unsure (1)..(454): unsure at all n locations; Clone ID: LIB3061-052-Q1-K1-A2
cggacgcgtgggtgaaaacccagctcttcaaccatataggcttcaacaagcaatcgcagcaagcaacatacctttatcgcccttgttgtttcaacaatcaccagccctatctttggtgcagtcattggtacaaaccatcagggcacaacagctgcagcaactcgtgctacctgtgatcaaccaagtagctctggcaaacctttctccctactctcagcaacaacaatttcttccattcaaccaactgtctacactgaaccctgctgcttatttgcagcaacaactattaccatttagccagctagctactgcctactctcagcaacaacaacttcttccatttaaccaattggccgcactgaaccccgctgcttatttgcagcagcaaatactactgccatttagcgagctagctgcagcaagtcgtgcttncttcttgacacagcaacagttg

SEQ ID NO: 1341 - DNA, 422 bp, Zea mays
  Clone ID: LIB3061-052-Q1-K1-A3
attgataccaactagcaaaatacatagtgaagtacactagcaacatcttagcaccaatgggagccaagatttttttccctccttgccctccttgctctttcagcaagcgctgctacctctactattattccacaatgctcacaacaatacctctctccggtgacagccgcgggatttcaacacccaactatacaatcctacatgctacatgaggccatcgtagcaagcatcttacggtcattagcattaaccctccaacagccatatgccctattgcaacaaccatccttagtgcatctgtatctccaaagaatcgcgacacaacaactacaacaacagttgctaccaacaatcaatcaagtagttgcagcgaaccttgctgcttatctgcagcaacaacaatttcttccattcaatcaact

SEQ ID NO: 1342 - DNA, 296 bp, Zea mays
  Clone ID: LIB3061-051-Q1-K1-H1
ggattaccttcttcagcatcatggcaagatctcaaggaccatatgcggcgagctggtgatgtctgtttcactgatgtgtatcgtgaggctggagcaactattggaatagctgattatactaactatgaagatatgaaacacgcgataaggaagctagatgattctgagttccgtaatgctttttcaaggacatatgtccgggtgagggagtatgatgctaggcgcagccgttctcgctccagaggcagaaaccgctctaagtcaagaagcagaagccacagccattcgtactcaag

SEQ ID NO: 1343 - DNA, 400 bp, Zea mays
  Clone ID: LIB3061-051-Q1-K1-F2
gttgtgatagcgaagaagaaagccataaggcacttgtggtagagggaattctggatgccatttcggctggtattctgatctacatggccttggtggacctcatcgcagctgattttctcagcaagaggatgagctgtaacttgaggcttcaagtcggctcatacattgccttgttccttggtgccatggccatggcatctctagccatctgggcttagcaagtagaatggaagtaaggcaaagatttgagagtgctgcctaattgcctttgatagcaggaggttctctccagcagctagttggttgcaattcttgatgagaatgggaggcattttttattttcttatattcttctggttgtctattggttctcttcatgttggtggtggacaagtagatt

SEQ ID NO: 1344 - DNA, 359 bp, Zea mays
  Clone ID: LIB3061-051-Q1-K1-F3
cagtagtgtaccaacaatggcagccaaaatattttgcttccttatgctccttggtcggtctgcaagtgttgctaccgcaaccattttcccacaatgctcacaagctcctatagcttcccttcttcccccatacctctcaccagcggtgtcttcaatgtgtgaaaacccaattgttcaaccctacaggatccaacaggcaatcgcaacaggcatcttaccattatcacccttgttcctccaacaaccgtcagccctattacagcagttacctttggtccatttggtggcacaaaacatcagggcacaacaactacaacaacttgtgctagcaaaccttgctgcatactctcagcaacatc

SEQ ID NO: 1345 - DNA, 328 bp, Zea mays
  Clone ID: LIB3061-051-Q1-K1-F4
gctagctacaacaagccccacttcctttttgaaacaacaaccaacttgctttgacaagactcaacagtgttctaccaacaacccatcattggtggtgccctcttttagattgcttatgagttatagttcaataatgaagttttttggatgatgtttgtggcgtcccagaaataagaaagtacatttctagaaaaaaaaaaaaaaaaaaaaaaaaaaaaaaaaaataaaaaaaaaaaataaaaaaaaagaaaaaaaaaaataaaaaaaaaacataagaaaaattaaaaagagggaaaacataaggttttcaacaactacaacaacttgt

SEQ ID NO: 1346 - DNA, 439 bp, Zea mays
  unsure (1)..(439): unsure at all n locations; Clone ID: LIB3061-051-Q1-K1-F5
ctggcatcttacctttatcacccttgttcctccaacaatcatcagccctattacatcagttacctttggtgcatttattggcacaaaacatcagggcacaacaactacaacaacttgtgctagcaaaccttgctgcctactctcagcaacagcagtttcttccattcaaccaactagctgcattgaactctgcttcttatttgcaacaacaacaactaccattcagccagctacctgctgcctacccccagcaatttcttccattcaaccaactggcagcattgaactctcctgcttatttacagcagcaacaactactaccattcagccagctagctggtgtgagccctgctaccttcttgatacaaccacagntgttgccgttctaccagcacgctgcgcctaacgctggcacccttttacaactgcaacaattgct

SEQ ID NO: 1347 - DNA, 443 bp, Zea mays
  unsure (1)..(443): unsure at all n locations; Clone ID: LIB3061-051-Q1-K1-F6
gatcgtcctgttcctcacagcagcagtcatggcggccgagccggagaagcaggcggcccccgcggcacaggagacggccgtgcacatcgtgtacgttgaccgccccgaggacgccgaccctgaggagttccacatccgcaccctcacccccgtcctcggcagcgaacagaaggccagggacgcagtgctctaccactacaagaacgccgccagcggcttctccgcgaagctcaccccccagcaggtcaaggatctcaaggagcaaccaggtgttctccaggttgtgccgagccagacttaccagctacatggccctgggtctggcactcaccagggcacgacacacaccttgggccttatgtgaaggcgtatgagaatcaagaagactatgtttagtatggctgtatggcacangtctgacgaatgtgtatagtacagtacta

SEQ ID NO: 1348 - DNA, 417 bp, Zea mays
  Clone ID: LIB3061-051-Q1-K1-F7
acgccttcataaatgggcaagctgttccttatgatcctaaatatcatgaggagtgggggagaaacaatgcccgtgccaatgacagaaaccggcgcaatgataggccccgcaactttgacaggtcaaggaactttgacaggagaagggagaacatgcaaaactaccagaacagagatgggcctcctgcccaaggtttcaatggccctccacctccacctggccagaaccagatgccatcccaccatggtcagggcaacatgcctccgcaaccaccacatgctggtggcggccaaccaaactatcagccccaaatgcaaaacccacagacgggctacaaccctggcggtgctcctcactaccagcaaggtgctgctcctggctaccaaggtggacctccggggtatcaaggtggtaacc

SEQ ID NO: 1349 - DNA, 236 bp, Zea mays
  Clone ID: LIB3061-051-Q1-K1-F8
cggacgcgtgggcggacgcgtgggcggacgcgtggggtagaacggcaacaactgtgggtgtgtcaagaaggcagcagggctcacatcagctagctggctttgacaaacccaacagtgttctaccaacaacccatcattggtggtgccctcttttagattgcttatgagttatagttcaataatgaagttttttggatgatgtttgtggcgtcccagaaataagaaagtacatttct

SEQ ID NO: 1350 - DNA, 264 bp, Zea mays
  unsure (1)..(264): unsure at all n locations; Clone ID: LIB3061-051-Q1-K1-F9
gcgagtgttcagggaggccgggacggatgcgacgacgacggacggtgccggcgtcggaggagaagaaagaagaagtagccagctctcgtatatgccttcttgccccatctccgatctggtcgtcgtagcgctcatcgcccccgtcgtcgccggcctcctcctcctcctcctccgctccctcgcctgctccagccgatctatgcgcaaggggctcaacggatggaacanatcctcgtcgatgctcagggacgggttcgggtcaag

SEQ ID NO: 1351 - DNA, 375 bp, Zea mays
  unsure (1)..(375): unsure at all n locations; Clone ID: LIB3061-051-Q1-K1-G1
ctttatcgcccttgttgtttcaacaatcgccagccctatctttggtgcagtcattgggacagaccatcagggcacaacagctgcagcaactcgtgctacctctgatcaaccaagtagctctggcaaacctttctccctactctcagcaacaacaatttcttccattcaaccaactgtctacactgaaccctgctgcttatttgcagcaacaactattaccatttagccagctagctactgcctactctcagcaacaacaacttcttccatttaaccaattggccgcactgaaccccgctgcttatttgcagcagcanatactactaccatttagccagctagctgcagcaaaacgtgctttcctcttgacacagc

SEQ ID NO: 1352 - DNA, 362 bp, Zea mays
  unsure (1)..(362): unsure at all n locations; Clone ID: LIB3061-051-Q1-K1-G10
atgggatcaagatgatggaactggactggaggaacatgagttatatgatgattcaagtcanataggatcctcaacagcacctttatctagctacatgggattcgagcagatgaacttatctgacatgaagtcagatatttcacttgcaaacgttggggatcagaatgtaataggcactttacaatcctgtactgttgaagaacttccaaactttgatacattgatgtccagaagtgatgatcaaaatggtgaaacccccattccacataatctggggaatatgacaccagatgaagatcagttgccaccaccacctgctctccccccaatgcaatggaagatgacaagacaaacaactttac

SEQ ID NO: 1353 - DNA, 396 bp, Zea mays
  Clone ID: LIB3061-051-Q1-K1-G12
gcaacatagaaagcacaatagtgtaccaacaatggcagccaaaatattttgcctccgtatgctccttggtctttctgcaagtgctgctacggcgaccattttcccgcaatgctcgcaagctcctatagcttcccttcttcccccgtacctctcaccagcggtgtcttcggtatgtgaaaacccaattcttcaaccctacaggatccaacaggcaatcacagctggcatcttacctttatcacccttgttcctccaacaatcatcagccctattacatcagttacctttggtgcatttattggcacaaaacatcatggcacaacaactacaacaacttgtgctagcaaaccttgctgcctactctcagcaacagcagtttcttccattcaaccaact

SEQ ID NO: 1354 - DNA, 317 bp, Zea mays
  Clone ID: LIB3061-051-Q1-K1-G2
agggcccgggcgtcgtgcctcgtgggtcccacgcgccaccccgcggtccccgactgggcggggcgatccgacgggcatgagactcccgccgcggtgcgcatgggtcacggcgccggatcgggttcggctgcagtgggtacgaagttcggcacgccccggtctaccgaggagccgtggcaccacagggagctctggtctattcgtgcgggtaaagctgcccagacagcgacgtgcgactgggacattctgaggccagcagacggtggacgagcattggacgggacgcacggcactttgttgcgataacgatgaagctg

SEQ ID NO: 1355 - DNA, 286 bp, Zea mays
  Clone ID: LIB3061-051-Q1-K1-G3
gcagggccagcttattatatataatatctgacgtggagcatatctatctggctgtgggctgcaagcaggcctagtacgccgactgcgcgttcctcctattacacatataggcccctccctgcgtgtatgcttgttaccgtcgtgtcgaaccttgtactacgaggctccatcgaacatcgatggcttgcttctttatcagaacatgtttgaataaacgctatttggtaaaacacaatatactagacaatgtcagctaaaatgtggagaagtgggagcagaacaaggc

SEQ ID NO: 1356 - DNA, 89 bp, Zea mays
  Clone ID: LIB3061-051-Q1-K1-G5
ctcttttagatttcttatgagttatagttcaataataaagttttttgtctgatgtttgtggcttcccagaaatgagaaagtacatttct

SEQ ID NO: 1357 - DNA, 349 bp, Zea mays
  Clone ID: LIB3061-051-Q1-K1-G6
cccacgcgttcgaccacgcgtacgcccacgcgtacgaccacgcgttcgtccttgtcgtgatccgtccaggggagcaaacaagcaagcaagtaaacgggcgaggagctggatagaggccgacgactcgaagcaaccgccgatcggagccgcggctgaggaggaggaacaagctcgagattgtgggtctcggctgcggcagcacggcgcgtgcagagcacgttgtggccaacgcctgacgagagacggagtacgtgcgccgtctgcaccgccactcgccggccgagcaccattgtacttgcaccctcgtcaagcacattaaggcgcccgtccaccttgtgtgggagctggt

SEQ ID NO: 1358 - DNA, 412 bp, Zea mays
  Clone ID: LIB3061-051-Q1-K1-G7
aaagaattctatatagaatgggttgggaattatgcctagatcccgtataaatggaaatttcattgataagacgttctcgattgtagccaatattttattgcaaataattccgacaacctccggggaaaaaagggcatttacttattatagagatggtgcgatttgactcttttttttttttagccctacctatatctcattcttacgagaaagagagagggttcgcatagagagaacaaaattagtaaaggaaacccgcgcttggggaaggtgaggtgaactaacaattccttctgtcgtgtatcctcgattgatgtggcctcagatgcttcaattgtagatttgagtattgagcgaaaggttacacctacaggataggttctgtattacagggcaatccgactctactagt

SEQ ID NO: 1359 - DNA, 324 bp, Zea mays
  Clone ID: LIB3061-051-Q1-K1-G9
cgcaatgctcgcaagctcctatagcttcccttcttcccccgtacctctcaccagcggggtcttcggtatgtgaaaacccaattcttcaaccctacaggatccaacaggcaatcacagctggcatcttacctttatcacccttggtccttcaacaatcatcaaccctattacatcagttacctttggtgcatttattggcacaaaacatcagggcacaacaactaccacaacttgtgctagcaaaccttgctgcctacttttagcaacagcagtttcttccattcaaccaactaactgcattgaactctgcttcttatttgcaac

SEQ ID NO: 1360 - DNA, 408 bp, Zea mays
  Clone ID: LIB3061-051-Q1-K1-F12
gaccaactagcaacatagaaagcacattagtgtaccaacaatggcagccaaaaggtggggcttccttatgctccttggtctttctgcaagtgttgctaccgcaaccattttcccacaatgctcacaagctcctatagcttcccttcttcccccatacctctcaccagcggtgtcttcaatgtgtgaaaacccaattgttcaaccctacaggatccaacaggcaatcgcaacaggcatcttaccattatcacccttgttcctccaacaaccgtcagccctattacagcagttacctttggtccatttggtggcacaaaacatcagggcacaacaactacaacaacttgtgctagcaaaccttgctgcatactctcagcaacatcagtttctttcatttaaccaactggc

SEQ ID NO: 1361 - DNA, 443 bp, Zea mays
  Clone ID: LIB3061-043-Q1-K1-F4
gcagttgcttgcatccaacccacttgctctggcaaacatagttgcataccaacaacagcgaacaattgcaacagtggctaccagcgctcagtcaactagccatggtgaaccctgccgcctacctacaacagcaacaactgatttcatctagccctctcgctgtggttaatgcacctacatacctgcaacaacagttgctgcaacagattgtaccagctctgactcagctagctgtggcaaaccctgctgcctacttgcaacagctgcttccattcaaccaactgactgtgtcgaactctgctgcgtacctacaacagcgacaacagttacttaatccactagcggtggctaacccattggtcgctgccttcctacagcagcaacaattgctgccatacaaccagttctctttgatgaaccctgccttgttgtggcagcaaccc

SEQ ID NO: 1362 - DNA, 222 bp, Zea mays
  Clone ID: LIB3061-043-Q1-K1-F5
gcaacatagaaagcacaatagtgtaccaacaatggcagccaaaatattttgcctgctgatgctccttggtctttgtgcaagtgctgctacggcgaccattttcccacaatgctcacaagctcctatagcttcccttcttcccccgtacctctcaccagcggtgtcttcggtatgtgaaaacccaattcttcaaccctataggatccaacaggcaatcgcagc

SEQ ID NO: 1363 - DNA, 441 bp, Zea mays
  Clone ID: LIB3061-043-Q1-K1-F6
aacaattccagggtcatgacaagcagcaacaaccacaacagcctcagcaatatcagcggggccaggaaaaatcacaacagcaacaatgtcattgccaggagcagcaacagactacaaggtgcagctataactactatagcagtagctcaaatctaaaaaattgtcatgaattcctaaggcagcagtgcagccctttggtaatgccttttctccaatcacgtttgatacaaccaagtagctgccaggtattgcagcaacaatgttgtcatgatcttaggcagattgagccacaatacattcaccaagcaatctacaacatggttcaatccataatccaggaggagcaacaacaacaaccatgtgagttatgtggatctcaacaagctactcaaagtgcggtggcaatcttgacagcagcacaatacctaccatcaatgtgcg

SEQ ID NO: 1364 - DNA, 442 bp, Zea mays
  Clone ID: LIB3061-043-Q1-K1-F7
gttctagatcgcgagcggtcgccctttttttttttttttttttttttttttttgggaggaaaagtgccatagcataatccaaaacttgacagtacagaacagcatccaggacaaaacagaacccaaaatcgactccggcagttcttagctataatatagataccgcatttagacaagcacccgacgagtagagctctccactcaaaccatcctaagcctttactgtctcagttggggcctcgagcacaaggcccttggtgggctttgccagcaggtcggtgtactgctggaacggggccatggagaacttggtctggctccagaattcaggagtgaggaagccgtaggtcttcatcaggcagtcgaaggttgccttgacgaagttgccaagggtcttagtggagccacgggacgaggtgaagacatcctcaatgccagcgaa

SEQ ID NO: 1365 - DNA, 440 bp, Zea mays
  Clone ID: LIB3061-043-Q1-K1-F8
cactagcaacatagaaagcacaatagtgtaccaacaatggcagccaaaatattgggcttccttatgctccttggtctttctgcaagtgctgctaccgcaaccattttcccacaatgctcacaagctcctatagcttcctttcttcccccatacctctcaccagcggtgtcttcagtatgtgaaaacccaattcttcaaccctacaggatccaacaggcaatcgcagcaggcatcttacctttatcacccttgttcctccaacaaccgtcagccctattacagcagttacctttggtgcatttgttggcacaaaacatcaaggcacaacaactacaacaacttgtgctaggaaaccttgctgcctactctcagcaacagcagtttcttccattcaaccaactggctgcattgaactctgctgcttatttgcaacaacaact

SEQ ID NO: 1366 - DNA, 232 bp, Zea mays
  Clone ID: LIB3061-043-Q1-K1-F9
caactacaacaactcgtgctagcaaaccttgctgcctactctcagcaacagcagttaccgttagggcatttgttggcacagaacatcatggcacaacaactacaacaactcgtgctagcaaaccttgctgcctactctcagcaacaacagtttctgccattcaaccaactagctgcattgaactctgctgcttatttgcagcaacaacaactactaccattcagccagctag

SEQ ID NO: 1367 - DNA, 446 bp, Zea mays
  Clone ID: LIB3061-043-Q1-K1-G1
cgcaagtcctaagagaagtgcgcgggaggggtttgctgaacgcagtggatctaaacaacgacgcgctatctccgtgcttctgcatatgacatgtgcatcaagttgaaggagagaggcattttagcgaaacccacacatgacactataatccgacttgctcctcccctcacaatcagtcctgaggagcttgcagaagcatccaaggcgcttagtgacgtgctggaacatgacttgccacagctgcagctgcagaagcagataaaaaagccagaatctgaggcagagaagccagtctgtgacagatgcggccgggacttgtacggatgaatgaagcctccgaacagagataacttcattttcgtacgcacccatctcgccccagaagaaataataacagagcagaggatgccagctgcctagctacttgggttacggtaatgttatgc

SEQ ID NO: 1368 - DNA, 456 bp, Zea mays
  Clone ID: LIB3061-043-Q1-K1-G10
gcaacatagaaagtggaatccagtagcaacaatagagcaacaatggcgaccaagatacggtcccggcttatgctccttgctctttctgcatgtgttgctaacgcgacaattttccctcaatactcacaagctcctatagcttcccttcttcccccataccttccatcaatgatagcttcagtatgtgaaaacccagctcttcaaccctataggctccaacaagcaatcgcagcaagcaacatacctttatcacccttggttcaacaatcgccagccctatctttggtgcagtcattggtacaaaccatcaaggcacagcagctgcagcaactcgtgctacctgtgatcaaccaagtagctctggcaaacctttcttcctactatcagcaacaaccaattctttcatgcaaccaactatctacactgaacccctgctgcttatttgcagcaacaact

SEQ ID NO: 1369 - DNA, 332 bp, Zea mays
  Clone ID: LIB3061-043-Q1-K1-G11
ctcagagtgggttggcttctcctcccccaccggttcgtgttcaggttctggttcgtgggcgagagggaagagatggcggcgtcagacgttgagtaccgttgcttcgttggcggcctctcctgggccaccgacgaccactccctcaacaacgccttcagcacctacggcgaggtcctcgagtcgaagatcatcctggatcgggagacgcagaggtcccgcggcttcggcttcgtcaccttctacacggaggacgcgatgcgcaacgccattcgaggcatgaacggcaaggaactcgacggccgcaacatcaccgttaacgaggcccactcccg

SEQ ID NO: 1370 - DNA, 442 bp, Zea mays
  Clone ID: LIB3061-043-Q1-K1-G2
attgagaccaactagcaacatagaaagcacaatagtgtaccaacaatggcagccaaaggattttgcttccttatgctccttggtctttctgcaagtgttgctaccgcaaccattttcccacaatgctcacaagctcctatagcttcccttcttcccccatacctctcaccagcggtgtcttcaatgtgtgaaaccccaattgttcaaccctacaggatccaacaggcaatcgcaacaggcatcttaccattatcacccttgttcctccaacaaccgtcagccctattacagcagttacctttggtccatttggtggcacaaaacatcagggcacaacaactacaacaacttgtgctagcaaaccttgctgcatactctcagcaacatcagtttcttccattcaaccaactggctgcattgaactctgctgcttatttgcaac

SEQ ID NO: 1371 - DNA, 437 bp, Zea mays
  Clone ID: LIB3061-043-Q1-K1-G3
gctctcgcccccataaataaagcagctcctccgggggcggcgaactactcctcgtcggcagaaccctagccctgcttcgttgccatggcgagcagcgctagccaggcgagcctcctgctccagaagcagctcaaggatcttgcgaagaaccccgtggatgggttctccgccgggcttgtagacgacagcaacatcttcgagtggcaggtcaccatcatcggaccgcctgacaccctatatgatggaggctacttcaatgcaataatgaccttcccccagaactatcccaacagcccgccatcagtaagatttacttctgagatgtggcatccgaatgtttatcctgatggacgtgtttgcatttctattcttcatccacctggtgaagatcccaatggttatgagcttgcaagcgaacgatggacaccagtgcacac

SEQ ID NO: 1372 - DNA, 350 bp, Zea mays
  Clone ID: LIB3061-043-Q1-K1-G4
cttccgtttaaccaattggccgcactgaaccccgctgcttatttgcagcagcaaatactactaccatttagccggctagctgcagcaaaccgtgcttccttcttgacacagcaacagttgctgcctttctaccagcagtttgcggctaaccccgcaaccctcttacaactacaacaattgttgccctttgtccaacttgctttgaagaccgagcggcctcctaccaacaacacatcattggtggtgccctcttttagattgcttattagttgtaattcaataataaagttttttggatgatgtatgtggccaaccagaaataagaagttacatttccagattttaatgtg

SEQ ID NO: 1373 - DNA, 404 bp, Zea mays
  Clone ID: LIB3061-043-Q1-K1-G5
tctgctgcttatttgcaacaacaattaccattcagccagctagttgctgcctacgccgagcaatttcttccatgcggccaactagcagcattgaactctgctgcttatttacagcagcaacaactactaccattcagccagctagctgatgtgagccctgctgccttcttgacacaacaacagttgttgccgttctacctgcacgctatgcctaacgctggcaccctcttacaactgcaacaattgctgccattcaaccaacttgctttgacaaacccaacagtgttctaccaacaacccatcattggtggtgccctcttttagattgcttatgagttatagctcaataatgaagttttttggatgatgtttgtggcgtcccagaaataagaaagtacatttct

SEQ ID NO: 1374 - DNA, 442 bp, Zea mays
  unsure (1)..(442): unsure at all n locations; Clone ID: LIB3061-043-Q1-K1-G6
attgggttctcgtttccgggatgccaagaggagacccagcagcagcagtatggatacggatatggatatggacacgcatcaccatcagcatgaccaccacaagatccaccgattcgagcagggcgacgtggtggccatgccggccggcgcccagcactggctgtacaacgacggcgacgcgccgcttgtggcggtctacgtcttcgacgagaacaacaacatcaaccagctcgagccgtccatgaggaaattcttgctggctgggggcttcagcaaggggcagccccacttcgccgagaacatcttcaaagggatcgacgcccggttcctgagcgaagccctgngcgtcagcatgcacgtcgccgagaagctgcagagccggcgtgaccagcgaggcgagatcgtccgcgtggagccggagcacggctttcaccagctgaat

SEQ ID NO: 1375 - DNA, 348 bp, Zea mays
  Clone ID: LIB3061-043-Q1-K1-G7
ttcccttctcttttcaccaattcctttatatacccaacataatcattatcaatacgaatatttaaaaactcaccatccccatcaacattaccaccacaatatccaccaacttctatcatattcaaccttaattaccatacacatcctactcccatcactcatctttacaactacctcatacactcacacttaacatctttctacttcttctaccataacatcaacatcaaccacctctatccttccatcactaaattctttctatctctactcttcatcaaacctcatccccacttctcccataacatctacaaacttatccacaccctcatccttatccaaatcctt

SEQ ID NO: 1376 - DNA, 370 bp, Zea mays
  Clone ID: LIB3061-043-Q1-K1-F3
gcggcggctgcggctgccagccaccgtcgccggttcatctaccgccgccggtgcatgggcgacctccggttcacgggcgacctccggtgcatctcccaccgccggtccacctgccgccgccggtccacctgccaccgccggtccatgtgccgccgccggttcatctgccgccgccaccatgccactaccctactcaaccgccccggcctgagtcttatccagagccacacatatgcccgtgccaacagccgtatccaagcccgtgccatctgcaggaaacctgcggcgttggcagcaccccgatcctgcgccagtgcgtcgagtttctgaggcatcagtgcaccccgacggcgacgccctactgctcgcc

SEQ ID NO: 1377 - DNA, 391 bp, Zea mays
  Clone ID: LIB3061-043-Q1-K1-E1
aaggcatacaaagcgcaatacagtgactacaattgcagccaaaatatattacctacttgagcgccttaatctatgagcgagtgctacttaccgcgactatattccatcaatgctcacaaggtcatatagattcactagtttacccgtacatcatcaccaacgagtgtctgcagtatgtaataacacaaatcttcaaacctatataatctaacagacacactcagctatgatatcacatctatcacacttattcttccaacaatgacaacccctataacaccacatacatcagctgcatatatagtgacacaacatttgggaccactaattacaacaacttgtgctacaaaaccttgctgaatactctcagatacaccagcgtcttccatac

SEQ ID NO: 1378 - DNA, 446 bp, Zea mays
  Clone ID: LIB3061-043-Q1-K1-E10
ggaatccagtagcaacaacagagcaacaatggcgaccaagatattttccctccttatgcgccttgctctttctgcatgtgttgctaacgcgacaattttccctcaatgctcacaagctcctatagcttcccttcttcccccataccttccatcaatgatagcttcagtatgtgaaaacccagctcttcagccctataggctccaacaagcaatcgcagcaagcaacatacctttatcacccttgttgtttcaacaatcgccagccctatctttggtgcagtcattggtacaaaccatcaaggcacagcagctgcagcaactcgtgctacctgtgatcaaccaagtagctctggcaaacctttctccctactctcagcaacaacaatttcttccattcaaccaactgtctacactgaaccctgctgcttatttgcagcaacaactat

SEQ ID NO: 1379 - DNA, 353 bp, Zea mays
  Clone ID: LIB3061-043-Q1-K1-E11
tgagcattcagaaacacaccaagcgaagcgcactagcaacgacctaacaacaatggctagcaagggattagccctccttgcgcttcttgccctttttgtgagcgcaacaaatgcgttcattattccacaatgctcacttgctcctagtgccattattccacagttcctcccaccagttacttcaatgggcttcgaacacctagctgtgcaagccaacatgcaacaacaagcgcttgcggcgagcgttttacaacaaccaattgcccaattgcacaacaatccttgccacatctaacaatacaagccatcacaacgcaacagcaacaacaggtcctaccagcacttgaccacct

SEQ ID NO: 1380 - DNA, 422 bp, Zea mays
  Clone ID: LIB3061-043-Q1-K1-E12
caacaatttcttccattcaaccaactgtctacactgaaccctgctgcttatttgcagcagcaacgattaccatttagccagctagctactgcctactctcagcaacaacaacttcttccatttaaccaattggccgcactgaaccccgctgcttatttgcagcagcaaatactactgccatttagcgagctagctgcagcaagtcgtgcttccttcttgacacagcaacagttgctgcctttctacaagcagtttggggctaaccccgcaacccttttacaactacaacaattggtgccctttgtccaacttgctttgacaaacccagcagccttctaccaacaacacatcattggtggtgccctcttttagattgattattagttgtaattcaataataaagttttttggatgatgtatgt

SEQ ID NO: 1381 - DNA, 446 bp, Zea mays
  Clone ID: LIB3061-043-Q1-K1-E2
atttagaccaactagcaacatagaaagcacaatagtgtaccaacaatggcagccaaagtattttgcctccttatgctccttggtatttctgcaagtgctgctacggcgaccattttcccgcaatgctcacaagctcctatagcttcccttcttcccccgtacctctcaccagcggtgtcttcggtatgtgaaaacccaattcttcaaccctacaggatccaacaggcaatcgcagctggcatcttacctttatcacccttgttcctccaacaatcatcagccctattacagcagttacctttggtgcatttattggcacaaaacatcagggcacaacaactacaacaacttgtgctagcaaaccttgctgcctactctcagcaacagcagtttcttccattcaaccaactagctgcattgaactctgcttcttatttgcaacaacc

SEQ ID NO: 1382 - DNA, 215 bp, Zea mays
  unsure (1)..(215): unsure at all n locations; Clone ID: LIB3061-043-Q1-K1-E3
attcccaactcgacgcactcatccaatttanaccaactatcaacatataaaattcattactacaccaacactcacaaccaacataggctttctcaaatatggtcggtcttactactctaactactactacattgaccattttaacccactacttacattcatctataactcccacttttcacatctacctctacacaatcacacacttacctatt

SEQ ID NO: 1383 - DNA, 444 bp, Zea mays
  Clone ID: LIB3061-043-Q1-K1-E4
cggacgcgtgggcttcgggaggcaagtgcgatttcgatctcgcagccaccttttttgtgttctgttgtgtatctagtagttggaggagatatgcagtttgcacttgcattggacacgaactcaggtcctcaccagataagatcttgtgagggtgatgggattgacaggttggaaaaattaagtattgggggcagaaagcaggagaaagctttgagaaataggtgctttggtggtagagttgctgcaactacacaatgtattcttacctcagatgcttgtcctgaaactcttcattctcaaacacagtcctctaggaaaaattatgctgatgcaaaccgtgtatctgctatcattttgggcggaggcactggatctcagctctttcctctgacaagcacaagagctacgcctgctgtacctgttggaggatgttacaggcttatt

SEQ ID NO: 1384 - DNA, 443 bp, Zea mays
  unsure (1)..(443): unsure at all n locations; Clone ID: LIB3061-043-Q1-K1-E5
cggacgcgtggggcaacatagaaagtggaatacagtagcaaaaatagagcaacagtggcggccaagatattgtccatccttatgctccttgctctttctgcatgtgttgctaacgcgaccatttttcctcaatactcacaagctcctatagctgcccttcttcccccataccttccatcaatgaccgctttagtatgtgaaaacccagcccttcaaccctacaggatccagcaagcaatcgcaacaagcaacttacctttatcacacctgttctttcaacaatcgccagccctatctttggtgcagtcattggtacaaaccatcagggcagaacagttgcagcaactcgtgctaccagtgatcagccaagtagctctggcaaacctttccccctactctcagcaacaacaatntcttccattcaaccaactgtctatactgaa

SEQ ID NO: 1385 - DNA, 113 bp, Zea mays
  Clone ID: LIB3061-043-Q1-K1-E8
ggcgatgattgagtaataatgtgtcacgcatcaccatgggtggcagtgtcagtgtgagcaatgacctgaatgaacaattgaaatgaaaagaaaaaaagtactccatctgttcc

SEQ ID NO: 1386 - DNA, 445 bp, Zea mays
  Clone ID: LIB3061-043-Q1-K1-E9
gcagtttcttccattcaaccaactggctgcattgaactctgctgcttatttgcaacaacggctacgattcagtcagctagctgctgcctacccccagcaatttcttccattcaaccaactggcagcattgaactctgctgcttatttacaacagcaacagctaccaccattcagccagctagctgatgtgagccctgttgccttcttgacacaacaacagttgttgccgttctacctgcacgctgcgcctaacgctgggaccctcttacaactgcaacaattggctgcattcaaccaacttggtttgacaaacccaaccagggtctaaccacaacccatcattggtggtgccctcttttagattggttatgagttatacttcaataatgaattttttggaatgatgttggggctttccagaaataagaaagtacatttcttaaaa

SEQ ID NO: 1387 - DNA, 409 bp, Zea mays
  Clone ID: LIB3061-043-Q1-K1-F10
gaattcccaggcaggcaggtcggcgaggagggcaggaagaccgaagaccgagccgtgcgggggcgcgggacgggaacgggacaggaccccaaaatctcagatccttcctgcccgcccgcccgtgcccgtcgacgcgtcgttcttgccggccgcgcctcacctccgccctctcctcctccagggggatcggatacgccacaggctgcgcgatggtgctgtgggtcttcggctacggctccctcatctggaaccccggcttcgacttcgacgacaaaatcctcggcttcatcaagggctacaagcgcacctttaatctcgcttgcattgaccacagaggcacaccggagcattcggcgaggacctgcacgcttgaaaccgacgacgaggccatatgctggggaattgcata

SEQ ID NO: 1388 - DNA, 308 bp, Zea mays
  Clone ID: LIB3061-043-Q1-K1-F11
gagaaaagcagagggggccagatgaggagggacctcgcatcctccttcgctaccgccgcgtcctcgtcgtcggcagccgacgcgctccggggctggtgggatgacgtcaacgagtcgccccagtggcaggacgcggccttcttctccctcgccgccgactacgccctcgtctccgccgtcgcactgattcagctcgtcaggatccagcgccgggtgcccgagttcggatggaccacgcagaaggtctttcacctcatgaacttccttgtcaacggggtccgtgctctggtattcggcttccatgtcca

SEQ ID NO: 1389 - DNA, 453 bp, Zea mays
  Clone ID: LIB3061-043-Q1-K1-F12
attgagaccaacaagcaacatagaaagtggaatacagtagcaaaaatagagcaacaatggcggccgagatattttccatccttatgctccttgctctttctgcatgtgttgctaacgcgaccatttttcctcaatactcacaagctcctatagctgcccttcttcccccataccttccatcaatgaccgctttagtatgtgaaaacccagcccttcaaccctacaggatccagcaagcaatcgcaacaagcaacttacctttatcacacctgttctttcaacaatcgccagccctatctttggtgcagtcattggtacaaaccatcaaggcagaacaggtgcagcaactcgtgctaccagtgatcagcccagtagctctggcaaacctttccccctactcttaacaacaacaaatttcttgcatttcaccaactgtctatactgaaccctgct

SEQ ID NO: 1390 - DNA, 394 bp, Zea mays
  unsure (1)..(394): unsure at all n locations; Clone ID: LIB3061-043-Q1-K1-F2
aaacaagtagcgacagctcgacaaagatttgtgagagtgatccggcgctgagaagagggggctaagatcgccgcagccgccgcggcggcggcggcgctgtgcttcgcggccctggtggccgtggccgtctgccaaggcgaggtcgagcggcagaggctcagggacctgcagtgctggcaggaggtccaggagagcccgctcgacgcgtgccgccaggtcctcgaccggcagctaaccggcggcggcgtcggcggcccgttccggtggggcaccgggctccggatgcggtgctgccagcagcttcaggacgtgagccgcgagtgccgctgcgccgncatccggagcatggtcaggggctacgaggaggccatgccgnctctggagaaaggctggt

SEQ ID NO: 1391 - DNA, 251 bp, Zea mays
  Clone ID: LIB3061-043-Q1-K1-D9
cggccaggtcgcggggctgttggcggcgcagatagcgcagcaactgacggcgatgtgcggcctgcggcagccgactgcatgcccctacgctgctgccggcggtgtcccccactgaagaaactatgtgctgtagtatagccgctggctagctagctagttgagtcatttagcggcgatgattgagtaataatgtgtcacgcatcaccatgggtggcagtgtcagtgtgagcaatgacctgaatgaacaatgg

SEQ ID NO: 1392 - DNA, 385 bp, Zea mays
  Clone ID: LIB3061-025-Q1-K1-F9
agaccaactagcaacatagaaagcacattagtgtaccatcaatggcaaccaaaatatggggcgtccttatgctccttggtctttctgcaagtgctgctaccgcgaccattttcccgcaatgctcacaagctactatagcttcccttcttaccccatacctctcaccatcggtgtcttcagtatgtgaaaacccaattcttcaaccctacaggatccaacatgcaatcgcagcaggcatcttacctttatcacccttgttcctccaacaaccgtcagccctattacagcagttaccttcggtgcatttgtcggcacaaaacatcagggcacatcaactacaacaacttgtgctagcaaaccttgctgcctactctcagcaacagca

SEQ ID NO: 1393 - DNA, 441 bp, Zea mays
  Clone ID: LIB3061-025-Q1-K1-G1
acggaccaacaagcaacatagaaagtggaatacagtatcaaaaatagagcaacaatggcgggcgagagattttccatccttatgctccttgctctttctgcatgtgttgctaacgcgaccatttttcctcaatactcacaagctcctatagctgcccttcttcccccataccttccatcaatgaccgctttagtatgtgaaaacccagcccttcaaccctacaggatccagcaagcaatcgcaacaagcaacttacctttatcacacctgttctttcaacaatcgccagccctatctttggtgcagtcattggtacaaaccatcagggcagaacagttgcagcaactcgtgctaccagtgatcagccaagtagctctggcaaacctttccccctactctcagcaacaacaatttcttccattcaaccaactgtctatactg

SEQ ID NO: 1394 - DNA, 295 bp, Zea mays
  Clone ID: LIB3061-025-Q1-K1-G11
gcccgacggcgactccctactgctcgcctctatgccagtcgttgcggcagcagtgtggccagcagctcaggcaggtggagccgcatcaccggtaccaggcgatcttcggcttggtcctacagtccatcctgcatcatcagccgcatagcggccaggtcgcggggctgttggcggcgcatatagcgcatcatctgacggctatgtgcggcctgcatcatccgactccatgcccctacgctgctgccgccggtgtcccccactgaaaaaactatgtgctgtagtatagccgctggct

SEQ ID NO: 1395 - DNA, 408 bp, Zea mays
  unsure (1)..(408): unsure at all n locations; Clone ID: LIB3061-025-Q1-K1-G12
tcgcagcttccaatgagattgaaggaggtctcagcgaccattcttgcanatgttgtggcagcnggtgcacgttntgagtccattccacttgatcataataggcagaccttggtgtctgaagacattgtacacaatctgcttcatctcataagcaacactggacctgcaattgagtgtaagttgctccaggttttcgttggtctaactgactcttcgacatctgtacaaaatatagttgatgctatcaaaagttcaggtgctattgtcagtttaattcagtttgttgaagcacctcaaagggaagtacgcatgaattccatcaagctcttgaataacatatcaccttatatgggtcaagaacttgctgatgcttttcgtggaaacttcagtcaactaagcagcttggtc

SEQ ID NO: 1396 - DNA, 308 bp, Zea mays
  Clone ID: LIB3061-025-Q1-K1-G2
acggtaccatcaatcatcattcatcttagtagtataggcaccaaatcaaatctgcaacatcagttatgtaacttcaaaaaccatgaagctggtgcttgtggttctagctatcatagctttaatgttaagtgatgcttggacacacacagtcggcttcatcatgatgcaccatcatgaccatgcacagcagtatcaatcacctaacatgtgacacattaataactaccatggctatcacaactgcaattctacctgtagcaccatacgcaatatgaggactatatgcattcacatacacattagcttca

SEQ ID NO: 1397 - DNA, 386 bp, Zea mays
  Clone ID: LIB3061-025-Q1-K1-G5
gttcgccgtgcgggccgacctgtgcgccaccgtgggaacgttcaaggcgatcggggccggtagctgcgacgtgccggcgccgcagcagcggctgatctacaagggccggatcttgaaggacgagcaaaccctagccagctacggtgtggagacagaccatacaatccacatggtacgtggtgctgcgccaccaccagcatccactgcacctgcagccaaccaagaacctaccactgctgctcctgccagttccccagcagcaggattgggtggcttgttgcaaaatctgggtgctacaggggctgctgctaacagtgggggtttgggtttgcttggatctgggctccctgaattagaccacatgcaacaacagctagctgaaaatc

SEQ ID NO: 1398 - DNA, 433 bp, Zea mays
  Clone ID: LIB3061-025-Q1-K1-G6
cccacgcgtccggcaacatagaaagcacaatagtgtaccaacaatggcagccagagataggttgcctccttatgctccttggtctttctgcaagtgctgctacggcgaccattttcccgcaatgctcgcaagctcctatagcttcccttcttcccccgtacctctcaccagcggtgtcttcggtatgtgaaaacccaattcttcaaccctacaggatccaacaggcaatcacagctggcatcttacctttatcacccttgttcctccaacaatcatcagccctattacatcagttacctttggtgcatttattggcacaaaacatcagggcacaacaactacaacaacttgtgctagcaaaccttgctgcctactctcagcaacagcagtttcttccattcaaccaactagctgcattgaactctgcttctta

SEQ ID NO: 1399 - DNA, 436 bp, Zea mays
  Clone ID: LIB3061-025-Q1-K1-G8
atatcttggtagccattggtgttagccctccttgcgcttcttgcccttttagtgagcggggcaaatgcgttcattattccacagtgctcacttgctcctagtgccagtattccacagttcctcccaccagttacttcaatgggcttcgaacatccagccgtgcaagcctacaggctacaactagcgcttgcggcgagcgccttacaacaaccaattgcccaattgcaacaacaatccttggcacatctaaccctacaaaccattgcaacgcaacaacaacaacaacagtttctgccatcactgagccacctagccgtggtgaaccctgtcacctacttgcaacagcagctgcttgcatccaacccacttgctctggcgaacgtagctgcataccagcaacaacaacagctgcaacagtttatgccagtgctcagtc

SEQ ID NO: 1400 - DNA, 372 bp, Zea mays
  Clone ID: LIB3061-025-Q1-K1-G9
gcgactctgttttcaagaagacaggataagggagctgtagtgagtctttaagcaatggcgagtgcacaggcagcggagcaaggagaacgaggccacttcgttctgaacagcggacacaccattccgggcgttggtctaggcacttggagggccggctcagataccgctcactctgttcggaccgccatcgccgaagctggatataggcacgtggacacagctgcccaatacggagtagagaaagagatcggtagaggacttaaagctgcgatggaaggcgggatcaacaggaaagatcagtcagtgacgtcgaagctatggtgcaccgagctggctcctgatagggctcggtcagcactcgagataacactc

SEQ ID NO: 1401 - DNA, 378 bp, Zea mays
  Clone ID: LIB3061-025-Q1-K1-H1
acgattcagccagctacctgctgcctacccatagcaatttcttccattcaaccaactagcaggattgggctctcctgcttatttacagcatcaacaactactaccattcagccagctagctggtgtgagccctgctaccttcttgacacaaccacagttgttgccgttctaccagcacgttgcgcctaacgctggcaccctcttacaactgcaacaattgctgccattcaaccaacttgctttgacaaacccagcagtgttctaccaacaacccatcattggtggtgccctcttttagatttcttatgagttatagttcaataatcaagtgctttatctgatgtttgtggcttcccagaaataagaaagtacatttct

SEQ ID NO: 1402 - DNA, 358 bp, Zea mays
  Clone ID: LIB3061-025-Q1-K1-H11
cgcaaacaaccaccaaagcaatcgaaaagcaaccctgcaagtgcaggcaaagagagggcgcgaccaaacagatccaatccaatggcgatggcaccgtccgcagcatgcgtcgtctcgttccccgcccgcccggcggcgtccacggccgggccccgcgccgccgcgggcgccggggcggtccacgctttcgcggggtcggcggagggcgccaagtggtgggcgccgctgctggggtggtcggggaaggccgactacctggaggccccggccccggcgccggcgggggcgcatgacgaggcgccgcggaggcagttcgtgggggtgatgacggaggagaaggcccgggagctgcgggcgc

SEQ ID NO: 1403 - DNA, 151 bp, Zea mays
  Clone ID: LIB3061-025-Q1-K1-H12
acgcgagtgtcagtgtgagcaatgaccctgccacctatggtgatgcgtgacacattattgctcaatcatcgccatgggtggcagtgtcagtgtgagcaatgacctgaatgaacaattgaaatgaaaagaaaaaaagtactccatctgttcc

SEQ ID NO: 1404 - DNA, 430 bp, Zea mays
  Clone ID: LIB3061-025-Q1-K1-H2
cccacgcgtccgcaggcaggcaggtcggcgaggagggcaggaagaccgaagaccgagccgtgcgggggctcgggacgggaacgggacaggaccccaaaatctcagatccttcctgcccgcccgcccgtgcccgtcgacgcgtcgttcttgccggccgcgcctcacctccgccctctcctcctccagggggatcggatacgccacaggctgcgcgatggtgctgtgggtcttcggctacggctccctcatctggaaccccggcttcgacttcgacgacaaaatcctcggcttcatcaagggctacaagcgcacctttaatctcgcttgcattgaccacagaggcacaccggagcatccggcgaggacctgcacgcttgaaaccgacgacgaggccatatgctggggaattgcatattgtgtcaagggtggt

SEQ ID NO: 1405 - DNA, 380 bp, Zea mays
  Clone ID: LIB3061-025-Q1-K1-F8
gaggaggacaggggggctactactacccctgcagccgggcaggagagggataccaaacgcagatgtatccaccgtgtcgtcccggcaccaccgggccaaggatcggccgcgtgaggcttacgaaggcccgggagtacgccgcggggttgccgatgatgtgccggctgtcggagccacaggagtgcagcatcttctccggcggcgaccagtactagctaccatggttaaaaaaaatgcgagtcggcgcgaggtgcaagacgcagcatgtgtactgtgcgcgtgcaagtccagaatggcgtagttctgacgtgggctcgcattgtcgcgtgttacaataatgataataactatgcggaataaatatgggaatgttgccagat

SEQ ID NO: 1406 - DNA, 439 bp, Zea mays
  Clone ID: LIB3061-025-Q1-K1-E4
acgctttctggcataccagaaaccagcagggtcatgtatagatgcaaatgcacttgttaaacgctacgggatccaacaaacgatcgcaacaagcatcttaccattatcacccttgttcctccaacaaccgtcagccctattacagcagttacctttggtccatttggtggcacaaaacatcagggcacaacaactacaacaacttgtgctagcaaaccttgctgcatactctcagcaacatcagtttcttccattcaaccaactggctgcattgaactctgctgcttatttgcaacaacaattaccattcagccagctagttgctgcctacccccagcaatttcttccattcaaccaactagcagcattgaactctgctgcttatttacagcagcaacaactactaccattcagccagctagctgatgtgagccctgct

SEQ ID NO: 1407 - DNA, 301 bp, Zea mays
  Clone ID: LIB3061-025-Q1-K1-E5
acgattgagaccaacaagcaccatataaagtgtaatccagtagcaacattacagcagcaatggcgaccaagatacttttccttcttatgctccttgctctttctgcatgtgttgctaacgcgacaattttacctcaatgctcacaagcttctatagcttcccttcttcccccataccttgcatcaatgatagctctagtatgagaaaacccagctattcaaccctatacgcttcaacatgcaatcgtattacgcaacatacctttatgacccttggtgtaacaattgctaggcatatctta

SEQ ID NO: 1408 - DNA, 293 bp, Zea mays
  Clone ID: LIB3061-025-Q1-K1-E7
ttgccattttacccacaagttgtgggaaacattaatgccttcttgcaacagcagcaatggctaccattctacccacagaatgtggcaaacattgttgccttcttacaacaacaacaattgctaccatttagccaacatgctttgacgaatcctaccaccttattgcaaccgaccaccattggtggtgccatcttctagattttttatgattaatactgtaataataaagtcctcatgctgatatgtgcgacctctcagtaataaagtattagagatctatattctaaattcaa

SEQ ID NO: 1409 - DNA, 431 bp, Zea mays
  Clone ID: LIB3061-025-Q1-K1-E8
cccatacctctcaccagcggtgtcttcaatgtgtgaaaccccaattgttcaaccctacgggatccaacaggcaatcgcaacaggcatcttaccattatcacccttgttcctccaacaaccgtcagccctattacagcagttacctttggtccatttggtggcacaaaacatcagggcacaacaactacaacaacttgtgctagcaaaccttgctgcatactctcagcaacatcagtttcttccattcaaccaactggctgcattgaactctgctgcttatttgcaacaacaattaccattcagccagctagttgctgcctacccccagcaatttcttccattcaaccaactagcagcattgaactctgctgcttatttacagcagcaacaactactaccattcagccagctagctgatgtgacccctgctg

SEQ ID NO: 1410 - DNA, 412 bp, Zea mays
  Clone ID: LIB3061-025-Q1-K1-E9
gcagccgcatccacaacctgcctctctcgtcccctggcggcgtccgcggcaggatggcggaatctacggcgaggacggtgaaggatgtcaacccgcacgagttcgtcaaggcctactccgcccacctcaagcgctccggcaagatggagctccctgagtgggttgacattgtgaagactgcgaggttcaaggagcttcctccttatgatcctgactggtactacatcagggctgcatccattgcaaggaagatctacctaaggcaaggcatcggtgtgggtggctttcagaagatctacggtggccgccagaggaatggctcccgcccaccacacttctgcaagagcagtggtgctgttgcacgcaacatcctgcagcagctgcagattatgggcatcatcgatgtcgatcc

SEQ ID NO: 1411 - DNA, 440 bp, Zea mays
  Clone ID: LIB3061-025-Q1-K1-F1
cagaaacacaccaagcgaagcgcactagcaacgacctaacaacaatggctaccaagatgtgagccgtccttgcgcttcttgccctttttgtgagcgcaacaaatgcgttcattattccacaatgctcacttgctcctagtgccattattccacagttcctcccaccagttacttcaatgggcttcgaacacctagctgtgcaagccaacatgcaacaacaagcgcttgcggcgagcgtcttacaacaaccaattgcccaattgcaacaacaatccttgccacatctaacaatacaagccatcacaacgcaacagcaacaacagttcctaccagcactgagccacctagccatggtgaaccctgccgcctacttgcaagagcagctgcttgcattcaacccacttgctctggcgaacgtagtttgcaaccagcaacaacaa

SEQ ID NO: 1412 - DNA, 396 bp, Zea mays
  Clone ID: LIB3061-025-Q1-K1-F10
gaaactatgtgctgtatattagccgctggctatcctagctagttgagtcatttaccgggaatgattgagtaataatgtggtcacgcatcaccatgggtggcaacgtcagtgtgagcaatgacctgaatgaacaattgacatgaacagataaaaagtactacatctgttccaaattaaaattggttttaaccttttaataggtttatactatagaacaataccttggcttggaacacaccgatacaacatcgaaaaggtcttacacagacaatcagaatcggcacacctatgagaagcccgtgaaaatttataattgagaaaacttaaagtttcaatcgattgacggaggcctcgacaacaatatgcccaagatgatgaggcttaaaacagaaaaat

SEQ ID NO: 1413 - DNA, 406 bp, Zea mays
  Clone ID: LIB3061-025-Q1-K1-F11
cagaatttcggagatccttttttgatggttattcgtgaagttgagactgctgcacagggactggagcgcattcaaagaaaacttagagttccggatgaggacttctccaagtggaagcttgcattcatatccatgaaccggccagagtacctccaggacactgatgttgtatcatcacgttttcagaggagagatgtatatggtgcttgggaacaataccttggcttggagcacaccgatacaacatcgaaaaggtcttacacagccaatcagaatcggcacacctatgagaagcccgtgaaaatttataattgagaaaacttaaagtttcaatcgattgacggaggcctcgacaacagtatgcccaagatgatgaggcttagaacagatcaattggcagaagaat

SEQ ID NO: 1414 - DNA, 329 bp, Zea mays
  Clone ID: LIB3061-025-Q1-K1-F12
tgaagtgctgatcggggccgttgctctgctggcgctcgctgctagcgccgcctccagtacaagcggcggctgtggctgccagacaccaccgtttcatctaccgcctccgttctatatgccgccttcgttctatctgccgtcgcagcagcagccgcagccatggcaataccccactcaaccaccgcagctaagcccgtgccagcagttcggatcctgcggcgtaagcagcgtcggcagaccgttcctgggccagtgcgtccagttcctgaggcaccagtgcagcccggcggcgacgccctacggctcgccacagtgccaggcgcttgcac

SEQ ID NO: 1415 - DNA, 437 bp, Zea mays
  Clone ID: LIB3061-025-Q1-K1-F2
ccaacaagcaacatagaaagtggaatacagtagcatcaatagagcaacaatggcggccgggatagtttccatccttatgctccttgctctttctgcatgtgttgctaacgcgaccatttttcctcaatactcacaagctcctatagctgcccttcttaccccataccttccatcaatgaccgcttcagtttgtgaaaacccagcccttcaaccctacaggctccaacaagcaatcgcaacaagcaacttacctttatcacccctgttctttcaacaatcgccagccctatctttggtgcagtcattggtacaaaccatcagggcacaacagctgcaacaactcgtgctaccagtgatcagccaagtagctctggcaaaccttactgcctactctcagcatcaacaatttcttccattcaaccaactgtctacactga

SEQ ID NO: 1416 - DNA, 392 bp, Zea mays
  Clone ID: LIB3061-025-Q1-K1-F3
cggacgcgtgggtgtcagccaacgtcacacttatttattatctgctggtgatgacaaacgaggtggatgttgggatcttgaacaaaacaaggttattaggtcctaccatgggcatctgagtggtgtttactgcctagctctccatccaacaattgatatcttactgactggtggccgggattcagtttgcaatgtgtgggacatcagaacaaaagcacatgtttctgctttaacagggcatgacaacactgtctgttcagtgattgctcgtcctacggatcctgaagttgttactggttcacatgagacaactattaaatactgggatcttgtaactgggaggactatgtgtacccttactgatcataaaaagtctgtccgatctatggcgc

SEQ ID NO: 1417 - DNA, 438 bp, Zea mays
  Clone ID: LIB3061-025-Q1-K1-F4
caagcaacatagaaagtggaatccagtagcaacaatagagcaacaatggcgaccaagatgttttggctccttatgctccttgctctttctacatgtgttgctaacgcgacaattttccctcaatgctcacaagctcctatagcttcccttcttcccccataccttccatcaattatagcttcaatatgtgaaaacccagctcttcaaccatataggcttcaacaagcaatcgcagcaagcaacatacctttatcgcccttgttgtttcaacaatcgccagccctatctttggtgcagtcattggtacaaaccatcagggcacaacagctgcagcaactcgtgctacctctgatcaaccaagtagctctggcaaacctttctccctactctcagcaacaacaatttcttccattcaaccaactgtctacactgaaccct

SEQ ID NO: 1418 - DNA, 400 bp, Zea mays
  Clone ID: LIB3061-025-Q1-K1-F5
ggacgtcagcctagcaattagctcatcgactccagattggagaactcgacaccatgaaggtgctgatcgttgcccttgctctcctggcgctcgctgcgagcgccgcctccagtacaagcggcggctgtggctgccagacaccaccgtttcatctaccgcctccgttctatatgccgcctccgttctatctgccgccgcagcagcagccgcagccatggcaataccccactcaaccaccgcagctaagcccgtgccagcagttcggatcctgcggcgtcggcagcgtcggcagcccgttcctgggccagtgcgtcgagttcctgaggcaccagtgcagcccggcggcgacgccctacggctcgtcacagtgccaggcgctgcagcagcagtgctgccacca

SEQ ID NO: 1419 - DNA, 440 bp, Zea mays
  Clone ID: LIB3061-025-Q1-K1-F6
gacgccaacaagcgacatagaaagtggaatacattagcatcaatagagcaacaatggcagccaggatagtttccatccttatgctccttgctctttctgcatgtgttgctaacgcgaccatttttcctcaatactcacaagctcctatagctgcccttcttcctacataccttccatcaatgaccgcttcagtttgagaaaacccagcccttcaaccctacaggctccaacaagcaatcgcaacaagcaacttacctttatcacccctgttctttcaacaatcgccagccctatctttggtgcattcattggtacaaaccatcagggcacaacagctgcaacaactcgtgctaccagtgatcagccaagtagctctggcaaacctttctacttactctcagcaacaacaatttcttccattcaaccaactgtctacactg

SEQ ID NO: 1420 - DNA, 373 bp, Zea mays
  unsure (1)..(373): unsure at all n locations; Clone ID: LIB3061-025-Q1-K1-F7
gggtcttcagaccattagctttatctactccagagcgcagaagaacccgatcgacaccgtgagggtgttgctcgttgccctcgctctcctggctctcgctgcgagcgccacctccacgcatacaagcggcggctgcggctgccagccaccgccgccggttcatctaccgccgccggtgcatctgccacctccggttcacctgccacctccggtgcatctcccaccgccggtccacctgccgccgccggtccacctgccaccgccggtccatgtgccgccgccggttcatctgccgacgccaccatgccactaccctactcaaccgncccggcctcagcctcatccccagccacacccatgcccgtgccaacag

SEQ ID NO: 1421 - DNA, 238 bp, Zea mays
  Clone ID: LIB3061-025-Q1-K1-E2
acgaagcacaatactataccaacaatgtcgattcaaaatatttagcctccttatgctcctcgtgctgtgtgcaattgctgctatggctaccattttctcgctatgctcgcaagctcctataatacaaccttttcctccgtatctcacacaagcgctgcctttcatataccaaaacccatacatctaacacctccggttcacctaccacctcccatgcatctaccacacccggatcacc

SEQ ID NO: 1422 - DNA, 428 bp, Zea mays
  Clone ID: LIB3061-025-Q1-K1-C8
caggcaggcaggtcggcgaggagggcatgaagaccgaagaccgagccgtgcgggggctggggacgggaacgggacaggaccccaaaatctcagatccttcctgcccgcccgcccgtgcccgtcgacgcgtcgttcttgccggccgcgcctcacctccgccctctcctcctccagggggatcggatacgccacaggctgcgcgatggtgctgtgggtcttcggctacggctccctcatctggaaccccggcttcgacttcgacgacaaaatcctcggcttcatcaagggctacaagcgcacctttaatctcgcttgcattgaccacagaggcacaccggagcatccggcgaggacctgcacgcttgaaaccgacgacgaggccatatgctggggaattgcatattgtgtcaagggtggtccagaaaaag

SEQ ID NO: 1423 - DNA, 418 bp, Zea mays
  Clone ID: LIB3061-025-Q1-K1-D1
attgagaccagcaagcaacatagaaagtagaatccattagcaacaatagagcaacaatggcgacggagatattttccctccttatgctccttgctctttctacatgtgttgctaacgcgacaattttccctcaatgctcacaagctcctatagcttcccttcttcccccataccttccatcaattatagcttcagtatgtgaaaacccagctcttcaaccatataggcttcaacaagcaatcgcagcaagcaacatacctttatcgcccttgttgtttcaacaatcaccagccctatctttggtgcagtcattggtacaaaccatcagggcacaacagctgcagcaactcgtgctacctgtgatcaaccaagtagctctggcaaacctttctccctactctcagcaacaacaatttct

SEQ ID NO: 1424 - DNA, 420 bp, Zea mays
  Clone ID: LIB3061-025-Q1-K1-D10
agacgattgcatttaagtggaagtccaagttagataatcttgacattgatgctagcaatgggaactgtcttgaagctcatgcgtttcttcaactcctggcaacctttggtatttctgctgaattcaatgaagatgacttgtgcaaattgcttccatatgtcagtcgtcgtcgtcagacacctgaactttgtcgattgcttgggttgtcgcagaaaatgccaggtgtcattgaagttctggtggaaagtggaagacctattgatgcaattaattcggcttatgtgtttgagcttactgaacaatttgaaccagtacaccttcttaaagcatatctaagggatgttaagaaaatgtcacacgccaggaatgtcaaaacttctcctggagcacagaatgagatgaatgaacgtgagttatctg

SEQ ID NO: 1425 - DNA, 394 bp, Zea mays
  Clone ID: LIB3061-025-Q1-K1-D12
caactagcaacatagaaagcacaatagtgtaccaacaatggcagccaaaatattttagctccttatgctccttggtatttctgcaagtgctgctacggcgaccattttcccgcaatgctcacaagctcctatagcttcccttcttcccccgtacctctcaccagcggtgtcttcggtatgtgaaaacccaattcttcaaccctacaggatccaacaggcaatcgcagctggcatcttacctttatcacccttgttcctccaacaatcatcagccctattacagcagttacctttggtgcatttattggcacaaaacatcagggcacaacaactacaacaacttgtgctagcaaaccttgctgcctactctcagcaacagcagtttctttcattc

SEQ ID NO: 1426 - DNA, 437 bp, Zea mays
  Clone ID: LIB3061-025-Q1-K1-D2
gttgtggaccaggtcggggatcgcgctaccagctacgatgacttcacaaacagcctcggggagagtgactgccgatacgcgatctatgatttcgactttgttactgcagaggatgtccagaagagcaggatcttctatatcctatggtccccatcctccgccaaggtgaagagcaagatgctttacgcaagctcaaaccagaaattcaagagtggcctcaatggcattcaggttgaactccaggccacagatgcgagtgaaatcagcctcgatgagatcaaggatcgggcacgctaggcgcaccgccatcgcgagtttcatgatcacgcatcatggactcgcctactactgtggatttgtatgccattatagacttggtgctgcgaaagactgctttggtgatttgtgggtttgttgctgtgtaaaaagatcctcat

SEQ ID NO: 1427 - DNA, 53 bp, Zea mays
  Clone ID: LIB3061-025-Q1-K1-D3
gagattattgaagctgatcttgtccttttagctttggtattcttggctcctga

SEQ ID NO: 1428 - DNA, 435 bp, Zea mays
  Clone ID: LIB3061-025-Q1-K1-D4
acgcccacgcgtgcgcataaacacaccaagctaagcgcactagcaacgacctaacaacaatggctacggggatattagcccttcttgcgcttcttgccctttttgtgagcgcaacaaatgcgttcattattccacaatgcttacttgctcctagtgccattattccacagttcctcccaccatttacttcaatgggcttccaacacctagctgtgcaagccaacatgcaacaacaagcgcttgcggctagcgtcttacaacaaccaattgcccaattgcaacaacaatatttgccacatctaacaatacaatccattacaacgcaacagcagcaacagtttctaccagcactgagccacctagccatggtgaaccctgccgcctacttgcaagagcagctgcttgcatccaacccacttgctatggcgaacgtag

SEQ ID NO: 1429 - DNA, 443 bp, Zea mays
  Clone ID: LIB3061-025-Q1-K1-D5
acgattgagaccagcaagcaacatagaaagtttaagctattagcaacaatagagcaacaatggcgacgaagatattttccgtccttatgctccttgctctttctacatgtgttgctaacgcgacaattttccctcaatgctcacaagctcctatagcttcccttcttcccccataccttccatcaattatagcttcagtatgtgaaaacccagctcttcaaccatataggcttcaacaagcaatcgcagcaagcaacatacctttatcgcccttgttgtttcaacaatcaccagccctatctttggtgcagtcattggtacaaaccatcagggcacaacagctgcagcaactcgtgctacctgtgatcaaccaagtagctctggcaaacctttctccctactctcagcaacaacaatgtcttccattcaaccaactgtctaca

SEQ ID NO: 1430 - DNA, 389 bp, Zea mays
  Clone ID: LIB3061-025-Q1-K1-D6
gcgcttgctcctagtgccattattccacagttcctcgcactcagactacttcaacggggtgagagcgtccagccgtgcaagcctacaggctacaactagcgcttgcggcaagcgccttacaacaaccaattgcccaattgcaacaacaatccttggtacatctaaccctacaaaccattgcaacgcaacagcatcaacaacaacagtttctgccatcactgatccacctagccgtggacgaaccctgtcacctacttgcagcagtaactgcttgcatgcaacccacttgctctcgctaacgtcactgcataccagcgacaacagcagactgcatcatggaatgccagagctcagtcaactagccatggtgaaccatgccgtctacctac

SEQ ID NO: 1431 - DNA, 356 bp, Zea mays
  Clone ID: LIB3061-025-Q1-K1-D7
acggtagaccgtgcttccttcatgacacagctacagctgctgactacctaccagcagtttggggctaaacccgagcccgtcttgcaactacaacaattgttgccctcggaccaactggctttgacagacccaacggcctactagcaactacagataattggtggcgccctcttttagatggctcattagtgggaattcaacaatcaagcgtgctagatgacgtacgtagactagcgcatgtcagaagcgacttacaacaaccattaggtgaattgcaacaacaatgggtggcacatctagcggtacaaagcataggtacgcatccacgacagcgtctacctcttctgtcatgactg

SEQ ID NO: 1432 - DNA, 428 bp, Zea mays
  Clone ID: LIB3061-025-Q1-K1-D8
cagaccattagctttatctactccagagcgcagaagaacccgatcgacaccagggggggggtgctcgttgccctcgctctcctggctctcgctgcgagcgccacctccacgcatacaagcggcggctgcggctgccagccaccgccgccggttcatctaccgccgccggtgcatctgccacctccggttcacctgccacctccggtgcatctcccaccgccggtccacctgccgccgccggtccacctgccaccgccggtccatgtgccgccgccggttcatctgccgccgccaccatgccactaccctactcaaccgccccggcctcagcctcatccccagccacacccatgcccgtgccaacagccgcatccaagcccgtgccagctgcagggaacctgcggcgttggcagcaccccgatcctggg

SEQ ID NO: 1433 - DNA, 363 bp, Zea mays
  Clone ID: LIB3061-025-Q1-K1-D9
gaactcgacaccatgacagtgctgatcgttgcccttgctctgctggcgctcgctgcgagcgcgcgctgcagtacaagcggcggctgcggctgccagacaccaccgtttcatctaccggctccgttctatatgccgcctccgttctatctgccgccgcagcagcagccgcagccatggcaataccccactcaaccaccgcagctaagcccgtgccagcagttcggatcctgcagcgtcggcagtgtcggcagcccgttcctgggccagtgcgtcgagttcctgaagcaccagtgcagcccggcggcgacgccctacggttcgccacagtgccatgcgctgcatcagcagtgctgccaccagatc

SEQ ID NO: 1434 - DNA, 412 bp, Zea mays
  Clone ID: LIB3061-025-Q1-K1-E1
cccacgcgtgcgattcaaaaacacaccaagcgaagcgcactagcaacgacctaacaccggtggctaccaagatattagccctccttgcgcttcttgcccttttagtgagcgcaacaaatgcgttcattattccacagtgctcacttgctcctagtgccattattccacagttcctcccaccagttacttcaatgggcttcgaacatccagccgtgcaagcctacaggctacaactagcgcttgcggcgagcgccttacaacaaccaattgcccaattgcaacaacaatccttggcacatctaaccctacaaaccattgcaacgcaacaacaacaacaacaacagtttctgccatcactgagccacctagccgtggtgaaccctgtcacctacttgcaacagcagctgcttgc

SEQ ID NO: 1435 - DNA, 387 bp, Zea mays
  Clone ID: LIB3061-025-Q1-K1-E10
tcgcagaaacacaccaagcgaagcgcactatcaacaacctaacaacaatggctaccaagggattatccctccttgcgcttcttgcgctttttgcgagcgcaacaaatgcgtccattattccacaatgctcacttgctcctagttccattattccacagttcctcccaccagttacttcaatggccttcgaacacccagctgtgcaagcctataggctacaacaagcgattgcggcgagcgtcttacaacaaccaattgcccaattgcaacaacaatccttggcacatctaacaatacaaaccatcgcaacgcaacagcaacaacagttcctaccagcactgagccacctagccatggtgaaccctgtcgcctacttgcaacagcagc

SEQ ID NO: 1436 - DNA, 396 bp, Zea mays
  Clone ID: LIB3061-025-Q1-K1-E11
caaacatgcttttgggggatcgccacatattgtttgcaagaggggttcaatcgaagggcttaggttatgcttcgacaaagaattgaagcctcgtgattgccttaccacttctttggcgaatggaagtgtatcaaaaagcaagcactgcccgcggtacatcaccttgccaacatatgatccccttgtgcttgccaattcaactgtagagatcatgacacagttcgatgaatttgaggtgcctgcagctctttatacagcttaaaatgcaattattgcaatagcagaaggtgctcgcgtgagcacctagaaccaggcacatttatcctgggatattcaatcatttgtacatgtacacttgaaagagaactgacatcttttcaacctgaaaatttataa

SEQ ID NO: 1437 - DNA, 420 bp, Zea mays
  unsure (1)..(420): unsure at all n locations; Clone ID: LIB3061-025-Q1-K1-E12
aacaacagctgcaacagtttctgccagcgctcattcaactagccatggtgaaccctggcgngtacctacaacagcaacaactgctttcatctagcccgctcgctgtggccaatgcacctacatacctgcaacaacaattgttgcaacagattgtaccagctctgactcagctagttgtggcaaaccctgctgcctacttgcaacagctgcttccattcaaccaactgactatgtcgaactctgctgcgtacctacaacagcgacaacagttacttaatccactagcagtggctaacccattggtcgctgccttcctacagcagcaacaattgctgccatacaaccagttctctttgataaaccctgtcttgtcgaggcagcaacccatcgttggaggtgccatcttttagattacatatg

SEQ ID NO: 1438 - DNA, 385 bp, Zea mays
  Clone ID: LIB3061-025-Q1-K1-C7
ggatttattccttgggaacctgcaacatcaatgctaagtttgatgctaaacctattgagcttattgttacaacatatcaggctgcattgctactactgtttaatggatctgacaggcttagttattctgagattgtaacacaattaaacctgtcagatgatgatgtagtgcgtttgctccattctctttcttgtgcgaagtacaagatccttaacaaggaaccggctagtagatccatctctcccaatgatgtttttgagttcaattcaaagtttactgacagaatgagaagaatcaaggttccactccctcctgttgatgagaagaacaaggttgttgaagatgttgacaaagacaggaggtatgcaattgatgcatcaattgt

SEQ ID NO: 1439 - DNA, 430 bp, Zea mays
  Clone ID: LIB3061-043-Q1-K1-C6
ggcagttatggatgcttgacatttatttccgtgaagggcatatattatcaggctgaagttcaaggacaaaagatcacctggctaactccgcatgctcttcagcaagtattaactgatgatgttgatttcaatgtgatgctttcttttctagaattctatgagactcttctaggatttgtgaacttcaaaatctatcattcaataaatgtaaattatcctcctattctggatccacgtctggaagctttagctgttgagctctatgcattgtgccgatacatgtctgctggttccagaagaatgattgggaattcacaaactgacgaagtaatggaagataaggatgagaaaagtaaagctgatgaagtaattgaggaagagaaggttgtgaagaataaagcaagctcaaaagcagatgaatctgagttca

SEQ ID NO: 1440 - DNA, 435 bp, Zea mays
  Clone ID: LIB3061-043-Q1-K1-C7
caaatagcaacatagaaagcacaatagtgtaccaacaatgtctgtcatcatactggggttccttatgctccttgggctttctgcaagtgctgctaccgtaaccatttttccacaatgctcacaagctcctatagcttcctttcttatccccatacctctcaccaactgtgtcttcagtatgtgaaaacccaattcttcaaccctacatgatccaacatgcaatcgcagcaggcatcttacctttatcaccctcgttcctgcaacatccgtcagccctattacagcatttaccttcgatgcatatgttggcacaaaccatcaaggcacaacatctactacgacttgtgctaggaaaccttgcttcatactctcagcaacagcaggttctttcattcaaccaactcgctgcattgaactctgctgcttatttgcaac

SEQ ID NO: 1441 - DNA, 435 bp, Zea mays
  Clone ID: LIB3061-043-Q1-K1-C8
caaacacacaccgagcgaagcgcactatcaacgacctaacaccaatggctaccaagatgattatccctgcttgcgctgcttgccctgttactgagcgcatcacatgcgttcattattacacagcgctcacttgctcctagtgccattattccacagttcctcccaccagttacttcaatgggctacgaacatccagccacgcaagcctacaggctacaactagcgcttgcggcgagcgacttacatcaaccaattgcccaatagcaacaacaatacttgacacatctaaccctacaaaccattgcaacgcaacaacaacaacagcaccagttcctgtcatcgactgagccacctagccgtggagaaccatgtcagctacttgcaacagcagctgcttgcatccaatccacttgctctggcgaacgtagctggcta

SEQ ID NO: 1442 - DNA, 403 bp, Zea mays
  unsure (1)..(403): unsure at all n locations; Clone ID: LIB3061-043-Q1-K1-C9
gagcattcagaaacacacctagcgaagcgcactatcaacgacctaacaacaatggcttggaanagattatccctccgtgcgcttcttgccctttttgtgagtgcaacaaatgcgttcattattccacaatgctcacttgctccgagtgccattattccacagttcctccctccagttacttcaatgggcttcgaacacccagctgtgcaagcctataggctacaacaagcgcttgcggcgagcgttttataacaaccaattgcccaattaacacaacaatcctttgcacatctaaccatacaaaccatcgcaacgcaacaacaacaagcacttgaccacctaaccgatgtgaaccctatcgactacttgcatcaacagctgcttgcatacaacccacttgctt

SEQ ID NO: 1443 - DNA, 447 bp, Zea mays
  Clone ID: LIB3061-043-Q1-K1-D10
gcaacatagaaagcacaatagtgtaccaacaatggcagccaaaatattttgcttccttgtgctccttggtctttctgcaagtgctgctaccgcaaccattttcccacaatgctcacaagctcctatagcttcctttcttcccccatacctctcaccagcggtgtcttcagtatgtgaaaacccaattcttcaaccctacaggatccaacaggcaatcgcagcaggcatcttacctttatcacccttgttcctccaacaaccgtcagccctattacagcagttacctttggtgcatttgttggcacaaaacatcaaagcacaacaactacaacaacttgggctaggaaaccttgctgcctactctcagcaacagcagtttctttcattcaaccaactggctgcattgaactttgctgcttatttgcaacaacaactaccattcagtca

SEQ ID NO: 1444 - DNA, 283 bp, Zea mays
  unsure (1)..(283): unsure at all n locations; Clone ID: LIB3061-043-Q1-K1-D11
cccacgcgtccgcaacaagcaacatagaaagtggaatccagtagcaacaatagaacaacgatanggaccaagatacgggccctccttatgctccttgctctttctgcatgtgttgctaacgcgacaatattccctcaatgctcacaagctcctatagcttcccttcttcccccataccttccatcaatgatagcttcagtatgtgaaaacccagctcttcaaccctataggctccaacaagcaatcgcagcaaggaacatacctttatcacccttggttcaac

SEQ ID NO: 1445 - DNA, 452 bp, Zea mays
  Clone ID: LIB3061-043-Q1-K1-D12
atgttgagcattcagaaacacacctagcgaagcgcactagcaacgacctaacaacaatggcttccaagacattatgcctccttgcgcttcttgccctttttgtgagtgcaacaaatgcgttcattattccacaatgctcacttgctccgagtgccattattccacagttcctccctccagttacttcaatgggcttcgaacacccagctgtgcaagcctataggctacaacaagcgcttgcggcgagcgtcttagaacaaccaattgcccaattacaacaacaatccttggcacatctaaccatacaaaccatcgcaacgcagcagcaacaagcactgagccacctagccgtggtgaaccctatcgcctacttgcaacaacagctgcttgcattcaacccacttgctttggcaaacgtagctgcataccaacaacaacaacagttgcaacag

SEQ ID NO: 1446 - DNA, 428 bp, Zea mays
  Clone ID: LIB3061-043-Q1-K1-D2
cgtttttcctttttcctggacagccactgcaactcctcccaaatcctcccacccggttgagccggctccgctgccaccggcgcgactccacctctgtcgccaccatggtcaagtccaaggccatcagggtccacgagctgggcggccccgaggtgctgcggtgggaggaggtggaggtcggggagcccggtgaaggggagatccgcatcaggaccaccgccgtcggcgtcaacttcatcgacatctactttcggaagggggtctacgccgcgcccaccatgcccttcaccccaggaatggaagccgttggcgtcgtcaccgctgttgggcctggcctcactggcaggaaggtgggcgatgttgttgcatatgccggcaaccccatgggctcctatgctcaggagcagatccttccagcggctgtcgct

SEQ ID NO: 1447 - DNA, 421 bp, Zea mays
  Clone ID: LIB3061-043-Q1-K1-D3
cagaaataataaagcacatatatgggattccactccacatcaattctcaacaactacagcggcttgtgctatcagacctgtgctgactactctcagcaacagcaccatacttcacattcaaccaactagctgcatcaaactctgcttcttatttacaacatcaacatctaccattcagacatctacctgctgcctacccacagcaacttcttacattcaaccaactgacacatttgaactatgatctttatttacagcaagcaccacttactacaattcaccaagctacttgttgtaagccttgcaacctttttgatccacccacatttgttgccatcctacaataacactaagcctaacgctgccccccttttacaattcaaccaattgttgccatttacccaacttccttttacaaacc

SEQ ID NO: 1448 - DNA, 334 bp, Zea mays
  Clone ID: LIB3061-043-Q1-K1-D4
attcagaaacacaccaagctaatcgcactatcaacgacctaacaacaatggctaccaggagattatccctccttgcgggtcttgccctttttgtgagcgcatcaaatgcgttcattattccacaatgctcacttgctcctagtgccattattccacagttcctcccaccagttacttcaatgggcttcgaacacctagctgtgcaagccaacatgcaacaacaagcgcttgctgcgagcgtcttacaacaaccaattgcccaattgcaacaacaatccttgccacatctaacattacaagccatcacaactcatcatcaacatcagtttctacc

SEQ ID NO: 1449 - DNA, 436 bp, Zea mays
  unsure (1)..(436): unsure at all n locations; Clone ID: LIB3061-043-Q1-K1-D5
caaatcccagacccatcccagccctagcgacaccaaccagctcgccagcgaccatggggaacccggagaagctgaggaatcagatcttcgacctcaagttcacctccaagtcgctgcagcggcaggcgcgcaagtgcgagaaggaggagaaggagcagaagctcaaggtcaagaaggcgatcgagaagggcaacatggacggcgcccgcatctacgccgagaacgccatccgcaagcgcaccgagcacatgaactacctccgcctcgcctctcgcctcgacgccgtcgtggcccgcctcgacacgcaggccaagatgcaggtcatcggcaagtccatgcagtccatcgtcaagtcgctcgactccgcgctcgccaccgggaacctncagaagatgtccgagaccatggacaatttcgagcgccagttcgtcaacat

SEQ ID NO: 1450 - DNA, 431 bp, Zea mays
  Clone ID: LIB3061-043-Q1-K1-D6
caaacattatccaaaatgccaacccggagcagtacctgaattggtgatgggactgaggcattctagacgtgttggcttcaatatgtgaacctgaccatcctcagctaatgcagttggccgtgattgtgcgtggacaatatttctatcaatggtctgatcctgtttacatttattctgcagatgggggagaaaagagacaaggctctcaaggagctcatggaccaggtggccatgaagcagcccaacagcatgtgccatggaaacaaggataatttctgggagagccagggcttcaggttcattgcctctatgtcgatgctggcgctagtgatcctcgcaaagcgttgaagcggcatagtttaagcagatgtgaatgtagcgtttacattagcttgtaagctcgggcagttgtgcatactgcatgccaaaat

SEQ ID NO: 1451 - DNA, 253 bp, Zea mays
  Clone ID: LIB3061-043-Q1-K1-D7
cccactcatcctcaaacattatccaaaattccaacctttttcactacctgaatttctcatccaactgaagcattctaaacatgttggcgttaatatattaacctaaccatcctcaactaattcaattctcctttatatttcctaaacaatatttctatcaatcctcttatcctttttacatttattctacatatcttttaaaaattacacatttctctcaatcacctcattaaccaattacctcattaacatt

SEQ ID NO: 1452 - DNA, 289 bp, Zea mays
  unsure (1)..(289): unsure at all n locations; Clone ID: LIB3061-043-Q1-K1-D8
cattcagaaacacacctagcgaagcgcactagcaacgacctaacaacaatggctgccgagatattatccctgtttgcgcttcttgccctttttgtgagcgcaacanatgcgttcattattccacaatgctcacttgctcctagtgccattattccacagttccttccttccagttacttcaatgggcttcgaacaaccaacttttccagcctaacagctacaaccagccccttgcggcgagcgtcttacaacaaccaattgcccaattaccacaacaatccttggcaca

SEQ ID NO: 1453 - DNA, 437 bp, Zea mays
  Clone ID: LIB3061-043-Q1-K1-C4
gaacaggcgacgaagaagatgagcacgctggacacgcggacgctcaaggacgagctgacgagcatggacaggaagtgcctcgtggacctcggccacccgctgctcaaccgcgtcgccgacagcttcatccgcgccgctggggtcggggcggccagggccgtctccagggaggcctacgtcgtcaccgtcgaagggctttcaggagactcgtccgggctagacgccgacggcggcaagcggagccatttctccagcatcagaggtgacgacggccagaggtcgctcgacgcagtggtaaaaacggccggcaaggaggccttccagtgggggttggcagccggagtctactcagggctcacgtacgcgctgcgggaggccaggggatgccacgactggaaaaacagcgccatcgcaagcgccatcgctggggcggcggt

SEQ ID NO: 1454 - DNA, 240 bp, Zea mays
  Clone ID: LIB3061-043-Q1-K1-A6
accaagccttccgccaatccttccgtagaaggcccattagttaaccaccaatgccagccaaaaaggtttgcttcctaatcctcttaggcctttctgcaagtgcctctacggcgaccattttcccgcaatgctcgcatgctcctatagcttcccttcttcccccgtacctcttaccagcggtgtattcggaatgtgaaaacccaattcttaaaccctacaggttccaacaggcaatcacag

SEQ ID NO: 1455 - DNA, 403 bp, Zea mays
  Clone ID: LIB3061-043-Q1-K1-A8
cagacatactagccacaaaccaagtactatcacttgccaacaaagccacacaacgtgggatttttcaatatgcgcgacgatctctgttacagttctcattacgaatcatttctcctacactgctaacactctcctatagctcacttttttcccacatacctcttacaaacactgtcatcaccatgtcacaacccactacttcatccataccgcatccactatcaaatacaagtacacatcttacatgtatcacgattcaacatacaacatccgtcatctctattctatccttaatcaactgtacctttatattctgactacatctatacacaacgactacatttacttcagctactaaacctctcagattactctaactaacacaatttttttccattctaac

SEQ ID NO: 1456 - DNA, 251 bp, Zea mays
  Clone ID: LIB3061-043-Q1-K1-A9
gagtcaccatcgagaaggacgtatacgacaacgttgcgcacgcgttcgtgaagatacggggcgaggagggcccgtcggagctgtaccgtgggctgacacccagcctgatcggcgtggtgccgtacgcggtctgtaacttgtacgcctacgagacgctgaagcggctctaccgttgcgcgaccgggcggcgttccggcgcggacgtgggccccgtggcgacgctgctcatcgggtccgcggcgggcgccatc

SEQ ID NO: 1457 - DNA, 363 bp, Zea mays
  Clone ID: LIB3061-043-Q1-K1-B1
attgagaccaactagccacatagagagcacaatagtgtaccaacaatggcagccaagatgttttgcctacatatgcgccttggactttctgcaagtgctgctacagcgaccatttcaccgcaatgctcgcaagctcctatagcttccgttattccacctaacctctcaccagcggtgtcttcggtatgtgaaaacccaattctcaaacaatacacgatccaacaggcaatcacagctggaatctcacctttatcagcttagtccatccaacaatcatcatccttataacatcagttacctgtggtgcatatatcggcacaaaacatcggggcacaacatctacaacaacttgtgctagcaaac

SEQ ID NO: 1458 - DNA, 373 bp, Zea mays
  Clone ID: LIB3061-043-Q1-K1-B11
caacatagaaagcacaatagtgtaccaacaatggcagccaaaatattttgcttccttatgctccttggtctttctgcaagtgttgctaccgcaaccattttcccacaatgctcacaagctcctatagcttcccttcttcccccatacctctcaccagcggtgtcttcaatgtgtgaaaccccaattgttcaaccctacaggatccaacaggcaatcgcaacaggcatcttaccattatcacccttgttcctccaacaaccgtcagccctattacagcagttacctttggtccatttggtggcacaaaacatcaaggcacaacaactacaacaacttgtgctaacaaaccttgcttcatactctcagcaacatc

SEQ ID NO: 1459 - DNA, 320 bp, Zea mays
  Clone ID: LIB3061-043-Q1-K1-B12
gagaccaactagcaacatagaaagcacaatagtgtaccaacaatggcagccaaaatatggggctggcttatgctccttggtctttctgcaagtgctgctaccgcaaccattttcccacaatgctcacaagctcctatagcttcctttcttcccccatacctctcaccagcggtgtcttcagtatgtgaaaacccaattcttcaaccctacaggatccaacaggcaatcgcagcaggcatcttacctttatcaaccttgttccttcaacaacccgcaggcctattacagcagttacctttggtgccattggtgggacaaaa

SEQ ID NO: 1460 - DNA, 443 bp, Zea mays
  Clone ID: LIB3061-043-Q1-K1-B2
atttagaccaactagcaacatagaaagcacaatagtgtaccaacaatggcagccaaaatattttgcctccttatgctccttggtatttctgcaagtgctgctacggcgaccattttcccgcaatgctcacaagctcctatagcttcccttcttcccccgtacctctcaccagcggtgtcttcggtatgtgaaaacccaattcttcaaccctacaggatccaacaggcaatcgcagctggcatcttacctttatcacccttgttcctccaacaatcatcagccctattacagcagttacctttggtgcatttattggcacaaaacatcagggcacaacaactacaacaacttgtgctagcaaaccttgctgcctactctcagcaacagcagtttcttccattcaaccaactagctgcattgaactctgcttcttatttgcaaca

SEQ ID NO: 1461 - DNA, 292 bp, Zea mays
  Clone ID: LIB3061-043-Q1-K1-B3
caacaagcaacatagaaagtggaatacagtagcaaaaatagagcaacaatggcggccaggatattttccatcctgatgctccttgctctttctgcatgtgttgctaacgccaccatttttccttaatactcacaagcttctatagctgcccttcttcccccataccttccatcaatgaccgctttaatattgtgaaaccccagcctttaacccttccagatccaacaagccatcgcaaccagcaacttacctttattacaactggtcttttaacaattgccaggccctatct

SEQ ID NO: 1462 - DNA, 342 bp, Zea mays
  Clone ID: LIB3061-043-Q1-K1-B4
ctcaagcctacgtagaccaacacgcaccttaatacgtggactccaatttcaacaaccagacggcactttataccggtgcgtattctatcctcatgctcctcactctttctgcatgtgttgctaactcgacaatatcctatcaatgctcacattcttctatagctcccattatctctgcataccttacatcaatgatagcttcactttatgcaaacccttctcttcatacctatagcatgcatcaagccatctctacaagcaacataccttcatcactcttgctgtttaaacaatctgcaaccctatctattattcagtcatttattcaaaccatcacgactc

SEQ ID NO: 1463 - DNA, 272 bp, Zea mays
  Clone ID: LIB3061-043-Q1-K1-B5
cccacgcgtccggagaccaacaagcaacatagaaagtggaatccagtagcaacagcggagcaacaatggcgaccaagatattttccctccttatgctccttgctctttctgcatgtgttgctaacgcgacaattttcccttaatgctcacaagctcctatagctttccttctttccccataccttccatcaatgatagcttcagtatgtgaaaacccagctcttcagacctataggcttcaacaagcgattgcagcaagcgacataccttta

SEQ ID NO: 1464 - DNA, 440 bp, Zea mays
  Clone ID: LIB3061-043-Q1-K1-B6
cttcttcccccgtacctctcaccaacggtgtcttcggtatgtgaaaacccaattgttgaaccctacaggatccaagaggcaatcgcagctggcatcttacctttatcacccttgttcctccaacaatcatcagccctattacagcagttacctttggtgcatttattggcacaaaacatcagggcacaacaactacaacaacttgtgctagcaaaccttgctgcctactctcagcaacagcagtttcttccattcaaccaactagctgcattgaactctgcttcttatttgcaacaacaacaactaccattcagccagctatctgctgcctacccccagcaatttcttccattcaaccaactgacagcattgaactctcctgcttatttacagcagcaacaactactaccattcagccagctagctggtgtgagccctgc

SEQ ID NO: 1465 - DNA, 291 bp, Zea mays
  unsure (1)..(291): unsure at all n locations; Clone ID: LIB3061-043-Q1-K1-B7
caaatagagaaattgaaaaatcaaaaggagaagctcgaatccctgtgtcgaacacgtacaggcagaaaggaaacaaggcccctccgccagtattccagatgccccttctagccaagaagtgtcagcgacaagtcaagaatcttaacattccagttgccccttctagccaagatgtgtcagcaacaagtcaagaatcttggcagttgtgcttgtcaatataccgttggtgccagctacagctngcggagatttctgaagcctgacattcagctgtcaacctaccgtccgtct

SEQ ID NO: 1466 - DNA, 416 bp, Zea mays
  Clone ID: LIB3061-043-Q1-K1-B8
cagccgtgcaagcctacaggctacaactagcgcttgcggcgagcgccttaacacgaccgaatgccccaattgaacggccatcccttgcaccatttaaccttccaaccaatggaacccaaccaccaccaccaccagttcttgcattaattaaccaacttacccttgtgaacccttgcaactaatttcaacaacaacttgttgcattcaacccaattgctcttgccaacctaactgtataccagcaacaacaacagctgcaacagtttatgccagtgctcagtcaactatccatggtgaaccctgccgtctacctacaactactttcatctagcccgctcgcggtgggcaatgcacctacgtacctacaacaacagttgctgcaacaaattgtaccagctctgactcaactagctgtg

SEQ ID NO: 1467 - DNA, 379 bp, Zea mays
  Clone ID: LIB3061-043-Q1-K1-C1
aagtgcttacctcgtgatacgcacagtcatcttccagcagtgtcatgcaagacttagagtctgctaaatctaggaggtctgtctgctggcgctgctcctatcacatattcttctaccgtgctcactgacactgtatgctgtgcacctctttaccagcagcacgatcatgagtcggatgaaagagatgtgcatcccagactatcgatccatatctgacctaactctcgactgcatgtggaatctgacctcgataatcgtcggtaaatcgaccatgataatcattcttacaacatccacatgtccagtgtttattgactcgcaacatcatgtgctgacatctacgatagctcatgctgacagaacttgctacctactctta

SEQ ID NO: 1468 - DNA, 248 bp, Zea mays
  Clone ID: LIB3061-043-Q1-K1-C11
ccaagatattatccctccttgcgcttcttgcgctttttgcgagcgcaacaaatgcgttcgttatgccacaatgctcgcttgctccaagttccattattacacagttcctcccaccagttacttcaatgggcttcgaacacccagctgtgcaagcctataagctacaacaagcaattgcggcgagcgtcttacaacaaccaatttcccagttgcaacaacaatccttggcacatctaacaatacaaacc

SEQ ID NO: 1469 - DNA, 445 bp, Zea mays
  Clone ID: LIB3061-043-Q1-K1-C12
gcaacatagaaagcacaatagtgtaccaacaatggcagccaaaatattttgcctccttatgctccttggtctttctgcaagtgctgctacggcgaccattttcccgcaatgctcgcaagctcctatagcttcccttcttcccccgtacctctcaccagcggtgtcttcggtatgtgaaaacccaattcttcaaccctacaggatccaacaggcaatcacagctggcatcttacctttatcacccttgttcctccaacaatcatcagccctattacatcagttacctttggtgcatttattggcacaaaacatcaaggcacaacaactacaacaacttgtgctagcaaaccttgctgcctactctcaacaacagcagtttcttccattcaaccaactaactgcattgaactctgcttcttatttgcaaccacaacaactaccattc

SEQ ID NO: 1470 - DNA, 321 bp, Zea mays
  Clone ID: LIB3061-043-Q1-K1-C2
tgagaccaactagcaacatagaaagcacaatagtgtaccaacaatggcagccaaaatagtttgcctccttatgctgcttggtctttctgcaagtgctgctacggcgaccattttcccgcaatgctcgcaagctcctatagcttcccttcttcccccgtacctctcaccagcggtgtcttcggtatgtgaaaacccaattcttcaaccctacaggatccaacaggcaatcgcagctggcatcttacctttatcacccttgttcctccaacaatcatcagccctattacaacagttacctttggtgcatttattggcaccaaa

SEQ ID NO: 1471 - DNA, 347 bp, Zea mays
  unsure (1)..(347): unsure at all n locations; Clone ID: LIB3061-043-Q1-K1-C3
gggccttcaagagaatcttttgagaggcatttatgcatatggttttgagaaaccatctgcggttcagcagagaggaattgttcccttctgcaaggggcttgatgtcattcagcaagcacaatctggtacaggaaagacagcaaccttctgttctgggatcttgcagcagcttgactatggtctggttgaatgccaggccctggttcttgctcccacccgtgagcttgcacagcanattgagaaagttatgcgcgcacttggtgactaccttggtgttaaagtccatgcatgcgttggaggaacatctgttcgtgaggcccaaaggattctcgccagtggtgtgcatg

SEQ ID NO: 1472 - DNA, 436 bp, Zea mays
  unsure (1)..(436): unsure at all n locations; Clone ID: LIB3061-043-Q1-K1-A5
attgagaccaactagcaacatagaaagcacaatattgtaccaataatggcagccaaaggattttgcctcattatgctccttggtctttctgcaagtgctgctacggcgagcattttcccgcaatgctcacaagctcctatagcttcccttcttcccccatacctctcaccagcgatgtcttcagtatgtgaaaatccaattcttctaccctacaggatccaacaggcaatcgcagcaggcatcttacctttatcacccttgttcctccaacaatcatcagccctattacagcagttacctttggtgcatttattggcacataacatcagggcacaacaactacaacaactcgtgctagcaaaccttgctgcctactctcagcaacagcagttacctttggtgcatttgttggcacaaaacatcnaggcacaacaac

SEQ ID NO: 1473 - DNA, 196 bp, Zea mays
  Clone ID: LIB3061-042-Q1-K1-G7
ctcccgatctagattgctaacctcttcgtcttctgtttcatgacctacttcttcgtgtcctcccggcgggtcttgatggagctgtacgccaactatgtgcccaataccgctcagaactttcgctctctgtgcactgtccacaattgcgtgctcaatttctttaagccgctatactacaattgctccatctttctac

SEQ ID NO: 1474 - DNA, 456 bp, Zea mays
  Clone ID: LIB3061-042-Q1-K1-G8
gtggaatccagtagcaacaatagagcaacaatggcgaccaagatactgcacctccttatgctcgctgctctctaggcatgtgttgctaacgcgtcaattcaccctcaatgctcacacgctcctattgcattccttctatcccccataccttacatcaatgatagctacagtatgtgaaaactgatctcttcaaccctataggctacaacatgcaatcgtagcaagcagcatacctttatcactcctagtttcatcaatcggcagccctatctttggtgcagacatagttacataccatcaaggcacagcagctgcagcaactcgagctacctgtgatcaaccaagtagctctggcaaaccttactccctactatcagcaacaacaatctcttccattcaaccaactatctacactgaaccctgctgcttatttgcagcaacaactattaccattca

SEQ ID NO: 1475 - DNA, 311 bp, Zea mays
  Clone ID: LIB3061-042-Q1-K1-G9
attagctttatctactccagagcgcataagaacccgatcgacaccatgagggtgttgctcgttgccctcgctctcctggctctcgctgcgagcgccacctccacgcatacaagcggcggctgcggctgccagccaccgccgccggttcatctaccggcgccggtgcatctgccaacttcggttcacctgccacctccggtgcatctcccaccggcggtccaactgccggcggcggtccaactgccaccggcggtccatgtgccggcggcgggtcatctgccggcggcaccatgccactaccctacttaacc

SEQ ID NO: 1476 - DNA, 356 bp, Zea mays
  Clone ID: LIB3061-042-Q1-K1-H1
ggcccgcggggccggatcgtgatggagctgtacgccaacgaggtgcccaagaccgcggagaacttccgcgcgctgtgcacgggcgagaagggcgtgtgcaagtacgggaagccgcttcctacaagggctccaccttcacggttatccagggcaatgtgcaaggccggcaacttaaccggcggaaccggacccgcgggcagtccatctacggcgagaagttccccgacgagaagttcgtgcgcaagcacaaccgccccggtgtgctctccatggccaacgccgggcccaacaccaacggcttccagttcttcatctgcaccgtcgcgaccccttggctcgacggcaagcacgtcgtc

SEQ ID NO: 1477 - DNA, 374 bp, Zea mays
  Clone ID: LIB3061-042-Q1-K1-H10
ttcccgctcgagccacgcgtccggaaagaagcaagatcaagatcacggatatccaaatcaagcttagcagacagtgcgtgcaggacacctgaaggcccgagacctatcgctgtgcagcttaccatcacagagttctaccgctcgaagaaagcgcataacgtataatctgggaagaagccggcgggagaagggcacgccgcgagggaaggctcgagaaaatcttccgacagggacctcgacaagagcctgccgaagtctgttcagcgccgtctcctcttcgattgctgaggactatgtagcctggcttttttttggtgaacactgcactgtaatcttggtgccactgctgtagatgacctatggaatgccttaac

SEQ ID NO: 1478 - DNA, 346 bp, Zea mays
  Clone ID: LIB3061-042-Q1-K1-H11
tgggcatttgtggagaacacggtggagagccttcctctgtggccttcttcgcgaaggctggcctgggtccgttcctggttcccttttcagggttccgattgctaggctagctgcagctcaggtccttgccttaggctgcctcctaattggcaaccggtttgcctgcttctggggaattgggggtccacccgtttttttcccagaccctccctttgaacccttctctggtcccagctcttttaagctttccatccctatgcctttttttccccaacctgtttaactttctcactctgctccacggtttcaaatctgttctttaaaacaccatctcctatcaccgttt

SEQ ID NO: 1479 - DNA, 480 bp, Zea mays
  Clone ID: LIB3061-042-Q1-K1-H2
ttcccgggctctgatctcgggttcaccgcagcgcacagagcaccctcgactcccgtcccgatccgcgctcttctctacgacgctgcactcatggcaggaatggcacacgcggcttctcagcctgatgctaaacactatgatactacataatgcatgatctgctataccactgatgagactgagctgcactatgctaaaaccgatctattcaaccatagaggctacaacatgcactttcagcaggctacatacctagatcaccctgcattcagcaatcgccagccctatctttggtgcagtcattggtacaaaccatcaaggcacagcacctgcagcaactcgtgctacctgtgatcaaccgagtagctctggcaaacctttctcggtactatcagcaacaacaatttcttccattcaaccaactatctacactgaaccctgctgcttatttgcagtagcaactattaccattcagccagc

SEQ ID NO: 1480 - DNA, 418 bp, Zea mays
  Clone ID: LIB3061-042-Q1-K1-H3
aagcacaatagtgtaccaacaatggcagccaaaatattttgcctccttatgctccttggtcttgctgcaagtgctgctacggcgaccattttcccgcaatgctcgcaagctcctatagcttcccttcttcccccgtacctctcaccagcggtgtcttcggtatgtgaaaacccaattcttcaaccctacaggatccaacaggcaatcgcagctggcatcttacctttatcacccttgttcctccaacaatcatcagccctattacaacagttacctttggtgcatttattggccccaaaccttaaggcaccaccacctccaccacctgggcctaccaaacttggttgctaattttaacaaccacaagttctttcattcaacccactaaggtcaatggactctgcttcttaattgcaac

SEQ ID NO: 1481 - DNA, 264 bp, Zea mays
  Clone ID: LIB3061-042-Q1-K1-H4
attttgagcattcagaaacacacctagcgaagcgcactagcaacgagctaacatcagtgggtaccaagatattatccctctttgcgcttattgccctttttgtgagcgcaacatatgcgttcattattccacaatgctcacttgctcctagtgccattattccacagttcctccctgcaaatacttcaatgggcttcgaacacccaactgtgcaagcctacaggctacaacaagcgctagcagccagcgtgttacaacaaccaa

SEQ ID NO: 1482 - DNA, 417 bp, Zea mays
  unsure (1)..(417): unsure at all n locations; Clone ID: LIB3061-042-Q1-K1-H5
gaactagcaacatacatagtgaagtacactagcatcatcttagcaccaatggcagccaagacttttgccatccttgccctccttgctctttcaggaagcgttgctaccgcgactattattccacaatgctcacaacaatacctctctccggtgacagccgcgagatttgaatacccaactatacaatcctacaggctacaagaggccatcgcagcaagcatcttacggtcgttagcattgaccgtccaacaaccatatgccctattgcaacaaccatccttaatgaatctatatctccaaagaatcgcagcacaacaactacaacaacagttgcttccaacaatcaatcaagtagttgcagcgaaccttgctgcttacctncagcaacaacaatttcttccattcaatcaactagct

SEQ ID NO: 1483 - DNA, 143 bp, Zea mays
  Clone ID: LIB3061-042-Q1-K1-H6
gatccgagctctccatctacgacgcgttcagtcatggcgggaatggcaccctaggtgtctcagcttgatgctaagcactatgatcctaaaatgcatgagctgctgagcactgctgagactgaggaagtcctcactttatatga

SEQ ID NO: 1484 - DNA, 369 bp, Zea mays
  unsure (1)..(369): unsure at all n locations; Clone ID: LIB3061-042-Q1-K1-H7
caacatagaaagcacaatagtgtaccaacaatggcagcacaaactataacggatcatcagggtccacggggatattgcaagtgcttatactgcttactatttttgcatgtggcgctaacgctactatagttcctcaatgctcacaagctcctatagctacccttcttcccccataccttccatcaatgatagcttcagtatgtgaaaacccagctcttcagccctataggctccaacaagcaatcgcagcaagcaacatacctttatcacccttggtggttcaaccattggccagccctatctttggtgcagtcattggtacaaaccatcanggcacatcagctgcagcaactcgtgctacctgtgatc

SEQ ID NO: 1485 - DNA, 333 bp, Zea mays
  Clone ID: LIB3061-043-Q1-K1-A1
gcagttacctttggtgcatttgttggcacaaaacatcaaggcacaacaactacaacgacttgtgctaggaaaccttgctgcctactctcagcaacagcagtttcttccattcaaccaactggctgcattgaactctgctgcttatttgcaacaacaactaccattcagtcagctagctgctgcctacccccagcaatttcttccattcaaccaactggcagcattgaactctgctgcttatttacaacagcaacagctaccaccattcagccagctagctgatgtgagccctgttgccttcttgacacaacaacagttgttgccgttctacct

SEQ ID NO: 1486 - DNA, 251 bp, Zea mays
  Clone ID: LIB3061-043-Q1-K1-A11
tgccacgctcttccgccgcgacgcagcctcgtcctcgccgccgtccgcggaccctcccggctccagcggcgacgcccaggcccagcacccgttcctcgcgctcctgggcccgccgctgccgccggtcaccgaggcggcggagccctccggggaggaggaggcgccgccggatgaggcgctcgacggcaaggaggcggcgcaccacgcgaggacggtgtgcgcccagccgccgcggcgggccatgtcggaga

SEQ ID NO: 1487 - DNA, 331 bp, Zea mays
  Clone ID: LIB3061-043-Q1-K1-A2
aacgagatctctttggcatacgtagagttaaactatcaaggaccaacgtcagcaaacaggaggtctacacatactcggctagtactatgagccagagcagcttacagacctcaaccacctctgtgttcataaattccgatcgcttctgctactgcacctaccttcctaccagctctgtgctagctacccatagcactaactgtcattcaacatgctgttagaaacgatgtagcctacttaaaagcgacagtttcatgaaaccccatgactctgacaaactgtggtgtacacctactacatcgactacaaagattcactccagagatagtgg

SEQ ID NO: 1488 - DNA, 400 bp, Zea mays
  Clone ID: LIB3061-043-Q1-K1-A4
gtgagcgaccgctccggcgcggcgcccatacattcatcggcatcctctagcccagtccggaggtaccctaaccatgagcgccgactacaagaagctgctgcaggccgtcaggtccctcgtcctctccgcttctaaccgatccgttctagtcgtcgagggccgcaccgacgagctcggcacgctcaacaactttggcaggaagaccttcatcaccgtctacttatcctaccacacgcagggatcccaccatgccgagtcggagtggggagccatcgccgccgcagtctaagctgcagtccacatgctcgaggaccagcaggctcatgctgcacagatcgagcgcaccttcattgccatcaagcctgatggtgtgcagagaggcctgatatctgagattatg

SEQ ID NO: 1489 - DNA, 424 bp, Zea mays
  Clone ID: LIB3061-042-Q1-K1-G6
cgcgccgccgacgccgacgacgtgacggaaggaagaggaggagcaaggagcacgacgcgatgggccactccgacgagtggaactcgcaccctaagaactacggtcctggctcccgcgtctgccggctctgcgcgaaccctaacggtctgatcaggaagtacggtctcatgtgctgcatgcagtgcttgcgcagcaacgcctaggacatcgctttcatcaagtaccgttgaagaggccactgtgctgctgtggagaacttcctacatcaaagaaatggctccttcattagaaggcctaatttatgcgctatagctttttgctcagaacttgagactcatgtgttaaactcgacttgttaaagttttgatggctactttgtgcttgttggaccagctataatcagaagattgaaattttctcactc

SEQ ID NO: 1490 - DNA, 360 bp, Zea mays
  Clone ID: LIB3061-025-Q1-K1-B2
acgctgggtcttcagaccattagctttatctactccatagcgcagaagaacccgatcgacacgatcagggtgttgctcgtagcgctcgctctcatggctctaactgccagcgccaaattctcgcatacaatcacaggctgcacaatgtactacaattcacgcagatcatttacgtgagccctggtaccttcttgacacagccacagttgttagccgttctaccagcacgctgcgcctaacgcttgcaccctcttacaactgcaacaattgctgtcattgaaccaacttgctttgacaaacctagcagtgttctaccaacaacccatcattggtggtgccctcttttagatttcttatgag

SEQ ID NO: 1491 - DNA, 387 bp, Zea mays
  Clone ID: LIB3061-025-Q1-K1-B3
gcaacatagaagcacaatagtgtaccaacaatggcagccaaaatattttgcctccttaggctccttggtctttctgcaagtgctgctacggcgaccattttcccgcaatgctcgcaagctcctatagcttcccttcttcccccgtacctctcaccagcggtgtcttcggtatgtgaaaacccaattcttcaaccctacaggatccaacaggcaatcgcagctggcatcttacctttatcacccttgttcctccaacaatcatcagccctattacaacagttacctttggtgcatttattggcacaaaacatcagggcacaacaactacaacaacttgtgctagcaaaccttgctgcctactctcagcaacagcagtttcttccattc

SEQ ID NO: 1492 - DNA, 389 bp, Zea mays
  Clone ID: LIB3061-025-Q1-K1-B4
gctttactgtggatgatggtccactgagatactacgatgatcctgaaaatgaagagttgcttgagagccttaagatgtcaaagtgccccaaggagctggtgcctactgatggagaacatgttgatgtgtctgttattaaaaggatggaagattaccgggaacctgtaaggcctcaatcagctttccagggtgttggaagaacccttggtggtggaccttccccagatgagagtgcaacacctgctcctgcaccaacggcccctgctgcttcgaggtccgctggcatagtcgtggatgactcccagccatttacatccatacagctgaggctggctgatggcactcgcatggtcgcccggttcaacatgcaccacaccgtgggagacatc

SEQ ID NO: 1493 - DNA, 302 bp, Zea mays
  Clone ID: LIB3061-025-Q1-K1-B6
gaccgtcgaaactagtatggatcagtatacagagtaaggtaatgggaattacattatctaatacactattagagacatattatttagcatagattatcacacgaggaccattcgtgtacatgcctatctcacacacatgatacgtcacacgtacgggcacatcccggcggcagccgctcactggtactgtccgccggtgccgtgcgcctgcaagaagtcgctgccgacaagcgggttgtgctcggctctgggccgagccgtgccagtgcccttagcgactggactggtcttgcctacaccgg

SEQ ID NO: 1494 - DNA, 381 bp, Zea mays
  Clone ID: LIB3061-025-Q1-K1-B7
agagagcacaatagtgtaccaactttggcaaccaaaatatttcgctcccttatgctccgggatctttctccaagtgctgctaccgtgaccattttaccgctgtgctcacatgctcctatatcttaccagcttctcctatacttctaaccagttgcgtcttcaatctgtgataacccccatcttcaacactacatgctccaacatgcgctcacactcagcatattacccatatcacactctgccgtctaactaccgcaacacctattactgtaatctactccggtgcatgtgttcactccaaatacatacgtgcaacaactattgctgctagagcttgcaccacctgtgactcaactatcatgagcaaaccctgttgcatac

SEQ ID NO: 1495 - DNA, 429 bp, Zea mays
  Clone ID: LIB3061-025-Q1-K1-B8
gtgaaaacccagctcttcaaccctataggctccaacaagcaatcgcagcaagcggcatagctttatcacccttgtttcaacaatcgccagccctatctttggtgcagtcattggtacaaaccatcaaggcacagcagctgcagcaactcgtgctacctgtgatcaaccaagtagctctggcaaacctttctccctactatcagcaacaacaatttcttccattcaaccaactatctacactgaaccctgctgcttatttgcagcaacaactattaccattcagccagctagctactgcctactctcatcaacaacaacttcttccatttaaccaattggccgcactgaacctcgctgcttatttgcagcagcaaatattactaccatttagccagctagctgcagcaagccgtgcttccttcttgacac

SEQ ID NO: 1496 - DNA, 388 bp, Zea mays
  Clone ID: LIB3061-025-Q1-K1-B9
gcaacatagaaagcacaatagtgtaccaacaatggcagccaaaatattttgcttcctgatgcgccttggtctttctgcaagtgttgctaccgcaaccattttcccacaatgctcacaagctcctatagcttcccttcttcccccatacctctcaccagcggtgtcttcaatgtgtgaaaccccaattgttcaaccctacaggatccaacaggcaatcgcaacaggcatcttaccattatcacccttgttcctccaacaaccgtcagccctattacagcagttacctttggtccatttggtggcacaaaacatcagggcacaacaactacaacaacttgtgctagcaaaccttgctgcatactctcagcaacatcagtttcttccattc

SEQ ID NO: 1497 - DNA, 439 bp, Zea mays
  Clone ID: LIB3061-025-Q1-K1-C1
caaccaattgcccaattgcaacaacaatccttgccacatctaacaatacaagccatcagggcgcggcagcaacaacagttcctaccagcactgagccacctagccatggtgaaccctgccgcctacttgcaagagcagctgcttgcatccaacccacttgctctggcgaacgtagttgcaaaccagcaacaacaacagctacaacagtttctgccaacgctcagtcaactagccatggtgaaccctgccgcctacgtacaacaacaacaactgctttcatctagcccgctcgctgtgggcaatgcacctacatacctgcaacaacaattgttgcaacagattgtaccagctctgactcaactagctgtggcaaaccctgttgcctacttgcaacagctggcttcattcaaccaactgactctgtcgaactctgctgcgt

SEQ ID NO: 1498 - DNA, 345 bp, Zea mays
  Clone ID: LIB3061-025-Q1-K1-C10
gttgtaattcaataataaagttttttggatgatgtatgtggccaaccagaaataaggggttacatttccagattttaaaaaaaaaaaaaaataattaaactaaaaaataaatataaataaaaaaaaaaaaaaaaaaatataaaataaaaaaataaaaaaactaatataaataaaaataaaaaaaaacataaataaaataaaatgggagcttctttatgagaaaacaaattttttcaatcatatatgcttcaacaagcttttttatcaggcaccataaatttatcgcccttgctgttttaacaatagccatccctagaaaaaccgctggcattgctacatataatc

SEQ ID NO: 1499 - DNA, 422 bp, Zea mays
  Clone ID: LIB3061-025-Q1-K1-C11
catcaaccatattattgagaccaacaagcaacatagaaagtggaatccagtagcaacgatagagcaacaatggcgaccaagatattttccctccttatgctccttgctctttctacatgtgttgctaacgcgacaattttccctcaatgctcacaagctcctatagcttcccttcttcccccataccttccatcaattatagcttcaatatgtgaaaacccagctcttcaaccatataggcttcaacaagcaatcgcagcaagcaacatacctttatcgcccttgttgtttcaacaatcgccagccctatctttggtgcagtcattggtacaaaccatcagggcacaacagctgcagcaactcgtgctacctctgatcaaccaagtagctcttgcaaacctttcttcctactctcagcaaca

SEQ ID NO: 1500 - DNA, 405 bp, Zea mays
  unsure (1)..(405): unsure at all n locations; Clone ID: LIB3061-025-Q1-K1-C12
ataaagcacaatagtgtaccaacagtggcagccaaactattttgcttccttatgctcgttgggctttctgcaagtgctgctaccgcatccattttcccacaatgctcacaagctcctatagcttccttctgtcccccatacctgtcaccagcgctgtcttcaatatgtgaaatcccaattcttcaaccctacaggatccaacatgctatcccagcatgcatcttaccttcatcacccttgttcctgcaacatccgtcagccctattacagcagttacctttggtgcatttgttgtcacatagcattacggcacaacatctacatcaactcgtgctaggaaaccttgctgcctactctcagcaacagcagcttcttncatgcaaccaactggctgcattgaactct

SEQ ID NO: 1501 - DNA, 399 bp, Zea mays
  Clone ID: LIB3061-025-Q1-K1-C2
cacaatagtgtaccaacaatggcagccaaaatattttgcctccttatgctccttggtctgtctggaagtgctgctacggcgaccattttcccgcaatgctcgcaagctcctatagcttcccttcttcccccgtacctctcaccagcggtgtcttcggtatgtgaaaacccaattcttcaaccctacaggatccaacaggcaatcacagctggcatcttacctttatcacccttgttccttcaacaatcatcagccctattacatcagttacctctggtgcatttattggcacaaaacatcagggcacaacatctacaacaacttgtgctagcaaaccttgctgcctactctcagcaacagcagtttcttccattcaaccaactagctgcattgaactct

SEQ ID NO: 1502 - DNA, 383 bp, Zea mays
  Clone ID: LIB3061-025-Q1-K1-C3
tgggggtattgaagatggaaattctgcatcagaatatattgacactcaaggctatgagttatcggctgatgcacgggcccaagcagatataaaatttacttatgttgtttcttgccaaatatatggactacagaagcaaacaaaaaaacaagaggctgcagatattgctctcctactgcaaagaaatgaggctcttcgggttgctttcatacacgaagaggaaatcatatcaagggatggtaaggctacaacaagagagtattattccaagcttgtgaaggctgatgttcatggcaaagaccaagaaatatactgcattaaattgcctgggaaccccaagcttggtgaaggcaaacctgagaaccaaaaccatgccataatct

SEQ ID NO: 1503 - DNA, 302 bp, Zea mays
  Clone ID: LIB3061-025-Q1-K1-C4
ctcagatcgcggtcttcactacttttacactggtgctaagcacaccatcatccaccatggtgtggagaccacaaacatccttctggatgagaactgggatgccaaggtttcagatttccgtgtgtccaagactggcctatttatggtccatacttatgtgagcacaggtggcacaggcagcatcagcttcctctatcctgactactttgagatgctgccgctcacagatcaggctgatgtatactctttcggtgttgagctgattgaggacctctgcgcaccggctgtgcttgaaccctact

SEQ ID NO: 1504 - DNA, 387 bp, Zea mays
  Clone ID: LIB3061-025-Q1-K1-C5
gcattcagaaacacaccaagcgaagcgcactagcaacaacctaacaacaatggcgaccaggatattatccctccttgcgcttcttgcgctttttgcgagcgcaacaaatgcgtccattattccacaatgctcacttgctcctagttccattattccacagttgctcccaccagttacttaaatggccttcgaacacccagctgtgcaagcctataggctacaacaagcgattgcggcgagcgtcttacaacaaccaattgcccaattgcaacaacaatccttggcacatctaacaatacaaactattgcaacgcaacagcaacagcagttcctaccagcactgagccacctagccatggtgaaccctgtcgtctacttgcaacagca

SEQ ID NO: 1505 - DNA, 280 bp, Zea mays
  Clone ID: LIB3061-025-Q1-K1-C6
acgaagacgcgtactatgccatccatcatgttcaaaatattcagcccaaatttcctcgcatgggtgccatgaagtgctgccacagtgaacttaatgccctcatgctctcacaactatatgcgttcactaattctcacagcccacttactacatcttgctctatgaacctgacaactcaaacattcaaacctacaggatccacaacaggatcatacctaacattctgctctacaacaagcctattgctcctaacctcatacaccttccgaatacagacacc

SEQ ID NO: 1506 - DNA, 432 bp, Zea mays
  unsure (1)..(432): unsure at all n locations; Clone ID: LIB3061-025-Q1-K1-B12
agcaacatagaaagtagaatccatgagcaacaatagagcaacaatggcgaccaagatggttgccctccttatgctccttgctctttctacatgtgttgctaacgcgacaattttccctcaatgctcacaagctcctatagcttcccttcttcccccataccttccatcaattatagcttcagtatgtgaaaacccagctcttcaaccatataggcttcaacaagcaatcgcagcaagcaacatacctttatcgcccttgttgtttcaacaatcaccagccctatctttggtgcagtcattggtacaaaccatcagggcacaacagctgcagcaactcgtgctacctgtgatcaaccaagtagctctggcaaacctttctccctactctcagcaacaacaatntcttccattcaaccaactgtctacactgaa

SEQ ID NO: 1507 - DNA, 261 bp, Zea mays
  Clone ID: LIB3061-024-Q1-K1-H8
gtcagggagactccacgccgtgtctttgatgccgtgctcttcagcaatgagcgtgagatccttgatatccgctggcacgagcttagcccgtatgtgtcagaatttgtgctgcttgagtccaattcaacttttaccggcataaagaaggaccttcacttcaaggaaaaccgccaacggtttggctttgcagagtcacggttgacctatggcatgataggtggaaggtttgtgaagggagagaacccatttgtcgaggagtcg

SEQ ID NO: 1508 - DNA, 426 bp, Zea mays
  Clone ID: LIB3061-024-Q1-K1-H9
gtgtcttgcattcaaccaactagctgcattgaactctgcttcttatttgcaacaacagcaacgaccattcagccagctacctgctgcctacccccagcaatttcttccattcaaccaactggcagcattgaactctcctgcttatttacagcagcaacaactactaccattcagccagctagctggtgtgagccctgctaccttcttgatacaaccacagttgttgccgttctaccagcacgctgcgcctaacgctggcaccctcttacaactgcaacaattgctgccattcaaccaacttgctttgacaaacccagcagcgttctaccaacaacccatcattggtggtgccctctcttagatttcttatgagttatagttcaataataaagttctttgtctgatgtttgtggcttcccagaaata

SEQ ID NO: 1509 - DNA, 394 bp, Zea mays
  Clone ID: LIB3061-025-Q1-K1-A1
ccctactcaaccgtcccggcctcagccttatccccagccacacccatgcccgtgccaacagccgcatccaagcccgtgccagctgcagggaacctgcggcgttggcagcaccccgatcctgggccagtgcgtcgagttcctgaggcatcagtgcagcccgacggcgacgccctactgctcgcctcagtgccagtcgttgcggcagcagtgttgccagcagctcaggcaggtggagccgcagcaccggtaccaggcgatcttcggcttggtcctccagtccatcctgcagcagcagccgcaaagcggtcaggtcgcggggctgttggcggcgcagatagcgcagcaactgacggcgatgtgcggcctgcagcagacgacttcatgcccctacgct

SEQ ID NO: 1510 - DNA, 420 bp, Zea mays
  Clone ID: LIB3061-025-Q1-K1-A10
tcgcgctcatcccacatcagtagtcgaccaagcacaagcagcagagccggccggaatatgtggacgatcaggaaggtggcggcgccgttggcggaggcgcgcgtgtgccggcgccggagcgcgggcttcaagggggtctgcatgtccgaccacaactgcgcgcaggtgtgcttgcaggagggctacggcggcggcaactgcgacggcatcatgcgccagtgcaagtgcatcagggagtgctagctagctaggctctaggatctagcaagctagctatatcggcctttaattaaattaataaggatcgacgtcgtggccggtcgctaaatatgtactactatacgtctacactacatgcaataatgcaccacatgtacgcgtacgcgcgccgagctgtgtggacgccgcatctagcatgca

SEQ ID NO: 1511 - DNA, 388 bp, Zea mays
  Clone ID: LIB3061-025-Q1-K1-A11
tcgagccacgcgtacgcacagttcctgccaccagttacttcaatgggcttcgaacacccagctgtgcaagcctgtaggctacaacaagcaattgcggcgagcgtcttacaacaaccaatttcccagttgcaacaacaatccttggcacatctaacaatacaaaccatcgcaacgcaacagcaacaacaattcctaccagcactgagccacctagccatggtgaaccctgccgactacttgcaacagcagttgcttgcatcaaacccacttgctctggcaaacgtagttgcaaaccagccacaacaacagctgcaacagtttctgccagcgctcagtcaactagccatggtgaaccctgccgtctacctacaacagcaacaactgcttt

SEQ ID NO: 1512 - DNA, 424 bp, Zea mays
  unsure (1)..(424): unsure at all n locations; Clone ID: LIB3061-025-Q1-K1-A12
gcccctgctcagagttcgaacatgttctccttccaacccccaattcaaccagcagctgctaccggtggactcccttttttccccaacacaaatcaggccttgacgggacagccaacttctagcctgtccagtatggtcatgcagcctgctcttgtttcaaatccatttgggatgcttccagcaatgcctcagatgtccatcgggaatggtggatcttcaccttcagttcaatatggaatatcaagtttgccggttgcggagaagcctcttccaagtagatcattgtccatggcggttcctagacatttgtcacagagaaggataaaactgctgccaagaaaatataatccaatatctgatggcaaggttccattctttgctgatgatgaagaatctncagcaacaccaaaggcagatgcttttt

SEQ ID NO: 1513 - DNA, 406 bp, Zea mays
  Clone ID: LIB3061-025-Q1-K1-A2
ggctgaccagatcgtctcttggttgaaggagtactttgacggcaaattgactccgttcaggaagtctgagcctattcctgaggtcaacaatgagcctgttaaggtggttgttgctgacaacgtccacgacttcgtcttcaaatctggcaaaaatgtccttattgaattctatgccccctggtgcggacactgcaagaagctggcgcccatcttggacgaggcagccaccactctccagagcgacgaggaagtcgtgattgctaagatggacgcgactgccaatgacgttcccagtgagtttgacgtccaaggctacccgaccttgtacttcgtgaccccgagcgggaaggtgacatcctacgacagcggcaggacggcggacgacatcgtcgacttcatcaagaag

SEQ ID NO: 1514 - DNA, 395 bp, Zea mays
  unsure (1)..(395): unsure at all n locations; Clone ID: LIB3061-025-Q1-K1-A3
gcagcttctgcttgctctggggggaaggagagagagagagcgagagagagagagagatgtagtagagaggctagtaggtggtcctcgaacgaagatgttggcggtgttcagcgggcaggtggtggaggtgccggcggagctggtggcggcgggcagccggacgccgtcgcccaagacgaaggcgtcgcagctcgtggggcgctttctggccgcgtccgagccggccgtgtccgtgcagctcggcgaccacggccacctcgcctactcccacaccaaccaggcgctcctacgncccaggtcgttcgcggtcaaggacgaggtgttctgcctgttcgaaggggtgctggacaacctgggtcggctgatccagcagcactggctgtcaagcaagggcg

SEQ ID NO: 1515 - DNA, 150 bp, Zea mays
  Clone ID: LIB3061-025-Q1-K1-A5
gtacgcgtgacttagcgctacctgtgatcaacttattagctgtgacacacattcctgcgtactcggacgagcaacaatttctgccagtcaaccaactagctacactgaaccctgctgcttatttgtaggaccaactattaccattcagac

SEQ ID NO: 1516 - DNA, 379 bp, Zea mays
  Clone ID: LIB3061-025-Q1-K1-A6
tcggggaatttttgggctgcttgttgccgcactctttttataaagtcgacccaccctgacctaattttaatgtcaaaagaacccgcagcaggggagactgggagatacagagaggagagggagggtttcctcaaagagacccaaacccaagcagagaacactagcgttccctcaccagggcgtccatcccagcagccatggcgatggcgtacaagatggcgacggaggggatgaacgtgaaagaggagtgccagcgctggttcatggagatgaagtggaagaaggtgcaccgcttcgtggtgtacacgatcgacgagcggtcgcgcgccgtgctggtggacaaggtgggcggccccggcgaagggtacgaggagctcgt

SEQ ID NO: 1517 - DNA, 421 bp, Zea mays
  Clone ID: LIB3061-025-Q1-K1-A7
gctctaccggtctcgattcccgggctgccgtcgtggcgtctcaccgtttccaggatacgaacatgaggtcggccaccctgcttacgatctgcaccttggccgcgctgctgctggtggcgcgcggctcggagaagccatcggccgcgccgccgacggtggtggccgtgggcgtggcggcagccagcgacctcatacgctccggcggtcaccgctacctggacgtcagaacagaggaggaattcaggagtgggcatgtggaggattcactcaacgtgccctatcttttcttcacttcacaaggaagggagaagaaccccaagttcatcgcacaggtcgcagtgggtttcgacaaagaggacaacatagttgtgggctgcacaagcggagtgaggtctcgattagcatgtgctgatctcatggc

SEQ ID NO: 1518 - DNA, 418 bp, Zea mays
  Clone ID: LIB3061-025-Q1-K1-A8
ctgcattgaactctgcttcttatttgcaacaacaacaactaccattcagccaggtacctgttgcctacccccaacaatttcttccattcaaccaactggcagcattgaactctcctgcttatttacagcagcaacaactactaccattcagccagctagctggtgtgagccctgctaccttcttgacacaaccacagttgttgccgttctaccagcacgctgcgcctaacgctggcaccctcttacaactgcaacaattgctgccattcaaccaacttgctttgacaaacctagcagtgttctaccaacaacccatcattggtggtgccctcttttagatttcttatgagttatagttcaataataaagttttttgtctgatgtttgtggcttcccagaaataggaaagtacattttt

SEQ ID NO: 1519 - DNA, 408 bp, Zea mays
  Clone ID: LIB3061-025-Q1-K1-A9
gcaacatagaaagtggaatccagtagcaacaatagagcaacaatggcgaccaagatactttccctccttatgctccttgctctttctgcatgtgttgctaacgcgacaattttccctcaatgctcacaagctcctatagcttcccttcttcccccataccttccatcaatgatagcttcagtatgtgaaaacccagctcttcaaccctataggctccaacaagcaatcgcagcaagcaacatacctttatcacccttgtttcaacaatcgccagccctatctttggtgcagtcattggtacaaaccatcaaggcacagcagctgcagcaactcgtgctacctgtgatcaaccaagtagctctggcaaacctttctccctactatcagcaacaacaatttcttgcattc

SEQ ID NO: 1520 - DNA, 424 bp, Zea mays
  unsure (1)..(424): unsure at all n locations; Clone ID: LIB3061-025-Q1-K1-B10
cttccttccccgccactgcgcagcgcgagtgcggcgacagccagtcacacactcacactccctcgaccgctctgggccccgtccgcgtcgccgcagggcgaggaggcaatggcggcgggcgggaatggcgccggcggggacaccagggcggccttcgcgcggatctacaagacgctcaaggaggagctgctcaccgacccggccttcgagttcaccgaggagtcacgccagtggatcgaccgcatggttgactacaatgtactcggaggcaagtgtaaccgtgggctctctgtggtcgacagctacaagctgctcaagggcgctgatgctctgggcgaggaggaaacgttccttgcttgcaccctcggctggtgcattgaatggcttcaggctntctnntctgtgcttgatgatatcatggatg

SEQ ID NO: 1521 - DNA, 411 bp, Zea mays
  Clone ID: LIB3061-025-Q1-K1-B11
caatttcttccattcaaccaactgtctacactgaaccctgctgcttatttgcagcaagaactattaccatttagccagctagctactgcctactctcagcaacaacaacttcttccatttaaccaattggccgcactgaaccccgctgcttatttgcagcagcaaatactactgccatttagcgagctagctgcagcaagtcgtgcttccttcttgacacagcaacagttgctgcctttctacaagcagtttgcggctaaccccgcaaccctcttacaactacaacaattgttgccctttgtccaacttgctttgacaaacccagcagccttctaccaacaacacatcattggtggtgccctcttttagattgattattagttggaattcaataataaagttttttggatg

SEQ ID NO: 1522 - DNA, 263 bp, Zea mays
  Clone ID: LIB3061-024-Q1-K1-H7
acccatactctagtatatcttcccttattcttccattccttccatcaatcaccgctttagtgtaggataactcaaccattcaggcctacacaatccaccactcaatcacaacaatcaactcacctacattacacctcttcttttaacaatactcagacatatttttcttgcatatattcgtacaatccattactacataacacattcaacaactattactaccatttatcatccaactcattatcactaacctttaccctcta

SEQ ID NO: 1523 - DNA, 212 bp, Zea mays
  Clone ID: LIB3061-024-Q1-K1-F8
gtcgcttgcagccgccgccgccgcgtttgcctcgcccagcgcagcagccggggtagcgacatcgctatctcgatctcagccatggcggaggtggagcagcatcaggacacgccgaagctgttcaaccgctggaccttcgatgatgtccaggtgaacgacatatcgctgaaagactacctcgttgtgaacgcgacgaagctcgcacagtacct

SEQ ID NO: 1524 - DNA, 426 bp, Zea mays
  Clone ID: LIB3061-024-Q1-K1-F9
ccagtactccgcagtccgcacggccgcatccgtcaagatccgcgaaaaacaagtgagggagagagagagagagaggagggaaaatgctgcgccacgccgcccgccgcctcgtttcccgcgccgtcgctccgcccaccgcgcgccgggcgctcgccacggcggaggtgcccgcggaggccgtcgaggactccacgttcgtcgaggcctggaaaaaggtcgcccccaacatcgagcccccagcgacgcccctctccctcatgcagccgcgcccgcccacgccagctaccatccctaccaagctcaccgtcaacttcgtcctcccctacaagtccgagatcgccaacaaggaggttgacatggtaattgtaccagctacaactggtcagatgggtgttttgccaggccatgttgccacaattgcagagc

SEQ ID NO: 1525 - DNA, 266 bp, Zea mays
  Clone ID: LIB3061-024-Q1-K1-G1
gggcacaacaactacaacaacttgtgctagcaaaccttgctgcatactctcagcaacgtcaggttcttccattcaaccaactggctgcattgaactctgctgcttatttgcaacaacaattaccattcagccagctagttgctgcctacccccagcaattacttccattcaaccaactagcatcattgaactctgctgcttatttacagcatcaacaactactaccattcagccagctagctgatgtgagccctgctgccttcttg

SEQ ID NO: 1526 - DNA, 426 bp, Zea mays
  Clone ID: LIB3061-024-Q1-K1-G10
cccacgcgtccggtgctcccccaacgctactaccgccgctagctggttcaagtgcggggaggggagccggagaccggtagaggaaattaagaggcgtcgatcgggcatggggtgcgacgacaagtgcgggtgcgccgtgccgtgccccggcggcaaagactgcaggtgcacgtcggggagcggcgggcagcgggagcacacgacttgcggctgcggggagcactgcgagtgcagcccgtgcacgtgtggccgggccacgatgccgtccggccgcgagaacaggagggctaactgctcctgcggggcgtcctgcaactgcgcatcctgcgcctcggcctgatccgtgcgcctcgccctcgtgctaccgcgctgcctagtggagggagttgtctagtgaggctggagacgaagcaactagcactactt

SEQ ID NO: 1527 - DNA, 439 bp, Zea mays
  Clone ID: LIB3061-024-Q1-K1-G12
tcgacccacgcgtacggggtcttcgactcccgtctctcccccgtcgtcttctgatgattcagacgactcccgggagagtgcctcggaagtctggacgtacatccgggccgtcgagcgctccgggctcgagggctcggatgagtcggagtactcctcggatgaggaggactcggacggcggtgaggacgaggatgacgacgacgacggcgacgacgacgacgacggtggcgacggcgacagtgacggcagcagcagctgcggcggcagcatcggcagctactggagcaagggcagcaccagaggccgcagcaacatgggcagcaccaagcgctgcggcggcagcagaagcagcacggccagtggctaaacgccactggtctctagatattagtgtaatgtaattagaataatgtagtagtaatgtaaactagtatagtgt

SEQ ID NO: 1528 - DNA, 243 bp, Zea mays
  Clone ID: LIB3061-024-Q1-K1-G2
atcgataacagccgcctccatttagtttacctcgcacaccgcaccatccggggcagggcatctatctatggagctcagccatcacccaggtggatcatcaacacgacacgccgaaactgttcaaccgctggaccttatatgatgtacagaacaactacatctatctgaaccactacctacttctaaactcgaccaagcacgctacgtacctgccgcacaccttgttgcctcactaacagaagc

SEQ ID NO: 1529 - DNA, 258 bp, Zea mays
  Clone ID: LIB3061-024-Q1-K1-G3
catggactttgacttcttcaagtccatcggcctcagcgacaagatctggaacaacgggccggtggacacccaaatccagtggttcaggcagctgctcccctccgtgtgcgggaaggattgcaagaactacctgtccaagtccctgttcgtggtgggcgagttcggcggcaacgactacaacgcggcgctcttctcggggcggtccatggcggaggtgagagggtacgtgcccatggtggtgagcaagctcgtccgcgg

SEQ ID NO: 1530 - DNA, 267 bp, Zea mays
  Clone ID: LIB3061-024-Q1-K1-G4
attgagaccaacatgcaacatagaaagtggaatacagtagcaacaatagagcaacaggggcggccaagatattctccatccttatgctccttgctctttctgcatgtgttgctaacgcgaccatttttcctcaatactcacacgctcctatagcttcccttcttcccgcataccttccatcaatgaccgcttcagtttgcgaaaacccaacccttcaaccgtacatgctccaacaagcaatctcaacatgcaacattacgctttatc

SEQ ID NO: 1531 - DNA, 258 bp, Zea mays
  Clone ID: LIB3061-024-Q1-K1-G5
caactagcaacataaaaagcacaatactgtaccaacaatggcagccaaaatatgttcggctccttatgctccttggtctttctgcaagtgctgctactgcgaccattttaccgcaatgctcacatgctcctataacttcccttcttcccccgtacctctcaccagcggcgactacagtatgtgaaaacccaattcttcaaccatacaggatccaacaggcaatcacagcttgcatcttacctttatcacccttgttcc

SEQ ID NO: 1532 - DNA, 278 bp, Zea mays
  Clone ID: LIB3061-024-Q1-K1-G6
gcgagcatcaacgcttcatatccatgtcaacctacatgtatctacatgtacactaactggtgactgcgcaacatctatcaactggctataatctacttcagtttgtattctatgctactgttcaacgccaccattttttgctcattacatcccattgctcctatatcatacccttctgcttatatacatcttcatcaatctcctactcaagtgtcctaaatacctacaacattcaaccgtatactctttgacaagcaatagctgcattgcaacttacc

SEQ ID NO: 1533 - DNA, 269 bp, Zea mays
  Clone ID: LIB3061-024-Q1-K1-G8
cctgctgcttatttgcagcaacaactattaccattcagccagctagctactgcgctagtctcatcaacaacaagttcttccatttaaccaattggccgcactgaacctcgctgcttatttgcagcagcaaatattactaccatttagccagctagctgcagcaagccgtgcttccttcttgacacaacaacagttgctgcctttctaccaacaatttggggataaccccgcaaccctcttacaacttacctccattggtggcccttttt

SEQ ID NO: 1534 - DNA, 417 bp, Zea mays
  Clone ID: LIB3061-024-Q1-K1-G9
cgctctctggtggagttgctgtggttaatgttggagcatcgaccgaggcagagctaggggacgggcaagctccgcatagaggacgcgaagaatgcgacttttgcagcaatagaggaaggtattgttccaggaggcggtgcagcatatgttcatctatcgacattcgtaccggctatcaaggagacgttggatgatcctgaggagcgcctaggtgctgatatcattcagaaggctttggtggcacctgcagcgctgatagcccataatgctggggtggaaggtgaggtgattgtggataaaatccgggaaagcgagcgggagttcggttacaacgccatggcggacaagcacgagaacctggtggaggctggtgtgatcgaccctgccaaagtgactaggtgcgccctgcagaacgct

SEQ ID NO: 1535 - DNA, 267 bp, Zea mays
  Clone ID: LIB3061-024-Q1-K1-H1
attcagaaacacaccaagcgaagcgcactagcaacaacctaacaacaatggctaccaggatgttatccctccttgcgcttcttgcgctttttgcgagcgcaacaaatgcgtccattattccacaatgctcacttgctcctagttccattattccacagttcctcccaccagttacttcaatggccttcgaacacccagctgtgcaagcctataggctacaacaagcgattgcggcgagcgtcttacaacaaccaattgctccaattg

SEQ ID NO: 1536 - DNA, 332 bp, Zea mays
  Clone ID: LIB3061-024-Q1-K1-H10
cgacctcacgcgtacgctctgctgcttatttacagcagcaacaactactaccattcagccagctagctgatgggagcgctgctgccttcttgacacaacaacagttgttgccattctacctgcacgctatgcctaacgctggcaccctcttacaactgcaacaattgctgccattcaaccaacttgctttgacaaacccaacagtgttctaccaacaacccatcattggtggtgccctcttttagattgcttatgagttatagttcaataatgaagttttttggatgatgtttgtggcgtcccagaaataagaaagtacatttctagattct

SEQ ID NO: 1537 - DNA, 389 bp, Zea mays
  Clone ID: LIB3061-024-Q1-K1-H11
gaacaatgagaacaagcctgtcacaaacagccgtgacactcaggagatacgcctcgagcaaggccttcagatgctcaagatattcaaggatcatgtcagcaaaacttccatcctcgacgactttgccttctatgagagccgccagaagttgatgcaggataagaggtccaaacagcagcagctccaaaagcaggtctgggacactaggacccccgtttctgtcaccggtgaacgaccacaggaacctgctaatgggaagcccaatccgtccgtaccagatggtgtcacggcagaggtgaaggcggtgaaggctcccgcagagaacggcatcactgctcctgttgtttcctatgcagcaaaggtggcccagacagcaccagagaaacccg

SEQ ID NO: 1538 - DNA, 438 bp, Zea mays
  unsure (1)..(438): unsure at all n locations; Clone ID: LIB3061-024-Q1-K1-H12
tacgaactagcaacatacatagtgaagtacactagcaacatcttagcaccaatggcagccaagatttttgcgatccgggccctccttgctctttcagcaagcgttgctaccgcgactattattccacaatgctcacaacaatacctctctccggtgacagccgcgagatttgaatacccaactatacaatcctacaggctacaagaggccatcgcagcaagcatcttacggtcgttagcattgaccgtccaacaaccatatgccctattgcaacaaccatccttaatgaatctatatctccaaagaatcgcagcacaacaactacaacaacagttgcttccaacaatcaatcaagtagttgcagcgaaccttgctgcttacctncagcaacaacaatttcttccattcaatcaactagctggggtgaaccctgctgct

SEQ ID NO: 1539 - DNA, 268 bp, Zea mays
  Clone ID: LIB3061-024-Q1-K1-H2
acgcatctgccacctacggttcacctgccacctccggtgcatctcccaccgccggtccagctgccgccgccggtccacctgccaccgccggtccatgtgccgtcgccggttcatctgccgacgacaccatgccactaccctactcaaccgccccggcctcagcctcatccccagccacacccatgcccgtgccaacagccgcatccaagcccgtgccagctgcagggaacctgcggcgttggcagcaccccgatcctgggccagtgcg

SEQ ID NO: 1540 - DNA, 264 bp, Zea mays
  Clone ID: LIB3061-024-Q1-K1-H3
acaagctcctatagctgcccttcttcccccataccttccatcaatgaccgctttagtgtgtgaaaacccagcccttcaaccctacaggatccagcaagcaatcgcaacaagcaacttacctttatcacacctgttctttcaacaatcgccagccctatctttggtgcagtcattggtacaaaccatcagggcagaacagttgcagcaactcgtgctaccagtgatcagccaagtagctctggcaaacctttccccctactctca

SEQ ID NO: 1541 - DNA, 253 bp, Zea mays
  Clone ID: LIB3061-024-Q1-K1-H4
cccacgcgtccgatttgagcattcatatacacaccacgcgaagcacattagcaacgggctaggtacaatggctacgatgatattatccctccttgcgcttcttgcgctttttgctagcgcaacacatgcgatcattattccacattgctcactagcttcaatttacggtattccgcagacggtttgactatgcacagtcacggtcgacctatagcatgataggcgagccgattgtctacggcgagcactcgtt

SEQ ID NO: 1542 - DNA, 263 bp, Zea mays
  Clone ID: LIB3061-024-Q1-K1-H6
ctacgcgtacgggcaaacattgttgccttcttacaacatcaacaattgctaccatttagccagcatgggttgactaatcctacgaccttattgcaacctcccaccattggtggtgccatcttctagatcttatacgattaatactgtaataatcaaactctcatgctgatatgtgcgacctctcaataataaagcattaaagatctatattttaaaacacacatctatgcaagcttatacgctacaacaagcaatatggtcgg

SEQ ID NO: 1543 - DNA, 263 bp, Zea mays
  Clone ID: LIB3061-024-Q1-K1-F7
gcaacagcagatgcttacattcaaccaactagctgcattgaactctgcttgtgatctgcaacaacaacaactaccattcagccagctacctgctgcctacccccagcaatttcttccattcaaccaactggcagcattgaactctcctgcttatttacagcagcaacaactactaccattcagccagctagctggtgtgagccctgctaccttcttgatacaaccacagttgctgccgttctaccagcacgctgaagcctaac

SEQ ID NO: 1544 - DNA, 435 bp, Zea mays
  Clone ID: LIB3061-042-Q1-K1-F1
aggcaccaaatcaaatctgcaacatgaattatctaactccaaaaaccatgaagctggtgcgttgtggttcttgcgtttcattgctttagtatcaagtgtttcttgtacacagacaggcggctgcagctgtggtcaacaacaaagccatgagcagcaacatcatccacaacaacatcatccacaaaaacaacaacatcaaccaccaccacaacatcaccagcagcagcaacaccaacaacaacaagttcacatgcacccccaaaaccttaagcaccaccagaaggtcattgtcaaccaccacccacaccaacggaagaaccacaaccaccaccaccaccaccggacccaccaccaccttcatggtaaaggccaccaccaccttacccaccattaccaaggccttttccacaaccccaaccgagcccttagccacac

SEQ ID NO: 1545 - DNA, 137 bp, Zea mays
  Clone ID: LIB3061-042-Q1-K1-F10
gctagctgcacgcagccgggcaggcttcatcacacacattcacgacacgcctgtgcgggggcaatgtgcagccatcaacgcgcccgctgtacacctactacagagattgcccctgggccacactctgatacacaccc

SEQ ID NO: 1546 - DNA, 311 bp, Zea mays
  Clone ID: LIB3061-042-Q1-K1-F12
cgttctcgtcgtgtgcctggctccgtcagctgccagcgcctctgcaatgcagatgcgctgcccctgcgcggggctgcagggcttgtacggcgctggcgccggcctgacgacgatgatgggcgccggcgggctgtacccctacgcggagtacctgaggcagccgcagtgcagcccgctggcggcggcgccctactacgccgggtgtgggcagacgagcgccatgtaccagccgctccggcaacagtgctgccagcagcagatgaggatgatggacgtgcagtccgtcgcgcagcagctgcagatgatgatgc

SEQ ID NO: 1547 - DNA, 393 bp, Zea mays
  Clone ID: LIB3061-042-Q1-K1-F2
caacatgcaacatagaatgtggaagacagtagcaacaatagagcaacggtggcggccgagatgttttccatgcttatgctccttgctctttctgcatgtgttgctaacgcgaccatttttcctcaatactcacaagctcctatagctgcccttcttcccccataccttgcatcaatgaccgcttcagtttgtgaaaacccagccgttcaaccctacaggctccaacaagcaatcgcagcaagcaacttacctttatcacccgtgcactttcaacaatcgccagtcctatctttggtgcagtcattgctacaaaccatcagggcacagcagctgtatcaactcgtgctaccagtgatcagtcaagtagctctggcaaaccttgctccctactct

SEQ ID NO: 1548 - DNA, 220 bp, Zea mays
  Clone ID: LIB3061-042-Q1-K1-F3
aacatccttctatcagtaccatcactcatgcattcatcttagtactataggggcacagtgccatgtgctctgagatccttcctgctcgaccgcccgtgcccgtcgactcgtcgttcttgccggccgcgcctcaccttcgacctctccttctacagggggatcggatacgccacaggctgcacgacggtgctgtgggtcttcggctactgctccctcatct

SEQ ID NO: 1549 - DNA, 402 bp, Zea mays
  Clone ID: LIB3061-042-Q1-K1-F4
caacaatggcagccaaaatagtttgcctccttatgctccttgggctttctgcaagtgctgctacggcgaccattttcccgcaatgctcgcaagctcctatagcttcccttcttcccccgtacctctcaccagcggtgtcttcggtatgtgaaaacccaattcttcaaccctacaggatccaacaggcaatcgcagctggcatcttacctttatcacccttgttcctccaacaatcatcagccctattacaacagttacctttggtgcatttattggcacaaaacatcagggcacaacaactacaacaacttgtgctagcaaaccttgctgtctactctcagcaacagcagcttcttccattcaaccaactatgttcattgaactctgcttcttatttgcaac

SEQ ID NO: 1550 - DNA, 430 bp, Zea mays
  Clone ID: LIB3061-042-Q1-K1-F5
aacatccttctatcagtaccatcaatcatcattcatcttagtagtataggcaccaaatgaaatctgcaacatgaattatctaactccaaaaaccatgaagctggtgcttgtggttcttgctttcattgctttagtatcaagtgtttcttgtacacagacaggcggctgcagctgtggtcaacaacaaagccatgagcagcaacatcatccacaacaacatcatccacaaaaacaacaacatcaaccaccaccacaacatcaccagcagcagcaacaccaacaacaacaagttcacatgcaaccacaaaaacatcagcaacaacaagaagttcatgttcaacaacaacaacaacaaccgcagcaccaccaccaacaacaacaacaacagcaccaacaacaacatcaatgtgaaggccaacaacaacatcac

SEQ ID NO: 1551 - DNA, 433 bp, Zea mays
  Clone ID: LIB3061-042-Q1-K1-F6
gcgcccacgcgtccacggactcgcgggcataaacacacctgacgaagcgcagtatcaacgagctagcaacaatgggctgacgcgacattatgcgtccatgcgctcacagcgctcactgggagtgcagcacatgcattcatcagtccacaatgctaactacgttccaagtgctattatcacacagctgctcaatccaattacttacatgaggtgctaacacccagctgtgcaagcctatccgctgcaacaagcgctcgccgatagcgtgttagaacaaccattcgccccattacaacagcaatgcttggcacatctaaccatacaaaccatgggaacgcaatagcatcatgcgctgagccacctagccgatgcgaaccctatggcctacttgcaacaacagctgatcgcatacaacccacttgctttggcaaac

SEQ ID NO: 1552 - DNA, 308 bp, Zea mays
  Clone ID: LIB3061-042-Q1-K1-F7
aaaaataataattaaaataaaataaatataaaaaaataaatataaaaaaacaataattaataaattcaaaataaaaaataaacatatataataaaacaactataaataaataaaataaaaatatataaataatatataaaaaaattaaaaaaaaaaatataatataaaaaaaaaaaataataaatattataaaaataattattttaaatataaaataaaataataaaaataaaaaaatataattataatatacaaaattataaataataaaatataaaatatatatataaataaaaaaaatacataat

SEQ ID NO: 1553 - DNA, 166 bp, Zea mays
  unsure (1)..(166): unsure at all n locations; Clone ID: LIB3061-042-Q1-K1-G1
attttgagcattcagaaacacaccaagcgaagcacattagcaacaacgtaacaacaatggctaccaagatatgatccctccttgcgcttcttgcgctttttgcgagcgcaacanatgcgttcattattccacaatgctcacttgctccaagttccattattacaca

SEQ ID NO: 1554 - DNA, 380 bp, Zea mays
  Clone ID: LIB3061-042-Q1-K1-G10
gacgaaatcgcaaggatggtgaaggactcggagggtgacgtgaggtacctgatagagagcatccaccatcgctcggatctgcggaagaaggtggcagagaagtctcgcaattcagtaccgtcaagctcccagggtagtagagccgcgaagccaaggccgttccccgtgcctgatgggataccgaaaacgcaagaagagctcgctgaagaagaagaggcgttgatgccggagtctccgtacacgaggctgctgagaaggatgggaaggtaccctgattggtacaccccacgccctgatcatgagaccgactgaatcgagttgcccaccatcctagtgtcccttgtgggagtttttggagcatggtaatctgaagctccttt

SEQ ID NO: 1555 - DNA, 300 bp, Zea mays
  Clone ID: LIB3061-042-Q1-K1-G11
ggcggggggggcggcgctgtgctttgcgggcctgttggccccggccgtctgccaaagcgaggtctagcggcagaagctcatggacccgcagtgctgtcagcaggtccaccagagcccgctcgacgcgtgccgccagctcctcgaccggcagctaaccagcggcggcggcggcggcggcgttggcccgctcctgtggggcacccagctccctatgcagtgctgccagcagctccatgacgtgagccgccagtgccgctgcgccgccatccggagcatggtcaggggatacgaggaggccat

SEQ ID NO: 1556 - DNA, 371 bp, Zea mays
  unsure (1)..(371): unsure at all n locations; Clone ID: LIB3061-042-Q1-K1-G12
caactagcaacatagaaagcacaatagtgtaccaacaatggcagccaaaatattttgcggccttatgctccttggtatttctgcaagtgctgctacggcgaccattttcccgcaatgctcacaagctcctatagcttcccttcttcccccgtacctctcaccagcggtgtcttcggtatgtgaaaacccaattcttcaaccctacaggatccaacaggcaatcgcagctggcatcttacctttatcacccttgttcctccaacaatcatcagccctattacagcagttacctttggtgcatttattggcacanaacatcagggcacaacaactacaacaacttgtgctagcaaaccttgctgnctactctc

SEQ ID NO: 1557 - DNA, 244 bp, Zea mays
  Clone ID: LIB3061-042-Q1-K1-G2
gtgcaatcacacgtacatcagtaacaccatgaagactatgttcatcaatagctcctacgaccgctgtgccctaaccatcaccgtctgctccggaaccaccaactccttcactgtgaacgccactaacagcataaccaacaatcacttggccatgtgcaacaacacgaacagagccatgagcaacaccatggacagagccctgcgtcacagcattggcaactatatcagggtgatgacaagctgc

SEQ ID NO: 1558 - DNA, 302 bp, Zea mays
  Clone ID: LIB3061-042-Q1-K1-G3
cgtcgacgcacgcgtccgcgatcttcttcggctgttgaccgcccgtgcagtgctctacttgcttgggggcgtgcgtgagggacgcggtgaccgacttgcttgtcgtcagctgtgatggaggggcggatgctgcagactgctgcgcagctcgacgctggcggaccagctcgccgcggtcgctgaaggtcgggctccgcactgcgctgcgccacgttctggaagtgggtttcgtgaatctgatcggcgctttcaggtcagctctacattacagatggtggttgaaagcaaaaagggaacggatc

SEQ ID NO: 1559 - DNA, 419 bp, Zea mays
  unsure (1)..(419): unsure at all n locations; Clone ID: LIB3061-042-Q1-K1-G5
cgcgtccaggaacatacatagtgaagtacactagcaacatcttagcaccaatgggagccaagatttgtgccctccgtgccgtccttgctctttcagcaagcgctgctacctcgacttttattccacaatgctcacaacaatacctctctccggtgacagccgcgggatttcaatacccaactatacaatcctacatggtacaagaggccatccaagcaagcatcttacggtcattagcattaaccctncaacaaccatatgctctattgcaacagccatccttagtgcatctgtatctccaaagaatcgcggcacaacaactacaacaacagttgctaccaacaatcaatcaagtagttgcagcgaaccttgctgcttacctncagcaacaacagtttcttccattcaatcaactagct

SEQ ID NO: 1560 - DNA, 368 bp, Zea mays
  Clone ID: LIB3061-042-Q1-K1-E9
ataggagcttgtgagcaacatacctttatcgcccttgttgtttcaacaatcgccagcggtatctttggtgcagtcattggtacaaaccatcagggcacaacagctgcagcaactcgtgctacctctgatcaaccaagtagctctggcaaacctttctccctactctcagcaacaacaatttcttccattcaaccaactgtctacactgaaccctgctgcttatttgcagcaacaactattaccatttagccagctagctactgcctactctcagcaacaacaacttcttccatttaaccaattgcccgaactgacccccgctgcttatttgcagcaacaaattactactaccattttaccagctagct

SEQ ID NO: 1561 - DNA, 88 bp, Zea mays
  Clone ID: LIB3061-042-Q1-K1-D2
tataacggtgttaagcaataaaataccatacattatgatgtttgtactatgatatttgaataagaatactaattgtaattataatgct

SEQ ID NO: 1562 - DNA, 276 bp, Zea mays
  Clone ID: LIB3061-042-Q1-K1-D3
tcccggtcgacgacgcgtccgctgtttgtccgtcgggctggcccaggcagcacggagctgaccgtggagggaaggccatgcgaccagctgggcaggagaaacctcactgacagccccgtatttgacggccgtggccctgacgccagcctcgtggctcgcgtacagggagtcgctacccagatgggcgacgtgcgccagttgtacaccgtcgtgttccaggagaggccgctcaagggctccacgctcgtcaccgaaaggcccaatgacagaagggtc

SEQ ID NO: 1563 - DNA, 425 bp, Zea mays
  unsure (1)..(425): unsure at all n locations; Clone ID: LIB3061-042-Q1-K1-D4
atagaaagtggaatgcagtagcaacaacagagcaacaatggcgaccaggatattttgcgctgttatgctgcttgctctttctgcatgtgttgctaacgcgacaattttccctcaatgctcacaagctcctatagcttcccttcttcccccataccttccatcaatgatagcttcagtatgtgaaaacccagctcttcagccctataggctccaacaagcaatcgcagcaagcaacatacctttatcacccttgttgtttcaacaatcgccagccctatctttggtgcagtcattggtacaaaccatcaaggcacagcagctgcagcaactcgtgctacctgtgatcaaccaagtagctctggcanaccttttctcctactctcagcaacaacaaattcttccattcaaccaactgtctacactga

SEQ ID NO: 1564 - DNA, 426 bp, Zea mays
  Clone ID: LIB3061-042-Q1-K1-D5
gaccaactagcaacatagaaagcacaatagtgtaccaacaatggcagccaaaatattttgcttccttatgctccttggtctttctgcaagtgttgctaccgcaaccattttcccacaatgctcacaagctcctatagcttcccttcttcccccatacctctcaccagcggtgtcttcaatgtgtgaaaccccaattgttcaaccctacaggatccaacaggcaatcgcaacaggcatcttaccattatcacccttgttcctccaacaaccgtcagccctattacagcagttacctttggtccatttggtggcacaaaacatcagggcacaacaactacaacaacttgtgctagcaaaccttgctgcatactctcagcaacatcagtttcttccattcaaccaactggctgcattgaactctgctgc

SEQ ID NO: 1565 - DNA, 425 bp, Zea mays
  Clone ID: LIB3061-042-Q1-K1-D6
tccacgcgtgcgcttctatcagtaccatcaatcatcattcatcttaggagtataggcagcaaatcaaatctgcaacatcaattatctaactccaaaaaccatgaagctggtgcttgtggttcttgctttcattgctttaatatcaagtgtttcttgtacacagacaggcggctgcagctgtggtcaacaacaaagccatgagcagcaacatcatccacaacaacatcatccacaaaaacaacaacatcaaccaccaccacaacatcaccagcagcagcaacaccaacaacaacaagttcacatgcaaccacaaaaacatcagcaacaacaagaagttcatgttcaacaacaacaacaacaaccgcagcaccaccaccaacaacaacaacaacagcaccaacaacaacatcaatgtgaaggccaac

SEQ ID NO: 1566 - DNA, 422 bp, Zea mays
  Clone ID: LIB3061-042-Q1-K1-D7
aaaccacatgcgaatcgtatattgcctcttagtttatacatgtgaatatatgaaatatatgatgcatgtgttactagaattttcttattgtttttagtagcatatagtggtgggtttcgaagaacaatatggttttatggatccagctcaatagaataaggatcagttggattgcggtacgaaatcggagttcatacttcatataactatttcttattcgtgctgatattttttggtgttcatgtacctattcattatgcgtcgtttgcttggtacttgcacatgattctgtcgaattgtccgttacatggctcacaggttttggccccagttcattgatttgcttgttggtaccgctattgaccatccaatgcagtgttctcaaggtccaaagtacgtggaccttcagttggtgtaatcag

SEQ ID NO: 1567 - DNA, 427 bp, Zea mays
  Clone ID: LIB3061-042-Q1-K1-D8
ccagcaagcaacatagaaagtagaatccattagcaacaatagagcaagggtggcgaccgagagattttccctgcttatgctccttgctctttctacatgtgttgctaacgcgacaattttccctcaatgctcacaagctcctatagcttcccttcttcccccataccttccatcaattatagcttcagtatgtgaaaacccagctcttcaaccatataggcttcaacaagcaatcgcagcaagcaacatacctttatcgcccttgttgtttcaacaatcaccagccctatctttggtgcagtcattggtacaaaccatcagggcacaacagctgcagcaactcgtgctacctgtgatcaaccaagtagctctggcaaacctttctccctactctcagcaacaacaatttcttccattcaaccaactg

SEQ ID NO: 1568 - DNA, 390 bp, Zea mays
  Clone ID: LIB3061-042-Q1-K1-D9
cccacgcgtccgaaccgctccacgccctccccctccgcgcagagccagccaagccagccggccagtcagaagaggaaccggggagcggcagctgcagcggccgagggcggagcacgcgaggcatggatagataccaaagggtagagaagcctcggaatgacacgccaatcagccagaatgagatcagaatcactactcaggggaggatgaggaactatatcagctatgggatgtcgctgcttgaggaaaatggacatgatgagattagtatcaaggccatgggacgggccataaataagacagttatggttgttgaattgatcaagagaagggttggaggtcttcatcagaacactgctactgaatctgttgatatcacagacacatggg

SEQ ID NO: 1569 - DNA, 431 bp, Zea mays
  Clone ID: LIB3061-042-Q1-K1-E1
cgcgtgcggtattacatcagttacctttggtgcatttattggcacagaacatcagggcacaacaacgacaacaactggtgctagcaaacgttgctgcctactctcagcaacagcagtttcttccattcaaccaactagctgcattgaactctgcttcttatttgcaacaacaacaactaccattcagccagctacctgctgcctacccccagcaatttcttccattcaaccaaattggcagcattgaactctcctgcttatttacagcagcaacaactactaacaattaacccactaacttgtggtaaccctggtaacttcttgatacaaccaccagtggtggccgtctaacaacacccttggcctaacgcttgcacccttttacaactggaacaattggtggcattcaaccaacttgctttgacaaaccc

SEQ ID NO: 1570 - DNA, 210 bp, Zea mays
  Clone ID: LIB3061-042-Q1-K1-E10
cttacaactacaacaattgttgccctttgtaagaggggctttgacaaacccagcaggcggctaccaacaacacatgattggtggtgccctcttttagattgattattagttgaaattcaataataaagttttatggatgatgtatgtggccaaccagaaataagaaggtacatttccagattctaatgtgaaacagcattatacacaaaa

SEQ ID NO: 1571 - DNA, 310 bp, Zea mays
  Clone ID: LIB3061-042-Q1-K1-E11
cccacgcgtccgcaccaacgcaaattgcaccaagaaatccatcgagaggccgtcgacaggggaattaatggcgtcgtcgtctagcagcagccaccgccgcctcatcctcgcagccgccgtcctgctctccgtgctcgcggctgccagcgccagcgccgggacctcctgcgtgccggggtgggccatcccgcacaacccgctcccgagctgccgctggtacgtgaccagccggacctgcggcatcgggccgcgcctcccgtggccggagcttaaaaagagatgctgccgggagctggcggacatcccggcg

SEQ ID NO: 1572 - DNA, 345 bp, Zea mays
  Clone ID: LIB3061-042-Q1-K1-E12
caccaacgcaaattgcaccaagaaatccatcgagaggccgtcgacaggggaattaatggcgtcgtcgtctagcagcagccaccgccgcctcatcctcgcagccgccgtcctgctctccgtgctcgcggctgccagcgccagcgccgggacctcctgcgtgccggggtgggccatcccgcacaacccgctcccgagctgccgctggtacgtgaccagccggacctgcggcatcgggccgcgcctcccgtggccggagctgaagaggagatgctgccgggagctggcggacatcccggcgtactgccggtgcacggcgctgagcatcctcatggacggcgcgatccc

SEQ ID NO: 1573 - DNA, 378 bp, Zea mays
  unsure (1)..(378): unsure at all n locations; Clone ID: LIB3061-042-Q1-K1-E2
atcctccgaccgaatccgatgaagaggatcaacgtcgcggngatcatggagcacgagtggttcaagaagactacgtgcctgctgttccgcacgatgatgacgaagacgtccttcctagtccagctccctcgataaagccaatcgatgagccggcgcaagagaagtgttctcctatcaacgcttttcagttgatcgggatggcctctttcccttgacctttctggtttcttcgaggaagaggatgcagcgcaaagaaagattcggttcacttcgacgcacccacccaaagatctatttgacaagatcgaaaagcgtgtcatggagatgggattcaaagtccataggggggcaagcaagctcaaggtcttgaagaatagc

SEQ ID NO: 1574 - DNA, 259 bp, Zea mays
  Clone ID: LIB3061-042-Q1-K1-E4
aggaagcgaactggagagaagagagagagtgtcaagctcgtcgcgccggctgtagggtccttgacctgttcaccgcgtcgctgccgctcaatccacagatcatggcgaacagctcgctcttatgctggggcggtggccacggcggcgctcgccggcgtcagaggcgcgtggtgcgtgtgccggtcggacctgcggacgcgcgctgcagaagacgctggactacccttccggcgtcagaccgactgcaagcccatcctgc

SEQ ID NO: 1575 - DNA, 442 bp, Zea mays
  Clone ID: LIB3061-042-Q1-K1-E5
ctcacgagctcctatagctgcccttcttcccccataccttccatcaatgaccgcttcagtttgtgaaaacccaggccttcaaccctacaggctccaacaagcaatcgcaacaagcaacttacctttatcacccctgttctttcaacaatcgccagccctatctttggtgcagtcattggtacaaaccatcagggcacaacagctgcaacaactcgtgctaccagtgatcagccaagtagctctggcaaacctttctccctactctcagcaacaacaatttcttccattcaaccaactgtctacactgaaccctgctgcttatttaacacaacaacaactactaccattcagccagctagctactgcctactctcagcagcaacaatttcttccatttaaccaattggccgcactgaacccctctgcttatttccagcagcaa

SEQ ID NO: 1576 - DNA, 429 bp, Zea mays
  Clone ID: LIB3061-042-Q1-K1-E6
gagaccaactagcaacatagaaagcacaatagtgtaccaacaatggcagccaaaataggttgcctccttatgctccttggtctttctgcaagtgctgctacggcgaccattttcccgcaatgctcgcaagctcctatagcttcccttcttcccccgtacctctcaccagcggtgtcttcggtatgtgaaaacccaattcttcaaccctacaggatccaacaggcaatcgcagctggcatcttacctttatcacccttgttcctccaacaatcatcagccctattacaacagttacctttggtgcatttattggcacaaaacatcagggcacaacaactacaacaacttgtgctagcaaaccttgctgcctactctcagcaacagcagtttcttccattcaaccaactaggttcattgaactctgcttct

SEQ ID NO: 1577 - DNA, 292 bp, Zea mays
  Clone ID: LIB3061-042-Q1-K1-E7
gctgtggtgaaccctgtcgcctacttgcaacagcagttgcttgcatccaacccacttgctctggcaaacatagttgcatacgaacaacaacaacaattgcaacagtttctaccagcgctcagtcaactagccatggtgaaccctgccgcctacctacaacagcaacaactgatttcatctagccctctcgctgtggttaatgcacctacatacctgcaacaacagttgctgcaacagattgtaccagctctgactcagctagctgtggcaaaccctgctgcctacttgcaac

SEQ ID NO: 1578 - DNA, 423 bp, Zea mays
  Clone ID: LIB3061-042-Q1-K1-D11
tgcaacgcaacaacaacaacaacaacagtttctgccatcactgagccacctagccgtggtgaaccctgtcacctacttgcaacagcagctgcttgcatccaacccacttgctctggcgaacgtagctgcataccagcaacaacaacagctgcaacagtttatgccagtgctcagtcaactagccatggtgaaccctgccgtctacctacaactactttcatctagcccgctcgcggtgggcaatgcacctacgtacctacaacaacagttgctgcaacaaattgtaccagctctgactcagctagctgtggcaaaccctgctgcctacttacaacagttgctttcattcaaccaaatggctgggtcaaactctgctgcgtacctacaacagcgacaacagttacttaatccattggcagtggc

SEQ ID NO: 1579 - DNA, 375 bp, Zea mays
  unsure (1)..(375): unsure at all n locations; Clone ID: LIB3061-042-Q1-K1-B3
gcacagagaagacggcggcgacatctacacttgctgaccggcgccattccgtcggtgtgcgcttctcgccgataattatccctgcaccagtttgagttggagaagacgaacttccaccgtcttgggaccctataccctctcctttagttagcaatggatgttgcactaagagatcaccttagacggaggagagatgaggaggaggatgatatgatgctgnttttttcctatgctacatatattgggttctagttcanacatagtaagggagaagaagcgaaggcatacatcanagttatcttagaagggaggggctggttcgtgatacaaggattaaggtcgagggaaagctagcattcttcttatacatgctca

SEQ ID NO: 1580 - DNA, 372 bp, Zea mays
  unsure (1)..(372): unsure at all n locations; Clone ID: LIB3061-042-Q1-K1-B4
ggcccgacgcacgcgtccgcgtgagcctagcaattagctcatcgacttcagattggagaactcgacaccatgaaggtgctgatcgttgcccttgctctgctggcgctcgctgcgagcgccgcctccagtacaagcggcggctgtggctgccagacaccaccgtttcatctaccgcctccgttctatatgccgnctccgttctatctgccgccgcagcagcagccgcagccatggcaataccccactcaaccaccgcagctaagcccgtgccagcagttcggatcctgcggcgtcggcaagcgtcgcagcccgttcctgggccaatgcgtcgagttcctgaggcaccagtgcaacccggcggcgacgccctac

SEQ ID NO: 1581 - DNA, 158 bp, Zea mays
  Clone ID: LIB3061-042-Q1-K1-B5
cctgtagtatagccgctggctagctagctagttgagtcatttagcggcgatgattgagtaataatgtgtcacgcagcaccatgggtggcagtgtcagtgtgagcaatgacctgaatgaacaattgaaatgaaaagaaaaaaagtactccatctgttcc

SEQ ID NO: 1582 - DNA, 317 bp, Zea mays
  Clone ID: LIB3061-042-Q1-K1-B7
ctctgctgcttatttacagcagcaacaactactaccattcagccagctagctgatgtgagccctgctgccttcttgacacaacaacagttgttgccgttctacctgcacgctatgcctaacgctggcaccctcttacaactgcaacaattgctgccattcaaccaacttgctttgacaaactcaacagtgttctaccaacaacccatcattggtggtgccctcttttagattgcttatgagttatagttcaataatgaagttttttggatgatgtttgtggcgtcccagaaataagaaagtacatttctagattctt

SEQ ID NO: 1583 - DNA, 255 bp, Zea mays
  Clone ID: LIB3061-042-Q1-K1-B8
cagccatgatctaccttcaacccatcattgccggtgcacctctgcgagatcacttgtgaaacttcgatgaccattaaactgttgcgtctgatgcttgcggctatcgctttaatatcaagggtcatttgtacacagacaggcggctgcaactgtgctcaccatctaaacgatgcgcacttacatactccagcatgccatgatacacattttctatagcgtcaaccaccatcacatcattggccgcagcattaacac

SEQ ID NO: 1584 - DNA, 370 bp, Zea mays
  Clone ID: LIB3061-042-Q1-K1-B9
gctccttggtctttctgcaagtgctgctacggcgaccattttcccgcaatgctcgcgagctcctatagctgcccttcttcccccgtacctctcaccagcggtgtcttcggtatgtgaaaacccaattcttcaaccctacaggatccaacaggcaatcacagctggcatcttacctttatcacccttgttcctccaacaatcatcagccctattacatcagttacctttggtgcatttattggcacaaaacatcagggcacaacaactacaacaacttgtgctagcaaaccttgctgcctactctcagcaacagcagtttcttccattcaaccaactagctgcattgaactctgcttcttatttgcaacac

SEQ ID NO: 1585 - DNA, 226 bp, Zea mays
  Clone ID: LIB3061-042-Q1-K1-C1
cttcgatattttcgctgccgggagtgagacttcatcgacggtgctagcgtgggccatgtcagagctcgtcaggaacccacgggtgctgcacaaggcgcagtcagaggtgagggagacgttcaagggccaggaaaggctaaccgaaaacgacatgcccaggctgagctacctgaacctggtgatcaaggaggccctacggttgcacccgccggtgccactgttgttg

SEQ ID NO: 1586 - DNA, 433 bp, Zea mays
  Clone ID: LIB3061-042-Q1-K1-C11
ctatgacaacagttacctttggtgcatttattggcacaaaacatcagggcacaacaactacaacaacttgtgctagcaaaccttgctgcctactctcagcaacagcagtttcttccattcaaccaactaggttcattgaactctgcttcttatttgcaacaacaacaactaccattcagccagctacctgctgcctacccccagcaatttcttccattcaaccaactagcagcattgaactctcctgcttatttacagcagcaacaactactaccattcagccagctagctggtgtgagccctgctaccttcttgacacaaccacagttgttgccgttctaccagcacgttgcgcctaacgctggcaccctcttacaactgcaacaattgctgccattcaaccaacttgctttgacaaacccaacaatgttct

SEQ ID NO: 1587 - DNA, 358 bp, Zea mays
  Clone ID: LIB3061-042-Q1-K1-C12
gtggagccgcagcaccggtaccaggcgatcttcggcttggtcctccagtccatcctgcagcagcagccgcaaagcggccaggtcgcggggctgttggcggcgcagatagcgcagcaactgacggcgatgtgcggcctgcagcagccgactccatgcccctacgctgctgccggcggtgtcccccactgaagaaactatgtgctgtagtatagccgctggctagctagctagttgagtcatttagcggcgatgattgagtaataatgtgtcacgcatcaccatgggtggcagtgtcagtgtgagcaatgacctgaatgaacaattgaaatgaaaagaaaaaaagtactccatctgttcc

SEQ ID NO: 1588 - DNA, 359 bp, Zea mays
  unsure (1)..(359): unsure at all n locations; Clone ID: LIB3061-042-Q1-K1-C3
ttcaagggtctgcctggggtgctgtgggtgctccctgattcctacatcgacgtgaagagcaangactacngaggtgacaagtacgtgaacggcgagataatcccctgcacgtacccgacgtaccagccgaaggagcggaggacgtccaagtacgagagcaggcggtacgagaggcggagagatgggccaccggcggccagcaggaaaccgaggcagcaggcaccagctcagactcagaccgagtcggcgtcttcgtgacgagctctgcaggcattttgtccacgtacctacctacctagaagtagaacaagagaagaagacgcctaaaattctgtcgcattgggcaccgggtactggac

SEQ ID NO: 1589 - DNA, 330 bp, Zea mays
  Clone ID: LIB3061-042-Q1-K1-C4
tgcgccttgcagctgtcacatctgtgtcctcgctcctgccgcgcgatgacctaacgctcatgtgctccacaaacccctccctcatggcgcatgctaccacgtggtggggccgcctggccgagcttgcgctggactctgcagacgctgtttccgccggtgcgtttgaggctcttgcacggctgttccaggagctagaggggcgccgcatgagccggctagctggagacaagcttgttgatggagaaggtgcgcttgcagtgcgtgcccagtgggcggctgatgccattgatttcatttggtcaaggcgcaacatgctgattgcgcgctcta

SEQ ID NO: 1590 - DNA, 443 bp, Zea mays
  Clone ID: LIB3061-042-Q1-K1-C5
ccaactagcaacatagaaagcacaatagtgtaccaacaatggcagccaaaatattttgcttccttgggctccttggtctttctgcaagtgttgctaccgcaaccattttcccacaatgctcacaagctcctatagcttacctacttaccccatacctctcaccagcggtgtcttcaatgtgtgaaaacccaattgttcaaccctacaggatccaacaggcaatcgcaacaggcatcttaccattatcacccttgttcctccaacaaccgtcagccctattacagcagttacctttggtccatttggtggcacaaaacatcagggcacaacaactacaacaacttgtgctagcaaaccttgctgcatactctcagcaacatcaggttcttccattcaaccaactggctgcattgaactctgcttgctatttgcaacaacaatta

SEQ ID NO: 1591 - DNA, 193 bp, Zea mays
  Clone ID: LIB3061-042-Q1-K1-C6
gacgcacgcgtccgaatcgctaatgcactctgctcgcccgctgagtcgctgcgcctcgcagctgtcacatctgtgtcctcgatactcccgcgcgaagacctaacgcttatgtgctgcacaaacccctccctaatggcgcatgctaccacgtctggaggccgactggccgagcttgggcctgactatgcagacg

SEQ ID NO: 1592 - DNA, 415 bp, Zea mays
  unsure (1)..(415): unsure at all n locations; Clone ID: LIB3061-042-Q1-K1-C7
gacacttaaaaatgcttggaggttatcttgagttcttcatgaatcgcgatcttgcttgaacttatgtgagtttgaagagagaacttgagaatttaatccattgcaagctccaaaacccaaggatggatatccaaacgagtgaagagctgctatcagccatccgtttgctggtgactgaagatccatgcagtgggcggttcgtgtacggccgacaggagccaagatcaaagaaagcaaagacgatgctttcgccatcctctctgagtgaggctggtggcaacggaggggataatgccaagaaccagctccagacttacctgacccgggccgggcacagcaaccncacctacaagacgaagcagatcaagagctatctcttcagatcgacgggtgagttcaacggcatgcagttcgt

SEQ ID NO: 1593 - DNA, 429 bp, Zea mays
  Clone ID: LIB3061-042-Q1-K1-C8
acgcgcaatgctcgcaagctcctatagcttaccttcgtccgccgtacctctgaccagcggtgtcttcggtatgtgaaaacccaattcttcaaccctacaggatccaacaggcaatcgcagctggcatcttacctttatcacccttgttcctccaacaatcatcagccctattacaacagttacctttggtgcatttattggcacaaaacatcagggcacaacaactacaacaacttgtgctagcaaaccttgctgcctactctcagcaacagcagtttcttccattcaaccaactaggttcattgaactctgcttcttatttgcaacaacaacaactaccattcagccagctacctgctgcctacccccagcaatttcttccattcaaccaactagcagcattgaactctcctgcttatttacagcagc

SEQ ID NO: 1594 - DNA, 391 bp, Zea mays
  Clone ID: LIB3061-042-Q1-K1-C9
gaatggcaaaatggttggaagcaagcccctttatgtagctcttgcgcagcgtaaagaggacagaaaggcaaagctacaggcacaattttcacaaatgcgtcctgttgcaatggcgccttcagtaggtcctcgcatgcccatgtttccacctggtgtccctggagttggtcagcagctgttctatggtcagccaccaccagccttcatcaaccctcaggctggatttgctttccagcaacctctgatgcctggtatgaggcctggtggtccaatgccgaactttatgatgcctatggttcagcaaggacagcaaccacagcgtcctgctggtagacgtgctggtggaatgcagcagcccatgccaatgggtggtcagcaacaggtgttccct

SEQ ID NO: 1595 - DNA, 381 bp, Zea mays
  unsure (1)..(381): unsure at all n locations; Clone ID: LIB3061-042-Q1-K1-D1
gcaacatagaaagcacaatagtgtaccaacaatggcagccaaaatattttgcctccttatgctccttggtctttctgcaagtgctgctacggcgaccattttcccgcaatgctcgcaagctcctatagcttcccttcttcccccgtacctctcaccagcggtgtcttcggtatgtgaaaacccaattcttcaaccctacaggatccaacaggcaatcacagctggcatcttacctttatcacccttgttcctccaacaatcatcagccctattacatcagttacctttggtgcatttattggcacanaacatcagggcacaacaactacaacaacttgtgctagcaaaacctgctggctactctcagcaacagcaggttct

SEQ ID NO: 1596 - DNA, 377 bp, Zea mays
  unsure (1)..(377): unsure at all n locations; Clone ID: LIB3061-042-Q1-K1-D10
tcaccatcgagaaggacgtatacgacaacgtcgcgcacgcgttcgtgaagatcctacgcgacgagggcccgtcggagctgtaccgtgggctgacacccagcctgatcggcgtggtgccgtacgcggcctgtaacttctacgcctacgagacgctgaagcggctctaccgtcgcgcgaccgggcggcgtcccggcgcggacgtgggccccgtggcgacgctgctcatcgggtcggcggcgggcgccatcgccagctcggccacgttcccgctggaggtggcccgcaagcagatgcaggtgggcgctgtgggcgggaggcaggtgtaccagaacgtcctncacgctatctactgcatcctcaagaaggagggcgccggc

SEQ ID NO: 1597 - DNA, 202 bp, Zea mays
  Clone ID: LIB3061-042-Q1-K1-B2
cggacagggctctcgcgacgcgatcggtcatggcggcgtctctgcgggcctcgtcctggctccgctcgcgcgtcctctcgttctcctcggggtgttctctgtgtccgtggcgtctcctcctctcctcacctgtccactcggacgccccccaccagaccgaaaccctcgctttcgacgagatccagctgtcgccggagaagcc

SEQ ID NO: 1598 - DNA, 425 bp, Zea mays
  Clone ID: LIB3061-024-Q1-K1-D9
cgatgttcagcattcaaaaacacaccaagtttaatcgcactagcaacgacctaacaccaaggggtgccaagatattagccggccttgcgcttcttgcccttttagtgagcgcaacaaatgcgttcattattccacagtgctcacttgctcctagtgccattattccacaggtcctcccaccagttacttcaatgggcttcgaacattcagccgtgcatgcctacaggctacaactagcgcttgcggcgagcgccttacaacaaccaattgcccaattgcaacaacaatccttggcacatctaaccctacagaccattgcaacgcaacaacaacaacagcaacagtttctgccatcactgagccatctagccgtggtgaaccctgtcacctacttgcaacagcagctgcttgcatccaacccactt

SEQ ID NO: 1599 - DNA, 270 bp, Zea mays
  Clone ID: LIB3061-024-Q1-K1-E1
cgccatctcaccggcggcgggcctgcggccggcaaccggaggcgatggcgagctcgggtgtggcggcggacatggagctggaccgccccaacctggaggactacctcccgcccgactcgctcccgcaggaggcgcccaggaatctccatctgcgcgatctgcttgacatctcgccggtgctaaccgaggcagcgggtgccatagtcgatgattcattcacgcgttgctttaagtcgaattctccagaactcatggaacctggaacataaa

SEQ ID NO: 1600 - DNA, 429 bp, Zea mays
  Clone ID: LIB3061-024-Q1-K1-E10
cataccaactagcaacatacatagtgaagtacactagcaacatcttagcaccaatgggggccgggatttttgccctccttgccctccttgctctttcagcaagcgctgctacctcgacttttattccacaatgctcacaacaatacctctctccggtgacagccgcgggatttcaatacccaactatacaatcctacatggtacaagaggccatccaagcaagcatcttacggtcattagcattaaccctccaacaaccatatgctctattgcaacagccatccttagtgcatctgtatctccaaagaatcgcggcacaacaactacaacaacagttgctaccaacaatcaatcaagtagttgcagcgaaccttgctgcttacctacagcaacaacagtttcttccattcaatcaactagctggggtga

SEQ ID NO: 1601 - DNA, 439 bp, Zea mays
  Clone ID: LIB3061-024-Q1-K1-E11
ccggattcccggtaaagaaccaccggcatgcccaatccccatggcctaccgacggtagcagggagtcgccggcgccgatcaccgggacgcctatcacgaggactgcgcctcgtgccacggctacacgtcgttcaaaagcatagatgagcccaagctcgggctgtggcgaactctggctaccaaagccaaggggatcctcgacgaggacgggttggcgcataagttcgaagacttgcggaaagaacggcctcgtagcgactccactgcatccagcatagatcaggctcctaactctcgctggtcatttgagaaccactggaaggccggagacgccatgtcacggatcagacccgaggctctttctgcttctgccaaccagctcagtggaaaaatgaagaatgctttggcagaagggctcacgatcgtggataacaagacc

SEQ ID NO: 1602 - DNA, 426 bp, Zea mays
  Clone ID: LIB3061-024-Q1-K1-E12
ggagttggaaaaactagctaatgggaatagcaagattcctggtacattagatgagtgtaggaagcttgtcgttccaataattgaggagtattttagtacaggagatgtggaattggcagcttctgagctgaagtgtcttggatctgatcagtttcatcattactttgtgaagaagcttatatctatggcaatggatcgccatgacaaagaaaaagaaatggcatcgattctgttatcatctttgtatgctgatctactgagctcctacaggatcagtgaaggttttatgatgcttctggagtctacagaagatctaactgttgatataccggatgctactgatgtattggcagtttttattgcacgggctattgttgatgaaattttgcctcctgttttcctcactcgagctagggcactacttcc

SEQ ID NO: 1603 - DNA, 267 bp, Zea mays
  Clone ID: LIB3061-024-Q1-K1-E2
cagaaacacaccaagcgaagcgcactagcaacgacctaacaacaatggctaccaagagattagccctccttgcgcttcttgccctttttgtgagcgcaacaaatgcgttcattattccacaatgctcacttgctcctagtgccattattccacagttcctcccaccagttacttcaatgggcttcgaacacctagctgtgcaagccaacatgcaacaacaagcgcttgcggcgagcgtcttacaacaaccaattgtcccaattgcaa

SEQ ID NO: 1604 - DNA, 273 bp, Zea mays
  Clone ID: LIB3061-024-Q1-K1-E4
cacccgtgcgcccaggcaggcaggtcggcgattaggttaggaagaccgaagaccgagccgggggggggctcgggacgggaacgggacacgaccccaaaatctcagatccttcctgcccgcccgcccgtgcccgtcgacgcgtcgttcttgccggccgcgcctcacctccgccctctcctcctccagggggatcggatacgccacaggctgcgcgatggtgctgtgggtcttcggctacggctccctcatctggaaccccggcttcgacttcga

SEQ ID NO: 1605 - DNA, 263 bp, Zea mays
  Clone ID: LIB3061-024-Q1-K1-E6
aaaaaaggatcaaggtgggagaaacaaaacacaaggcggcgtccgcagcttccccactccaggttgggtgtttccgactccggtgactccaccaccagcaacccgtgcagcgagcgcactccgaccatcgccatgtcgaggcgcggcgactgggtctacgagaacaacggcgggacctgcgtggccatcgccggcgctgattactgtgtcgtcgctgcggacacccgcctctctgtaggatacagtatcctcacgccgtgatc

SEQ ID NO: 1606 - DNA, 263 bp, Zea mays
  Clone ID: LIB3061-024-Q1-K1-E7
cagattgacaaccaaatgcctgctcaatagtcagcagagcagtatgaaaaggtgaagggctttaaaggaatgctggagcgcactttgcatttcctgcaagttaacaagagcaacattcatccaggtttgagggaaaaaatccccatttacgagaggcaaattctcagtatcctaagttcacaaagaaggaaacctgtgcaggcacctgggcagcaaacgtttcagcaatctagtgggcaagctcctagctctaacatttcaca

SEQ ID NO: 1607 - DNA, 258 bp, Zea mays
  Clone ID: LIB3061-024-Q1-K1-E8
cccaggcaggcaggtcggcgaggaggtctaggaagaccgaagaccgagccgggggggggctcgggacgggaacgggacaggaccccaaaatctcagatccttcctgcccgcccgcccgtgcccgtcgacgcgtcgttcttgccggccgcgcctcacctccgccctctcctcctccagggggatcggatacgccacaggctgcgcgatggtgctgtgggtcttcggctacggctccctcatctggaaccccggcttcga

SEQ ID NO: 1608 - DNA, 419 bp, Zea mays
  Clone ID: LIB3061-024-Q1-K1-E9
caagcggcagtgcgtagagaggatcgtccaacagaacagcatgaagatggtcatcgggctggtcgtgtgcctggctctgtcagctgccagcgcctctgcaatgcagatgccctgcccctgcgcggggctgcaaggcttgtacggcgctggcgccggcctgacgaccatgatgggcgccggcgggctgtacccctacgcggagtacctgaggcagccgcagtgcagcccgctggcggcggcgccctactacgcccggtgtgggcagccgagcgccatgttccagccgctccggcaacagtgctgccagcagcagatgaagatgatggacgtgcagtccgtcgcgcagcagctgcagatgatgatgcagcttgagcgtgccgctgccggcagcagcagcctgtacgagccagctctgatgc

SEQ ID NO: 1609 - DNA, 267 bp, Zea mays
  Clone ID: LIB3061-024-Q1-K1-F1
gcacaatagtgtaccaacaatggcagccaaaatattttgcctccttatgctccttggtcttggctgcaagtgctgctacggcgaccattttcccgcaatgctcgcaagctcctatagcttcccttcttcccccgtacctctcaccagcggtgtcttcggtatgtgaaaacccaattcttcaaccctacaggatccaacaggcaatcgcagctggcatcttacctttatcacccttgttcctccaacaatcatcagctcctattacaa

SEQ ID NO: 1610 - DNA, 440 bp, Zea mays
  Clone ID: LIB3061-024-Q1-K1-F10
gctgccgctgctcaagcccgtggaggagtgctggcagccggcggacttcctcccggactcctcgtccgaggtgttcgggcacgaggtccgcgagctgcgcgcccgcgccgcggggctccccgacgagtacttcgtcgtgctcgtgggcgacatggtcacggaagaggcgctgcccacgtaccagaccatgatcaacacgctcgacggcgtccgcgacgagaccggcgccagcaactgcccctgggcggtctggacgcgcgcctggaccgccgaggagaaccgccacggcgacatcctcggcaagtacatgtacctatccggccgcgtcgacatgcgcatggtcgagaagaccgtccagtacctcatcggctccggcatggatcccggaacggagaacaacccgtacctgggcttcgtgtacacgagcttccaggagcgcg

SEQ ID NO: 1611 - DNA, 154 bp, Zea mays
  Clone ID: LIB3061-024-Q1-K1-F11
acgcaaccaaatataccacatcaagtatttatttccaaaaaccatgaagctggtgctggtagggtcatactttcattgcttaagcttcttgctcttgctgcacgcatacataactctacaattttccctcatatgctcacaagctcctatagat

SEQ ID NO: 1612 - DNA, 391 bp, Zea mays
  Clone ID: LIB3061-024-Q1-K1-F12
ctgctatcaatgctatcaatcatcatttattttagtagtataggcaccaaatcaagtgggggcatcaattatctaactccaaaaaccatgaagctggcgcttgtggttcttgctttcattgctttattatccattgtttattgtacacagtcaggcagctacaactgctattaccaccgctaccatcatccgtacatcgttcacaactcatgatacaacaaccaccaccactagcgataaccaacacttctgcatactctcaaccacacccaacaattagtttacatgcaatcacttaatcgtaatctgctacttgattgcaacgtccaccactaccatccctaccgctacatgatcactaacaacagcaactacttcacttacagcaact

SEQ ID NO: 1613 - DNA, 270 bp, Zea mays
  Clone ID: LIB3061-024-Q1-K1-F2
gacccacaccacccatgcaccgaatcaagtacgacgcctattaatttacgcagaccgaacaccaaccccggggggggctaataacaggaacgggacaccaccccataatctcacatccttcctcaccacatcgcccgtaccattccacacatatctcttgccagacgcccctcacatccgcactctcctcctccagacccatcagatacacaacatgatccaccatgatgctgacaaatttctcatcccactccctcatctcgcacccca

SEQ ID NO: 1614 - DNA, 148 bp, Zea mays
  Clone ID: LIB3061-024-Q1-K1-D8
cgccggcctgacgacaacgatgcacacccgcgcactataccactacgctgactacctgatacagccataatgcaacacgttctccgaccagccatactactccgcttgtaacaagtagctctccatgctacaatccatcaaccaacac

SEQ ID NO: 1615 - DNA, 268 bp, Zea mays
  Clone ID: LIB3061-024-Q1-K1-F3
attttgagcattcagaaacacaccaagcgaagcgcactagcaacgacctaacaacaggggctaccaagatattagccctccttgcgcttcttgccctttttgtgagcgcaacaaatgcgttcattattccacaatgctcacttgctcctagtgccattattccacagttcctcccaccagttacttcaatgggcttcgaacacctagctgtgcaagccaacatgcaacaacaagcgcttgcggcgagcgtcttacaacaaccaattgg

SEQ ID NO: 1616 - DNA, 262 bp, Zea mays
  Clone ID: LIB3061-024-Q1-K1-F4
ggtctttctgcaagtgctgctaccgcatccattttcccacaatgctcacaagctcggatagcttcctttcttcccccatacctctcaccagcggtgtcttcagtatgtgaaaacccaattcttcaaccctacaggatccaacaggcaatcgcagcaggcatcttacctttatcacccttgttcctccaacaaccgtcagccctattacagcagttacctttggtgcatttgttggcacaaaacatcaaggcacaacaactac

SEQ ID NO: 1617 - DNA, 246 bp, Zea mays
  Clone ID: LIB3061-024-Q1-K1-F5
agctccgaggaaccaatgcacatacaagcgcactagcgacacatgacgggggtaaatagttacctatcttgactcttgccctagtgctatgcacaaagctttcattttgctagtaggcacttacatcctagtgccattattccacagtttctcccaccagttacttcaatgggcttcgcacacctatctgagcatgccaacatgcaccagcaagcgcttgtggcgagcgacttacaacaaccaatt

SEQ ID NO: 1618 - DNA, 222 bp, Zea mays
  Clone ID: LIB3061-024-Q1-K1-F6
tcgcgagctagacgctgctccctctggatttgtccgacactgccgacatgctggggtgggttgatgacgaggaggatgcctctgactatcggtgtgttgagtatgtgaaaaccttgttgttggatggtatcggatacaacgaggagggccagcaggcagtgcacctgtattacactatgacctagtacagcgagagctggacacgacagcgagcacgacaag

SEQ ID NO: 1619 - DNA, 393 bp, Zea mays
  unsure (1)..(393): unsure at all n locations; Clone ID: LIB3061-024-Q1-K1-B9
acgaacaagcaacatagaaagtggaatccagtagcaacaatagagcaacaatggcgaccgggatggtttccctccttatgctccttgctctttctgcatgtgttgctaacgcgacaattttccctcaatgctcacaagctcctatagcttcccttcttcccccataccttccatcaatgatagcttcagtatgtgaaaacccagctcttcaaccctataggctccaacaagcaatcgcagcaagcaacatacctttatcacccttgtttcaacaatcgccagccctatctttggtgcagtcattggtacaaaccatcaaggcacagcagctgcagcaactcgtgctacctgtgatcaaccaagtagctctggcaaacctttcntcctactatc

SEQ ID NO: 1620 - DNA, 263 bp, Zea mays
  Clone ID: LIB3061-024-Q1-K1-C1
atacagtggaatccagacccagcaattgagcatcaatggcgaccaagatattttcgcggcggtgctccttgctcttgctacatgtgttgctaacgcgacaatgttccctcaatgctcacaagctcctatagcttaccttcttgcgctataccttccatgaattatagctctaatatgtgcaaaccgagctcttcaaccatataggcttcaacaagcaatcgcagcaggcaacatacctttatcgcccttgacgaattcaacaa

SEQ ID NO: 1621 - DNA, 260 bp, Zea mays
  Clone ID: LIB3061-024-Q1-K1-C3
atagaaagcacaatagtgtaccaacaatggcagccaaaatattttgcctccttatgcgccttggtctttctgcaagtgctgctacggcgaccattttcccgcaatgctcgcaagctcctatagcttcccttcttcccccgtacctctcaccagcggtgtcttcggtatgtgaaaacccaattcttcaaccctacaggatccaacaggcaatcacagctggcatcttacctttatcacccttgttcctccaacaatcatca

SEQ ID NO: 1622 - DNA, 269 bp, Zea mays
  unsure (1)..(269): unsure at all n locations; Clone ID: LIB3061-024-Q1-K1-C4
gtgatggcagattatggttacagcattgagcacattctcatggttgatatcatcccggacggtgctgttcgtaagggaatgaacgacataaatgcagcccaaaggcttcaactggcaagtgtttacaagggagaagcagagaagatccttatggtgaagaaagcggaggcagaagcagaggcgaaatatctttctggtgtcggtatcgctaaacagcggcaggcgataaccgacggccttagagagaacatncctcgaacttctcacaa

SEQ ID NO: 1623 - DNA, 260 bp, Zea mays
  Clone ID: LIB3061-024-Q1-K1-C5
gaccaactagcaacatagaaagcacaatagtgtaccaacaatggcagccaaagtatggtgcttccttatgctccttggtctttctgcaagtgttgctacctgaaccattttcccacaatgctcacaagctcctatagcttccctacttcccccatacctctcaccagcggtgtcttcaatgtgtgaaaccccaattgttcaaccctacaggatccaacaggcaatcgcaacaggcatcttaccattatcacccttgttcc

SEQ ID NO: 1624 - DNA, 262 bp, Zea mays
  Clone ID: LIB3061-024-Q1-K1-C6
gcggtgttcttgggattattgagaatccggtgtctatcaaaagtatagaatgtgcggtcggagacaaaggttttgaagagggatggatgattccacgacctccacttcaaagaacaggaaggaaggtggccattgttggcagtggaccatctggtttggctgctgcagatcaactaaataaaatgggccacttcgtaactgtgttcgaacgtgcagatcgaattggaggtttaatgatgtatggtgtgccaaacatgaagac

SEQ ID NO: 1625 - DNA, 157 bp, Zea mays
  Clone ID: LIB3061-024-Q1-K1-C7
cgctacgcacaaacccagcagcgtactaccaacaacccatcattggtggtgcccattttgacatctcatacgagtgggacttcaataatgaagtgctacggctgacgtttgccgctaacgataaatagcaacgatcatttctaaaataacaacatac

SEQ ID NO: 1626 - DNA, 246 bp, Zea mays
  Clone ID: LIB3061-024-Q1-K1-C8
atccaatccagatcagcaaagcggcagtgcgtagagaggatcgtcgaacagggcaggatgaagatggtcatcgttctcgtcgtgtgcctggctctgtcagctgccagctcctctgcaatgcatatgccctgcccctgcgcggggctgcagggcttgtaccgcgctggcgccggcctgacgacgatgatgggcgcctgcggtctgtacccctacgcggagtacctgaagcagccgcagtgcatcccg

SEQ ID NO: 1627 - DNA, 424 bp, Zea mays
  Clone ID: LIB3061-024-Q1-K1-C9
gtctgagtcatccagaggtgtgcaagaaaactgccagtttaattggtgtgcaaggaggctgggagtttattggggtttaatggttttgttggttatgtgaataagtttaatgtgataattttaatgcagcattaggttcaacttacttccattgaatcaacacccctgccactacttattaactggcttgtgtgattagagcaatcctatccaacattgtcaactgacttgtgtggtttaattctataaactatgagtatggattttccttagattagaaaaaaaggtgaatcatttcttagtccactgtctgtcatacacagtgctagagagtagagagtagagacactgtctgtcatacgcactgttcattatgtatgtgaattcgccaggagggtcaatgacagcttgtaataccttatct

SEQ ID NO: 1628 - DNA, 266 bp, Zea mays
  Clone ID: LIB3061-024-Q1-K1-D1
ctcaatgctcacaagctcctatagcttcccttcttcccccataccttccatcaatgagagctgcagtatgtgaaaacgcagctcttcagccctataggctccaacaagcaatcgcagcaagcaacatacctttatcacccttgttgtttcaacaatcgccagccctatctttggtgcagtcattggtacaaaccatcagggcacagcagctgcagcaactcgtgctacctgtgatcaaccaagtagctctggcaaaccatttctcc

SEQ ID NO: 1629 - DNA, 423 bp, Zea mays
  Clone ID: LIB3061-024-Q1-K1-D10
cgaagaacccgatcgacaccatgagggtgttgctcgttgccctcgctctcctggctcgcgcggggagcgccacctccacgcatacaagcggcggctgcggctgccagccaccgccgccggttcatctaccgccgccggtgcatctgccacctccggttcacctgccacctccggtgcatctaccaccgccggtccacctgccgccgccggtccacctgccaccggcggtccatgtgccgccgccggttcatctgccgacgccaccatgccactaccctactcaaccgccccggcctcagcctcatccccagccacacccatgcccgtgccaacagccgcatacaagcccgtgccagctgcagggaacctgcggcgttggcagcaccccgatcctgggccagtgcgtcgagtttctgaggcatc

SEQ ID NO: 1630 - DNA, 422 bp, Zea mays
  Clone ID: LIB3061-024-Q1-K1-D11
tcttggcctttttctctccaccccaaagcttgtgcacgcgcgcaccgtccctcaccggcgggctctgctcctcttccgccgccgcaggatctcgtatcgccggagaccatgtaccgcgccgccgggagccacctccgctccctcaagcatcatggtgcttctaggcttgccagtacaagtgttgcgaagcagtcctcaggtggtctgttcagctggcttcttggtggaaaatcaagcgaactccctccccttgatgttccactcccaggcattagcattccctcacctctaccagattttgtagagccatctaagacaaaagtcactactcttccaaatggcgtcaagatcgcctcggagacatcatcgagcccagcagcatctgtgggtctgtacattgactggggttccatttacgaaac

SEQ ID NO: 1631 - DNA, 342 bp, Zea mays
  Clone ID: LIB3061-024-Q1-K1-D12
tatattatattttcttttttttgtttccaccaaacgcacagccggattattgaaactaacgtaggacattagataaatacggaaatattgcatgcatgaaacattaattatactgatgatcgaacacgacacacaacatttgagcacccatgcaagctgctctttcattcaaaagattcccaggagcagagactacgacaacttccttctgatcctgcatgcatgtaaccctctaaccacgaaagacgttgccgcaactaggctcatgatcctacttctaattggaagtaaggccggcaacgaaattaccataaacgatgctacaaacgcccaatccaacaa

SEQ ID NO: 1632 - DNA, 267 bp, Zea mays
  Clone ID: LIB3061-024-Q1-K1-D2
ctccggtgcatctcccaccgccggtccacctgccgccgccggtccacctgccaccgggggtgcatgtgccgccgccggttcatctgccgccgccaccatgccactaccctactcaaccgccccggcctcagcctcatccccagccacacccatgcccgtgccaacagccgcatccaagcccgtgccagctgcagggaacctgcggcgttggcagcaccccgatcctgggccagtgcgtcgagtttctgaggcatcagtgcagcccga

SEQ ID NO: 1633 - DNA, 261 bp, Zea mays
  Clone ID: LIB3061-024-Q1-K1-D3
gccgcccttttttttttttttttatttactccaccactacaggtccatttatttacgcgcagtataaaattaccgatcggtacttaactacacacgcaagcaattagttcatgcgcttattaggttgtgccactggccaccactacactacattacactagcacaagcaagcagctacacatacttgtccatatcacataaacgaaacagcatatataagaagatgtcccaacatctttgcaccacgcgctgagatcaggg

SEQ ID NO: 1634 - DNA, 261 bp, Zea mays
  Clone ID: LIB3061-024-Q1-K1-D5
caacaactaccattcagccagctacctgctgcctacccccagcaatttcttgcattcgaccaactggcagcattgaactctcctgcttatttacagcagcaacaactactaccattcagccagctagctggtgtgagccctgctaccttcttgatacaaccacagttgttgccgttctaccagcacgctgcgcctaacgctggcaccctcttacaactgcaacaattgctgccattcaaccaacttgctttgacaaaccca

SEQ ID NO: 1635 - DNA, 264 bp, Zea mays
  Clone ID: LIB3061-024-Q1-K1-D6
gcagcttctgcttgctctggggggaaggagagagagagagcgagagagatcgggtggagaggctagctaggtggtcctcgaacgaagatgttggcggtgttcagcggtcaggtggtggaggtgccggctgatctggtggcggcgggcagccggacgccgtcgcccaagacgaaggcgtcgcagctggtggggcgcttcctggccgcctccgagccggccgtgtccgtgcagctcggcgaccacggccatcctcgcctactccac

SEQ ID NO: 1636 - DNA, 260 bp, Zea mays
  Clone ID: LIB3061-024-Q1-K1-B8
ggtgcattgaactctgctccttatctgcaacaacaacaactaccattcatccgggtgcctgctgcctacgccgagcaatttcttccattcaacgcaactggcagcattgaactctcctgcttatttacagcagcaacaactactaccattcatccagatagctggtgtgagccctgctaccttcttgatacatccacagttgttgccgttctaccatcacgctgcgcctaacgctggcaccctcttacaactgcaacaat

SEQ ID NO: 1637 - DNA, 258 bp, Zea mays
  Clone ID: LIB3061-024-Q1-K1-D7
agcggcagtgcgtagagaggatcgtcgaacagaacagcatgaagatggtcatggttgtggtcgtgtgcctggctctgtcagctgccagcgcctctgcaatgcagatgccctgcccctgcgcggggctgcagggcttgtacggcgctggcgccagcctgacgacgatgatgggcgcctgctggctgcacccatacgcggagtacctgatgcagccgcagagcagcccgctggctgcggcgccctactacaccaggtgtg

SEQ ID NO: 1638 - DNA, 375 bp, Zea mays
  Clone ID: LIB3061-024-Q1-K1-A10
ctgtttctgccaactatggcatgtaggccgagcttctcaccaagtatatcaggcgggggctggtgctccgatatcctcaactgataagccaatatcatcaagatggaggatactgatgcccgatggatcctatggcaagtatccaactccgaggcgcctagccacatccgagataccagaaattgttgagcaataccgacaagcagccataaacgccatcaaagcaggcttcgatggcatcgagatccatggcgcccatggctacctcatcgatcagttcctcaagggcggtatcaacgaccggactgacgagtacagcggctcactctccaaccgctgccggatcctgctggatgcgacccgagccagggtctc

SEQ ID NO: 1639 - DNA, 370 bp, Zea mays
  Clone ID: LIB3061-024-Q1-K1-A11
cgcttatttgcagcaacaacaactactaccattcagccagctagctgctgcctaccgccggcgatttcttccattcaaccaactggcagcattgaactctcatgcttatgtacaacaacaacaactactaccattcagccagctagctgctgtgagccctgctgccttcttgacacagcaacatttgttgccgttctacctgcacactgcgcctaacgttggcaccctcttacaactgcaacaattgctgccattcgaccaacttgctttgacaaacccagcagtgttctaccaacaacccatcattggtggtgccctcttttagattgcttatgagttatagttcaataataaagttttttttgctgat

SEQ ID NO: 1640 - DNA, 273 bp, Zea mays
  Clone ID: LIB3061-024-Q1-K1-A2
gtcctccagtccatcctgcagcagcagccgcaaagcggccaggtcgcggggctgttggcggggcagatagcgcagcaactgacggcgatgtgcggcctgcagcagccgactccatgcccctacgctgctgccggcggtgtcccccactgaagaaactatgtgctgtagtatagccgctggctagctagctagttgagtcatttagcggcgatgattgagtaataatgtgtcacgcatcaccatgggtggcagtgtcagtcgtgagcaatttgg

SEQ ID NO: 1641 - DNA, 268 bp, Zea mays
  unsure (1)..(268): unsure at all n locations; Clone ID: LIB3061-024-Q1-K1-A3
cagcaagcaacatagaaagtagaatccattagcaacaatagagcaacaatggcgaccgagatgattttccctccttatgctccttgctctttctacatgtgttgctaacgcgacaattttccctcaatgctcacaagctcctatagcttcccttcttcccccataccttccatcaattatagcttcagtatgtgaaaacccagctcttcaaccatataggcttcaacaagcaatcgcagcaagcaacatancctttatncgcccttgt

SEQ ID NO: 1642 - DNA, 267 bp, Zea mays
  Clone ID: LIB3061-024-Q1-K1-A4
ctctctctcacacacacacttttttctccggacgcgctcgttcgttcgcgaaggcgcgcctgcctgccctcacatccgctcctccctccccgacaccgaccgacccctcgtccgctcgcctccctccccgatccccaccgccatggccgccgccgccgccgccgcgtcctcctcttcctcctccgaggttccgatcgccgcccgcacctgcgtctccgtcggcgaggtggcggtgggcgcggtggctacaggcagcaggcgaccggg

SEQ ID NO: 1643 - DNA, 266 bp, Zea mays
  Clone ID: LIB3061-024-Q1-K1-A5
aaacacgttcacatggaatacccttagcaagaagaaggtcaagccacttgagcgcgagggcttacttgattgtgcgcctagctttctatacatgtcatacttgcacgacattgcctcgtcctggctgacgatctaatatcgctgtacatcttgcctgatactatgactgaattctagcttgcgtatgagcaaacccaggattactaccatacaggctggaccaggcaatatgaataagcaacatacctaaatcgtacacttgttga

SEQ ID NO: 1644 - DNA, 297 bp, Zea mays
  Clone ID: LIB3061-024-Q1-K1-A6
gaccggaatctgccggctccgacccaggcgaccggtctgtcgcacacacacactttattctccggacgcgctcgttcgttcgcgaaggcgcgccgggctgacctcacatccgctcctccctacccgacaccgaccgacccctagtccgctcgcctccctccccgatccccaccgccatggccgccgccgccgccgccgcgtcctcctcttcctcctccgaggttccgatcgccgcccgcacctgcgtctccgtcggcgaggtggccgtgggcgcggtggctacaggcagcaggcgac

SEQ ID NO: 1645 - DNA, 291 bp, Zea mays
  Clone ID: LIB3061-024-Q1-K1-A7
accgttcggattccgggcccaattcttcaacctacaggatccaacaggcaatcgcagctggcatcttacctttatcacccttgtgcctgcaacaatcatcagccctattacaacagttacctttggtgcatttattggcacaaaacatcagggcacaacaactacaacaacttgtgctagcaaaccttgctgcctactctcagcaacagcagtttcttccattcaaccaactaggttcattgaactctgcttcttatttgcaacaacaacaactaccattcagccagctac

SEQ ID NO: 1646 - DNA, 262 bp, Zea mays
  Clone ID: LIB3061-024-Q1-K1-A8
ggtaatcgtgatgtcttgtgctccccactagctgaagcaaacaagaatgggagagatgtggtggaaacatttgctagttacttgaaagattattacattggaaaatttggggcgttagttgcatgatatgatcagcaatattcgaagaacacaactcctgctgaatcctgatatagactatggtggtaccaagtttgcagtgaggttgcatatttgcaggtggcaccaaagaaccatagtgttcgttccccagagatcgaca

SEQ ID NO: 1647 - DNA, 389 bp, Zea mays
  Clone ID: LIB3061-024-Q1-K1-A9
gatctatgttatggggctctatgaggcatgtaattgctccttctgcctctcatagagggtgccattactatgagaaggtatcgtttcagttgtattttgtgacacgagagaaagtcaggagtataaagcagttacctgttaatgtaaaatccatcagggagagcctgaattctgtgctattacatcatcaaaactccatgtttagccaaaacatgctgtcattgtcagaggatccatcattgatgatggcattttcaatggcacgtcgtgcagctgcggtgccgcttctattagtcaatggcacctataagtcaactgctagcacataccttgattctgctattctgcaacatcagctacagaagctaaatgagcacaattcactgaaa

SEQ ID NO: 1648 - DNA, 266 bp, Zea mays
  Clone ID: LIB3061-024-Q1-K1-B1
gcaacatagagagtggaatacagtagcaaacatagagcaacaatggcggccaagatagtctgcatccttatgctccttgctctttctgcatgtgttgctaacgcgaccatttttcctcaatactcacaagctcctatagctgcccttcttcccccatacctttcatcaatgaccgctttagtatgtgaaaacccagcccttcaaccctacaggatccagcaagcaatcgtagcaagcaacttacctttatcacacctgttctttca

SEQ ID NO: 1649 - DNA, 426 bp, Zea mays
  Clone ID: LIB3061-024-Q1-K1-B10
cgcaacatagaaagcacaatagtgcaccaacaatggcagccaaaatattacgcctcctgatgcgccttggtctttctgcaagtgctgctacggcgaccattttcccacaatgctcacaagctcctatagcttcccttcttcccccgtacctctcaccagcggtgtcttcggtatgtgaaaacccaattcttcaaccctataggatccaacaggcaatcgcagctggcatcttacctttatcacccttgttcctccaacaatcatcagccctattacagcagttacctttggtgcatttattggcacaaaacatcagggcacaacaactacaacaacttgtgctagcaaaccttgctgcctactctcagcaacaacagtttcttccattcaaccaactagctgcattgaactctgcttcttatttgc

SEQ ID NO: 1650 - DNA, 426 bp, Zea mays
  Clone ID: LIB3061-024-Q1-K1-B11
ccagcaagcaacatagaaagtagaatccattagcaacaatagagcaacactggcgagcaagagattttccctccttatgctccttgctctttctacatgtgttgctaacgcgacaattttccctcaatgctcacaagctcctatagcttcccttcttcccccataccttccatcaattatagcttcagtatgtgaaaacccagctcttcaaccatataggcttcaacaagcaatcgcagcaagcaacatacctttatcgcccttgttgtttcaacaatcaccagccctatctttggtgcagtcattggtacaaaccatcagggcacaacagctgcagcaactcgtgctacctgtgatcaaccaagtagctctggcaaacctttctccctactctcagcaacaacaatttcttccattcaaccaact

SEQ ID NO: 1651 - DNA, 424 bp, Zea mays
  Clone ID: LIB3061-024-Q1-K1-B12
gcaattagctcatcgactccagattggagaactcgacaccatgaaggtgctgatcgtggccgttgctctcctggcgctcgctgcgagcgccgcctccagtacaagcggcggctgtggctgccagacaccaccgtttcatctaccgcctccgttctatatgccgcctccgttctatctgccgccgcagcagcagccgcagccatggcaataccccactcaaccaccgcagctaagcccgtgccagcagttcggatcctgcggcgtcggcagcgtcggcagcccgttcctgggccagtgcgtcgagttcctgaggcaccagtgcagcccggcggcgacgccctacggctcgccacagtgccaggcgctgcagcagcagtgctgccaccagatcaggcaggtggagccgctgcagcggtaccaggcg

SEQ ID NO: 1652 - DNA, 269 bp, Zea mays
  Clone ID: LIB3061-024-Q1-K1-B2
gcaacatagaaagtagaatccattagcaacaatagagcaacaatggcgaccaagatagtttcgctccttatgctccttgctctttctacatgtgttgctaacgcgacaattttccctcaatgctcacaagctcctatagcttcccttcttcccccataccttccatcaattatagcttcagtatgtgaaaacccagctcttcaaccatataggcttcaacaagcaatcgcagcaagcaacatacctttatcgcccttgttgtttcaacc

SEQ ID NO: 1653 - DNA, 249 bp, Zea mays
  Clone ID: LIB3061-024-Q1-K1-B3
atacaatgaataatacaatatttatatttcatcaccttcttccgctaaaagcgtacgcatccaaatcctgcatgatctcacaatacttactatcaacaaattccattattacacacttttctacaatctcttacttcaatccacttctaacattcaactaaataaatatattcaatactactagcaatttccactatcatcttataccatccaatttactacttactacatcaattcatcacccatata

SEQ ID NO: 1654 - DNA, 266 bp, Zea mays
  Clone ID: LIB3061-024-Q1-K1-B4
ctcaatgctcacaagctcctatagcttcccttcttcccccataccttccatcaattagagcgtcaatatgtgaaaacccagctcttcaaccatataggcttcaacaagcaatcgcagcaagcaacatacctttatcgcccttgttgtttcaacaatcgccagccctatctttggtgcagtcattggtacaaaccatcagggcacaacagctgcagcaactcgtgctacctctgatcaaccaagtagctctggcaaaacctttctcc

SEQ ID NO: 1655 - DNA, 248 bp, Zea mays
  Clone ID: LIB3061-024-Q1-K1-B5
gttgttgcaacaatcgccagccctatctttggtgccgtcattggtacaaaccgtcagggcacataagctgcaggaactcgcgctacctgtgatcaaccaagtcgctctggcaaacctttctccctactctcagcaacaacaatttcttccattcaaccaactgtctacactgaaccctgctgcttatttgcagcaacaactattaccattcagacagctagctactgcctactctcagcaacaacaac

SEQ ID NO: 1656 - DNA, 262 bp, Zea mays
  Clone ID: LIB3061-024-Q1-K1-B6
ggtgcgcccaaggcggaaagaagacggcgaccatggcgaagcagcagaatccgatcgccatcccgatgccgctgtcgctgtcgctgcccctcgtcctcgtcgcgctgctcctgccggccgcccgcggcgccgcggagacgccgcagtacacgacggtgcacgcggagtcggacttcgaggtgcggctgtacggcgacaccgtctggatgtccgcccccaccccggacatcccttccttccacgtcgcgcaccaagctcggct

SEQ ID NO: 1657 - DNA, 270 bp, Zea mays
  Clone ID: LIB3061-024-Q1-K1-A1
ctagcaacatagaaagcacaatagtgtaccaacaatggcagccaaaatattttgcttgcttatgctccttggtctttctgcaagtgctgctaccgcaaccattttcccacaatgctcacaagctcctatagcttcctttcttcccccatacctctcaccagcggtgtcttcagtatgtgaaaacccaattcttcaaccctacaggatccaacaggcaatcgcagcaggcatcttacctttatcacccttgttcctccaaccaacgcgtca

SEQ ID NO: 1658 - DNA, 260 bp, Zea mays
  Clone ID: LIB3061-024-Q1-K1-B7
caacaatggctaccaagatattatccctccttgcgcttcttgcgctttttgcgagcgcaacaaatgcgttcattattccacaatgctcacttgctccaagttccattattacacagttcctcccaccagttacttcaatgggcttcgaacacccagctgtgcaagcctataggctacaacaagcaattgcggcgagcgtcttacaacaaccaatttcccagttgcaacaacaatccttggcacatctaacaatacaaacc

SEQ ID NO: 1659 - DNA, 98 bp, Zea mays
  Clone ID: LIB3061-041-Q1-K1-H7
caccaccttttcatctacctccttctttctatatgccgcctcctatctatctgccttctcatcaacatctctcaaccatttcaataccccactcaacc

SEQ ID NO: 1660 - DNA, 360 bp, Zea mays
  Clone ID: LIB3061-041-Q1-K1-H8
aattcccggggttcaggaggtccttaatttctgctggcatttctcattctagaagttcaagcatcccattgcagcaccgtggaaattcatccacatcacatgagattaggaatcatcagccaggatcaagctctcgtgcacatcagcagcaccccttaagacccggtcattcctctgtagacaggcagagctctggttacttggaccttcagtcttttatgcagaccatagcttcaagggaaggaggcagaccaatgtcagagatccgcaatgtcttcgatcagattcgtcaggggagaaatgcacgattggaggatttgcttctcattgaccggtcacttattatgagacgaagctaat

SEQ ID NO: 1661 - DNA, 427 bp, Zea mays
  Clone ID: LIB3061-041-Q1-K1-H9
ggaagattatgggttcccaagggctatagcatttgctgcttctgcaatccgcagttcagcagttgttgctgtgacatgtgacaaagagataattactggtggccacgttgatggttcattgaagttgatatccctagatggagcgaagacaattgaaactgcttctgggcatattgctccagtgacatgccttgcgctgtcacctgatagcaactaccttgtgacagggtctagagataccacagttatactctggaggattcatcagacaggctcctcacataagaaaaatgctcaagaacctccaccgactacaccaacgacaccacgcagtcctctctctggcagcactagcaccatgagcagcctctcagaaacaaagagacgtcgcgttgaaggtccaatgcatgtaatgagaggacatctt

SEQ ID NO: 1662 - DNA, 402 bp, Zea mays
  unsure (1)..(402): unsure at all n locations; Clone ID: LIB3061-042-Q1-K1-A1
gagatagagtcctttttactttctatcgatgatgagataaactctcttttgaacaaaggactgctctgagatgccgaactagcaactcaacgagaacgtatcttgaggatcagtgctgattttgacaatttcaggaaaaggacagaaaatgagaagcttaacatgatggaaaatgtgcaaggggaacttatagagagctttttgcctgttctcgacaactttgaaagagcgaaagtgcaaataaaggtggaaacagagggagaggagaaaataaataatagctaccagagcatntaatagcaattcatcgagattttgaattcattgggcgttgaagatgttgaaaacggtcggaanaccatttgatcccatgcttcatgaggctattatgagagaggaatc

SEQ ID NO: 1663 - DNA, 408 bp, Zea mays
  unsure (1)..(408): unsure at all n locations; Clone ID: LIB3061-042-Q1-K1-A10
gagaccaacaagcaacatagaaagtggaatccagtagcaacaacagagcaacaatggcgagcaagatattgtccctccttatgctccttgctctttctgcatgtgttgctaacgcgacaattttccctcaatgctcacaagctcctatagcttcccttcttcccccataccttccatcaatgatagcttcagtatgtgaaaacccagctcttcagccctataggctccaacaagcaatcgcagcaagcaacatacctttatcacccttgttgtttcaacaatcgccagccctatctttggtgcagtcattggtacaaaccatcanggcacagcagctgcagcaactcgtgctacctgtgatcaaccaagtagctctggcaaacctttctccctactcttagcaacaac

SEQ ID NO: 1664 - DNA, 419 bp, Zea mays
  unsure (1)..(419): unsure at all n locations; Clone ID: LIB3061-042-Q1-K1-A11
cttcgtattgattgacgatttcaaagaggaaatatgcaaatctctgaaggactacaagaggcagattgagcagctcaagcaggagatggatgatgccacacgtggggcagataatatcagaagtgatattggtgccctcgctcagagatatacagtaattgaccgtgagcaggattgtggggtttgccggcgcanaatattgactgttggagggttgcaccaggtaggaagaagctatacatctggtggacacatggcccccttttatgtgtttccctgtggacatgccttccatgcaaattgcttgattggacatgtgactcgttgcagtaaccaagtgcaagctgagagaatattggaccttcagaaacggcttagcttgatggacaggaaagcagcanaagacaatggggcaagtg

SEQ ID NO: 1665 - DNA, 422 bp, Zea mays
  Clone ID: LIB3061-042-Q1-K1-A12
cacatgatataagcagaagtgaaagtcaggcaggaactggacttggtgagtcagatagcggggaaccactccaaacacggacgtttgccaatggtatgatgattcaggagttagagatgggcaaacctgatggtaaaaaggccagccgtgggaagaaggtttctgttagatatattggcaagctaaagaatggcactattttcgactccaacgtcagtggaagaccttttgagtttagactaggtgttgggcaggttatcagtggctgggacgttggcgtcaatggtatgcgggttggggacaaaaggagactcaccattccaccttccatggggtatgggagcaaaagagtggggcagataccacagaactcaactctcatcttcgatgtggagctggtgaacgttaaatgaaatgagaag

SEQ ID NO: 1666 - DNA, 392 bp, Zea mays
  Clone ID: LIB3061-042-Q1-K1-A2
ttatccctccttgcgcttcttgcgctgtttgcgagcgcagcaaatgcgtccattattccacaatgctcacttgctcctagttccattattccacagttcctcccaccagttacttcaatggccttcgaacacccagctgtgcaagcctataggctacaacaagcgattgcggcgagcgtcttacaacaaccaattgcccaattgcaacaacaatccttggcacatctaacattacaaaccatcgcaacgcaacagcaacaacaggtcctaccagcactgagccaactaaccatggtgaaccctggtcgctacttgcaacagcagctggttgcatccaacccacttgctctagcaaacgtagttgcaaaccagcaacaacaacaactgcaaca

SEQ ID NO: 1667 - DNA, 424 bp, Zea mays
  Clone ID: LIB3061-042-Q1-K1-A3
cagcaagggaaggttaggtttcttcggcaccatggtgcatcattcacttgctggggagaacgttcatgagatttagaggcatgtgctacaaatgcagttctggacataataactgaatttgagcatcgcattcttgtgctgctgaatcttatcttgattatggcttcggcaacatcctggaagaggaatttatggtcaactgagatcatctccaagaccgagagggctaacagaaaacatcagatttcagcatccaattactcttgactaacgttccactctttgcaaaaccattgtgccggcaaggagggctactattttaggtccggttaacgtgtgtaagtagccccgtctatgagaaaatggacaaagaatcgcagcctcattcagcatgaattaccaacgatggttgactactactagt

SEQ ID NO: 1668 - DNA, 435 bp, Zea mays
  Clone ID: LIB3061-042-Q1-K1-A4
aaagtatttcttcttctacgtgcactcgtagacccgcgacatctgcggagagacttcctgcccagcggccggcgacttcgtgctgtcccaccagcagacgctgccaggcttcactccgccgggctcctacacgatctacatgaagattgtcggggacgacaacgaggagctgagctgcatctcgttcgggttcagcatcggcttcgtcgcgtccagctgaacgcgtccgagcccgggcacgagaggcagccagcccatggatgtaattacgtgaagcacactctgtatcctatgacttccaagtgtctaagtccatgtaagctttttgggggtgtctgtgttcaactgagacgtttttatccggagttgaacatcacagtaaagcaaagtcactgttaccatgtaatggaactctgagcgcttgatgggccccgt

SEQ ID NO: 1669 - DNA, 371 bp, Zea mays
  unsure (1)..(371): unsure at all n locations; Clone ID: LIB3061-042-Q1-K1-A5
attattatctgcccacggatagtcatgttatctacataatccgacatgcggctcttcagggttctgcattgtgaatagaggttcatctctgtgattagattgccaccgccgctgctttctactcattcgacgaatgttttgcaaagaagaaatctggtttatcttaccctcgattccttcctatgatacaactaacaaaatgaattggtacattcaggtatctttaaaaccttttcacttccaaattagaatgatatcatgctcaagaggtaacattttctgatgttttttattttaatagtaattattggtcgctgactttntaaaactatttgtgttgtacttcaagcatcttctacactgcatctaag

SEQ ID NO: 1670 - DNA, 268 bp, Zea mays
  Clone ID: LIB3061-042-Q1-K1-A6
gcaacaacctaacaacaatggctaccaagatattatccctccttgcgcttcttgcgctgtttgcgagcgcaacaaatgcgtccattattccacaatgctcacttgctcctagttccattattccacagttcctcccaccagttacttcaatggccttcgaacacccagctgtgcaagcctataggctacaacaagcgattgcggcgagcgtcttacaacaaccaattgcccaattgcaacaacaatccttggcacatctaacaataca

SEQ ID NO: 1671 - DNA, 406 bp, Zea mays
  Clone ID: LIB3061-042-Q1-K1-A7
cggtgacaccattgagtaccaaaggctcgtgagggaagaagtgcggcctgcgctgaaggatatggtctgggcttggcagagcgaccggcaccagcagcagcagcagcgcgagcagtctgtgcaaggagagcagcagcagcagcagcagccgttgtcgtctttgccgacgcagcagtagtcactgcaccaccagttgcgaccgccataaccagatcacgtcaaaactgcaccaagccgcacaggactagtaactcccacttgcatcgacgcttatgtgattgcggaattgtgtttcaggttacctgcctgctgcggtaggacctaaagcgcctacctggctaccatttggcatttttttgtatactgtacgtacattagagtaataaacaaacatgcttaacttttc

SEQ ID NO: 1672 - DNA, 327 bp, Zea mays
  Clone ID: LIB3061-042-Q1-K1-A8
agtggagcttgtacagcttcctctagatgcaatgactggactgtgcaaaggttatggggttattcagtttggccggcttgaagatgcaaaagctgcacagagtttgaatgggcagcttgatattgccggcagagttattaaggtttcagctgttactgatcatgtgggaagtgcaagctagtggagctactactggagatctagatgatgatgaaagtggaggcttggcgctaaatgcaagctccagagctgctctaatgctcaaattggacaggagtggtacagcaaccagcttaactggtggtattggtgctgctggagtggttg

SEQ ID NO: 1673 - DNA, 381 bp, Zea mays
  Clone ID: LIB3061-042-Q1-K1-B10
aagggattggattatagaagagaatcctagaactgaaactacattgtttggagatagggggtcggaaatccttgatgagcctcagatggtgatgtctgctgaacctttccatgcacctgcttatttgaacttggaggctggaaattcaagcccaacggttcatgtcgagctaacaaattccgatgagaaactggccaatcttgcagaagacaagaatcggcgactttcagatgcaagccagttaagaacaggttcaaacccaatggtcgatgttgagctaacaaatttcgatgagaaactggccaatcttgcagaatgcaagaatcagcgactttcagatgcaagccacttaagaacaggttcaaacccaatggatgatgt

SEQ ID NO: 1674 - DNA, 366 bp, Zea mays
  unsure (1)..(366): unsure at all n locations; Clone ID: LIB3061-042-Q1-K1-B11
catgaggctattatgagagaagaatcatcagagtttgaagaggggattattctccaggaggtccgaaaaggtttcaaactcggngaaagactgcttcgcccagcaatggtcaaagtgtctgcaggaccaggccctgaaaagtttggagatgatgacccaacagctgtcgaaggtagtgtggcacctcaaaaggttgacgaagtcgaagacgacggttttggtgccggcgatgcagaataggtggctggagcttgatctgtgaatcaacaagaacaggtccagaaattttgatgcttttctggagcgtgccaagcaggaaataggatggtaccaattcgttcaaactatagagttaagtcccaaaat

SEQ ID NO: 1675 - DNA, 125 bp, Zea mays
  Clone ID: LIB3061-042-Q1-K1-B12
ggcctcgatccgatccgccgagtgcactctcacctttgcccactccgatcgaatcgaggggggcctaggtcgagaagaagatgataaccctcaaaagctccgatggctaggagttcgaggtggaa

SEQ ID NO: 1676 - DNA, 341 bp, Zea mays
  unsure (1)..(341): unsure at all n locations; Clone ID: LIB3061-041-Q1-K1-H6
ctccagagcgcagaagaacccgatcgacaccatgagggtgttgctcgttgccctcgctctcctggctctcgctgcgagcgccacctccacgcatacaagcggcggctgcggctgccagccaccgccgccggttcatctaccgccgccggtgcatctgccacctccggttcacctgccacctccggtgcatctcccaccgccggtccacctgccgccgccggtccacctgccaccgccggtccatgtgccgccgccggttcatctgccgccgccaccatgccactaccctactcaaccgccccggcctcagcctcatccccagccacancccatnngcccgt

SEQ ID NO: 1677 - DNA, 418 bp, Zea mays
  unsure (1)..(418): unsure at all n locations; Clone ID: LIB3061-041-Q1-K1-G10
cgctagcaaacgtagttgcnaaaccagcaacaacaacaactgcaacagtttctgccagcgggtagtcaactagccatggtgacccctgccgcctacctacaacagcaacaactgctttcatctagcccgctcgctgtggccaatgcacctacatacctgcaacaagaattgttgcaacagattgtaccagctctaactcagctagctgtggcaaaccctgttgcctacttgcaacagctgcttccattcaaccaactaactatgtcgaactctgttgcgtacctacaacagcgacaacagttacttaatccattggcagtggctaacccattggtcgctgccttcctacagcagcaacaattgctgccatacaaccggttctctttgatgaatcctgtcttgtcgaggcagcaaccca

SEQ ID NO: 1678 - DNA, 431 bp, Zea mays
  Clone ID: LIB3061-041-Q1-K1-G11
gcattcaaaaacacaccaagcgaagcgcactagcaacgacctaacaccaatggctaccgaggatattagccctccttgcgcttcttgcccttttagtgagcgcaacaaatgcgttcattattccacagtgctcacttgctcctagtgccagtattccacagttcctcccaccagttacttcaatgggcttcgaacatccagccgtgcaagcctacaggctacaactagcgcttgcggcgagcgccttacaacaaccaattgcccaattgcaacaacaatccttggcacatctaaccctacaaaccattgcaacgcaacaacaacaacaacagtttctgccatcactgagccacctagccgtggtgaaccctgtcacctacttgcaacagcagctgcttgcatccaacccacttgctctggcgaacgtagct

SEQ ID NO: 1679 - DNA, 338 bp, Zea mays
  Clone ID: LIB3061-041-Q1-K1-G2
ccacgcattcgtccagaagctgcaagcaacatagaaagtagtatccattagcaacaatagatcatcaagggggaacattaatatgcacgtgcggataacccgatactgttaccatattgccacaatgctcacatgctcctatagcttcccttcttcccccgtacctatcaccagcggtgtcttcggtatgtgaaaacccaattctttaaccctataagatccaacaggcaatcgcagcttgcatcttaccttcatcacccttgatccttcaacaatcatcagccctattacagcatttacctttggtgcatttattggcacaaaacattcaggcacaa

SEQ ID NO: 1680 - DNA, 362 bp, Zea mays
  Clone ID: LIB3061-041-Q1-K1-G4
ccgggctcgacgctatcgagaacatgaacggcaaggagctcgacggccgtaacatcaccgttaaccaggcccagtcccgtggcggtggcggtggcggcggtggctacggcggcggtcgcggcggcggcggctatggtggcgggcgccgtgacggcggttatggcggcggtggcggctacggcggtcggcgcgagggtggtggcggcggctacggaggcggtggcggctacggcggtcggcgcgagggtggtggtggcggctacggcggcggcggcggcggctggagggactgatgtgtgggcccatactggcttcggccgagttatctcatctatctatagtatcgtgttacccgtttcgct

SEQ ID NO: 1681 - DNA, 346 bp, Zea mays
  Clone ID: LIB3061-041-Q1-K1-G5
ccaactagcaacatagaaagcacaatagtgtaccaacaatggcagccaaaatattttgcctccttatgctccttggtctttctgcaagtgctgctacggcgaccattttcccgcaatgctcgcaagctcctatagcttcccttcttcccccgtacctctcaccagcggtgtcttcggtatgtgaaaacccaattcttcaaccctacaggatccaacaggcaatcgcagctggcatcttacctttatcacccttgttcctccaacaatcatcagccctattacaacagttacctttggtgcatttattggcacaaaacatcagggcacaacaacctacccaacaaac

SEQ ID NO: 1682 - DNA, 339 bp, Zea mays
  Clone ID: LIB3061-041-Q1-K1-G6
agaccagcaagcaacatagaaagtagaatccattagcaacaatagagcaacaatggcgaccaagatattttccctccttatgctccttgctctttctacatgtgttgctaacgcgacaattttccctcaatgctcacaagctcctatagcttcccttcttcccccataccttccatcaattatagcttcagtatgtgaaaacccagctcttcaaccatataggcttcaacaagcaatcgcagcaagcaacatacctttatcgcccttgttgtttcaacaatcaccagccctatctttggtgcagtcattggtacaaaccatcagggcaccaaccagctg

SEQ ID NO: 1683 - DNA, 335 bp, Zea mays
  Clone ID: LIB3061-041-Q1-K1-G7
attcagaaacacaccaagcgaagcgcactagcaacgacctaacaacaatggctaccaagatattagccctccttgcgcttcttgccctttttgtgagcgcaacaaatgcgttcattattccacaatgctcacttgctcctagtgccattattccacagttcctcccaccagttacttcaatgggcttcgaacacctagctgtgcaagccaacatgcaacaacaagcgcttgcggcgagcgtcttacaacaaccaattgcccaattgcaacaacaatccttgccacatctaacaatacaagccatcacaacgcaacagcaacaacagttccttacc

SEQ ID NO: 1684 - DNA, 328 bp, Zea mays
  Clone ID: LIB3061-041-Q1-K1-G8
gtttgttttatttcgttcgatctcaagctattcggacggtgctcgatctgaattcccaagtacaggagcgtcaaacgattcactcccaccgaatttgttttgtgtcctcgtagacctgtgcataaattgtagtaccccatttcgacggcagtcaccattctccacaccttgtcgtctgcataagccggacgattgttgggtggtgggaatggaaccgcgagaagcatagaagacatttgatcgtcggcgcgtctatgcgatagtcctgccattgcaaacatactacagatgattaactgacaaggtgatgatgaacgagcagcggcca

SEQ ID NO: 1685 - DNA, 417 bp, Zea mays
  Clone ID: LIB3061-041-Q1-K1-G9
atcgcccataatattttgagcattcaataacacacaaagggaagtgcactagcagactggctaacaacaatggctaccaagatattagccctccttgcgctcctttccctttcagtgagcgcaacaactgcattcattattccacaatgctcacttgctcctaatgccattattccacagttcctcccatcagttacatcaatgggcatcgaacaccctattgtgcaagcctataggctacaacaagcgcttgcggcgagcgtcttacaacaaccgtttgcccaattacaacaacaatccttggcacatctaaccatacaaaccatcgcaacacaactagagcaacagtttgtgcccgcattgagccaactagccgcggtgaaccctgtctcctacttgcaacagcaactgcttgca

SEQ ID NO: 1686 - DNA, 437 bp, Zea mays
  Clone ID: LIB3061-041-Q1-K1-H10
gcggcaacatagaaagtagaatccattagcaacaatagagcaacaatggcgaccagtataggttccctccttatgctccttgctctttctacatgtgttgctaacgcgacaattttccctcaatgctcacaagctcctatagcttcccttcttgccccataccttccatcaattatagcttcagtatgtgaaaacccagctcttcaaccatatacgcttcaacaagcaatcgcagcaggcaacatacctttatcgcccttgatgtttcaacaatcaccagccctatctttggtgcagtcattggtacaaaccatcatggcacaacagctgcagcaactcgtgctacctgtgatcaaccaactagctctggcaaacctttctccctactctcagcatcagcactttcttgcattcaaccaactggatacactgaaccc

SEQ ID NO: 1687 - DNA, 431 bp, Zea mays
  Clone ID: LIB3061-041-Q1-K1-H11
cagcaagcaacatagaaagtagaatccattagcaacaatagagcaacaatggcgaccaggatattttccctccttatgctccttgctctttctacatgtgttgctaacgcgacaattttccctcaatgctcacaagctcctatagcttcccttcttcccccataccttccatcaattatagcttcagtatgtgaaaacccagctcttcaaccatataggcttcaacaagcaatcgcagcaagcaacatacctttatcgcccttgttgtttcaacaatcaccagccctatctttggtgcagtcattggtacaaaccatcagggcacaacagctgcagcaactcgtgctacctgtgatcaaccaagtagctctggcaaacctttctccctactctcagcaacaacaatttcttccattcaaccaactgtctac

SEQ ID NO: 1688 - DNA, 434 bp, Zea mays
  Clone ID: LIB3061-041-Q1-K1-H12
ggtggaggtagcgcctccgcaggccatggaggtgcgcgtcaagatcctcttcagctcgctctgccacaccgacgtctacttctgggaggccaaggggcagactcccgtgttccctcggatctttggccacgaggctggaggtatcatagagagtgttggagagggtgtgactgacgtagctccgggcgaccatgtccttcctgtgttcactggggagtgcaaggagtgtgcccactgcaagtcggcagagagcaacatgtgtgatctgctcaggatcaacaccgaccgcggtgtgatgattgccgatggcaagtcgcggttttcaatcaatgggaagcctatctaccactttgttgggacttccaccttcagcgagtacaccgtcatgcatgtgggttgtgttgcatagatcaaccctcaggctccccttgata

SEQ ID NO: 1689 - DNA, 280 bp, Zea mays
  Clone ID: LIB3061-041-Q1-K1-H2
ttatttcattcgaccttcatctattcgaaccgtactctatcttaagttggaatttcaggatcgtgggacgattcactctcacccaattttttttttgtcctcctatacctcttcatatattgtagtaccctatttcaacctcagtcacacattctccacaccttgtcttatgcataaaccgtaccaatttataattgttataaatgaacctccaaaaacatataacacatttgatcttcttctcttctattctatatacctgccatttcaaacatacttc

SEQ ID NO: 1690 - DNA, 364 bp, Zea mays
  Clone ID: LIB3061-041-Q1-K1-H3
gtcagcctagcaattagctcatcgactccagattggagaactcgacaccatgaaggtgctgatcgttgcccttgctctcctggcgctcgctgcgagcgccgcctccagtacaagcggcggctgtggctgccagacaccaccgtttcatctaccgcctccgttctatatgccgcctccgttctatctgccgccgcagcagcagccgcagccatggcaataccccactcaaccaccgcagctaagcccgtgccagcagttcggatcctgcggcgtcggcagcgtcggcagcccgttcctgggccagtgcgtcgagttcctgaggcaccagtgcaagccccgggccggggccggaaaccggcccccc

SEQ ID NO: 1691 - DNA, 346 bp, Zea mays
  Clone ID: LIB3061-041-Q1-K1-H4
tcccgcgttcaggaggtccttaagttctgctgccatttctcattctacttgttcatgcgtcccattgcagcaccgggggaattcattctcatcacatgagattaggaatcatcagcccggatcacgctttcgtcctcctgccaccctccccggatcatctaccgccgcctgtgcatctgccacctccggttcacctgccacctccggtgcatctcccaccgccatagcttcaagggaaggaggcagaccaatgtcagagatccgcaatgtcttcgatcagattcgtcaagggagaaatgcacgattggaggatttgcttctcattgacccgtcacttattatgaca

SEQ ID NO: 1692 - DNA, 317 bp, Zea mays
  Clone ID: LIB3061-041-Q1-K1-H5
caattacctcatctactttagtttggagaactcaacaccatgaatgggctgggctttgcccttgcgtctgctggcgctcgctgcgagcgccgtctacagtacaagcggcggatgtggctgccaaacatcactgcttcatctaccgccttcattctatatgccgtctccgaactatctgccgccgcagcatccaccacagacatggcaataccccactcaaccaccgcaactaaacccatgctagtagttcaaatcctggggcgattacagcgactacaacccgtaccttggccagtgcgaaaagttcctgaggcacc

SEQ ID NO: 1693 - DNA, 319 bp, Zea mays
  Clone ID: LIB3061-041-Q1-K1-G1
gtcgccattgttgctctattgttgctaatggcgaccaagatattttccctccttatgctccttgctctttctacatgtgttgctaacgcgacaattttccctcaatgctcacaagctcctatagcttcccttcttcccccataccttccatcaattatagcttcagtatgtgaaaacccagctcttcaaccatataggcttcaacaagcaatcgcagcaagcaacatacctttatcgcccttgttgtttcaacaatcaccagccctatctttggtgcagtcattggtacaaaccatcagggcacaacagctgcagcaac

SEQ ID NO: 1694 - DNA, 419 bp, Zea mays
  unsure (1)..(419): unsure at all n locations; Clone ID: LIB3061-041-Q1-K1-E4
gtggaatacagtagcaaaaatagagcatcaatggcggccaagatattttccatcctgatgctccttgctctttctgcatgtgttgctaacgcgaccatttttcctcaatactcacaagctcctatagctgcccttcttcccccataccttccatcaatgaccgctttagtatgtgaaaacccagcccttcaaccctacaggatccagcaagcaatcgcaacaagcaacttacctttatcacacctgttctttcaacaatcgccagccctatctttggtgcagtcattggtacaaaccatcagggcagaacagttgcagcaactcgtgctaccaagtgattcaagcccanaggttaaaggcctttcctttgggggcccaaaaaaaaaacccccccctttttttttttttccccccccccc

SEQ ID NO: 1695 - DNA, 340 bp, Zea mays
  Clone ID: LIB3061-041-Q1-K1-E5
ggattttaataaatggaagggaaattagttcgttttcgttttctcaagggaaaatgggaatcccttggaggaattgagtttccaaaatagccctggtacgatatttacatgtgtttgccagcagtgtgaatcttcatactaagggttagtttagaaacttaaatcccctttccgattcctagagattgagtggaaattgactaatatcgcactcaatccccggaatcccctgtgttctggaactagccctaaatggtttatatgaatattctgttcttaccgagttgtgaactgctgaactctagttctgtgtatttgttacgacaccttagcactaagc

SEQ ID NO: 1696 - DNA, 339 bp, Zea mays
  Clone ID: LIB3061-041-Q1-K1-E8
aatttggtggagggatccatgactgtgtcgacgaccagaaagacaagggatccctgggctattatcaaggccagggaactaattaagcttttgtccaggagcgtccctgcacctcaggcaatcaaaattcttgatgatgagatgaactgcgatattattaagattggtggtcttgtgagaaataaggagcggtttgttaaaaggagggaacggcttttaggccctaacttgtctacactcaaggctattgagattttgactggctgctacatcttagtgcagggaaatactgttgcagccatgggcaactataggggaaggggactggaaaccaagtga

SEQ ID NO: 1697 - DNA, 411 bp, Zea mays
  Clone ID: LIB3061-041-Q1-K1-E9
accgaacaagccctaacagtgtgcgttttcgcaccccaactgcctttctctctataagggaaactcctcatcgatcaccaccaaagaacacagtaactagctagcagatcaaacaagtagcgacagctcgacaaagatttgtgagagtgatccggcgctgagaagagatggctaagatcgccgcagccgccgcggcggcggcggcgctgtgcttcgcggccctggtggccgtggccgtctgccaaggcgaggtcgagcggcagaggctcagggacctgcagtgctggcaggaggtccaggagagcccgctcgacgcgtgccgccaggtcctcgaccggcagctaaccggcggcggcgtcggcggcccgttccggtggggcaccgggctccggatgcggtgctgccagcagc

SEQ ID NO: 1698 - DNA, 347 bp, Zea mays
  Clone ID: LIB3061-041-Q1-K1-F1
ccaactagcaacatagaaagcacaatagtgtaccaacaatggcagccaaaatatttggcctccttatgctccttggtctttctgcaagtgctgctacggcgaccattttcccgcaatgctcgcaagctcctatagcttcccttcttcccccgtacctctcaccagcggtgtcttcggtatgtgaaaacccaattcttcaaccctacaggatccaacaggcaatcgcagctggcatcttacctttatcacccttgttcctccaacaatcatcagccctattacaacagttacctttggtgcatttattggcacaaaacatcaaggcaccaacaactacccaacaactt

SEQ ID NO: 1699 - DNA, 432 bp, Zea mays
  Clone ID: LIB3061-041-Q1-K1-F10
caacaagcaacatagaaagtggaatccagtagcaacaatagagcaacaatggcgaccaagatactttccctccttatgctccttgctctttctgcatgtgttgctaacgcgacaattttccctcaatgctcacaagctcctatagcttcccttcttcccccataccttccatcaatgatagcttcagtatgtgaaaacccagctcttcaaccctataggctccaacaagcaatcgcagcaagcaacatacctttatcacccttgtttcaacaatcgccagccctatctttggtgcagtcattggtacaaaccatcaaggcacagcagctgcagcaactcgtgctacctgtgatcaaccaagtagctctggcaaacctttctccctactatcagcaacaacaatttcttccattcaaccaactatctacactg

SEQ ID NO: 1700 - DNA, 429 bp, Zea mays
  Clone ID: LIB3061-041-Q1-K1-F11
cggacgcgtgggttcaaaaacacaccaagcgaagcgcactagcaacgacctaagaccagatggctaccaagatattagccctccttgcgcttcttgcccttttagtgagcgcaacaaatgcgttcattattccacagtgctcacttgctcctagtgccattattccacagttcctcccaccagttacttcaatgggcttcgaacatccagccgtgcaagcctacaggctacaactagcgcttgcggcgagcgccttacaacaaccaattgcccaattgcaacaacaatccttggcacatctaaccctacaaaccattgcaacgcaacaacaacaacaacaacagtttctgccatcactgagccacctagccgtggtgaaccctgtcacctacttgcaacagcagctgcttgcatccaacccacttgctc

SEQ ID NO: 1701 - DNA, 383 bp, Zea mays
  Clone ID: LIB3061-041-Q1-K1-F12
gcgcgagtcatcagctcgcgttgactacgtccctgccctttgtccaacttgctgtgacgagacccagcggcctcctaccaacaacacatcattggtggtgccctcttttagattgcttattagttgtaattcaataataaagttttttggatgatgtatgtggccaaccagaaataagaagttacatttacagattctaatgtgaaaaaaagatccaacacagcatcataaaattgaatcttacctttatcaaccttgatactctaacaataataaaaacatattacatcaattacctattggagccttaatagagataaaaaatatagtgtcaaaaaaatacattaacatagaacaaggggggccttctttataaaattcaa

SEQ ID NO: 1702 - DNA, 258 bp, Zea mays
  Clone ID: LIB3061-041-Q1-K1-F2
cagctagcaacatagaaagcacaatattgttccaacaatggcagccaaaatattttggctgcttatgctccttggtagttctgcaagtgctgctacggcgaccatttttccgcaatgcttacaagcttctatagctttccttctttccccgtaccttttaccagcggtgtcttcggtatttgaaaacccaattttttaacccttccgggttcaaccggcaattgcaacttgcaatctacccttaataaccttggttct

SEQ ID NO: 1703 - DNA, 339 bp, Zea mays
  Clone ID: LIB3061-041-Q1-K1-F3
cgggcctgccaccatcaaggttgggtttgcgagtttcgctctgcagaaggtcggtaggcacattggagactgggagcacttcaccctccgagtgagcaacttctcaggtcagctgtcgtctatctacttctcgcagcacagcgggggcgagtgggttgaagcttgcgatctggagttcatctctgggaacaaggcgatcatctactcgtccaggaacgggcacgcgagctacccccacccaggctgctacctgatgggttccgagacgctcggtgtcggagttagaaacgatgtggcgcgaagtgatctgtcagtggattcgagcacgcggtatggaga

SEQ ID NO: 1704 - DNA, 334 bp, Zea mays
  Clone ID: LIB3061-041-Q1-K1-F4
agcaacaactactaccattcagccagctagctggtgtgagccctgctaccttcttgacacaaccacagttgttgccgttctaccagcacgttgcgcctaacgctggcaccctcttacaactgcaacaattgctgccattcaaccaacttgctttgacaaacccagcagtgttctaccaacaacccatcattggtggtgccctcttttagatttcttatgagttatagttcaataataaagttttttatctgatgtttgtggcttcccagaaataagaaagtacatttctaaaaaaaaaaaaaaaaaaaaaaaaaaaaaaaaaaaacacacaaaa

SEQ ID NO: 1705 - DNA, 342 bp, Zea mays
  Clone ID: LIB3061-041-Q1-K1-F5
cccacgcgtccggcaacatagaaagcacaatagtgtaccaacaatggcagccaagaagattttgcctccttatgctccttggtctttctgcaagtgctgctacggcgaccattttcccgcaatgctcgcaagctcctatagcttcccttcttcccccgtacctctcaccagcggtgtcttcggtatgtgaaaacccaattcttcaaccctacaggatccaacaggcaatcacagctggcatcttacctttatcacccttgttcctccaacaatcatcagccctattacatcagttacctttggtgcatttattggcacaaaacatcagggcacaaccaacct

SEQ ID NO: 1706 - DNA, 348 bp, Zea mays
  Clone ID: LIB3061-041-Q1-K1-F6
cattcatcttagtagtaaggcaccaaatcaaatctgcaacatcaattatctaactccaaaaaccatgaagctggtgcttgtggttcttgctttcattgctttagtatcaagtgtttcttgtacacagacaggcggctgcagctgtggtcaacaacaaagccatgagcagcaacatcatccacaacaacatcatccacaaaaacaacaacatcaaccaccaccacaacatcaccagcagcagcaacaccaacaacaacaagttcacatgcaaccacaaaaacatcagcaacaacaagaagttcatgttcaacaacaacaacaacaaccgcagcaccaccaccaacaaca

SEQ ID NO: 1707 - DNA, 340 bp, Zea mays
  Clone ID: LIB3061-041-Q1-K1-F7
atagaaagcacaatagtgtaccaacaatggcagccaaaatattttgcctccttatgctccttggtctttctgcaagtgctgctacggcgaccattttcccgcaatgctcgcaagctcctatagcttcccttcttcccccgtacctctcaccagcggtgtcttcggtatgtgaaaacccaattcttcaaccctacaggatccaacaggcaatcgcagctggcatcttacctttatcacccttgttcctccaacaatcatcagccctattacaacagttacctttggtgcatttattggcacaaaacatcagggcacaacaactacaacaacttggtggcta

SEQ ID NO: 1708 - DNA, 335 bp, Zea mays
  unsure (1)..(335): unsure at all n locations; Clone ID: LIB3061-041-Q1-K1-F8
agcaacatagaaagcacaatagtgtaccaacaatggcagccaaaatattttgcctgcttatgctccttggtctttctgcaagtgctgctacggcgaccattttcccacaatgctcacaagctcctatagcttcccttcttcccccgtacctctcaccagcggtgtcttcggtatgtgaaaacccaattcttcaaccctataggatccaacaggcaatcgcagctggcatcttacctttatcacccttgttcctccaacaatcatcagccctattacagcagttacctttggtgcatttattggcacanaacatcagggcacaacaactaccaaca

SEQ ID NO: 1709 - DNA, 245 bp, Zea mays
  Clone ID: LIB3061-041-Q1-K1-F9
ccaccaaccaccactaccttcacaacaccttaaatacctactacaaatacctctaattccaaatcatacccaaattttaaaacccaaaaaccccaacattcactttcgacaacctttttaccacaaacacaatcccaaataccaaaacaatcattaacacatctaaccttaaaaaccataacaactcatcacaccacaccacttccccaacttaccctttccacccctaaccccttttcccttca

SEQ ID NO: 1710 - DNA, 355 bp, Zea mays
  unsure (1)..(355): unsure at all n locations; Clone ID: LIB3061-041-Q1-K1-E3
aagggtttgttgaagtcttagctgcacagcatagcccagataatccaaactggtttcagggtactgcaaatgctgtaaggcagtacttgtggttgtttgaggagcataatgtgatggaatttctaattcttgctggcgatcacctgtaccggatggactatgaaaagttcattcaggcacacagagaaacaaatgctgatattaccgttgctgccctaccgatggatgagaaacgtgcaactgcatttggcctcatgaaaattgatgaagaagggaggatcattgagtttgctgagaaaccgaaaggagagcagttgaaagcaatgatnggttgacnnaccaccaattaaccttt

SEQ ID NO: 1711 - DNA, 344 bp, Zea mays
  Clone ID: LIB3061-023-Q1-K1-G4
gcaacatagaaagtggaatccagtatcaacaatagagcaacaatggcgaccaagagattttgcctccttatgctccttgctctttctacatgtgttgctaacgcgacaattttccctcaatgctcacaagctcctatagcttcccttcttcccccataccttccatcaattatagcttcaatatgtgaaaacccagctcttcaaccatataggcttcaacaagcaatcgcagcaagcaacatacctttatcgcccttgttgtttcaacaatcgccagccctatctttggtgcagtcattggtacaaaccatcagggcacaacagctgcagcaactcgtgctacc

SEQ ID NO: 1712 - DNA, 430 bp, Zea mays
  Clone ID: LIB3061-023-Q1-K1-G5
ggcagcaccccgatcctgggccagtgcgtcgagttcctgaggcatcagtgcagccggacggcgacgccctactgctcgcctcagtgccagtcgttgcggcagcagtgttgccagcagctcaggcaggtggagccgcagcaccggtaccaggcgatcttcggcttggtcctccagtccatcctgcagcagcagccgcaaagcggccaggtcgcggagctgttggcggcgcagatagcgcagcaactgacggcgatgtgcggcctgcagcagccgactccatgcccctacgctgcatgccgcggtgtcccccactgaagaaactatgtgctgtagtatagccgctggctagctagctagttgagtcatttagcggcgatgattgagtaaatatgtgtcacgcatcaccatgggtggcagtgtcagtgtgagc

SEQ ID NO: 1713 - DNA, 447 bp, Zea mays
  Clone ID: LIB3061-023-Q1-K1-G6
acccacgcgtacaggacagacccatgacactattaccagttgaccagcaactgcgaccaaaaggcaaccggtccttaaccacctagctctctctacatgtcctgctaacgcgacaatattgcctcaatgctcacaagctcctatagcttcactacttgcaccataccttccatcaattatagcttcaatatatgaaaacccagctcttcaaccatatacgcttcaacaagcaatcgcagcaagcaacatacctttatcgcccttgatgattcaacaatcagcagccctatctatgctgcaatcattggtacaaaccatcagggcacaacagctgcagcaactcgtgctacctctgatcaaccaagtatctcttgcaaaccttactccctactctcagcaacaacaatttcttccattcaaccaactgtctacactgaaccctgctgc

SEQ ID NO: 1714 - DNA, 335 bp, Zea mays
  Clone ID: LIB3061-023-Q1-K1-G7
ggcagaggaggcacgagtcctgcaagagaagaacgtgggcgtgaaaggcgtctgtaggaagactaccgacgagtcggagcacttcatctggagggacggcgtcaaggtcccctgcggcaagctggtgccgtctgcgaacaacgacggcccgctcgagtacaacgagtacgccgtgtacgaccccaatctggtgagcatctgcttcctggacggggtgaactactaggagcagaacatggatgtggtgccgccggacgaccagtgaaggagtcgtctcgttgagtgtcctagggcatggcatggcatgccaggccaggaagtggtgggacccattt

SEQ ID NO: 1715 - DNA, 375 bp, Zea mays
  Clone ID: LIB3061-023-Q1-K1-G8
gcaacatagaaagcacaatagtgtaccaacaatggcagccaaaatatttggcttcgttatgctccttggtctttctgcaagtgttgctaccgcaaccattttcccacaatgctcacaagctcctatagcttcccttcttcccccatacctctcaccagcggtgtcttcaatgtgtgaaaccccaattgttcaaccctacaggatccaacaggcaatcgcaacaggcatcttaccattatcacccttgttccttcaacaaccgtcagccctattacagcagttacctttggtccatttggtggcacaaaacatcaaggcacaacaactacaacaacttgtgctagcaaaccttgctgcatactctcagcaacatca

SEQ ID NO: 1716 - DNA, 399 bp, Zea mays
  Clone ID: LIB3061-023-Q1-K1-G9
cccacgcgtccgaagatattttccctccttatgctccttgctctttctacatgtgttgctaacgcgacaatcttccctcaatgctcacaagctcctatagcttcccttcttcccccataccttccatcaattatagcttcagtatgtgaaaacccagctcttcaaccatataggcttcaacaagcaatcgcagcacgcaacatacctttatcgcccttggtgtttcaacaatcaccagccctatctttggtgcagtcattggtacaaaccatcagggcacaacagctgcagcaactcgtgctacctgtgatcaaccaagtagctgtggcaaacctttctccctactctcagcaacaacaatcttctgcattcaaccaactgtctacactgaaccctgct

SEQ ID NO: 1717 - DNA, 400 bp, Zea mays
  Clone ID: LIB3061-023-Q1-K1-H11
cccagactctgcaaaaggctataaaactcgtggaatggcatatgccatgcttggcaaatgggaggaagctgctcatgatctgcacacagcatctaacatggattacgacgaggagatcaatgctgtgctcaagaaggtggagcctaatgctcacaagatagtggaacatcgcaggaagtatgagaggttgagaaaagagagggaggaaaagagagcgcagcgtgatcggcttcgtcaacgtgcagaggcgcaggctgcttacgacaaggccaagaagaaagagcaatcgtcaagtcgctcatcaggaggtgcatctcccagaggctttcctggacggatgcctggtggtggtttccctagagggatgcccggtggaggtttcccccggggtggcatgcct

SEQ ID NO: 1718 - DNA, 307 bp, Zea mays
  Clone ID: LIB3061-023-Q1-K1-H2
tgtcttgagacaacaacatttgttgccattttacccacaagttgtgggaaacattagtgccttcttgcaacagcaacaattgctaccattctacccacagaatgtggcaaacattgttgccttcttacaacaacaacaattgctaccatttagccaacatgctttgacgaatcctaccaccttattgcaaccgcccaccattggtggtgccatcttctagattttttatgatttatactgtaataataaagttctcatgctgatatgtgcgacctctcagtaataaagtattagagatctatatttt

SEQ ID NO: 1719 - DNA, 429 bp, Zea mays
  Clone ID: LIB3061-023-Q1-K1-H3
attgagaccaactagcaacatagaaagcacaatagtgtaccaacaatggcagccaaaatattttgcttccttatgctccttggtctttctgcaagtgctgctaccgcaaccattttcccacaatgctcacaagctcctatagcttcctttcttcccccatacctctcaccagcggtgtcttcagtatgtgaaaacccaattcttcaaccctacaggatccaacaggcaatcgcagcaggcatcttacctttatcacccttgttcctccaacaaccgtcagccctattacagcagttacctttggtgcatttgttggcacaaaacatcaaggcacaacaactacaacaacttgtgctaggaaaccttgctgcctactctcagcaacagcagtttcttccattcaaccaactggctgcattgaactctgct

SEQ ID NO: 1720 - DNA, 288 bp, Zea mays
  Clone ID: LIB3061-023-Q1-K1-H4
gagccacgcgtccgcgagatattagccctccttgcgcttcttgcccttttagtgaccgcaacaaatgcgtgcattattccacagtgctcacttgctcctagtgccattattccacagttcctcccaccagttacttcaatgggcttcgaacatccagccgtgcaagcctacaggctacaactagcgcttgcggcgagcgccttacaacaaccaattgcccaattgcaacaacaatccttggcacatctaaccctacaaaccattgcaacgcaacaacaacaacaacaa

SEQ ID NO: 1721 - DNA, 320 bp, Zea mays
  Clone ID: LIB3061-023-Q1-K1-H5
agcgctctcactagcctcgcattccgtccctgcagtgcaggggcaggccggtgaggtctgggagaggaggaggaggaggagatggccggtagggagagcggcgggatggcggcggcgctgcgctgcgctggaaggatcgggatcctggccaccgtcgcagtgaacctcgcgtggatcgcgacgtacatccgccggcgctacttcggcggcgggaaccgatccgacaacaacggtggcggcggtgaagtggagccgtcaagagggaagccgccggtcacttcggactccatcgtcaacctcgatcatggcgacccgactat

SEQ ID NO: 1722 - DNA, 356 bp, Zea mays
  Clone ID: LIB3061-023-Q1-K1-H6
cgggatattagccctccttgcgctttttgcccttttagtgagcgcaacaaatgcgtgcattattccacagtgctcacttgctcctagtgccattattccacagttcctcccaccagttacttcaatgggcttcgaacatccagccgtgcaagcctacaggctacaactagcgcttgcggcgagcgccttacaacaaccaattgcccaattgcaacaacaatccttggcacatctaaccctacaaaccattgcaacgcaacaacaacaacaacaacagtttctgccatcactgaaccacctagccgtggtgaaccctgtcacctactttgcacagcagctgcttgcattccacccaa

SEQ ID NO: 1723 - DNA, 367 bp, Zea mays
  Clone ID: LIB3061-023-Q1-K1-H9
cacgtctcccagatgtaacttcccgcgtctcacgaagcccagagagcctccatggcgacgcaccgccactgcctcccactcctcctcgtggccgccgccctcgccctcgccgtcgtccctgctcgcgcatcgctgggcggcgggcgctgcccgctgctgtgcgggtggaacccgatccctgacgtgagcgactcgcacatccaggagctaggcgggtgggcgctggggcaggcgaagcaccagatgctggccgtccacgggctgcggttccgacgcgtggtgcgctgcgagcagcaggtcgtgtccgggatgaactacccgctctacgtcgacgccgacgaccccgacggtcgcaccgagcactacg

SEQ ID NO: 1724 - DNA, 433 bp, Zea mays
  Clone ID: LIB3061-023-Q1-K1-G3
gtgaaatttggccaagcagcctggtagcacaattcagatacttggtgcagagaaggctttatgcagagctctaaagacaaagcattctacacctaagtatggcctcatctaccatgcatccttaattggcaaggcttctcaaaagcacaagggaaaaatctctcgttctcttgctgcaaaaacagctcttgctatccggtatgatgcccttggtgatggtgaggacaactccattggcactgagagtcgacttaagcttgagacacggcttcaagttcttgagggtagagaacttgggaaatctgctggttccacaaaggggaagcccaagatagaagtgtatgaaaaggaccggaagaagggtactggggctttaacaactcctgctaagacatataaccctgcagctgatctggtactcacggaagaaaca

SEQ ID NO: 1725 - DNA, 292 bp, Zea mays
  Clone ID: LIB3061-023-Q1-K1-F1
agtcaggggtacgctggtatttgacagccgagtttccagtctccagcctcaaggatcgcgtacgggggagggggtacccagatcggcagacgtgcatccaaatgtacacacgtcgcgttccaatagaggacgatcagaggatccacgctagctaccaaaggctctatgacagaagggtcaaacgagtgctcgatctacggtagaacagaagtgttagcgatggcgagaggcctcataagtagaacgtgccttgtcaacactagcggcgggaactctgaccagcttgtcgagg

SEQ ID NO: 1726 - DNA, 415 bp, Zea mays
  unsure (1)..(415): unsure at all n locations; Clone ID: LIB3061-023-Q1-K1-F10
attgagaccaactagcaacatagaaagcacaatagtgtaccaacaatggcagccaagatattttgcttccttatgctccttggtctttctgcaagtgttgctaccggaaccattttcccacaatgctcacaagctcctatagcttcccttcttcccccatacctctcaccagcggtgtcttcaatgtgtgaaaacccaattgttcaaccctacaggatccaacaggcaatcgcaacaggcatcttaccattatcacccttgttcctccaacaaccgtcagccctattacagcagttacctttggtccatgtggtggcacaaaacatcagggcacaacaactacaacaactngtgctagcaaaccttgctgcatactctcagcaacattcagttcttccattcaaccaactggctg

SEQ ID NO: 1727 - DNA, 360 bp, Zea mays
  Clone ID: LIB3061-023-Q1-K1-F11
gagcattcagaaacacaccaagcgaagcacattagcaacaacctaacaacaatggctaccaagatattatccctccttgcgcttcttgcgctttttgcgagcgcaacaaatgcgttcattattccacaatgctcacttgctccaagttccattattacacagttactcccaccagttacttcaatgggcttcgaacacccagctgtgcaagcctataggctacaacaagcaattgctgcgagcgtcttacaacaaccaatttcccagttgcaacaacaatccttggcacatctaacaatacaaaccatcgcaacgcaacagcaacaacaattcctaccagcactgagccacctaaccatg

SEQ ID NO: 1728 - DNA, 385 bp, Zea mays
  Clone ID: LIB3061-023-Q1-K1-F12
gagaccaactagcaacatataaagcacaatagtgtaccaacaatggcagccaaaatgttttgcctccttatgctccttggtctttctgcaagtgctgctacggcgaccattttcccgcaatgctcgcaagctcctatagcttcccttcttcccccgtacctctcaccagcggtgtcttcggtatgtgaaaacccaattcttcaaccctacaggatccaacaggcaatcgcagctggcatcttacctttatcacccttgttcctccaacaatcatcagccctattacaacagttacctttggtgcatttattggcacaaaacatcagggcacaacaactacaacaacttgtgctagcaaaccttgctgcctactctcagcaacagc

SEQ ID NO: 1729 - DNA, 236 bp, Zea mays
  Clone ID: LIB3061-023-Q1-K1-F3
gaggaaggtgctctagcggatgccgactgagctattgcaagtggataccaaaagggggataggcaaccgcgctattaacatgaccgtgtgcgcatcgcccaactacgtacgccattgccgcgatgtcagcctgcgtctgctggatacctgatgcattgacctgtactaccagtatcaactctatgccatcgtacatatttatgatacgatcggtgagctgaaatactgtgcatatg

SEQ ID NO: 1730 - DNA, 333 bp, Zea mays
  Clone ID: LIB3061-023-Q1-K1-F4
atcgactccagattggagaactcgacaccatgaacgtgctgatcgttgcccttgcggtcctggcgctcgctgcgagcgccgcctccagtacaagctgcggctgtggctgccagacaccaccgcttcatctaccggctccgttctatatgccgcctccgctctatctgccgtcgcagcagcagccgcagccatggcaataccccactcaaccaccgcagctaagcccgtgccagcagttcggatcctgcggcgtcatgcagcgtcggcagcccgttcctgagccagtgcgtcgagttcctgaggcaccagtgcagcccggcggcgacaccctac

SEQ ID NO: 1731 - DNA, 360 bp, Zea mays
  Clone ID: LIB3061-023-Q1-K1-F5
caactagcaacatagaaagcacaatagtgtaccaacaatggcagccaaaatattttgcctccttatgctccttggtctttctgcaagtgctgctacggcgaccattttcccacaatgctcacaagctcctatagcttcccttcttcccccgtacctctcaccagcggtgtcttcggtatgtgaaaacccaattcttcaaccctataggatccaacaggcaatcgcagctggcatcttacctttatcacccttgttcctccaacaatcatcagccctattacagcagttacctttggtgcatttattggcacaaaacatcaaggcacaacaactacaacaacttgtgctagcaaaccttgc

SEQ ID NO: 1732 - DNA, 193 bp, Zea mays
  Clone ID: LIB3061-023-Q1-K1-F7
cattcaaccaacttgctttgtcaaacccaacagcattctaccaacaacccatcattggtggtgccctcttttagatttcttatgagttatagttcaataataaagctttttgtctgatgtttgtggcttcccagaaataacaaagtacatttatcaatactacaagtatcaactctataccaacgtaaaaata

SEQ ID NO: 1733 - DNA, 440 bp, Zea mays
  Clone ID: LIB3061-023-Q1-K1-F8
cccagctcttcagccctataggctcctaacaagcaatcgcagcaagcaacatacctggatcacccttgttgtttcaacaatcgccagccctatctttggtgcagtcattggtacaaaccatcagggcacagcagctgcagcaactcgtgctacctgtgatcaaccaagtagctctggcaaacctttctccctactctcagcaacaacaatttcttccattcaaccaactgtctacactgaaccctgctgcttatttgcagcaacaactattaccattcagccagctagctactgcctactctcagcaacaacaacttcttccatttaaccaattggccgcactgaaccccgctgcttatttgcagcagcaaatactactaccatttagccagctagctgcagcaaaccgtgcttccttcttgacacagcaacagttgctg

SEQ ID NO: 1734 - DNA, 373 bp, Zea mays
  Clone ID: LIB3061-023-Q1-K1-F9
gtcccctccccctatggcagtcatcctccattgcttcctcctacaagatctgcccctgacgcagcaaggatcgagaaaaggaggggcacgttgaattgaagaggaagagaggatcaaggatatgttcttccccattttctcttgaagatttcttggggaaaccctacgtggctacactacagatcatgtctagtacatttcttcttcttcgatgaaggagcttgatgctcatcaaggggagtgggaagtagcagcacatacaccttcattctcataataatgctgtccagacgcagacatgatttaatcagcaacttcttgtcagaggatgcttagcttgaactagactgtcgcactgattaattcatttcat

SEQ ID NO: 1735 - DNA, 395 bp, Zea mays
  Clone ID: LIB3061-023-Q1-K1-G10
ctccattcgacaggtcacagacaagcctattctgatatatcccaacagtggtgaaagatatgatggtgaaaaaaaggagtgggtggaatccactggtgtgtcagatggtgattttgctttcgtacgtaaatgaatggtgcaaagatggggctgcgcttatcgggggctgctgcatgacaactccaaacactatcagggccatacacagaactcttaaccaaggctgtcacaagcatcagttacctgtagcatagatctgtgctccactcctgatgctctactaccagcaatacctcgagctgtatacccgagattgcttaaccagcgcgaaccaatatactgttgcgtgttctcctgctaatgagatgttctgcaactatgtgcgtaatgttgta

SEQ ID NO: 1736 - DNA, 324 bp, Zea mays
  Clone ID: LIB3061-023-Q1-K1-G11
gacggatgcatccactcgtacgagcaatcgcagaagcattatacctttataggcttcgtggtctcaacaggggccaggcctatcttaggtgcagccatgggtgctaaacaagttaggtgatacatcagcctgcagcaactattgctacctttgatcatccatgtagctttggcaaacctatctctctactcttatcagcaacaatatgttacattcaaccgactgattacactgtaccctgctgcgtattagcagtaaccactattaccatttatgcagctagcgtctgactactttaagcaacaacagctgcatccatttaac

SEQ ID NO: 1737 - DNA, 153 bp, Zea mays
  Clone ID: LIB3061-023-Q1-K1-G12
actagttctagatcgcgagcggccgtgcttattcttgttggtataagaactttgtgggtagattagtagattgtacagctacgggagggggctatataaaattacggaagtcggccaaaaaaattacatgagagccatatagttctactttct

SEQ ID NO: 1738 - DNA, 335 bp, Zea mays
  Clone ID: LIB3061-023-Q1-K1-G2
gtgcaggcaagatctagtgccttgatgaatgctcgtcttgctgatgtgtgcattggcacgtgcgcagcaccgacggtcctccctgcgcactactttgaaaccgtggatcaccgcactggcgcatcgcgtagcttcaacgttatcgacgggggcctcgccgcaaacaatccggtgcttatttattgcttgcttggttatagtagtagttatttttctttcttctggctgggttttgacgactagcatgaaatcatgtgcgtatgttgctatgatctttttgtccctgtccctgtcctgtcctgtgatctgacagactctggtggcgattggtgaga

SEQ ID NO: 1739 - DNA, 407 bp, Zea mays
  Clone ID: LIB3061-023-Q1-K1-E9
gttccgggcttgacggatgcatccaggctatcgaagtaggaacatagagaggacatgaacgctactgcctttaccagtaagatagatggccaacttttcttgaagcctaacaggccagcacttgttgtgagcagcacaagctggactccagatgaacatttaaggatacttttggaagcaggactaatgtacgacagacgcgtcgctgcagctttaggtgaagatgattcaatggatgaagggcaactgtggattgatatcaataacgggaagcagattgtctacccaagattactgatcattattacaggtgaaggacctgataggacgaaatatgaggatcaaattaaaaggtcgaagtcgacacgtgctggcttgcggacaatgtggcttgcatcagaggacta

SEQ ID NO: 1740 - DNA, 421 bp, Zea mays
  Clone ID: LIB3061-023-Q1-K1-D4
acgcgtccgagtttgagcattcagaaacttaccattcgaagcacattagcaacaacctggcaacggtggctaccaagatattatccctccttgcgcttcttgcgctttttgcgagcgcaacaaatgcgttcattattccacaatgctcacttgctccaagttccattattacacagttcctcccaccagttacttcaatgggcttcgaacacccagctgtgcaagcctataggctacaacaagcaattgcggcgagcgtcttacaacaaccaatttcccagttgcaacaacaatccttggcacatctaacaatacaaaccatcgcaacgcaacagcaacaacaattcctaccagcactgagccacctagccatggtgaaccctgccgtctacttgcaacagcagttgcttgcattaaaccc

SEQ ID NO: 1741 - DNA, 402 bp, Zea mays
  Clone ID: LIB3061-023-Q1-K1-D5
acggggccacataccacatagattgaagtttacactatcaaacatcgatcaccgagtctgggccaaaatatatcccattctgatcctccttgccttttttggaactcaacataagcctacattattccacaatgctcacttgctcctagtgccattattccacagttcctaccttcagttacttcaatgggcttcgaacacccagctgtgcaagcctacaggctacaacaagcgcttgctgcgagcgtcttacaacaaccaattgcccaattacaacaacaatccttggcacatctaaccatacaaaccatcgcaacgcaacatcaacaacaatttctaccagcactgagccaactagctgtggtgaaccctgtcgcctacttgcaacagcagttgcttgca

SEQ ID NO: 1742 - DNA, 434 bp, Zea mays
  Clone ID: LIB3061-023-Q1-K1-D6
gaatttgcatcctcatcctgcggctgtcagtgtcaagcagccaggctcagggggttccggtgggatcggcagtgggtggtggtgaacgccaaagggcgagcatacacccagagggtggagcccaagcttgctctggtccaggtggagttgccgacggaggccttcgctgagaactggcagcccacgcccgactaccacctggttatcacagcacccggaatggacacactgaagatacctataataacggaacacaccacaatcgatgatgtctctgtctgggagtggtctggctctgcgtatgatgaacgggctgaagcgtctgaatggttcttcacttactttgggaagccaagtctactagtgcgctctaaagaagcatcggaaactaggccaaccgatccagattatgcccaaggttatcagatcatgtt

SEQ ID NO: 1743 - DNA, 408 bp, Zea mays
  Clone ID: LIB3061-023-Q1-K1-D7
gaccaacaagcaacatagaacgtggaatacagtcgcaaaaatagagcaacgatggcggccaagatattttccatccttatgctccttgctctttctgcatgtgttgctaacgcgaccatttttcctcaatactcacaagctcctatagctgcccttcttacccccataccttccatcaatgaccgctttagtatgtgaaaacccagcccttcaaccctacaggatccagcactgcaatcgcaacaagcaacttacctttatcacacctgttctttcaacaatcgccagccctatctttggtgcagtcattggtacaaaccatcaaggcagaacagttgcagcaactcgtgctaccagtgatcagccaagtagctctggcagacctttccccctactgtcagcaacaac

SEQ ID NO: 1744 - DNA, 430 bp, Zea mays
  unsure (1)..(430): unsure at all n locations; Clone ID: LIB3061-023-Q1-K1-D8
attttgagcattcagaaacacaccatgcgaagcacattagcaacaacctagcaacgatggctaccaagatattatccctccttgcgcttcttgcgctttttgcgagcgcaacaaatgcgttcattattccacaatgctcacttgctccaagttccattattacacagttcctcccaccagttacttcaatgggcttcgaacacccagctgtgcaagcctataggctacaacaagcaattgcggcgagcgtcttacaacaaccaatttcccagttgcaacaacaatccttggcacatctaacaatacaaaccatcgcaacgcaacagcaacaacaattcctaccagcactgagccacctagccatggtgaaccctgccgnctacttgcaacagcagttgcttgcatcaaacccacttgctctggcaaacgt

SEQ ID NO: 1745 - DNA, 320 bp, Zea mays
  Clone ID: LIB3061-023-Q1-K1-D9
cagctagcaacatacaaagctcaatattgtaccaacaatggcagccaaaagattagggctccttatgctccttggtctttctgcaagtgctgctaccgcgaccattttcccacaatgctcacaagctactatagcttaccttcttcccccgtacctctcaccagcggtgtcttcggtatgtgaaaacccaattcttcaaccctataggatccaacacgcaatcccagctggcatattacctttatcacacttgttcctccaacaatcatcagccctattacagcagttacctttggtgcatttattgccacacaacatca

SEQ ID NO: 1746 - DNA, 427 bp, Zea mays
  Clone ID: LIB3061-023-Q1-K1-E1
gctcctagtgccattataccacagtttctccgaccagttacttcaatgggcttcgagcacctagctgtgcaagcctacaggctacaacaagcgcttgcggcgagcgtcttacaacaaccaattaaccaattgcaacaacaatccttggcacatctaaccatacaaaccatcgcaacacaacagcaacaacagttcctaccagcactgagccaactagatgtggtgaaccctgtcgcctacttgcaacagcaggtgcttgcatccaacccacttgctctggcaaacgtagctgcataccaacaacaacaacaattgcaacagtttctgccagcgctcagtcaactagccatggtgaaccctgccgcctacctacaacagcaacaactgctttcatctagccctctcgttgtgggtaatgcacctacat

SEQ ID NO: 1747 - DNA, 281 bp, Zea mays
  Clone ID: LIB3061-023-Q1-K1-E10
gccgccgctgcttcttcatcttcctcgcagcgccggcgctccatcttactctccctggcttactagcgcttggcacgcaggtgacggctgcagcgactgcgttcaggctcgggctctcaatgacggcatcagcggcttccccttccgactcttggcagtcctatcgcgcactcgcctcgggtcctctgcacaccgtgcagtgaccgtgcgtgatggactggataaagtcttgcagcgatcttaccgcaagtgatgaggaacagcatgcattgcttgataat

SEQ ID NO: 1748 - DNA, 422 bp, Zea mays
  unsure (1)..(422): unsure at all n locations; Clone ID: LIB3061-023-Q1-K1-E11
cccacgcgtccgagaccattagctttatctactccagagcgcagaagaacccgatcgacaccatgagggtgttgctcgttgccctcgctctcctggctctcgctgcgagcgccacctccacgcatacaagcggcggctgcggctgccagccaccgccgccggttcatctaccgccgccggtgcatctgccacctccggttcacctgccacctccggtgcatctcccaccgccggtccacctgccgccgccggtccacctgccaccgccggtccatgtgccgccgccggttcatctgccgncgccaccatgccactaccctactcaaccgncccggcctcagcctcatccncagccacacccatgcccgtgccaacagccgcatccaagcccgtgccagctgcagggaacctgcggcgttggc

SEQ ID NO: 1749 - DNA, 337 bp, Zea mays
  Clone ID: LIB3061-023-Q1-K1-E12
agccttccgtaaccattacaaaacacaccacgctacgcacattagccacactctcagcgctgtggtctccgatataatacctccttgtgctctttgtgctctttgtgagcagcagcacatgcgctcattattccacaacactgactagttcctagtaccattattacacagcagctcctaccacctacttcaatggtgttcgaacacccagctgttcaagcctatatgctacatcaagcaattactgccagcgacctacatcaaccaatttaccagctacaacaacaatcattggcacatctcactatacaaaccatcgcatcgcaacagaaacgac

SEQ ID NO: 1750 - DNA, 440 bp, Zea mays
  unsure (1)..(440): unsure at all n locations; Clone ID: LIB3061-023-Q1-K1-E2
agaccaacaagcaacatagaaagtggaatccagtagcaacaacagagcaacaatggcgaccgagatattttccctccttatgctccttgctctttctgcatgtgttgctaacgcgacaattttccctcaatgctcacaagctcctatagcttcccttcttcccccataccttccatcaatgatagcttcagtatgtgaaaacccagctcttcagccctataggctccaacaagcaatcgcagcaagcaacatacctttatcacccttgttgtttcaacaatcgccagccctatctttggtgcagtcattggtacaaaccatcagggcacagcagctgcagcaactcgtgctacctgtgatcaaccaagtagctctggcaaacctttctccctactctcagcaacaacaatntcttccattcaaccaactgtctacactga

SEQ ID NO: 1751 - DNA, 369 bp, Zea mays
  Clone ID: LIB3061-023-Q1-K1-E4
tccgggcacgcgtacgcccgactttctgtttgtcctggacgcattcacgttccgcgccggggccattcatggcctgaagggggccccgtcgtcggccgctgaggacacgctcacaatgcctaccagcgcgcgcgctgggcccacgcaccagcatcaggcgcgcctagggggcaggttcacgtagctcgctcatgtgcaccagcgcctgcatgaacgtcgtcttagtcggcgccgcgattgagccatgtaccaagaccggaggcctaagcgacgttctcagtggcctgactgcggtcattggcctcaactggctccgtgtcatggcagcctctaccacctacgaccagtacaaggactcctgggacacca

SEQ ID NO: 1752 - DNA, 421 bp, Zea mays
  Clone ID: LIB3061-023-Q1-K1-E6
ggcaatcgcagctggcatcttacctttatcacccttgttcctacaacagtgatcagcgcctattacagcagttacctttggtgcatttattggcacaaaacatcagggcacaacaactacaacaacttgtgctagcaaaccttgctgcctactctcagcaacagcagtttcttccattcaaccaactagctgcattgaactctgcttcttatttgcaacaacaacaactaccattcagccagctacctgttgcctacccccaacaatttcttccattcaaccaactggcagcattgaactctcctgcttatttacagcagcaacaactactaccattcagccagctagctggtgtgagccctgctaccttcttgacacaaccacagttgttgccgttctaccagcacgctgcgcctaacgc

SEQ ID NO: 1753 - DNA, 385 bp, Zea mays
  Clone ID: LIB3061-023-Q1-K1-E7
cccgtatttgacggccgtggccctgacgccagcctcgtggctcgcgtacagggagtggctacccagatgggcgacgtgcgccagttgtacaccgtcgtgttccaggagaggccgctcaagggctccacgctcgtcaccgaaggcgcgatgacagaagggtcagacgagtgggcgatctactgtggaactggagtgttcgcgatggcgagaggcgtcataaggagaacgtttcttgccgacacgagcggcgggaacttcgacgagcttgccgtggaggttctctgcccggtgttccagccggcggtgtttggctcatcgtcgtcacagccagctgcaaaggacatcagctacaccgtcgtcgtcaccaaggtcggtatgtggggtg

SEQ ID NO: 1754 - DNA, 432 bp, Zea mays
  Clone ID: LIB3061-023-Q1-K1-E8
cgcacgcgtccgcccgccggcctgggcgtcccggacgcgtccacgttccgccgcggcgccgcgcagggcctgaggggggcccgggcgtcggcggcggcggacacgctcagcatgcggaccagcgcgcgcgcggcgcccaggcaccagcagcaggcgcgccgcgggggcaggttcccgtcgctcgtcgtgtgcgccagcgccggcatgaacgtcgtcttcgtcggcgccgagatggcgccgtggagcaagaccggcggcctcggcgacgtcctcggcggcctgccgccggccatggccgcgaacgggcaccgtgtcatggtcgtctctccccgctacgaccagtacaaggacgcctgggacaccagcgtcgtgtccgagatcaagatgggagacgggtacgagacggtcaggttctttcactgctacaagcgc

SEQ ID NO: 1755 - DNA, 395 bp, Zea mays
  Clone ID: LIB3061-023-Q1-K1-D3
attttgagcattcagaaacacacctagcgaagcgcactagcaacgacctaacaacaatggctaccaagatattatccctctttgcgcttcttgccctttttgtgagcgcaacaaatgcgttcattattccacaatgctcacttgctcctagtgccattattccacagttcctccctccagttacttcaatgggcttcgaacacccagctgtgcaagcctacaggctacaacaagcgcttgcggcgagcgtcttacaacaaccaattgcccaattacaacaacaatccttggcacatctaaccatacaaaccatcgcaacgcaacagcaacaacaatttctaccagcactgagccaactagctgtggtgaaccctgtcgcctacttgcaacagcag

SEQ ID NO: 1756 - DNA, 424 bp, Zea mays
  Clone ID: LIB3061-041-Q1-K1-C9
cttgaaaccgacgacgaggccatatgctggggaattgcatattgtgtcaagggtggtgcagaaaaagagctaaaagcaatgcagtacttggagagaagagagtgtgagtacgaccagaagatatccattgatttctacaaggaaggagatcccttgaaaccagctgtgacaggcgtcttagtgttcgtttccactccagatccaattggcaacaagtactatcttggccctgctcctttgcaggatatggcaaggcaaattgctacagccaatggccctactggctataatagggattacctgttctcaatggagaaggcattagccagcattagccacgaagatgattcgatcatagagcttgcaaacgaggtgaggaaggtgctcaacagaacataggagaccaagatcactggtgccaatg

SEQ ID NO: 1757 - DNA, 416 bp, Zea mays
  unsure (1)..(416): unsure at all n locations; Clone ID: LIB3061-041-Q1-K1-D10
ctcgactcgtggggaagtttcgctctcgcccgcgtcgacttcctagggttcgaggaacgtccgtccgtccgtccggggaaggagcaggagggaggcggagatgatcgaggtggtgctcaacgaccgcctggggaagaaggtgcgggtcaagtgcaacgaggacgacaccatcggcgacctcaagaagctggtggcggcgcagacggggacgcgccccgagaagatccgcatccagaagtggtacaacatctacaaggaccacatcaccctcaaggactacgaggtccacgacggcatgggcctcgagctctactacaactgagccgnncgccctctctccctctcgtcaggttggtctgaattctgaagtcatgggtgcaattcgcttcgcggtgatctcttaagctcatcacata

SEQ ID NO: 1758 - DNA, 360 bp, Zea mays
  Clone ID: LIB3061-041-Q1-K1-D11
ctcccaccgccggtccacctgccgccgccggtccacctgccaccgccggtccatgtgccgccgccggttcatctgccgccgccaccatgccactaccctactcaaccgccccggcctcagcctcatccccagccacacccatgcccgtgccaacagccgcatccaagcccgtgccagctgcagggaacctgcggcgttggcagcaccccgatcctgggccagtgcgtcgagtttctgaggcatcagtgcagcccgacggcgacgccctactgctcgcctcagtgccagtcgttgcggcagcagtgttgccagcagctcaggcaggtggagccgcagcaccggtaccaggcgatcttcggc

SEQ ID NO: 1759 - DNA, 417 bp, Zea mays
  Clone ID: LIB3061-041-Q1-K1-D12
gaccaggacgacgaggacggcgctggtggtgctagtagccgcggcgacaagagacggggccagaaagacgacggcgtcggccagcagggccacggcggcggacgtggtgaggcagttctacgacggggtgaaccggcgggacctggcggcggtggagccgctcatcgcggagggctgcgtgtacgaggacctggtgttcccgcgccccttcgttgggcgggagcgtgtggtcggcttcttcggcgagttcatggggaccatcagccccgacctgcagttcgtcatcgacgacatctccgccgaggactccgccgccgtcggggtcacctggcacctggagtggagggggaggccgtttcccttcagcaggggatgcagcttctaccgcttgctcggctcgggctcggactcggacgc

SEQ ID NO: 1760 - DNA, 348 bp, Zea mays
  Clone ID: LIB3061-041-Q1-K1-D2
cgagaccaactagcaccatagaaagcacaatagtgtaccaacaatggcagccaaaatattttgcttccttatgctccttggtctttctgcaagtgctgctaccgcaaccattttcccacaatgctcacaagctcctatagcttcctttcttcccccatacctctcaccagcggtgtcttcagtatgtgaaaacccaattcttcaaccctacaggatccaacaggcaatcgcagcaggcatcttacctttatcacccttgttacttcaacaaccgtcagccctattacagcagttacctttggtgcatttgctggcacagaacatcaaggcacaacaactacaacaact

SEQ ID NO: 1761 - DNA, 109 bp, Zea mays
  Clone ID: LIB3061-041-Q1-K1-D3
ccggaagcactcttacagaagcgcgctaacttcgacctaccatcgctggttaccaagatgttacccctaaaagggcggcatgcccaccttgggaccgcacaaacgcccg

SEQ ID NO: 1762 - DNA, 352 bp, Zea mays
  unsure (1)..(352): unsure at all n locations; Clone ID: LIB3061-041-Q1-K1-D4
cccgctcgaccacgcgtccgggcaatttgaagataaatttgacacacttgcacatataggaagggtatgggttcaaatatctttgatatatattaatgtctttggagtgcagatgacaatagtttcacccctccctattcctttacggtgatgtggtaagttgtttatggcttaatgcttgatataatttatttctgaaattttgatattgttttattaatgcggtagatatcgctggtcattggtgagaatgaagttgttattatgcttgtgatatacaagtatgcctatngttgtttcaccatgtttttcatgggtgaagtttattacaataatattggtatatatgctt

SEQ ID NO: 1763 - DNA, 338 bp, Zea mays
  unsure (1)..(338): unsure at all n locations; Clone ID: LIB3061-041-Q1-K1-D5
gcaagcaacatagaaagtagaatccattagcaacaatagagcaacaatggcgaccaagatattttccctccttatgctccttgctctttctacatgtgttgctaacgcgacaattttccctcaatgctcacaagctcctatagcttcccttcttcccccataccttccatcaattatagcttcagtatgtgaaaacccagctcttcaaccatataggcttcaacaagcaatcgcagcaagcaacatacctttatcgcccttgttgtttcaacaatcaccagccctatctttggtgcagtcattggtacaaaccatcagggcacaacagctnngcagca

SEQ ID NO: 1764 - DNA, 329 bp, Zea mays
  Clone ID: LIB3061-041-Q1-K1-D6
agatccattgattgatcggacggacgcgcgtctccggtcccgtccgtaataacactgatccgatccacgccggccggcgatggagctcatcaagtccagggcgaccgtgtgcgcgctcctcctggcgctgctcctgctctcacactacgacggcgggacgacgacgacgatggtggcggaggcccgggtgtgcatgggcaagagccagcaccactcgttcccctgcatctccgaccgcctctgcagcaacgagtgcgtcaaggaggacggcgggtggaccgccggctactgccacctccgctactgcaggtgccagaaggcgtgctaag

SEQ ID NO: 1765 - DNA, 338 bp, Zea mays
  unsure (1)..(338): unsure at all n locations; Clone ID: LIB3061-041-Q1-K1-D7
ctgtctgcaagtgctgctacggcgaccattttcccgcaatgctcgcaagctcctatagcttcccttcttcccccgtacctctcaccagcggtgtcttcggtatgtgaaaacccaattcttcaaccctacaggatccaacaggcaatcgcagctggcatcttacctttatcacccttgttcctccaacaatcatcagccctattacaacagttacctttggtgcatttattggcacaaaacatcagggcacaacaactacaacaacttgtgctagcaaaccttgctgcctactctcagcaacagcagtttcttccattcaaccannactaggttcattg

SEQ ID NO: 1766 - DNA, 329 bp, Zea mays
  Clone ID: LIB3061-041-Q1-K1-D8
ggagagtttaccatgttggagctagcacaggttgtgaaggaaacaattgacccaatggcaaccattgaattcaaacccaacacagctgatgatccccatatgagaaagccagatatcaccaaggctaagcaactgctacattgggagccaaaggtctctctcaaagaaggccttccgctaatggttcaagatttccgtcaaaggatctcggatgagtaatcaaagcaattcttttttccccgaatgtgccatgcacgtgtttgtaatcagagcaatcgtatgatactggtgaccggtttgattctgaacgatgctgcaactacagtcag

SEQ ID NO: 1767 - DNA, 423 bp, Zea mays
  Clone ID: LIB3061-041-Q1-K1-D9
gagaccaactagcaacatagaaagcacaatagtgtaccaacaatggcagccaaagtatgttgcctccttatgctccttggtctttctgcaagtgctgctacggcgaccattttcccacaatgctcacaagctcctatagcttcccttcttcccccgtacctctcaccagcggtgtcttcggtatgtgaaaacccaattcttcaaccctataggatccaacaggcaatcgcagctggcatcttacctttatcacccttgttcctccaacaatcatcagccctattacagcagttacctttggtgcatttattggcacaaaacatcagggcacaacaactacaacaacttgtgctagcaaaccttgctgcctactctcagcaacaacagtttcttccattcaaccaactagctgcattgaactct

SEQ ID NO: 1768 - DNA, 428 bp, Zea mays
  Clone ID: LIB3061-041-Q1-K1-E10
gcaacatagaaagcacaatagtgtaccaacaatggcagccaaaatattttgcttcctgatgctccttggtctttctgcaagtgctgctaccgcaaccattttcccacaatgctcacaagctcctatagcttcctttcttcccccatacctctcaccagcggtgtcttcagtatgtgaaaacccaattcttcaaccctacaggatccaacaggcaatcgcagcaggcatcttacctttatcacccttgttcctccaacaaccgtcagccctattacagcagttacctttggtgcatttgttggcacaaaacatcaaggcacaacaactacaacaacttgtgctaggaaaccttgctgcctactctcagcaacagcagtttcttccattcaaccaactggctgcattgaactctgctgcttatttgcaac

SEQ ID NO: 1769 - DNA, 422 bp, Zea mays
  Clone ID: LIB3061-041-Q1-K1-E11
cacagttcctccgaccagttacttcaatgggcttcgaacacctagctgtgcaagcctagaggctacaacaagcgcttgcggcgagcgtcttacaacaaccaattaaccaattgcaacaacaatccttggcacatctaaccatacaaaccatcgcaacacaacagcaacaacagttcctaccagcactgagccaactagatgtggtgaaccctgtcgcctacttgcaacagcaggtgcttgcatccaacccacttgctctggcaaacgtagctgcataccaacaacaacaacaattgcaacagtttctgccagcgctcagtcaactagccatggtgaaccctgccgcctacctacaacagcaacaactgctttcatctagccctctcgttgagggtaatgcacctacatacctgcaacaacaa

SEQ ID NO: 1770 - DNA, 363 bp, Zea mays
  Clone ID: LIB3061-041-Q1-K1-E12
cccacgcgtccgcttccatttaaccaattggccgcactgaaccccgctgcttagttgcagcagcaaatactactaccatttagccagctagctgcagcaaaccgtgcttccttcttgacacagcaacagttgctgcctttctaccagcagtttgcggctaaccccgcaaccctcttacaactacaacaattgttgccctttgtccaacttgctttgacagaccgagcggcctcctaccaacaacacatcattggtggtgccctcttttagattgcttattagttgtaattcaataataaagttttttggatgatgtatgtggccaaccagaaataagaagttacatttccagattttaatgtg

SEQ ID NO: 1771 - DNA, 345 bp, Zea mays
  Clone ID: LIB3061-041-Q1-K1-C8
actagcaacatagaaagcacaatagtgtaccaacaatggcagccaaaatattttgcctccttatgctccttggtctttctgcaagtgctgctacggcgaccattttcccgcaatgctcgcaagctcctatagcttcccttcttcccccgtacctctcaccagcggtgtcttcggtatgtgaaaacccaattcttcaaccctacaggatccaacaggcaatcgcagctggcatcttacctttatcacccttgttcctccaacaatcatcagccctattacaacagttacctttggtgcatttattggcacaaaacatcagggcacaacaactaccaacaaaccttt

SEQ ID NO: 1772 - DNA, 432 bp, Zea mays
  Clone ID: LIB3061-041-Q1-K1-B11
caacatagaaagcacaatagtgtaccaacaatggcagccaaaatattttgcctgcttatgctccttggtctttctgcaagtgctgctacggcgaccattttcccacaatgctcacaagctcctatagcttcccttcttcccccgtacctctcaccagcggtgtcttcggtatgtgaaaacccaattcttcaaccctataggatccaacaggcaatcgcagctggcatcttacctttatcacccttgttcctccaacaatcatcagccctattacagcagttacctttggtgcatttattggcacaaaacatcagggcacaacaactacaacaacttgtgctagcaaaccttgctgcctactctcagcaacaacagtttcttccattcaaccaactagctgcattgaactctgcttcttatttgcaacaacaa

SEQ ID NO: 1773 - DNA, 87 bp, Zea mays
  Clone ID: LIB3061-041-Q1-K1-B12
caccaatgatgggttatagttcaataataaagttctttgtctgatgtttgtggcttcccagaaataagaaagtacatttctagattc

SEQ ID NO: 1774 - DNA, 338 bp, Zea mays
  Clone ID: LIB3061-041-Q1-K1-B3
gcaccttagaagggggaatccataaccaccattgaaccaccattgccgaccaaaatagtggccttcctaatgctcctggctctttctacatgggtggctaacgcgacaattttccttcaatgctaacaagctcctatagcttcccttcttccccaataccttccatcaattatagcttcaatatgtgaaaacccagctcttcaaccatataggcttcaacaagcaatcgcagcaagcaacatacctttatcgcccttgctgtttcaacaatcgccagccctatctttggtgcagtcattggtacaaaccatcagggcacaacagctgcagcaaacttc

SEQ ID NO: 1775 - DNA, 303 bp, Zea mays
  Clone ID: LIB3061-041-Q1-K1-B4
ttcgtcgaccacgcgtcgagtacacagtctgcaacgctcatcaactagccatgggaaccctgcggtactcaacaacacactgcttcatctacccgtcgtgggcaatgcacctacatacctgacaacaatgtgcaacagattgaccagcttgactactagctgggcaaaccctgtgctacttgcacagtgcttcattaacaatgacttgcgaactctgtggtcctacaacacgacaacagtacttaatcattggtagggctaaccatgtcgccgacttctacagcagcaacaattgctgccata

SEQ ID NO: 1776 - DNA, 326 bp, Zea mays
  Clone ID: LIB3061-041-Q1-K1-B5
cgaactagcaacatacatagtgaagtacactagcaacatcttagcaccaatggcaggcaagatttttgccatccttgccctccttgctctttcagcaagcgttgctaccgcgactattattccacaatgctcacaacaatacctctctccggtgacagccgcgagatttgaatacccaactatacaatcctacaggctacaagaggccatcgcagcaagcatcttacggtcgttagcattgaccgtccaacaaccatatgccctattgcaacaaccatccttaatgaatctatatctccaaagaatcgcagcacaacaactacaac

SEQ ID NO: 1777 - DNA, 331 bp, Zea mays
  Clone ID: LIB3061-041-Q1-K1-B6
cggactagcaacatacatagagaatttcactagcaacatcttaccaccaatgggacgcacaattatggccatcggtgccctccttgctctttcatcaagcaccactaccccaactatcattccacattgcatacatcacttcctttctccgttcacatcaccatagattggaatacccaactatacacccatacatactacactacaccatcccacatggcatcttacgttctatattaccgacctcacaataaccatatgcccaatcacaacacctattctatctgaatccataggtgcatacattctcacaacacatcctacaacaaca

SEQ ID NO: 1778 - DNA, 329 bp, Zea mays
  Clone ID: LIB3061-041-Q1-K1-B7
caactagcaacatagaaagcacaatagtgtaccaacaatggcagccaaaatattttgcttccttatgctccttggtctttctgcaagtgttgctaccgcaaccattttcccacaatgctcacaagctcctatagcttcccttcttcccccatacctctcaccagcggtgtcttcaatgtgtgaaaacccaattgttcaaccctacaggatccaacaggcaatcgcaacaggcatcttaccattatcacccttgttcctacaacaaccgtcagccctattacagcagttacctttggtccattaggtggcacaaaacatcagggcacaac

SEQ ID NO: 1779 - DNA, 337 bp, Zea mays
  Clone ID: LIB3061-041-Q1-K1-B8
caggcaatcgcagctggcatcttacctttatcacccttgttcctccaacaatcatcagccctattacaacagttacctttggtgcatttattggcacaaaacatcagggcacaacaactacaacaacttgtgctagcaaaccttgctgcctactctcagcaacagcagtttcttacattcaaccaactaggttcattgaactctgcttcttatttgcaacaacaacaactaccattcagccagctacctgctgcctacccccagcaatttcttccattcaaccaactagcagcattgaactctcctgcttatttacagcagcaacaactatctacca

SEQ ID NO: 1780 - DNA, 419 bp, Zea mays
  unsure (1)..(419): unsure at all n locations; Clone ID: LIB3061-041-Q1-K1-B9
ttgagaccaacaagcaacatagaaagtggaatacagtagcaaaaatagagcaacgaatggcggccaagatattttccatccttatgctccttgctctttctgcatgtgttgctaacgcgaccatttttcctcaatactcacaagctcctatagctgcccttcttcccccataccttccatcaatgaccgctttagtatgtgaaaacccagcccttcaaccctacaggatccagcaagcaatcgcaacaagcaacttacctttatcacacctgttctttcaacaatcgccagccctatctttggtgcagtcattggtacaaaccatcagggcagaacagttgcagcaactcgtgctaccagtgatcagtcaagtagctctggccaacctttcccnctactcttcagccacacaatttctt

SEQ ID NO: 1781 - DNA, 338 bp, Zea mays
  Clone ID: LIB3061-041-Q1-K1-C1
agcattcaaaaacacaccaagcgaagcgcactagcaacgacctaacaccaatggctaccaagatattagccctccttgcgcttcttgcccttttagtgagcgcaacaaatgcgttcattattccacagtgctcacttgctcctagtgccattattccacagttcctcccaccagttacttcaatgggcttcgaacatccagccgtgcaagcctacaggctacaactagcgcttgcggcgagcgccttacaacaaccaattgcccaattgcaacaacaatccttggcacatctaaccctacaaaccattgcaacgcaacaacaacaacaacaaccagtt

SEQ ID NO: 1782 - DNA, 383 bp, Zea mays
  Clone ID: LIB3061-041-Q1-K1-C10
caaactggtttcagggtactgcagatgctgtaaggcagtacttgtggttgtttgaggagcataatgtgatggaatttctaattcttgctggcgatcacctgtaccggatggactatgaaaagttcattcaggcacacagagaaacaaatgctgatattaccgttgctgccctaccgatggatgagaaacgtgcaactgcatttggcctcatgaaaattgatgaagaagggaggatcattgagtttgctgagaaaccgaaaggagagcagttgaaagcaatgatggttgacaccaccatacttggccttgatgacgtgagggcaaaggaaatgccttatattgctagcatgggtatctatgttttcagcaaagatgtaatgctt

SEQ ID NO: 1783 - DNA, 427 bp, Zea mays
  Clone ID: LIB3061-041-Q1-K1-C11
gtcatggcgatggagaagcagaatgacaccagcatcttggtcctgctgcaggagtgtttcggcgaggggctcataaccatcaaccagatgaccaaaggctttgcccgtgtcaaggaaggccttgatgatctgatcctcgacatcccaaatgcccaggagaagtttggagagtatgtggagctggcaacagagcgcggctggctgctgccgaccttcgcctccgttccctgagcatccaccactggcgataccttccttatgtgtacatttgtgcccatgatgtcattagctccgtaccaaagttttcctattcctagtttacttatgttaccgtatactggaggattgtaggatggatgtggtgtcggttgttgagatagtgtcctattggtctagtctgggagggtacttttgagagttaaaagaa

SEQ ID NO: 1784 - DNA, 429 bp, Zea mays
  Clone ID: LIB3061-041-Q1-K1-C12
cgcctcgatcttcatccctggttggcaaacaatgagctacttctccgacctcggcggcatctgttggttcctggagcctggattcgagcgcgaggtgcggcgtctccacaggctcgtggggaatgccgttgtagacgggtaccatgtgctcgtcgggacaggctccactcagctctttcaggccgtgctgtacgcgctctcacctgcaagtgacggcacacccatgaacgtcgtctcaccggcaccgtactactcgtcttacccatctgtgaccaactatctaaactctgcgctctaccgttgggctggtgatgccaatacatttgatggcgacacatgtattgagctcgtctgctccccaaacaaccctgatggtggcctccggaagcctgtcatcaaatccaagtctagcaagcctgtatatgactt

SEQ ID NO: 1785 - DNA, 343 bp, Zea mays
  unsure (1)..(343): unsure at all n locations; Clone ID: LIB3061-041-Q1-K1-C2
accaattgttcaaccctacaggatccaacaggcaatcgcaacaggcatcttaccatgatcacccttgatccttcaacaaccgtcaggcctattacagcagctacctttggtccattaggaggcacaaaacatcagggcacaacaactacaacaacttgtgctagcaaaccttgctgcatactctgagcaacatcagtttcttccattcaaccaactggctgcattgaactctgctgcttatttgcaacaacaattaccattcagccagctagttgctgcctacccccagcaatttcttacattcaaccaactagcagcattgaactctgnctgcattatttac

SEQ ID NO: 1786 - DNA, 314 bp, Zea mays
  unsure (1)..(314): unsure at all n locations; Clone ID: LIB3061-041-Q1-K1-C3
cctcgctctcctggctctcgctgcgagcgctacctccacgcatacaagcggcggttgcgggtgccagccaccgccggcggttcatctaccgccgccggtgcatctgccacctccggttcacctgccacctccggtgcatctcccaccgccggtccacctgccgccgccggtccacctgccaccgncggtccatgtgccgacgncggttcatctagccgcgccaccatgccactaccctactcaaccgacccggcctcagcctcatccccaggcacacccatgcccgtgccaacagccgcattcaagcccgtgcc

SEQ ID NO: 1787 - DNA, 328 bp, Zea mays
  unsure (1)..(328): unsure at all n locations; Clone ID: LIB3061-041-Q1-K1-C4
gagaccaacaagcaacatagaaagtggaatccagtagcaacaatagagcaacaatggcgaccaagatactttccctccttatgctccttgctctttctgcatgtgttgctaacgcgacaattttccctcaatgctcacaagctcctatagcttcccttcttcccccataccttccatcaatgatagcttcagtatgtgaaaacccagctcttcaaccctataggctccaacaagcaatcgcagcaagcaacatacctttatcacccttgtttcaacaatcgccagccctatctatggtgcagtcattggtacanaccatcaaggcaca

SEQ ID NO: 1788 - DNA, 353 bp, Zea mays
  Clone ID: LIB3061-041-Q1-K1-C6
gccgatcgcgcaggtgtgctgcaactgcggcgtctgcatgggggagtacttctgcgcagcctgcaacttcttggacgatgacgttgacaaggagcagttccattgcgacgattgcggcatctgcagagtaggaggaaaggagaacttcttccactgccaaaagtgtggatcctgctactcgacgacccttcgcgacaggcactgctgcatcgagaactcgatgaagaacaactgccccatctgctacgagtacctgttcgattcgctgagggagacgtcggtgctccgctgcggccacaccatgcacctgcagtgcttgcacgagatgtttgaagcaacgaccaaagggtttt

SEQ ID NO: 1789 - DNA, 329 bp, Zea mays
  Clone ID: LIB3061-041-Q1-K1-B10
ctagatcgcgagcgggcgccctttattttttttttttttttttttttttttttggatggtttttaatatatttattataattattttttttttttttttttttttttattttatataattatttttttttttttattatattattttatttttttttttatattttattattatcaattaattttttattttttatatttttttaaatcaaaaaataattcataaattattaatcaaaaaaaaaaataacaaaaaataatatcatatatatttttataaattaaaaaacaaaaaaatatttacacatttaaacataccataatataata

SEQ ID NO: 1790 - DNA, 176 bp, Zea mays
  Clone ID: LIB3061-040-Q1-K1-H12
ccactcccaagccagtaccgagtcctacgagcagtcgcacgcaagtgtcaagagacgaaacggtcgacatggctcgcacgcaatctgccgtagcggtcgccgtggtggccgcggtgctgctgctggcagcggcggcgacgacctcggaggccgccatcacctgcgggcaagtgagc

SEQ ID NO: 1791 - DNA, 289 bp, Zea mays
  unsure (1)..(289): unsure at all n locations; Clone ID: LIB3061-040-Q1-K1-H2
cggacgcgtggggcagttgtgacagcatatcgaatcgtgactgtcagtaagggttattcatgggaggtcacaactgctgaaggtggacagggcctcaatgagctcttaagctccagaaagagtgtattaaacggaattgtaaatggaattgacattaatgattggaaccctgccacagacaaatgtatcccctgtcattattctgttgatgacctctctggaaaggccaaatgtaaaggtgcattgcagaaggagctgggtttacctataaggcctgatgtntctctga

SEQ ID NO: 1792 - DNA, 410 bp, Zea mays
  unsure (1)..(410): unsure at all n locations; Clone ID: LIB3061-040-Q1-K1-H5
ccgttatcacccttgttcctccaacaaccgtcagccctattacagcagttacctttggggcatttgttggcacaaaacatcaaggcacaacaactacaacaacttgtgctaggaaaccttgctgcctactctcagcaacagcagtttcttccattcaaccaactggctgcattgaactctgctgcttatttgcaacaacaactaccattcagtcagctagctgctgcctacccccagcaatttcttccattcaaccaactggcagcattgaactctgctgcttatttacaacagcaacagctaccaccattcagccagctagctgatgtgagccctgttgccttcttgacacaacaacagttgttgccgttctacctgcacgctgncgcctttaaaaaacccgggggggc

SEQ ID NO: 1793 - DNA, 410 bp, Zea mays
  Clone ID: LIB3061-040-Q1-K1-H6
gtaccatcaatcatcattcatcttagtagtataggcaccaaatcaaatctgcgacatcgattatctaactccaaaaaccatgaagctggtgcttgtggttcttgctttcattgctttagtatcaagcgtttcttgtacacagacaggcggctgcagctgtggtcatcaacaaagccatgagcagcaacatcattcacatcaacatgatccacatagacagcaacatcgtccacgagcacagcatcaccagctgcagcaacactcatcagcaacgagttcacatgcatccactaaaacatcagcatcaactagaagttcatgttcaacaacaacaacaacaaccgtagcaccaactacgacagcaacaacaacagcaccaacaacaacatcaatgtggaaaaaaggggggg

SEQ ID NO: 1794 - DNA, 322 bp, Zea mays
  Clone ID: LIB3061-040-Q1-K1-H7
ggaacacccgcccgacccacgcgtacgcggcaatctcatcatacccaaattaattttcttgcttaaacaaactgcaatccgatctggtgatcatacattggtcctagccatacagtgctaacaagctcatatacttttgctacttctgatatacctattaccactggcgaatccaatgtgctaatatccaattcatcaaccgtacaagatccaacaggcaatcgaaacacgcatgttaccattataacccttgttcctacaacaaccggtatccctacaacagcagttaactctacaacatttgctggctcataacatgatg

SEQ ID NO: 1795 - DNA, 217 bp, Zea mays
  unsure (1)..(217): unsure at all n locations; Clone ID: LIB3061-040-Q1-K1-H8
tgtttatcaaaagttatcgctcctgctcgcggaaagtgagcttgactgttgccggngtggaagtatcgttttggactgatgcatgagtgctgcggaggggtttgttgtttgtttgtttgttcggtgaccgaatcgcgagctggacgcctgtttaatccgtgcttatacatcgtctgagtaaacagcaataagagggacatccgtaagctctttccgt

SEQ ID NO: 1796 - DNA, 392 bp, Zea mays
  Clone ID: LIB3061-040-Q1-K1-H9
gctcaccttccgtgccctgtatatgcgccgggctggtccaggcagcagggagatgactgtgccgggaaggccatccgaccagctgggcaggagagtcgtcactgacagccccgtgtacgacggccgtggcgccgacgcccgcctcgtggctcgcatacagggagtcacgggtcctggtcggtaacgcagacccttggttcaccatggggttcgaaaccgacaggctaaaggcctcaacgctggtaatcaacggattggtaacggttgggtcaaacgattggccaaactacggcgaacccggggtgttcgccatggccaccgtggtcatgagaagaagaaaccttgccgccgttggcaccaacggaacctttgacaagctggccttgaaagtt

SEQ ID NO: 1797 - DNA, 330 bp, Zea mays
  Clone ID: LIB3061-041-Q1-K1-A1
atagaaagcacaatagtgtaccaacaatggcagccaaaatattttgcctccttatgctccgtggtctttctgcaagtgctgctacggcgaccattttcccgcaatgctcgcaagctcctatagcttcccttcttcccccgtacctctcaccagcggtgtcttcggtatgtgaaaacccaattcttcaaccctacaggatccaacaggcaatcacagctggcatcttacctttatcacccttgatcctacaacaatcatcagccctattacatcagttacctttggtgcatttattggcacaaaacatcagggcacaacaactacaacaac

SEQ ID NO: 1798 - DNA, 331 bp, Zea mays
  Clone ID: LIB3061-041-Q1-K1-A10
cagacagctttcacagttaccttatcactatagcacagcatcaaccgggaaagtcacattgagatcgtggtcagcgagcccaccagataccagagagaggatggcggacatatcgttgctgttggcggagcacttcgagaagacagcaaggcgaggcgcccccggcggggacagcggtagcgacagcgggaccgccggcgagactaggaacttctgggccgcggccacagtgtggagctcttgtgtggagtccgcctccgccgccgcgtacggggtcagattcaccgtctcggtgcacatgtagcccaagaccgggctcgcgctggccgcc

SEQ ID NO: 1799 - DNA, 434 bp, Zea mays
  Clone ID: LIB3061-041-Q1-K1-A11
caacatagaaagcacaatagtgtaccaacaatggcagccaaaatattttgcttgcttatgctccttggtctttctgcaagtgctgctaccgcaaccattttcccacaatgctcacaagctcctatagcttcctttcttcccccatacctctcaccagcggtgtcttcagtatgtgaaaacccaattcttcaaccctacaggatccaacaggcaatcgcagcaggcatcttacctttatcacccttgttcctccaacaaccgtcagccctattacagcagttacctttggtgcatttgttggcacaaaacatcaaggcacaacaactacaacaacttgtgctaggaaaccttgctgcctactctcagcaacagcagtttcttccattcaaccaactggctgcattgaactctgctgcttatttgcaacaacaact

SEQ ID NO: 1800 - DNA, 428 bp, Zea mays
  Clone ID: LIB3061-041-Q1-K1-A12
attcagaaacacaccaagcgaagctacctagcaacgacttaacaacaatggctgccaagatattatccctccttgcgcttcttgccctttttgtgagcgcaacaaatgcgttcattattccacaatgctcacttgctcctagtgccattataccacagttcctccgaccagttacttcaatgggcttcgaacacctacctgtgcaagcctacaagctacaacaagcgcttgcggcgagcgtcttacaacaaccaattaaccaattgcaacaacaatccttggcacatctaaccatacaaaccatcgcaacacaacagccacaacagttcctaccagcactgagccaactagatgtggtgaaccctgtcgcctacttgcaacagcaggtgcttgcatccaacccacttgctctggcatacgtagctgca

SEQ ID NO: 1801 - DNA, 304 bp, Zea mays
  Clone ID: LIB3061-041-Q1-K1-A2
cttctatcagtaccatcaatcatcattcatcttagtagtataggcaccaaatcaaagctgcaacatcaattatctaactccaaaaaccatgaagctggtgcttgtggttcttgctttcattgctttagtatcaagtgtttcttgtacacagacaggcggctgcagctgtggtcaacaacaaagccatgagcagcaacatcatccacaacaacatcatccacaaaaacaacaacatcaaccaccaccacaacatcaccagcagcagcaacaccaacaacaacaagttcacatgcaaccacaaaaa

SEQ ID NO: 1802 - DNA, 298 bp, Zea mays
  Clone ID: LIB3061-041-Q1-K1-A4
ggttggtggaagcaccaggattcccaaggtccagcagctcctgcgggactacttcgacggcaaggagcccaacaagggtgtcaaccctgatgaggctgttgcctttggtgccgctgtgcagggaagcatcttgagcggcgagggtggtgacgagaccaaagatatcctcctccttgatgtggctcccctcaccctgggtatcgagaccgtcggtggagtcatgaccaagttgatcccgaggaacactgtcatcccgaccaagaagtcccaggtggtcaccacctaccaggaccagcag

SEQ ID NO: 1803 - DNA, 334 bp, Zea mays
  Clone ID: LIB3061-041-Q1-K1-A5
gaaacacaccaagcgaagcacattagcaacaacctaacaacaatggctaccaagatgttatccctccttgcgcttcttgcgctttttgcgagcgcaacaaatgcgttcattattccacaatgctcacttgctccaagttccattattacacagttcctcccaccagttacttcaatgggcttcgaacacccagctgtgcaagcctataggctacaacaagcaattgcggcgagcgtcttacaacaaccaatttcccagttgcaacaacaatccttggcacatctaacaatacaaaccatcgcaacgcaacagcaacaacaattcctaaccagca

SEQ ID NO: 1804 - DNA, 295 bp, Zea mays
  Clone ID: LIB3061-041-Q1-K1-A6
gggacacaccaagcgaagcacattagtttcaacctaacaacaatggctaccaaggaggtatccctccttgcgcgtcttgcgctttttgcgagcgcaacatatgcgttcattattccacaatgctcacttgctccaagttccattattacacagttcctaccaccagctacttcaatgggcttcgaacacccagctgtgcaagcctataggctacaacaagcaattgcggcgagcgtcttacaacaaccaatttcccagttgcaacaacaatccttggcacatctaacaatacaaa

SEQ ID NO: 1805 - DNA, 337 bp, Zea mays
  Clone ID: LIB3061-041-Q1-K1-A7
accaaggggaggtagtcaagtatctcagcgtgaacctcgattccggtccagaatgcgtgatggtgaagggtctcaaggtaagtctgaggtgtctgccattgtttataaagctggggagtgcatgcaggagcttctgaaatcatggaaagagtttgatgtaactcaggatgctacaattgctgaaagcctacaacatggtcctactcttgaaatccgaatacctgcagaatttgttacttccactaaccgtcaggtaaaaggtgctcagctctggggaacagatatttatacaaatgattcagatcttgtggctgtgctaatgcatacttgggttact

SEQ ID NO: 1806 - DNA, 375 bp, Zea mays
  unsure (1)..(375): unsure at all n locations; Clone ID: LIB3061-040-Q1-K1-H11
cccacttctgactgaccactgtgccgcgccgtggtcaccggacggacacacagaacgacgatgggcgcgtcggcgctgcaccagaccaccagcttcctcgggcaggccctggtctcccgcgccgncggcgtcgatgccggcggccgcatcaccatgcgccgcaccgtcaagagcgttccccagagcatatggtacggccctgatcgcccaaagtattttggcccgttttccgagcaaaccccgtcgtacttgaccgggaagttccccggcaattacggttggaaaaccgcggccttttcggccaacccgaaaccattgggcccaaaccggaacctgaaggtaatcaattcccggtggccaatcttggcccccctg

SEQ ID NO: 1807 - DNA, 330 bp, Zea mays
  Clone ID: LIB3061-041-Q1-K1-A8
gctgatttggcacgcggtgtactaggcctacacaccagggggatattgatcctaaatatgaaaccttgcaattttctcatagacgaaaatgattgtgctgtgctgggggattttgggattccatccctgctgtttggcctttcattacctaatccggaccttatccagaggcttggaactccaaattacatggctcctgaacaatggcaaccaaacatcagaggtccgattagttatgaaactgattcgtggggttttgcgtgcagcgtccttgagatgttgactggcattcagccatggcgtggaaagtcagcagatgagatatatcag

SEQ ID NO: 1808 - DNA, 119 bp, Zea mays
  Clone ID: LIB3061-041-Q1-K1-B1
ctttgacaaacccagcagcattctaccaacaacccatcattggtggtgccctcttttagatttcttatgagttatagttcaataataaagttttttgtctgatgtttgtggcttcccag

SEQ ID NO: 1809 - DNA, 426 bp, Zea mays
  unsure (1)..(426): unsure at all n locations; Clone ID: LIB3061-023-Q1-K1-C1
ctgcgatgtggagcctaaaagcgatgacgagagcgatgaagatgatgatgacgacgacactgaagctctaatggcagagcttgagaggattaagaaagaaagagccgaggagaagcttagaaaggagcggcaacaagcagaagaggaggcgaagatgaaggaggctgaactgatgcggggaaacccgttgattaatatcaataatgctggctccttcagtgttaagagaaggtgggacgacgacgtggtattcaagaatcaagcacgaggagagaccaagacaccgaaacggttcatcaacgacaccatcaagagtgatttccaccgtaaatttcttcagaggtacatgaagtgacgcttncgtcgttcacaattcagcctggagcccctcatcgntatcacgtttgtgtatgagcgaaagatcat

SEQ ID NO: 1810 - DNA, 381 bp, Zea mays
  Clone ID: LIB3061-023-Q1-K1-C11
agaagaacccgatcgacaccatgagggtgtcgctcgttgccctcgctctcctggctgtcgctgcgagcgccacctccacgcatacaagcggcggctgcggctgccagccaccgccgccggttcatctaccgccgccggtgcatctgccacctgcggttcacctgccacctccggtgcatctcccaccgccggtccacctgccgacgccggtccacctgccaccgccggtccatgtgccgccgccggttcatctgccgccgtcaccatgccactaccctactcaaccgacccggcctcagcctcatccccagccacacccatgcccgtgccaacagccgcatccaagcccgtgccagcttgcaggaacctgcggcgttggca

SEQ ID NO: 1811 - DNA, 374 bp, Zea mays
  Clone ID: LIB3061-023-Q1-K1-C2
acccacgcatcacgcgtccgggacacgcaacataaaatgttgaatttttaatcaacaatagagcaacaagggctaggaagatactttccctccttatgctccttgctctttctgcatgtgttgctaacgcgacaattttccctcaatgctcacaagctcctatagcttcccttcttcccccataccttccatcaatgatagcttcagtatgtgaaaacccagctcttcaaccctataggctccaacaagcaatcgcagcaagcaacatacctttatcacccttgtttcaacaatcgccagccctatcttttgtgcagtcattggtaccaaccatcaaagcacaacaactgcatcaactcgtgctacctgtgatc

SEQ ID NO: 1812 - DNA, 396 bp, Zea mays
  Clone ID: LIB3061-023-Q1-K1-C3
gagaccaacaagcaacatagaaagtggaatccagtagcaacaatagagcaacaatggcgaccaagatactttccctccttatgctccttgctctttctgcatgtgttgctaacgcgacaattttccctcaatgctcacaagctcctatagcttcccttcttcccccataccttccatcaatgatagcttcagtatgtgaaaacccagctcttcaaccctataggctccaacaagcaatcgcagcaagcaacatacctttatcacccttgtttcaacaatcgccagccctatctttggtgcagtcattggtacaaaccatcaaggcacagcagctgcagcaactcgtgctacctgtgatcaaccaagtagctctggcaaacctttctacctactatc

SEQ ID NO: 1813 - DNA, 369 bp, Zea mays
  Clone ID: LIB3061-023-Q1-K1-C4
caccaacgcaaattgcaccaagaaatccatcgagaggccgtcgacaggggaattaagggcgtcgtcgtctagcagcagccaccgccgcctcatcctcgcagccgccgtcctgctctccgtgctcgcggctgccagcgccagcgccgggacctcctgcgtgccggggtgggccatcccgcacaacccgctcccgagctgccgctggtacgtgaccagccggacctgcggcatcgggccgcgcctcccgtggccggagctgaagaggagatgctgccgggagctggcggacatcccggcgtactgccggtgcacggcgctgagcatcctcatggacggcgcgatcccgccgggcccggacgcgcagctgga

SEQ ID NO: 1814 - DNA, 410 bp, Zea mays
  Clone ID: LIB3061-023-Q1-K1-C5
gaagccgaagtggcatgaatatcgaggatgacgaggtcgcagtgaaaatagaaaagagtgtgaacgagatcctcttcagggcattaactctcctggcaatcactgcactgaagtttgcatgagcagtcatcacgattttataggtttgtcgatgcagttgtgatatactcacctatgtctatgtggttcagaagtgtagtactgctttctgtaggaccaagttccacctgcccaaaccatggttatagcttctcagttctcattgatctcgtagaaaatgagccaagttgtaaattgtacaggatttttgcaggaaactcggtgtatattgtggatgatggattttaactctgtgaacattggataatctgatgcccagagcttatttataatttatctacttaatagca

SEQ ID NO: 1815 - DNA, 354 bp, Zea mays
  unsure (1)..(354): unsure at all n locations; Clone ID: LIB3061-023-Q1-K1-C6
gccgctaccgctagcacctccgatcgagtcggcgccatggaagacgtcatgaccgacgtgccgccgccttcccgcttttcccctgacgacctcgacaacttcgccgctccgccagcgcagcccacccccatcttcgtcgtttccccgaaccctagcccaccggccccgcgcctcctcgtcgtattcatctcccccacctccctcgcgctcctcgcctccccgccgccgctccacgcatccctgctcctcccggacctgcccctactcccgcacgcgcccatgcgcgtgtacctccacccctncggcgcgctcctcggcgcggcgcacggcgccttaccccgccaaccggcgcgc

SEQ ID NO: 1816 - DNA, 413 bp, Zea mays
  unsure (1)..(413): unsure at all n locations; Clone ID: LIB3061-023-Q1-K1-C7
cacgcatcacgagtaccgagcaccatanacagtagaatccattatcaacaatagagcaacaatggcgaccaagatattttccctccttatgctccttgctctttctacatgtgttgctaacgcgacaattttccctcaatgctcacaagctcctatagcttcccttcttcccccataccttccatcaattatagcttcagtatgtgaaaacccagctcttcaaccatataagcttcaacaagcaatcgcagcaagcaacatacctttatcgcccttgttgtttcaacaatcaccagccctatctttggtgcagtcattggtacaaaccatcagggcacaacagctgcagcaactcgtgctacctgtgatcaaccaagtagctctggcaaacctttctccctactctcagcaac

SEQ ID NO: 1817 - DNA, 360 bp, Zea mays
  Clone ID: LIB3061-023-Q1-K1-C8
attttcagcattcaaaaacacaccaagcgaagcgcactagcaacgacctagcaccagtggctaccaagatattagccctccttgcgcttcttgcccttttagtgagcgcaacaaatgcgttcattattccacagtgctcacttgctcctagtgccagtattccacagttcctcccaccagttacttcaatgggcttcgaacatccagccgtgcaagcctacaggctacaactagcgcttgcggcgagcgccttacaacaaccaattgcccaattgcaacaacaatccttggcacatctaaccctacaaaccattgcaacgcaacaacaacaacaacagtttctgccatcactgagccacc

SEQ ID NO: 1818 - DNA, 398 bp, Zea mays
  Clone ID: LIB3061-023-Q1-K1-C9
aaacattcatgagcaatatctcctacgtcacctgctgtgcaaccattgtggctactgtgagcaacagcagttacctttggtgcatttgtaggcacaaaacatcacggcacaacaactacaacaactcgtgctagcaaaccttgatgactactctaatcagcaacagattctgtcattcaaccaactagctgcattgaactctgctgcttattcgcatcaacaacaactactaccattcagccagctagctgctgcctacccgcggcaattccttacattcaactaactggcagcattgaactctcatgcttatgtacaacatacaacaactactaccattcagccagctagctgctgcgagcactgttgccttcttgacacagcaacatttgatgtcg

SEQ ID NO: 1819 - DNA, 428 bp, Zea mays
  Clone ID: LIB3061-023-Q1-K1-D1
aacacacctagcgaagcgcactagcaacgacctaacaacaatggcttccaagacaggatccctccttgcgcttcttgccctttttgtgagtgcaacaaatgcgttcattattccacaatgctcacttgctccgagtgccattattccacagttcctccctccagttacttcaatgggcttcgaacacccagctgtgcaagcctataggctacaacaagcgcttgcggcgagcgtcttagaacaaccaattgcccaattacaacaacaatccttggcacatctaaccatacaaaccatcgcaacgcagcagcaacaagcactgagccacctagccgtggtgaaccctatcggctacttgcaacaacagctgcttgcattcaacccacttgctttgcaaacgtagctgcataccaacaacaacaacagtt

SEQ ID NO: 1820 - DNA, 405 bp, Zea mays
  Clone ID: LIB3061-023-Q1-K1-D10
ccattttcccacaatgctcacaagctctctatagcttcccttcttcccccgtacctctgaccagcggtgtcttcggtatgtgaaaacccaattcttcaaccctataggatccaacaggcaatcgcagctggcatcttacctttatcacccttgttcctccaacaatcatcagccctattacagcagttacctttggtgcatttattggcacaaaacatcagggcacaacaactacaacaacttgtgctagcaaaccttgctgcctactctcagcaacaacagtttcttccattcaaccaactagctgcattgaactctgcttcttatttgcaacaacaacaactaccattcagccagctatctgctgcctacccccagcaatttctttcattcaacccaactgac

SEQ ID NO: 1821 - DNA, 424 bp, Zea mays
  Clone ID: LIB3061-023-Q1-K1-D11
gagaactcgacaccatgaaggtgctgatcgttgcccttgctctcctggcgctcgctgcgagcgccgcctccagtacaagcggcggctgtggctgccagacaccaccgtttcatctaccgcctccgttctatatgccgcctccgttctatctgccgccgcagcagcagccgcagccatggcaataccccactcaaccaccgcagctaagcccgtgccagcagttcggatcctgcggcgtcggcagcgtcggcagcccgttcctgggccagtgcgtcgagttcctgaagcaccagtgcagcccggcggcgacgccctacggctcgccacagtgccaggcgctgcagcagcagtgctgccaccagatcaggcaggtggagccgctgcaccggtaccaggcgacatacggtgtggtcctgcagtcctt

SEQ ID NO: 1822 - DNA, 441 bp, Zea mays
  unsure (1)..(441): unsure at all n locations; Clone ID: LIB3061-023-Q1-K1-D2
aacacaccaagcgaagcgcactagcatcgacctaacaacaatggctaccaagatatggagccctccttgcgcttcttgccctttttgtgagcgcaacaaatgcgttcattattccacaatgctcacttgctcctagtgccattattccacagttcctcccaccagttacttcaatgggcttagaacacctagctgtgcaagccaacatgcaacaacaagcgcttgcggcgagcgtcttacaacaaccaattgcccaattgcaacaacaatccttgccacatctaacaatacaagccatcacaacgcaactgcaacaacagttcctaccagcactgagccacctagccatggtgaaccctgccgnctacttgcaagagcagctgcttgcatccaacccacttgctctggcgaacgtagttgcaaaccagcagcaacaacagc

SEQ ID NO: 1823 - DNA, 427 bp, Zea mays
  Clone ID: LIB3061-023-Q1-K1-B9
cccacgcgtccgcccacgcgtccgcaacaagcaacatagaaagtggaatacagtagcgacaatagagcaacaatggcggccaagatattttccatccttatgctccttgctctttctgcatgtgttgctaacgcgaccatttttcctcaatactcacaagctcctatagctgcccttcttcccccataccttccatcaatgaccgcttcagtttgtgaaaacccagcccttcaaccctacaggctccaacaagcaatcgcaacaagcaacttacctttatcacccctgttctttcaacaatcgccagccctatctttggtgcagtcattggtacaaaccatcagggcacaacagctgcaacaactcgtgctaccagtgatcagccaagtagctctggcaaacctttctccctactctcagcaacaac

SEQ ID NO: 1824 - DNA, 440 bp, Zea mays
  Clone ID: LIB3061-023-Q1-K1-A6
ccagactacacatattatgagtttcagcttgctgaagaggaaagggctcttgctcagtcaaaggaggctgaagcatcgaaagctaactctggcactgcaagcttcaaggcaccaggtggtacttatagaagctcatttgaacagaagtctaactatcagacacctgcatcagctttgtacggggcatatgagggtagttcttcccaaggaagctcttctagttacggtgatcatacagatccaccatcagatcctgtagcattgatggaattctatgcaaagaaggctggcctggaagaacggaagaggccaccaaggcagtcgacagatgacatgccggcaactcctctctgcaaggtcctcctaacaagggacaccacatgggtgacttcattcctcaagaagaacttgaaaagtttatggcacggtgtaatgatgct

SEQ ID NO: 1825 - DNA, 362 bp, Zea mays
  Clone ID: LIB3061-023-Q1-K1-A7
cattcagccagctagctggtgtgagccctgctaccttcttgacacaaccacagttgttgccgtgctaccagcacgctgcgcctaacgctggcaccctcttacaactgcaacaattgctgccattcaaccaacttgctttgacaaacccagcagcattctaccaacaacccatcattggtggtgccctcttttagatttcttatgagttatagttcaataataaagttttttgtctgatgtttgtggcttcccagaaataagaaagtacatttctaaaaaaaaaaacaaataaaaaaaagaaacctaaataacaataaatataacaaaacatataagaataaaaacattaacaatcaagaact

SEQ ID NO: 1826 - DNA, 401 bp, Zea mays
  Clone ID: LIB3061-023-Q1-K1-A8
acggctaccgcaaccatggccgcacaatgtctacaggctcctaaagcttctagggttcggggataccgctgataagcggaccattcaatgacagtgatcacaagcgttcatacctacatgatctcaacaggatacttgtaacaagcattgtactcaaatcagtgatagcccaacaattcaaccctacaggattccagaggttatctcaggaggaattggaggtacatcacactagggcatacaacacccgacagctctgatccaccaactacgtttgatgcattcaacggcataaaacatttagcgtacaaccactacgatagcttgagctaggaaacctatctgcctactctcaccacatcagccagttacattctgcctactggctgcattgaactctg

SEQ ID NO: 1827 - DNA, 282 bp, Zea mays
  Clone ID: LIB3061-023-Q1-K1-A9
acgtacaactgcaacaattgctgccattcaaccaactgggttacaaggtttaggaaaggggctgatactattgctaaaatgattcattttagctatacccttctatttcacccagcttgcacgttcgctattaggaaaaacacatttatggactcaaacaaagagtgatacagaaagtcattttacttccaccttaagaaccaatccacgaaaacagatatcaactgtgacgccacactcaaaaacttgttttgtgacaggcataacgttgcgatgcttgag

SEQ ID NO: 1828 - DNA, 377 bp, Zea mays
  Clone ID: LIB3061-023-Q1-K1-B1
acgcgtccggagaaaggtttgccagagctacgcggctgatcactggtagcaccagttgtggcattgaaccaatcgtccgcactgaaccccgctgcttatttgcagcagcaaatactactgccatttagcgagctagctgcaacaagtcgtgcttacttcttgacacagcaacagttgctgcctttctacaagcagattgcggctaaccccgtaaccctattacaactacaacaagtgttgccctttgtgcaacttgctttgacaaacccagcagcctgctaccaacaacacatcattggtggtgccctcttttagattgattattagttgtaattcaataataaagttttttggatgatgtatgtggccaaccagaa

SEQ ID NO: 1829 - DNA, 326 bp, Zea mays
  Clone ID: LIB3061-023-Q1-K1-B10
gaaggggttgaaagccatctcggagggtaagctggccgtagtccttttggccggtggtcatggtactcgactgggaagctcacatcctaagggatgtttcaatatcggacttccatcaggaaagtcacttttccagctgcaagctgaaaggatcttgtgcgttcaaaagctggctgctcaatctagcgatagcccgagtaacactgtgccgatccactggtacatattgacaagcccctttactgatgctgccatcggcaaattatctgaaacccgcagatattttggcttagacgctgaccaagtgacattattacaacaaggca

SEQ ID NO: 1830 - DNA, 421 bp, Zea mays
  Clone ID: LIB3061-023-Q1-K1-B11
cccacgcgtccgctcggaaggggttccagattctcttctagaaatcaaagttcagaagagaggactaaccatagcagcgataaaccgggaagcagcacaagattcaatcctacgaaagcgagaattggcggtaatcaagggaggccaagatatgtatgcgattcatttaaatctccaagctcaaaggtgtcgcctgcaggctcttccaaatttccacttagcaagtttgaggagaggcgaagacagccttttgtgccagggtttgacattgctgaaagtagtagaagaaaggctgatgccaagcagctacagggtagtaagaaaattgctgcagagaacgacagttcagacaatctgcgaggtgaatcagaaggttttactactgaacaagtagtaaaaccagaaggctctcatgttgtcg

SEQ ID NO: 1831 - DNA, 225 bp, Zea mays
  Clone ID: LIB3061-023-Q1-K1-B12
cgaaagcgtgcggacgatgatctttatctactctatagtgcatatgaacgcgatcgagaccatgaagcagatgatcggtgtcttcggtttcctggctctcgctacgagcgatatatagacgcatacaagtggaagatgtagctgtcagctaccacctccggttcatctaccagcgtcggtgcatctgacacctacggttcacctgccaactccggtgcatgttcc

SEQ ID NO: 1832 - DNA, 378 bp, Zea mays
  Clone ID: LIB3061-023-Q1-K1-B3
cttccacccagacacaggccaggcggtcccattgttgcccaaaaaccttggattaagggacaagaattcttttttttttttaattttttcttaaggggaagaagaagaagaagaaggaaaagccgaagaaccaccaccaagcaacaaaacgccaagcgaaaccgggaccgaacccttgaagtcttttgcgaatccaaaagccaacgaccgtgttgcgaatcgtcttccaagatatgaacaaccggactttgggttttaaccgcagctagaagatagcctggagtgagcatttcattctggagatacaatgggtggctgctgctgctgctgctggtctgcaagggcatctgattcagatagagcaccggaccgacaaaa

SEQ ID NO: 1833 - DNA, 440 bp, Zea mays
  Clone ID: LIB3061-023-Q1-K1-B4
ccaccacaccgcagatgggtatgcagtaatagaagacctacaactacatcaccagctgctactgatcccaataggatgtaccctagctcccgaccgtacacccagtatgggaattcaataaaaactggccttccctacgggagcaacggttatgattccaggatatatgggcgatggggtcttggtatggataacaggtacaggcctaggggccgtaatggatattatggttatggcaacgagagtcacgatggaacaatcgagttaaacagaggtcctagatctggccgattcaagaaccagaaattgtacggccatactgtcactattgctgtgaaagggcagagccttccttctggtgaaagcaaggatgatagtgccgtgcctgatagagcacagttcaatagagacgatttccctgttcagtatgatgctgcaaa

SEQ ID NO: 1834 - DNA, 400 bp, Zea mays
  Clone ID: LIB3061-023-Q1-K1-B5
cgccaccatattaccccggcccattcccacccacagaccctgtccgatacgcatcacctgctcccccacagcggcaccgtccatggccatcagtatacccagttcaatatggatcgccgccgccccctccgctgcattgatagaaaggatctcagacgcacggaacggaaggatagttggttctgctcttgcccctccggccatggctaccacttgccagattcaccagtgtacgtggtcattgtcatgcttagcaaatactgttggctgatggctgcatgcctcaagagcgcgtggcaatctccacagaattttgtgaaatcatggtctgtcggtgtcggtcgttggtgctgaaagggattggattgaaggtgacgggtggtctgctgggtctcttcgg

SEQ ID NO: 1835 - DNA, 430 bp, Zea mays
  Clone ID: LIB3061-023-Q1-K1-B6
tggctagcatcaatgtccgtttcagtttgcgaaaacccagtcctacaacgctacggctccaacaagctgtcgcatcaagcaacgtacctttatcacccctgttatttcaacaatcgccagccctatctttggtgcagccattgttacaaaccatcatggcacaacagctgcaacaactcgtgctaccagtgatcagccaagtagctctggcaaacctttctgcctactctcagcaacaacaattgcttccattcaaccaactgtctacactgaaccctgctgcttatttacaacaacaacaactactaccattcagccagctagctactgactactctcagcagcaacaatttcttgcatttaaccaattggccgcactgaacccctatgcttatttccagcagcaaatactactaccatttggccagct

SEQ ID NO: 1836 - DNA, 395 bp, Zea mays
  Clone ID: LIB3061-023-Q1-K1-B7
gcgcttcttgccctttatgtgagcgcttcaaatgccgtcattaatccaaaatgcttggttgctgccaagggccatatttcaacagttcttccaaccatttacttcaatgggcttcgaacacctagctgtgcaagccaacatgcaacaacaagcgcttgcggcgagcgtcttacaacaaccaattgcccaattgcaacaacaatccttgccacatctaacaatacaagccatcacaacgcatcagcaacaacagttcctaccagcactgagccacctagccatggtgaaccctgccgtctacttgcaagagcagctgcttgcattcaacccacttgctctggcgaacgtagttgcaaaccagcaacaacaacagctacaacagtttttgccaacgc

SEQ ID NO: 1837 - DNA, 432 bp, Zea mays
  Clone ID: LIB3061-023-Q1-K1-B8
caacaagcaacatagaaagtggaatctagtagcaacaatagagcaacaatggcgaccaagatactttccctccttatgctccttgctctttctgcatgtgttgctaacgcgacaattttccctcaatgctcacaagctcctatagcttcccttcttcccccataccttccatcaatgatagcttcagtatgtgaaaacccagctcttcaaccctataggctccaacaagcaatcgcagcaagcaacatacctttatcacccttgtttcaacaatcgccagccctatctttggtgcagtcattggtacaaaccatcaaggcacaacatctgcaacaactcgtgctacctgtgatcaaccaagtagctctggcaaacctttctccctactatcagcaacaacaatttcttccattcaaccaactatctacactg

SEQ ID NO: 1838 - DNA, 439 bp, Zea mays
  Clone ID: LIB3061-023-Q1-K1-A4
gcacaatagtgtaccaacaatggcagccaaaatattttgcttccttatgctccttggtctttctgcaagtgctgctaccgcaaccattttcccacaatgctcacaagctcctatagcttcctttcttcccccatacctctcaccagcggtgtcttcagtatgtgaaaacccaattcttcaaccctacaggatccaacaggcaatcgcagcaggcatcttacctttatcacccttgttcctccaacaaccgtcagccctattacagcagttacctttggtgcatttgttggcacaaaacatcaaggcacaacaactacaacaacttgtgctaggaaaccttgctgcctactctcagcaacagcagtttcttccattcaaccaactggctgcattgaactctgctgcttatttgcaacaacaactaccattcagtcagcta

SEQ ID NO: 1839 - DNA, 349 bp, Zea mays
  Clone ID: LIB3061-022-Q1-K1-G8
gagaccaacaagcaacatagaaagtgtaatccagtagcaacaatagagcaacaatggcgaccaagatactttccctccttatgctccttgctctttctgcatgtgttgctaacgcgacaattttccctcaatgctcacaagctcctatagcttcccttcttcccccataccttccatcaatgatagcttcagtatgtgaaaacccagctcttcaaccctataggctccaacaagcaatcgcagcaagcaacatacctttatcacccttgtttcaacaatcgccagccctatccttggtgcagtcattggtacaaaccatcaaagcacagcagctgcagcaactcgtgct

SEQ ID NO: 1840 - DNA, 414 bp, Zea mays
  Clone ID: LIB3061-022-Q1-K1-G9
attgagaccaactagcaacatagaaagctcaatagtgtaccaacaatggcagccaaaatattttgcctccttatgctccttggtctttctgcaagtgctgctacggcgaccattttcccgcaatgctcgcaagctcctatagcttcccttcttcccccgtacctctcaccagcggtgtcttcggtatgtgaaaacccaattcttcaaccctacaggatccaacaggcaatcacagctggcatcttacctttatcacccttggtcctgcaacaatcatcagccctattacatcagttacctttggtgcatttattggcacaaaacatcagggcacaacaactacaacaacttgtgctagcaaaccttgctgcctactctcagcaacagcagtttcttccattcaaccaactagct

SEQ ID NO: 1841 - DNA, 367 bp, Zea mays
  unsure (1)..(367): unsure at all n locations; Clone ID: LIB3061-022-Q1-K1-H1
aacccatccatcattntagctgttgatacaaagagaaaggaaagggccgagataaccctagagccgagtgatcttatggcgcanacaaacaaaagaatagtgccaaagttcactgaaatcttccccgtggaggacgcgaactacccttacagcgccttcatcgcgtcggtccggaaagacgtgatcaaacactgcaccgaccataaagggatcttccagcccgtgctgccaccggagaagaaggtcccggagctatggttctacacagagctcaaaactaggaccagctccatcacgctcgccatacgcatggacaacctgtacctcgggggctttaaggaccccggccgggtgttgttggaagttc

SEQ ID NO: 1842 - DNA, 392 bp, Zea mays
  unsure (1)..(392): unsure at all n locations; Clone ID: LIB3061-022-Q1-K1-H10
ggtcttcagaccattagctttatctacttcagagcgcagaagaacccgatcgacaccatgagggtgttgctcgttgccctcgctctcctggctctcgctgcgagcgccacctncacgcatacaagcggcggctgcggctgccagccaccgccgccggttcatctaccgccgccggtgcatctgccacctccggttcacctgccaccttcggtgcatcttccaccgccgggccacctgccgccgccggtccacctgccaccggcggtccatgtgccgtcgccggttcatctgccgtcggcaccatgccactaccctactcaaccgccccggcctcagcctcatccccagccacacccatgcccgtgccaacagccgcattcaagcccgtgcca

SEQ ID NO: 1843 - DNA, 409 bp, Zea mays
  Clone ID: LIB3061-022-Q1-K1-H11
caacaagcaacatagaaagtggaatccagtagcaacaacagagcaacaatggcgaccaagatattttccctccttatgctccttgctctttctgcatgtgttgctaacgcgacaattttccctcaatgctcacaagctcctatagcttcccttcttcccccataccttccatcaatgatagcttcagtatgtgaaaacccagctcttcagccctataggctccaacaagcaatcgcagcaagcaacatacctttaatcacccttttgtttcaacaatcgccagccctatctttggtgcagtcattggtacaaaccatcagggcacagcagctgcagcaactcgtgctacctgtgatcaaccaagtagctctggcaaacctttctccctactctcagcaacaacaatttc

SEQ ID NO: 1844 - DNA, 437 bp, Zea mays
  Clone ID: LIB3061-022-Q1-K1-H12
gaccaactagcaacatagaaagcacaatagtgtaccaacaatggcagccaaaatattttgcctccttatgctccttggtctttctgcaagtgctgctacggcgaccattttcccgcaatgctcgcaagctcctatagcttcccttcttcccccgtacctctcaccagcggtgtcttcggtatgtgaaaacccaattcttcaaccctacaggatccaacaggcaatcacagctggcatcttacctttatcacccttgttcctccaacaatcatcagccctattacatcagttacctttggtgcatttattggcacaaaacatcagggcacaacaactacaacaacttgtgctagcaaaccttgctgcctactctcagcaacagcagtttcttccattcaaccaactagctgcattgaactctgcttcttatttgcaac

SEQ ID NO: 1845 - DNA, 394 bp, Zea mays
  Clone ID: LIB3061-022-Q1-K1-H3
gcggcaggaggatgatgagttcagaatctgatccatcactaaatgctgaacatcggagcatgaggagggcaccatcagcatcagttgggaatctgcctcctatggggagacctatctcttcttcgcagcaggcatcagatcgcagaggggggtcttcagtttccaacacaaggaaagatgagtacaactggagatacgataccaccgatgatatatctgaagaggtgctgcgggcatcgactgccctagaaagtgttcagctagaccgcaaatctcggaatctgccgacatcttggaggcattcaggggatggcgccgagtaacaagaaggctttggagctggttgcttgacttgaccgaccctgtatcatgtaatttgtatgccactcatttg

SEQ ID NO: 1846 - DNA, 334 bp, Zea mays
  Clone ID: LIB3061-022-Q1-K1-H4
ggtcgctcgaccacgcgtccggcaacatagaaagcacaatagtgtaccaacaatggcagccaaaatattttgcctccttatgctccttggtctttctgcaagtgctgctacggcgaccattttcccgcaatgctcgcaagctcctatagcttcccttcttcccccgtacctctcaccagcggtgtcttcggtatgtgaaaacccaattcttcaaccctacaggatccaacaggcaatcgcagctggcatcttacctttatcacccttgttcctccaacaatcatcagccctattacaacagttacctttggtgcatttattggcacaaaacatc

SEQ ID NO: 1847 - DNA, 266 bp, Zea mays
  Clone ID: LIB3061-022-Q1-K1-H5
gggaccctgttttctctttcttgttttaccgacatgctggtgaaggagaaggtggggaaattgtgtctggtggaatggattctagtcactacaagggtgatcacacctatgtcccagtcactcagaagggatactggcagtttaatatgggtgatgtcctgcttgatggaaagaccactgagttttgtgctcgaggttgtgcagcaatagcagattctggaacttccttgcttgatggccctacagccattattactgaaatcaac

SEQ ID NO: 1848 - DNA, 318 bp, Zea mays
  Clone ID: LIB3061-022-Q1-K1-H6
gcaacatagaaagcacaatagtgtaccaacaatggcagccaaaatattttgcctccttatgctccttggtctttctgcaagtgctgctacggcgaccattttcccgcaatgctcgcaagctcctatagcttcccttcttcccccgtacctctcaccagcggtgtcttcggtatgtgaaaacccaattcttcaaccctacaggatccaacaggcaatcgcagctggcatcttacctttatcacccttggtcctccaacaatcatcagccctattacaacagttacctttggtgcatttattggcacaaaacatcagggc

SEQ ID NO: 1849 - DNA, 75 bp, Zea mays
  Clone ID: LIB3061-022-Q1-K1-H7
ttaaaatatagatctctaatcttttattactgagaagttgcacatatcagtatgagaactttattattacagtat

SEQ ID NO: 1850 - DNA, 334 bp, Zea mays; identical to SEQ ID NO: 1846
  Clone ID: LIB3061-022-Q1-K1-H8

SEQ ID NO: 1851 - DNA, 448 bp, Zea mays
  unsure (1)..(448): unsure at all n locations; Clone ID: LIB3061-022-Q1-K1-H9
agcattcagaaacacaccaagcgaagcgtactagcaacgacctaacaacaatggctaccaagatattagccctccttgcgcttcttgccctttttgtgagcgcaacaaatgcgttcattattccacaatgctcacttgctcctagtgccattattccacagttcctcccaccagttacttcaatgggcttcgaacacctagctgtgcaagccaacatgcaacaacaagcgcttgcggcgagcgtcttacaacaaccaattgcccaattgcaacaacaatccttgccacatctaacaatacaagccatcacaacgcaacagcaacaacagttcctaccagcactgagccacctagccatggtgaaccctgccgnctacttgcaagagcaactgcttgcatccaacccacttgctctggcgaacgtagttgcaaaccagcaacaacaaca

SEQ ID NO: 1852 - DNA, 405 bp, Zea mays
  Clone ID: LIB3061-023-Q1-K1-A11
acggggtcttcagaccattagctttatctactccagagcgcacaagaacccgagcgacagcatgagggtgttgctcgttgccctcgctctactggctctcgctgatagcgccaccttcacgcatacaagctgcggctgcagatgccagccaccgtcgacggttcatctaccgccagaacggagcatctgccacctacgaggaacctgccacctacggcacatctcacatcgccggtccaactgacgacgtcggtccacctgacaccgccggtccatgtgctgccgacggttcatctgccgacgccacgatgccactaccctactcaaccgccccggcctcagcctcatacgcagccacacctatgcccgtgccaacagccgcattcaagcccgtgccagctgcat

SEQ ID NO: 1853 - DNA, 212 bp, Zea mays
  Clone ID: LIB3061-023-Q1-K1-A12
gtcttacaactgcagcaattgcagccattcaaccaacttgctttgacaaagccatcggcattctaccaactacccatcattggtggtgccctcttttagatatgttatgagttatcgttcaatactatagtgtctcggcgtgatagcgacagtctgtcgcagttcatggcgcgttagtgtctgatggtcgtccggtctacaggatccatgct

SEQ ID NO: 1854 - DNA, 338 bp, Zea mays
  Clone ID: LIB3061-023-Q1-K1-A2
aagacagtgaatgctacactgacaacatgctgcagtctgaacttggatggttaggggatcattgcacgtgtgacctccaattcagatgctgcacaagtcgcggagaccctcatttagaatatctgtaggaccaacgttgatggagtgccaggttgattgaatggtgacctcaacatctaggttgtggaaacaacatttgagacttgatcagtatgtaaggctaattcacagctagtaagccatgcttgacttgatgcgatctcagctggaaagtactatcattgcgatcggctgatggcacgaagagcatctcaagatgacttgtaatgagctcttta

SEQ ID NO: 1855 - DNA, 423 bp, Zea mays
  Clone ID: LIB3061-023-Q1-K1-A3
attgagaccaactagcaacatagaaagcacaatagtgtaccaacaatggcagccaaggtattttgcctccttatgctccttggtctttctgcaagtgctgctacggcgaccattttcccgcaatgctcgcaagctcctatagcttcccttcttcccccgtacctctcaccagcggtgtcttcggtatgtgaaaacccaattcttcaaccctacaggatccaacaggcaatcgcagctggcatcttacctttatcacccttgttcctccaacaatcatcagccctattacaacagttacctttggtgcatttattggcacaaaacatcagggcacaacaactacaacaacttgtgctagcaaaccttgctgcctactctcagcaacagcagtttcttccattcaaccaactaagttcattgaac

SEQ ID NO: 1856 - DNA, 424 bp, Zea mays
  Clone ID: LIB3061-022-Q1-K1-G7
gtgctcacttgctcctagtgccattattccacagttcctcccaccagttacttcaatgggcttcgaacatccagccgtgcaagcctacaggctacaactagcgcttgcggcgagcgccttacaacaaccaattgcccaattgcaacaacaatccttggcacatctaaccctacaaaccattgcaacgcaacaacaacaacaacaacagtttctgccatcactgagccacctagccgtggtgaaccctgtcacctacttgcaacagcagctgcttgcatccaacccacttgctctggccaaccgtactgcataccagcaacaacaacagctgcaacagtttatgccagtgctcagtcaactagccatggtgaaccctgccgtctacctacaactactttcatctagcccggtcgcggtgggcaat

SEQ ID NO: 1857 - DNA, 171 bp, Zea mays
  Clone ID: LIB3061-040-Q1-K1-F12
gctaaggcgaataagggaaggatgagtcatttgcaccatgtttgaccaccaattgttaggtggtgcatatattttgtactaattgtgagactttgtgctatggatctcaactgtataccttgctggtgcatggctttgggtttacatggttgaaaatgagattggtgtact

SEQ ID NO: 1858 - DNA, 291 bp, Zea mays
  unsure (1)..(291): unsure at all n locations; Clone ID: LIB3061-040-Q1-K1-F2
gcgcgcggcgccagcctccggcgaccggcacccgcctttcttttatacctccgccgcggcgacccacgccaaccttcgacccccctaaccctaccaaagcccgaactctcgagatcacaggacgcggatccaaaccagaggcccctgcctgccctctactcccccaccacaccacagcctaccgccatgtcggcgaccgctacggacgaggccgcggtggaggcgcgcctncaggagctgcgggggaggctcgggaagaagcagcacttcgaggaggccgtaaacgagctc

SEQ ID NO: 1859 - DNA, 417 bp, Zea mays
  Clone ID: LIB3061-040-Q1-K1-F3
ggcaatcacagctggcatcttacctttatcacccttgttcctccaacaatcatcagccgtattacatcagttacctttggtgcatttattggcacaaaacatcagggcacaacaactacaacaacttgtgctagcaaaccttgctgcctactctcagcaacagcagtttcttccattcaaccaactagctgcattgaactctgcttcttatttgcaacaacaacaactaccattcagccagctacctgctgcctacccccagcaatttcttccattcaaccaactggcagcattgaactctcctgcttatttacagcagcaacaactactaccattcagccagctagctggtgtgagccctgctaccttcttgatacaaccacagttgttgcccccgggttttttttcccccttttt

SEQ ID NO: 1860 - DNA, 226 bp, Zea mays
  unsure (1)..(226): unsure at all n locations; Clone ID: LIB3061-040-Q1-K1-F4
aattccggtcgacnacgcgtccggttgccctcgctctcctggctctcgctgcgagcgccacctccacgcatacaagcggcgggtgcggctgccagccaccgccgccggttcatctaccgccgccggtgcatctgccacctccggttcacctgccacctccggtgcatctcccaccgccggtccacctgccgccgccggtccacctgccaccgncggtccatgtgcc

SEQ ID NO: 1861 - DNA, 387 bp, Zea mays
  Clone ID: LIB3061-040-Q1-K1-F5
gcgcccacgcgtccgacgcgtcaggtgcaccgagcacccgctgaattgaacacctcgactaccatggacatggaggcgcaggcggcaaaggcgagaaccgaggacccgcgacgtcctcccagcgacggcggggccgcaggagcgaagtgcgtggagggtggaggcgacggtgccagccggagcacggcgaagcgggaggccgagaaagcggctgccgtggaggcggagggcgccaagccgctgccgctgccgtacgaacgggtgccgcagccgcgcgacgtgtacaacgagcagctggagcggatgtgaatgcatgttttctgctcggcagtctcgatgaaccccaatcgacccaatgatcgatcgagcgatcctgctacaggccct

SEQ ID NO: 1862 - DNA, 389 bp, Zea mays
  unsure (1)..(389): unsure at all n locations; Clone ID: LIB3061-040-Q1-K1-F6
caggcaccaccgtttcatctaccgccttcgttctatatgccgcctccgttctatctgcgcgccgcagcagcagccgcagccatggcaataccccactcaaccaccgcagctaagcccgtgccagcagttcggatcctgcggcgtcggcagcgtcggcagcccgttcctgggccagtgcgtcgagttcctgaggcaccagtgcagcccggcggcgacgccctacggctcgccacagtgccaggcgctgcagcagcagtgctgccaccagatcaggcaggtggagccgctgcaccggtaccaggcgacatacggtgtggtcctgcagtcctttctgcagcagcagccgcagggcgagctcgcggcgctgatggcggcccangtagcgcagc

SEQ ID NO: 1863 - DNA, 400 bp, Zea mays
  Clone ID: LIB3061-040-Q1-K1-F7
attgaactctcctgcttatttacagcagtaacaactactaccattcagccagctagctggtgtgagccctgctaccttcttgatacaaccacagttgttgccgttctaccagcacgctgcgcctaacgctggcaccctcttacaactgcaacaattgctgccattcaaccaacttgctttgacaaacccagcagcgttctaccaacaacccatcattggtggagccctcttttagatatcttatgagttatagttcaataataaatcattcaaccaactggcagcattgaactctcctgcttatttacagcagcaacaactactaccattcagccagctagctggtgtgagccctgctaccttcttgattcaaccacagataaaaaaggggtggttcccc

SEQ ID NO: 1864 - DNA, 344 bp, Zea mays
  Clone ID: LIB3061-040-Q1-K1-F9
acaacaacgacccccgcttcaccaccatcagcagctccgccctccagctgagactctcgagctgcgagtcgtacgtccctgcgcccggcgctcgtcgtacgtactacgacactacgtacgagcgcaagcgcttgacacacgaccgattcagcacgcatggcgatgaaaaagggcggcggcccggcggggctgaagcagatcctgaggcggggctcaaccctggggcggcgtaagcggaccggcggaaccgggtccaaggaggaggccaaggcggcggcaacgggcttgccgtcgaacttgccggccggcactttgggggggacctgggccaagcgggcccgccg

SEQ ID NO: 1865 - DNA, 400 bp, Zea mays
  Clone ID: LIB3061-040-Q1-K1-G1
tgaagtacttcttgttggtggaatgactagggttccaaaggtgcaggaggtagtctctgaaatgttcgtaaagagcccaagcaaaggagtgaacccagatgaagctgtggccatgggtgctgccattcagggtggcattctccgtggagatgttaaggagcttcttcttcttgatgttactcccctgtcactaggtattgagacactcggtggtatcttcaccagattgatcaacagaaacactacaatccctacaaagaaaagtcaggtgttctcaactgctgctgacaatcagacccaagtgggtatccgtgtgttgcaaggtgagcgtgaaatggcagcagacaacaagcttcttggtgaatttgaccttgtgggcattccacctgccccccaaaaa

SEQ ID NO: 1866 - DNA, 273 bp, Zea mays
  unsure (1)..(273): unsure at all n locations; Clone ID: LIB3061-040-Q1-K1-G10
atctacattaacagttctccttcaacgatcattcaaaactactaggacggcaatctcaactccacaaaggagaagattttgatcggagaggatctttcatggaaatcaaacttcaaatgctgggcttgcttatctcagtggtcaatcagttgttgggtctgctggactgccccaagttgaagcaaaatatcctgctttgctattcaaacagcagctcgtggatctaanttgaaaggtttatggcatgataagtgacagcgtgaaaaaggagct

SEQ ID NO: 1867 - DNA, 105 bp, Zea mays
  Clone ID: LIB3061-040-Q1-K1-G11
gctagtcatcactactcacgttcgtccaccagagcagacaacaatggccatggagacgtgcttcagagcgtgggcgctgcacgcccccgctggcagcaaggacag

SEQ ID NO: 1868 - DNA, 302 bp, Zea mays
  Clone ID: LIB3061-040-Q1-K1-G2
attgagaccagcaagcaacatagaaagtagaatccattagcaacaatagagcaacaatggcgaccaagatattttccctccttatgctccttgctctttctacatgtgttgctaacgcgacaattttccctcaatgctcacaagctcctatagcttcccttcttcccccataccttccatcaattatagcttcagtatgtgaaaacccagctcttcaaccatataggcttcaacaagcaatcgcagcaagcaacatacctttatcgcccttgttggttcaacaatcaccagccctatctttg

SEQ ID NO: 1869 - DNA, 143 bp, Zea mays
  Clone ID: LIB3061-040-Q1-K1-G3
aagaccaaccagcaacatagaaaggcgtatacaggatcagcaatcaagacaccatgacgaccgagatagttctcgtcctgatgctgcttgctgtagctgcacagcgccgttagcgcgacaatgctctgtcaatgctcacaagc

SEQ ID NO: 1870 - DNA, 287 bp, Zea mays
  Clone ID: LIB3061-040-Q1-K1-G4
cccacgcgtccggggtgattgaagagatgaaacgggatggccgtgttgctcctgattggacaagatacagcaacctggcttccatatatgttgaggctggaatgtttgagaaggcagaggctgctcttaaggagcttgagaagcggaacaccagcaatgacatcgaagcctaccagttccttattacattgtatgggcgtacacagaacttagtggaagttcaccgtgtctggcgatcgctgaagcgggataaccctagaatggcaaacatgagctaccttaacatg

SEQ ID NO: 1871 - DNA, 386 bp, Zea mays
  Clone ID: LIB3061-040-Q1-K1-G7
gaaagcacaatagtgtaccaacaatggctgccaaaatattttgcctccttatgctcctgggtctttctgcaagtgctgctacggcgaccattttcccacaatgctcacaagctcctatagcttcccttcttcccccgtacctctcaccagcggtgtcttcggtatgtgaaaacccaattcttcaaccctataggatccaacaggcaatcgcagctggcatcttacctttatcacccttgttcctccaacaatcatcagccctattacagcagttacctttggtgcatttattggcacaaaacatcagggcacaacaactacaacaacttgtgctagcaaaccttgctgcctactctcagcaacaacagtttcttccattcaaccaa

SEQ ID NO: 1872 - DNA, 406 bp, Zea mays
  Clone ID: LIB3061-040-Q1-K1-G8
atgctatgcagtatggcacagttcctgttgtccatgcaactgggggccttagagataccgtggagaacttcaaccctttcggtgagaatggagagcagggtacagggtgggcattcgcacccctaaccacagaaaacatgttgtggacattgcgaactgcaatatctacatacagggaacacaagtcctcctgggaagggctaatgaagcgaggcatgtcaaaagacttcacgtgggaccatgccgctgaacaatacgaacaaatcttccagtgggccttcatcgatcgaccctatgtcatgtaaaaaaggaccaaagtggtggttccttggaagatcatcagttcatcatcctatagtaagctgaatgatgaaagaaaacccctgtacatttacaatttgggggg

SEQ ID NO: 1873 - DNA, 404 bp, Zea mays
  Clone ID: LIB3061-040-Q1-K1-G9
gaagaaaacacctgggagcagtaatgccaaccatggtcatccaagacataagcgtcggcacgcagacgggtaaaacattgatcaaccatggtcattatttttttataactgatacaaccattattttccctatactatagatccatttcccctttaggttgggaaataatccaaaatatggtggtgtaaaatagggttggcttttcaatggatttttgagttttcaactggggattttgattttgattgggccaaataatggaagttggacaatgtaacctttaactgatttggtggcctggattaggttcaataacttataatggccaaacctaatggggaatttacagttttcccccttgaataatggggtttttgcccccaattttttgaatggaccttta

SEQ ID NO: 1874 - DNA, 312 bp, Zea mays
  Clone ID: LIB3061-040-Q1-K1-H1
cagaaacacaccaagcgaagctacctagcaacgacttaacaacaatggctaccaagatgttagcgctccttgcgcttcttgccctttttgtgagcgcaacaaatgcgttcattattccacaatgctcacttgctcctagtgccattataccacagttcctccgaccagttacttcaatgggcttcgaacacctagctgtgcaagcctacaggctacaacaagcgcttgcggcgagcgtcttacaacaaccaattaaccaattgcaacaacaatccttggcacatctaaccatacaaaccaatcgaacacaac

SEQ ID NO: 1875 - DNA, 343 bp, Zea mays
  Clone ID: LIB3061-040-Q1-K1-F11
cccacggtccgttcccaaatcccgtcccctccacccgcactccattggcgccgctcccctcccctggccgccgccggagatctgatccgatccgatccgatccgtttgtgcttgtgctgcaagagtgagaagtaaaaaatatggctgccctgccactggccacggccgaagtatccaaccctaaccttaaccggaccatgaccggcaacctcgggcgcctcaacccaatcttccaaactaccggccgggcccggtctttggccggcccaatggcacgcctaagggcttccaagaccacgttccggtccccgaggtccttgaggagaaagggccccgtaggggc

SEQ ID NO: 1876 - DNA, 384 bp, Zea mays
  Clone ID: LIB3061-040-Q1-K1-D3
caagcaacatagaaagtagaatccattatcaacaatagagcaacaatggcgaccaagatgttttccctccttatgctccttgctctttctacatgtgttgctaacgcgacaattttccctcaatgctcacaagctcctatagcttcccttcttcccccataccttccatcaattatagcttcagtatgtgaaaacccagctcttcaaccatataggcttcaacaagcaatcgcagcaagcaacatacctttatcgcccttgttgtttcaacaatcaccagccctatctttggtgcagtcattggtacaaaccatcagggcacaacagctgcagcaactcgtgctacctgtgatcaaccaagtagctctggcaaacctttctccc

SEQ ID NO: 1877 - DNA, 425 bp, Zea mays
  Clone ID: LIB3061-040-Q1-K1-D4
caacaagcaacatagaaagtggaatccagtagcaacaatagagcaacaatggcgaccaggatacgttccctccttatgctccttgctctttctgcatgtgttgctaacgcgacaattttccctcaatgctcacaagctcctatagcttcccttcttcccccataccttccatcaatgatagcttcagtatgtgaaaacccagctcttcaaccctataggctccaacaagcaatcgcagcaagcaacatacctttatcacccttgtttcaacaatcgccagccctatctttggtgcagtcattggtacaaaccatcaaggcacagcagctgcagcaactcgtgctacctgtgatcaaccaagtagctctggcaaacctttctccctactatcagcaaccaaaaaccccctaaaaaaattttttttt

SEQ ID NO: 1878 - DNA, 384 bp, Zea mays
  Clone ID: LIB3061-040-Q1-K1-D5
ctttcagcaagcgctgctacctcgacttttattccacaatgctcacaacaatacctctgtccggtgacagccgcgggatttcaatacccaactatacaatcctacatggtacaagaggccatccaagcaagcatcttacggtcattagcattaaccctccaacaaccatatgctctattgcaacagccatccttagtgcatctgtatctccaaagaatcgcggcacaacaactacaacaacagttgctaccaacaatcaatcaagtagttgcagcgaaccttgctgcttacctccagcaacaacagtttcttccattcaatcaactagctggggtgaaccctgctatctacttgcaggcacaacagctactaccatttaaccaa

SEQ ID NO: 1879 - DNA, 322 bp, Zea mays
  Clone ID: LIB3061-040-Q1-K1-D6
cccaattggttggtataatcctttagcttcaatagagcaacaatggcgaccaggatatgttccctccttatgctgcttgctctttctacatgtgttgctaacgcgacaattttccctcaatgctcacaagctcctatagcttcccttcttcccccataccttccatcaattatagcttcagtatgtgaaaacccagctcttcaaccatataagcttcaacaagcaatcgcagcaagcaacatacctttatcgcccttgttgtttcaacaatcaccaaccctatctttggtgcagtcattggtacataccattaaggcacaac

SEQ ID NO: 1880 - DNA, 387 bp, Zea mays
  Clone ID: LIB3061-040-Q1-K1-D7
gcgcccacgcgtccgctggcttaattttgcatttgattacttccatacgtaggctggacaagaacgtggaagattacatgtaaatccagaagaagatgagcaaccgaagaagaaagttcgacttggaagcccagcaaatcagtggatttcagtttataatgctagaaggcccatgaagcagagataccattacaatgtagcagatgccaggcttcatcaacacatagagaagggtaatgaagatggattgttcattagttcagtagcatcttcagccaatctttgggctctcattatggatgcagggactggtttcacatcccaagtatatgaactgtcacccatattccttcataaggattggattatggagcagtgggaaaataa

SEQ ID NO: 1881 - DNA, 313 bp, Zea mays
  unsure (1)..(313): unsure at all n locations; Clone ID: LIB3061-040-Q1-K1-D8
ggctgaccgtgttattcccactttaaaaccaaagcatttgttttctaggaaacgcactgttggaaagacaagcaggcgataagctcagtacctcactggatctggtagtaaaggactggtgcaattttggtgtgagcaatttgatgaaacgggagcttttatgtctagcacttatgtatgctacttatttatgaaatgtcttgctgttgctgtatcatggtcctctttaagacagttttactagtttatacatgtattacttcgaattggttgggttactatatattagctntctggtgtttgattctcttat

SEQ ID NO: 1882 - DNA, 145 bp, Zea mays
  Clone ID: LIB3061-040-Q1-K1-D9
gatgttcagtttgatgatattgttgttgcatgtggcagtggtggaaccattgctggccttgctggaggatccagattgagcagcttaaatacaaaagttcatgcattctctgtttgtgatgaccctgaatacttctatgactatg

SEQ ID NO: 1883 - DNA, 323 bp, Zea mays
  Clone ID: LIB3061-040-Q1-K1-E1
gtcagctagctgctgcctacccccagctttttctttcattcaaccaactggcagcattgaactcggctgcttatttacaacagcaacagctaccaccattcagccagctagctgatgtgagccctgttgccttcttgacacaacaacatttgttgccgttatacttgcacgctgatcctaacgctatcacactacttacgactgcaacaattgctgccattcaacctacttgctttgacagaccctacattgttctaccatcaactcataactggtggcacccttttttatattgctcatgatgcatacaccgattttgaatc

SEQ ID NO: 1884 - DNA, 388 bp, Zea mays
  unsure (1)..(388): unsure at all n locations; Clone ID: LIB3061-040-Q1-K1-E11
acttgcttgagtagcgaagcgcgagagcaatggcgtcgctgtcgtgcgcctncacgctgccctggacccccgcctcctacccgcggccctcggcggggcgctgcctcacggcctctcgccgggctccgtcgctggtcatcgtccgccaaggggagggtcagaaggtccggccgggcatattggccggccgcctaaaagaagggggggaaaaaggggagtccctggaagggccaaccggattctaccggaactttcttctttccaagggccagggttcccttctgacccccgaagtccttaagggaatgccactggagccggagagaattgaagctgtgaaaaagccggttaaagaagacgcttaacaacttgctcgagattttgaaac

SEQ ID NO: 1885 - DNA, 412 bp, Zea mays
  Clone ID: LIB3061-040-Q1-K1-E12
gcttctttggtttgtacaaaacaagaaggtcgaagattggacagacccacgttttcccactgtgcaaggcatagtacgtcggggcttgaaggttgaagcattgatacagtttatactccaacagggtgcttcaaaaaatctgaatctcatggagtgggataaactctggacaatcaacaagaagataattgatccagtgtgcgcaaggcatactgctgtgctaaaagaccagcgtgtcatcttcacttttaccaaatggccaaaagaaccctttggtcgaaatttaaccaggccttagaaattttaaggtgcctgaaagaaaggttccacccttggcaaccgaatttggcttgaatattcctaagccggaactatttaccaaggtgaaggaattacccttatgggatggggg

SEQ ID NO: 1886 - DNA, 404 bp, Zea mays
  unsure (1)..(404): unsure at all n locations; Clone ID: LIB3061-040-Q1-K1-E2
gccggcccaaggggaccagggacgtcgtgtcgtgggtgcttcggatgaaggaggagggcagggaggctgaggtcttccatccgagcatacaccacgaggacaaccaaggccagctggtgaggatcctcgacattgcgtgcctttgtgtcaccgctgctcctaaatcgagaccgacgtcgcagcagctagtcgcgtggctggacgacatcgcggagggatgaggcttcattctttgctgcagtcctagttcttcccagtgccttcagtttgatagttccttaagaatgattattagctgtgtacataatatttacagagtgatatgccgagagttctcttcttgtctntctctttatctgtctagtgatgctgatgacatcaacatcttcatttacttttggggg

SEQ ID NO: 1887 - DNA, 226 bp, Zea mays
  Clone ID: LIB3061-040-Q1-K1-E4
gtttagatcgcgagggccgcccttttttttttttttttttttttttttttttttttttgtttttgtttttttttttttttttttattttttttttttttttttttttttttttattaataaaaaattatttttttttttatttttatattgtttattatttataattaaaaaaaaaaattattttataattaaaaaaaaaaaacaaaaataaaaagatacatttac

SEQ ID NO: 1888 - DNA, 386 bp, Zea mays
  Clone ID: LIB3061-040-Q1-K1-E5
aaagaagaagggcccccttcaacagacagatcctccatcaatacctgttgatgagcttgtcccctcaggagaatttccagagggcgaaatccaacaatacaaggatgacaatctgtggagaacaactagtgaggaaaagagggacctggaacgactgcaaaagccaatatacaactctgttcgccaagcagcagaagttcatagacaggtgcggaaatatatgaggagcatcataaaacctggaatgttaatggttgatctatgtgagacattggaaaacatggtccggaaacttatcaaggagaatggactgcaagctggcattgcttttccgactggatgctccttgaattgggttgcagctcactggactccaaatgcgggcg

SEQ ID NO: 1889 - DNA, 230 bp, Zea mays
  Clone ID: LIB3061-040-Q1-K1-E6
agttgctgcctttctaccagcagtttgcggctaaccccgcaaccctcttacaactacagcaattgttgccctttgtccaacttgctttgacaaacccagcagcctcctaccaacaacacatcattggtggtgccctcttttagattgcttattagttgtaattcaataataaagttttttggatgatgtatgtggccaaccagaaataagaagttacatttccagattct

SEQ ID NO: 1890 - DNA, 384 bp, Zea mays
  Clone ID: LIB3061-040-Q1-K1-E7
gattcttgctccatctcaggagctgagcaagcaagggtgtatcctggaggctgttattgaagcaagtgctactgaaattatcaatctcatggatagcctaaatgaatgggacagtaaagtgggcgatggtgactgtggaagcacaatgtatagaggtgcaacagctattcttgaagatatgaaaaagcgttaccctatgaatgatgcagcgggaacaataaatgaaattggggcaacaatccgaagggtgatgggtggaacaagtggaatcttgtatgccatactctgcaaggctgcgtatgcaagcttaaagcagagctcaactgtcactgcgaataaatgggctgatgctttagaggcctccattgctgctgttagcaaata

SEQ ID NO: 1891 - DNA, 313 bp, Zea mays
  Clone ID: LIB3061-040-Q1-K1-E8
attgagatttatctcgatcaatatattgattatttctaggaaacacacgtcgggatgggggcaccattatcgagtacatgtcatatgtaatctaaaagatggcacctccaacgatgggttgctgcctcgacaagacaggattcatcaaagagaactggttgtatggcagcaattgttgctgctgtaggaaggcggcgaccaatgggttagccactaccaatggattaagtaactgttgtcgctgttgtaggtacgcagcagagttcgacagagtcagtcgattgaatggaagcagctgttgcaagtaagcaac

SEQ ID NO: 1892 - DNA, 395 bp, Zea mays
  Clone ID: LIB3061-040-Q1-K1-F1
gccgccaacatctccggcggccacgtcaacccggccgtcaccttcggcgcgctgatcggcggccggatctgcctcgtccgctccctcgtctactgggccgcgcagctgctcggcgccgtcgccgccgcgctcgtgctcaggctcgccaccggagggatgcatctgccggagtacgcgctggcggtgggcgtgagcggatggaacgcggcggtgctggaggcggccatggcgttcgggctcatgtacgcctactttgcgacggtgatggacaaagcgcggagggtccgcgccggcgccggagcgctggcggcgccgctcgccgtggggctcctggcgggggctaacgtgctggcctgcggcgcgctggaaggcgccgtgatgaatcccggcgccgg

SEQ ID NO: 1893 - DNA, 356 bp, Zea mays
  Clone ID: LIB3061-040-Q1-K1-D2
cagcaagcaacatagaaagtagaatccattagcaacaatagagcaacaatggcgaccaagatattttccctccttatgctccttgctctttctacatgtgttgctaacgcgacaattttccctcaatgctcacaagctcctatagcttcccttcttcccccataccttccatcaattatagcttcagtatgtgaaaacccagctcttcaaccatataggcttcaacaagcaatcgcagcaagcaacatacctttatcgcccttgttgtttcaacaatcaccagccctatctttggtgcagtcattggtacaaaccatcagggcacaacagctgcagcaactcgtgctacctgtgat

SEQ ID NO: 1894 - DNA, 383 bp, Zea mays
  Clone ID: LIB3061-040-Q1-K1-B5
ggtgtttttgattttagccgccgccgctgctcatctcacatccctcgagaagacgcctgctcctcgccgatcgatacgatggccgtcttctccgacctccacaccgccgacggcctcaagtccctcgaggctcacctcgccggcaaaacctatgtgtctggtgactccattactaaggatgacattaaggtcttcgccgcggtgccgtcgaagcctggcgctgagtttcctaatgccgcccgctggtacgagaccgtctctgcggctgtagcctcaagattccctggtaaggctgttggtgtaaatctgcctgcgggatcagctcctgcggcagctgctcctgcggatgaggctgaagatgatgatgaccttgatctttttgg

SEQ ID NO: 1895 - DNA, 303 bp, Zea mays
  Clone ID: LIB3061-040-Q1-K1-B6
atgattattgcccacggatagtcatgttatctacataatccgttttgccactcgtcagggttctgcattgtgaatagaggttcatctttgtgattagattgccaccgccgctgctttctactcattcgacgaatgttttgcaaagaagaaatctggtttatcttaccctcgattccttcctatgatacaactaacaaaatgaattggtacattcaggtatctttaaaaccttttcacttccaaattagaatgatatcatgctcaagaggtaacatttttctgatgttttttaattttaatagt

SEQ ID NO: 1896 - DNA, 381 bp, Zea mays
  Clone ID: LIB3061-040-Q1-K1-B7
ctttgttgccaaaaacgggagacagtttgagaatatcacacggcagaggaatcctggagatacaccattcaagtttctatttgacaaacactgtccagactacaaatattatgagtttcagcttgctgaagaggaaagggctcttgctcagtcaaaggaggctgaagcatcgaaagctaactctggcactgcaagcttcaaggcaccaggtggtacttatagaagctcatttgaacagaagtctaactatcagacacctgcatcagctttgtacggggcatatgagggtagttcttcccaaggaagctcttctagttacggtgatcatacagctccaccatcagatcctgtagcattgatggaattctatgcaaagaaggc

SEQ ID NO: 1897 - DNA, 284 bp, Zea mays
  Clone ID: LIB3061-040-Q1-K1-B9
aaaatatattctgctcttgctgaagtggcaacggatagagaggacatggacaactcactcagtgactgggtgaaagctttatctatgttggagcatttggttgagcctgaccatcgtcgagttgtggaattaaacttccgcatttgtttggtttatgaactagtttccaagatcggagaaacaatttcatactgggcaaaaacaatttcgctatgcaaagtacgcatacagagcccgaaaaggtccaaggatgctttgctggctggtatacattgtgatgcgtt

SEQ ID NO: 1898 - DNA, 384 bp, Zea mays
  Clone ID: LIB3061-040-Q1-K1-C1
ccgacgcgtccggattgggttcaaagttgggcttttggacagctgtggtgtgcacggcagctctgtgacttgtgaggaggaagggaggaagaaagcggatccatggcgtcgaagcggatcctcaaggagctcaaggacctgcagaaggatcctcccacctcttgcagcgcaggccctgttgccgaagatatgttctactggcaggcgacgattatggggccatcagatagcccatacgctggtggcgtatttttggtcactattcactttccaccggactacccattcaaaccaccgaaggttgcattcaagacgaaggtttaccatccgaatatcaacagcaacgggagcatctgtcttgatatcttgaaggagcaatggagc

SEQ ID NO: 1899 - DNA, 345 bp, Zea mays
  Clone ID: LIB3061-040-Q1-K1-C10
cagacgaataatctcttcttcacctcactaacaccagctagcaactctttctctcctgcaataagggccgctcgctcctcctcctcccagccgcagctggtcgcggcggcggcggtcctggcagcggcgctgctgctgctggcggcgggggccgggacggcgtcggcggcggtgagctgcggcgaggtgacgtcgtcggtggcgccgtgcctcgggtacccgatgggcaacgcggcgtcgccctccgcggcgtgctgcagcggggtgcgctcgctcaacagccgcgccgcgtcggcggcggacccgcaagccacctgcaactggcttaagaacatgaccggcccg

SEQ ID NO: 1900 - DNA, 437 bp, Zea mays
  Clone ID: LIB3061-040-Q1-K1-C12
aattcccgggggagaacctgatgctcaccgaaaccgtcggccctgaacaaattgcagaggtggtgagccgttggacgggtattccagtgacccggcttggccagaacgacaaggagaggctggtcggcctggctgacaggcttcaccagagggtggtcggccagacagaggctgtgagcgccgtcgcagaggcggtgctgaagtcgaaggccggtcttggcaggccacaacagcccactggctcgttcctcttcctgggttcgactggcgttgggaaaaccgaacttggccaaggccttacccgacagcttgttgaccaccaaaacctttttggtcggattgacatgttggaggacctggagcaacacttgggtgcttggcttattggagcaccacctggcttacttgggcattaaaaaggtgggccacttactgaa

SEQ ID NO: 1901 - DNA, 293 bp, Zea mays
  Clone ID: LIB3061-040-Q1-K1-C2
ggttatgattccaggatatatggtcgatgtggtcttggtaatggtatggataacaggtacaggcccagggcatgtagtggatactatggttatggcaatgagagtcaggatggaacaattgagttaaacagaggtcctagatctggccggttcaagaaccagaaattgtacggtcatactgtcactattgctgtgaaagggcagtctctcccttctagtgaaagcaagaatgatagtgctgtgcctgatagagcaaagtacaatagagatgacttccctggtcagtacgatgc

SEQ ID NO: 1902 - DNA, 384 bp, Zea mays
  Clone ID: LIB3061-040-Q1-K1-C3
gaattcccaggcaggcaggtcggcgaggagggcaggaagaccgaagaccgagccgtgcgggggctcgggacgggaacgggacaggaccccaaaatctcagatccttcctgcccgcccgcccgtgcccgtcgacgcgtcgttcttgccggccgcgcctcacctccgccctctcctcctccagggggatcggatacgccacaggctgcgcgatggtgctgtgggtcttcggctacggctccctcatctggaaccccggcttcgacttcgacgacaaaatcctcggcttcatcaagggctacaagcgcacctttaatctcgcttgcattgaccacagaggcacaccggagcatccggcgaggacctgcacgcttgaaaccgacgacg

SEQ ID NO: 1903 - DNA, 416 bp, Zea mays
  Clone ID: LIB3061-040-Q1-K1-C5
acccacgcgtggcgattgtattgtcagcatgcgaagtgtgtgatgtatttcaatggactcatcgagatcgggcggcctgtagctactccataatgcttgtcaatgccggatgaaagtcgcatgccatgtgccaaggcacggatctcatactcgtacttcgcacactatgggtactgacaactgccaaggtcttttcggctgcaatgactagctaccacatatagtatgatagtgttgttagcgtgttcagagccattgcatcatgctggtatttgcggcttaaatcctgatataatggttactatgttcatgaacgaccccatatactggaccacctagaagcttgaattgactattgatagaatacgtgaaacgggttcataggattttacgcgtgcatcaagcatgcgaaagat

SEQ ID NO: 1904 - DNA, 393 bp, Zea mays
  Clone ID: LIB3061-040-Q1-K1-C6
gcgattagcaacaatagagcaacaatggcgaccaagatattttccctccttatgctccttgctctttctacatgtgttgctaacgcgacaattttccctcaatgctcacaagctcctatagcttcccttcttcccccataccttccatcaattatagcttcagtatgtgaaaacccagctcttcaaccatataggcttcaacaagcaatcgcagcaagcaacatacctttatcgcccttgttgtttcaacaatcaccagccctatctttggtgcagtcattggtacaaaccatcagggcacaacagctgcagcaactcgtgctacctgtgatcaaccaagtagctctggcaaacctttctccctactctcagcaacaacaatttcttccattc

SEQ ID NO: 1905 - DNA, 343 bp, Zea mays
  Clone ID: LIB3061-040-Q1-K1-C7
cgacccacgcgtacgcaagggcgaggcaatcaggtttaaaattttgcttttaaaaccctgtaccgagcccagcgggtgggtgacacgtgaacaggactggaccaacaaatctcatacattgcatacaaacccatcctaaccgatctacacgacctgcataacgatccatccacaccttacatcgcacgtactgttgactaatataagctctactaagatgcgacaattatctgtccatcatatagtccatacacttgatgcgtattcttggacactactcactttacaccggactacccattctaaccagctacagacgcattcaaaaccaaggtttaccata

SEQ ID NO: 1906 - DNA, 357 bp, Zea mays
  Clone ID: LIB3061-040-Q1-K1-C8
gacgatcagccaacaagggatatatcgtacgcacttttagctcccatgtactgcttccagctatctggatacgtcagcattaaaaagcagtacatgcgtacgtctccaccatctcagttgctcagacacatacatatcagtgacaatcaataactcaacaatcatcctatatcattaacttcttatcccataccttccatcaattataacttcattatgtgaaaacccagctcttcaaccatatatgcttcaacaagcaatctcatcaagcaacatacctttatcgcccttgttgtttcaacaatcaccagccctatctttggtgcaatcattgtttcaaaccatcatgtcacaaca

SEQ ID NO: 1907 - DNA, 273 bp, Zea mays
  Clone ID: LIB3061-040-Q1-K1-C9
gcgagaggcgaggagagagaaagttctcgagctagacgagcgccgtgcgaggagagaagcgaggtgagcggtgaagcggcggccgtgggcggaggccaaggagaggcgaatggcatcccgccgaacgtcaccatctatatcaacaaccttaacgagaagatcaagctcgaagaacttaagaagtccctaacagccggttttttccagtttgggaaaattcttgatgggcttgctttcaagactttggagcataaaggtcaagcttgggttggc

SEQ ID NO: 1908 - DNA, 422 bp, Zea mays
  Clone ID: LIB3061-040-Q1-K1-D10
ctggactacgcgagaacaaggttggctaatgacgcgaaggctgccaagggaggaggtgaaaggcggttcaatgggcttgtcgatgtctaccgcaagacactcaagtctgatggtattgctgggctttaccgtggatttaacatctcctgtgttggaatcattgtttatcgtggtctgtactttgggctctatgattccatcaagccagttgtccttactggcaacctccaggacaatttctttgccagtttcgctctgggttggctgatcactaatggtgctggtcttgcatcttaacccatcgataccgtccccaaaaggatgatgatgacctctggtgaaggtgtcaagtaccagaacttcttggaccccttccagcagattcttaaaaagggaagggccaagttcctgtgtaagggtgc

SEQ ID NO: 1909 - DNA, 408 bp, Zea mays
  Clone ID: LIB3061-040-Q1-K1-D11
gggaatcccggcaggcaaagcgaaagcatccgcgcgagaggcgtcgcgtgttccttgcttcgtggtcacgtgccgtggcccttccgcttcccccgtatccgcccgtcctgttcccgccccgagcgaaccggccgccgccgaagccaatccacacgaaccgtggcgggctggcgcttaacccggcggccgggcttgggccggccctggttccaacaaccgtgaccaggcattcattgagccgaacctgaacttcgtcaaggcgcttcaggagctcaagaacctgcgcccgcagctctacttgggcttcgagtactgcgagaagtcctaccttcgcagcgaacacaagccagtggtgcttgacaacatgaaagattacgctgtcagggccctggtcaacgctgtcgacca

SEQ ID NO: 1910 - DNA, 194 bp, Zea mays
  Clone ID: LIB3061-040-Q1-K1-D12
gtcggatgtggcattggtggtagctcaaggtacttggcgaagaaatacggagcgcagtgcactgggatcacgttgagccctgttcaagccgagagaggaaatgctctcgctgcaacgcaggggttgtcggatcaagttactctgcaagttgctgatgctctggagcaaccgtttcctgacgggcagttcgatct

SEQ ID NO: 1911 - DNA, 379 bp, Zea mays
  unsure (1)..(379): unsure at all n locations; Clone ID: LIB3061-040-Q1-K1-B4
ctgtatcgcccttgttgtttcaacaatcgccagtcctatctttggtgcagtcattggggcaaaccatcagggcacaacagctgcagcaactcgtgctacctctgatcaaccaagtagctctggcaaacctttctccctactctcagcaacaacaatttcttccattcaaccaactgtctacactgaaccctgctgcttatttgcagcaacaactattaccatttagccagctagctactgcctactctcagcaacaacaacttcttccatttaaccaattggccgcactgaaccccgctgcttatttgcagcagcaaatactactaccatttagccagctagctgcagcaaaccgtgcttncttcttgacacagcaaca

SEQ ID NO: 1912 - DNA, 439 bp, Zea mays
  Clone ID: LIB3061-022-Q1-K1-F3
gcattcagaaacacacctagcgaagcgcactagcaacgacctaacaacaatggcttccaagacattatccctccttgcgcttcttgccctttttgtgagtgcaacaaatgcgttcattattccacaatgctcacttgctccgagtgccattattccacagttcctccctccagttacttcaatgggcttcgaacacccagctgtgcaagcctataggctacaacaagcgcttgcggcgagcgtcttagaacaaccaattgcccaattacaacaacaatccttggcacatctaaccatacaaaccatcgcaacgcagcagcaacaagcactgagccacctagccgtggtgaaccctatcgcctacttgcaacaacagctgcttgcatccaacccacttgctttggcaaacgtagctgcataccaacaacaacaacagttg

SEQ ID NO: 1913 - DNA, 384 bp, Zea mays
  Clone ID: LIB3061-022-Q1-K1-F5
gcgcgcttgctcatccatcaacccttagctctatcacagcagttacctttgctccagcgggttgcacaaaacattagggcgcagcaactacaacaacttgtactaacaaaccttgctgcatactcttagcaacatcaattagttccattcaaccaactggctgcattgaactctgctgcttattcgcagcaccaattaccattcatacagatagttgatgcctaccaccagcaatttcttacattcaaccaactatcagcattcaactctgctgcttatttacagcagcaacaactactaccattcagtcagctagctaatgtgaaccctgatgccttcttgacacaacaacatttgttacagttctacctgcacgctatgcct

SEQ ID NO: 1914 - DNA, 439 bp, Zea mays
  Clone ID: LIB3061-022-Q1-K1-F7
cagaaacacacctagcgaagcgcactttcaacgacctaacaacaatggcttccaagacattatccctccttgcgcttcttgccctttttgtgagtgcaacaaatgcgttcattattccacaatgctcacttgctccgagtgccattattccacagttcctccctccagttacttcaatgggcttcgaacacccagctgtgcaagcctataggctacaacaagcgcttgcggcgagcgtcttagaacaaccaattgcccaattacaacaacaatccttggcacatctaaccatacaaaccatcgcaacgcagcagcaacaagcactgagccacctagccgtggtgaaccctatcgcctacttgcaacaacagctgcttgcatccaacccacttgctttggcaaacgtagctgcataccaacaacaacaacagttgcaaca

SEQ ID NO: 1915 - DNA, 418 bp, Zea mays
  Clone ID: LIB3061-022-Q1-K1-F8
ctagtaacaaaagatgtctccgaagaggaaagagaagaaaaccttaccttccatagtgagaagctagcagtggcttatagtgtcctgaagactggtccagggacagaaataatggtttcaaagaatttgcaggtttgcagtgactgtcatgaatggatgaagataatctcaaaggtactttgccgtgttattattctgagggatagagttcggtttcaccggtttgaaagtggatggtgctcctgcaaggattactggtaggcctttcctggagcaatacagatgtaatccagctaatacaaaacgagcagttcctaggggatacatctgacctaattactttctccatctggagaatttggtgcttgttctgctgctgcatatcaatgaaatgaaatatttggacaattggttacta

SEQ ID NO: 1916 - DNA, 400 bp, Zea mays
  Clone ID: LIB3061-022-Q1-K1-F9
cgcttcgtagctttagagtttgtcgtgtgctatgtatagaatacaactctgtaccaatcagcataaagtatctaggaaagttgttgcatctcaagttcctagagatatgtggcacacctgttgatgagctccctaaggaaattgggcatctgagatctcttcagacactgctattagtcaatattggactagacgagctaccaccgactgtttgctcgcttacacggttgatgtgcttgatagccgaggggttcaaaaggtttccagctgacaggatggggaacctaacgtccctggaggagctacgattacggatggtagttggtcggagtgccacccaagccctagtagtagagcttggcaagctgacaaggtttgaggtggtcagcatcgccttttc

SEQ ID NO: 1917 - DNA, 439 bp, Zea mays
  Clone ID: LIB3061-022-Q1-K1-G10
catttattggcacaaaacatcagggcacaacaactacaacaactcgtgctagcaaaccttgctgcctactctcagcaacagcagttacctttggtgcatttgttggcacaaaacatcagggcacaacaactacaacaactcgtgctagcaaaccttgctgcctactctcagcaacaacagtttctgccattcaaccaactagctgcattgaactctgctgcttatttgcagcaacaacaactactaccattcagccagctagctgctgcctacccccggcaatttcttccattcaaccaactggcagcattgaactctcatgcttatgtacaacaacaacaactactaccattcagccagctagctgctgtgagccctgctgccttcttgacacagcaacatttgttgccgttctacctgcacactgcgcctaacgttg

SEQ ID NO: 1918 - DNA, 226 bp, Zea mays
  Clone ID: LIB3061-022-Q1-K1-G11
gcgccaactgatgctatttggcctgcttgctagtgccgatgcagctaccttcctgccacaaggctcgcaggctcctatagctccagttctaactcagctcgtttcaccaaaccctgctgcctactgggaacacctgattctataccactatctgactctgcaggcctttgcagctgacatactacatctatcaccgttgcttattccacagtcattagctctatta

SEQ ID NO: 1919 - DNA, 411 bp, Zea mays
  unsure (1)..(411): unsure at all n locations; Clone ID: LIB3061-022-Q1-K1-G12
aacccgatcgacaccatgagggtgttgctcgttgccctcgctctcctggctctcgctgcgagcgccacctccacgcatacaagcggcggctgcggctgccagccaccgccgccggttcatctaccgccgccggtgcatctgccacctccggttcacctgccacctccggtgcatctcccaccgccggtccacctgccgccgccggtccacctgccaccgccggtccatgtgccgccgccggttcatctgccgncgncaccatgccactaccctactcaaccgccccggcctcagcctcatccccagccacacccatgcccgtgccaacagccgcatccaagcccgtgccagctgcagggaacctgcggcgttggcagcaccccgatcctgggccaatgcgtcgagtttctg

SEQ ID NO: 1920 - DNA, 287 bp, Zea mays
  unsure (1)..(287): unsure at all n locations; Clone ID: LIB3061-022-Q1-K1-G2
agaagatgaaagaaatgagcacagattaaagagcaaagagctttgttccaagggtatgcatattcggtgggaaagcatttgccacatatatacaggcaaaaaggatcgttaaatttattacagatgtggcagctaccgtgaaccatgattcagacattggagatttgttgaaggtcgtatttgttccagactataatgttagtgttgccgangcgctaattcctgccagtgaattatcacagcatatcagtactgctggaatggaagctagtgggaccagtaacatg

SEQ ID NO: 1921 - DNA, 443 bp, Zea mays
  Clone ID: LIB3061-022-Q1-K1-G3
atcacaaaacatccttctatcagtactatcgatcatcattcatcttagtagtataggcaccaaatcaaatctgcgacatcaattatctaactccaaaaaccatgaagctggtgcttgtggctcttgctttcattgctttagtatcaagtgtatcttgtacacagacaggcagctgcagctgtggtcaacaacaaagccatgagcagcaacatcatctcacaacatcatcatgcacaataacaacatcatcaaccagcagcacaacatcactcagcagcagcagcaccaacaacaacaagttcacatgcaaccacataaacatcagcatcaacaagaagttcatgttcaacaacaacaacaacaaccgcagcaccaacaacaactactacaacaacagcaccaacaacaacatcaatgtgaaggccaacaacaacatcaccaac

SEQ ID NO: 1922 - DNA, 403 bp, Zea mays
  unsure (1)..(403): unsure at all n locations; Clone ID: LIB3061-022-Q1-K1-G4
agccctatcttgggtgccatcatgggtccaaaccatcagggcccaccagctgcagcacctcgtgctacctgtgatcaaccaagtagctctggcaaacctttctccctactctcagcaacaacaatttcttccattcaaccaactgtctacactgaaccctgctgcttatttgcagcaacaactattaccatttagccagctagctactgcctactctcagcaacaacaacttcttccatttaaccaattggccgcactgaaccccgctgcttatttgcagcagcaaatactactgccatttaacgagctagctgcagcaagtcgtgcttncttcttgacacagcaacagttgctgcctttctacaagcagtttgcgggtaaccccgcaaccctcttacaacta

SEQ ID NO: 1923 - DNA, 436 bp, Zea mays
  Clone ID: LIB3061-022-Q1-K1-G5
cagcattcaataacacaccagttattgcactagcaacgacctaacaccaatggctgccaagatattagccctccttgcgcttcttgcccttttagtgagcgcaacaaatgcgttcattattccacagtgctcacttgctcctagtgccattattccacagttcctcccaccagttacttcaatgggcttcgaacatccagccgtgcaagcctacaggctacaactagcgcttgcggcgagcgccttacaacaaccaattgcccaattgcaacaacaatccttggcacatctaaccctacaaaccattgcaacgcaacaacaacaacaacaacagtttctgccatcactgagccacctagccgtggtgaaccctgtcacctacttgcaacagcagctgcttgcatccaacccacttgctttggcgaacgtatctgca

SEQ ID NO: 1924 - DNA, 416 bp, Zea mays
  Clone ID: LIB3061-022-Q1-K1-G6
cccataccttccatcaattatagcttcagtatgtgaaaacccagctcttcaaccatataggcttcaacaagcaatcgcagcaagcaacatacctttatcgcccttgttgtttcaacaatcaccagccctatctttggtgcagtcattggtacaaaccatcagggcacaacagctgcagcaactcgtgctacctgtgatcaaccaagtagctctggcaaacctttctccctactctcagcaacaacaatttcttccattcaaccaactgtctacactgaaccctgctgcttatttgcagcaacaactattaccatttagccagctagctactgcctactctcagcaacaacaacttcttccatttaaccaattggccgcactgaaccccgcttgttatttgcagcagcaaatactac

SEQ ID NO: 1925 - DNA, 427 bp, Zea mays
  Clone ID: LIB3061-022-Q1-K1-F2
acaagctcctatagcttcccttcttttcccatacctctcaccagcggtgtcttcaatgtgtgaaaccccaattgttcaaccctacaggatccaacaggcaatcgcaacaggcatcttaccattatcacccttgttcctccaacaaccgtcagccctattacagcagttacctttggtccatttggtggcacaaaacatcagggcacaacaactacaacaacttgtgctagcaaaccttgctgcatactctcagcaacatcagtttcttccattcaaccaactggctgcattgaactctgctgcttatttgcaacaacaattaccattcaaccagctaggtgcttgctacccccagcaatttctttcattcaaccaactagcaacattgaactcttgtgcttatttacagcagcaaccactactacca

SEQ ID NO: 1926 - DNA, 443 bp, Zea mays
  Clone ID: LIB3061-022-Q1-K1-E1
caaaaacacaccaagcgaagcgcactatcaacgacctaacaccaatggctaccaagatattagccctccttgcgcttcttgcccttttagtgagcgcaacaaatgcgttcattattccacagtgctcacttgctcctagtgccattattccacagttcctcccaccagttacttcaatgggcttcgaacatccagccgtgcaagcctacaggctacaactagcgcttgcggcgagcgccttacaacaaccaattgcccaattgcaacaacaatccttggcacatctaaccctacaaaccattgcaacgcaacaacaacaacaacaacagtttctgccatcactgagccacctagccgtggtgaaccctgtcacctacttgcaacagcagctgcttgcatccaacccacttgctctggcgaacgtagctgcataccagcaacaa

SEQ ID NO: 1927 - DNA, 425 bp, Zea mays
  Clone ID: LIB3061-022-Q1-K1-E10
atagaaagcacaatagtgtaccaacaatggcagccaaaatattttgcttccttatgctccttggtctttctgcaagtgttgctaccgcaaccattttcccacaatgctcacaagctcctatagcttcccttcttcccccatacctctcaccagcggtgtcttcaatgtgtgaaaccccaattgttcaaccctacaggatccaacaggcaatcgcaacaggcatcttaccattatcacccttgttcctccaacaaccgtcagccctattacagcagttacctttggtccatttggtggcacaaaacatcagggcacaacaactacaacaacttgtgctagcaaaccttgctgcatactctcagcaacatcagtttcttccattcaaccaactggctgcattgaactctgctgcttatttgcaaaca

SEQ ID NO: 1928 - DNA, 422 bp, Zea mays
  Clone ID: LIB3061-022-Q1-K1-E11
ttgcctccttatgctccttggtctttctgcaagtgctgctacggcgaccattttcccacaatgctcacaagctcctatagcttcccttcttcccccgtacctctcaccagcggtgtcttcggtatgtgaaaacccaattcttcaaccctataggatccaacaggcaatcgcagctggcatcttacctttatcacccttgttcctccaacaatcatcagccctattacagcagttacctttggtgcatttattggcacaaaacatcaaggcacaacaactacaacaacttgtgctagcaaaccttgctgcctactctcagcaacaacagtttcttccattcaaccaactagctgcattgaactctgcttcttatttgcaacaacaacaactaccattcagccagctatctgctgcctaccccc

SEQ ID NO: 1929 - DNA, 413 bp, Zea mays
  Clone ID: LIB3061-022-Q1-K1-E12
caagcggcggctgcggctgccagccaccgccgccggttcatctaccgccgccggtgcatctgccacctccggttcacctgccacctccggtgcatctcccaccgccggtccacctgccgccgccggtccacctgccaccgccggtccatgtgccgccgccggttcatctgccgccgccaccatgccactaccctactcaaccgccccggcctcagcctcatccccagccacacccatgcccgtgccaacagccgcatccaagcccgtgccagctgcagggaacctgcggcgttggcagcaccccgatcctgggccagtgcgtcgagtttctgaggcatcagtgcaacccgacggcgacgccctactgctcgcctcagtgccagtcgttgcggccgcagtgttgccagcagctc

SEQ ID NO: 1930 - DNA, 375 bp, Zea mays
  Clone ID: LIB3061-022-Q1-K1-E2
ccagcagcaggcgcgccgcgggggcttgttctccgtcgctcgtcgtgtgcgccagcgccggcatgaacgtcgtcttcgtcggcgccgagatggcgccgtggagcaagaccggcggcctcggcgacgtcctcggcggcctgccgccggccatggccgcgaacgggcaccgtgtcatggtcgtctctccccgctacgaccagtacaaggacgcctgggacaccagcgtcgtgtccgagatcaagatgggagacgggtacgagacggtcaggttcttccactgctacaagcgcggagtggaccgcgtgttcgttgaccaacccactgtcctggagagggtttggggaagaccgaggagaagatctacggccctgtcgc

SEQ ID NO: 1931 - DNA, 421 bp, Zea mays
  Clone ID: LIB3061-022-Q1-K1-E3
gcgtgctcaaggcgaacgtaataaagttcgagcctgagctgccccagtggaagagctccgccatcgccgacctcggcgtgggcaccgagaacaagatcgccatgcacttcgacagggtcttttggcccaacgtcgaggtgctgggaatggtcgggccgacgcccaaagcctgtgggtacttcctgaacctgcacaaagccaccggcaatccggtcctcgtgtacatggccgccggaaggttcgcccaggaggtggagaagctgtcggacaaggaagccgtcggcctggtcgtttctcacctgaagaagatgctcccggatgccactgaaccgacgcagtacctggtgtcgcgatggggcttcgaccccaactccctggggtcctactcgtgcgacctggtcgcgaagccggccgacgtgtg

SEQ ID NO: 1932 - DNA, 398 bp, Zea mays
  unsure (1)..(398): unsure at all n locations; Clone ID: LIB3061-022-Q1-K1-E4
cccacgcgtccggtcagcctagcaattagctcatcgactccagattggagaactcgacaccatgaaggtgctgatcgttgcccttgctctcctggcgctcgctgcgagcgccgnctccagtacaagcggcggctgtggctgccagacaccaccgtttcatctaccgcctccgttctatatgccgcctccgttctatctgccgccgcagcagcagccgcagccatggcaataccccactcaaccaccgcagctaagcccgtgccagcagttcggatcctgcggcgtcggcagcgtcggcagcccgttcctgggccaatgcgtcgagttcctgaggcaccagtgcagcccggcggcgacgccctacggctcgccacagtgccaggcgctgcagcagcagt

SEQ ID NO: 1933 - DNA, 252 bp, Zea mays
  Clone ID: LIB3061-022-Q1-K1-E5
gcgggtcgcagccctatgatcaggttgtctggacgggcttgatcgtttatcgccgggaagctgctttggtgtcaaccaacggatctcgtatcgtcgtcttcagaatatcccagattatgcgcttctgcataagaacaacacatcaaaagcgagatcagctcagtaccaacaaaaccttaacaaccacgtttcatgtctgatctctacatgcatcttccatctgcctgtgatccgtttgctgaagcaaatgct

SEQ ID NO: 1934 - DNA, 436 bp, Zea mays
  Clone ID: LIB3061-022-Q1-K1-E6
cccacgcgtccgggcttctcctccccctccggttcgggttcgggttcgtgaggttctccggggttcggtttcgtgggtgagcggatcgagatggcggcgtcggatgttgagtaccgctgcttcgtcggcggcctcgcctgggccacggacgaccactccctccacaacgccttcagcacctacggcgaggtcctcgagtccaagatcatcctcgatcgggagacgcagaggtcccgcggcttcggcttcgtcaccttctccacggaggaggcgatgcggaacgccatcgagggcatgaacggcaaggagctggacggccgcaacatcaccgtcaacgaggcccagtcccgcggcggccgtggaggcggcggcggcggcgggtacggtggtggccgtggaggcggcggctacggcggtggcgggcgccgtgatggcg

SEQ ID NO: 1935 - DNA, 301 bp, Zea mays
  Clone ID: LIB3061-022-Q1-K1-E7
gcgcgcacgcgtccggtcttctccttccataccggatcgggttcgggttcgtaagggtcggcagggttcggtttcgtgggtgagcggatcgagatggcggcgtcacgatgttgagtaccgctgcttcatcggcggactcgcctgagccacggacgaccactccatacacaacgcctacagcacctaaggtgaggacctcgagtccaagatcatccatgatcggcagacacataggtccctcagcttctgctatgtcaccttttccacggaagtagcgatgcggaacgccatctagggcatg

SEQ ID NO: 1936 - DNA, 413 bp, Zea mays
  Clone ID: LIB3061-022-Q1-K1-E8
cggacgcgtgggttttcagcattcatttacacaccaagcgaagcgcactagcaacgacctaacaccaatggctaccaagatattagccctccttgcgcttcttgcccttttagtgagcgcaacaaatgcgttcattattccacagtgctcacttgctcctagtgccattattccacagttcctcccaccagttacttcaatgggcttcgaacatccagccgtgcaagcctacaggctacaactagcgcttgcggcgagcgccttacaacaaccaattgcccaattgcaacaacaatccttggcacatctaaccctacaaaccattgcaacgcaacaacaacaacaacaacagtttctgccatcactgagccacctagccgtggtgaaccctgtcacctacttgcaacagcagc

SEQ ID NO: 1937 - DNA, 376 bp, Zea mays
  Clone ID: LIB3061-022-Q1-K1-E9
cccacgcgtccgttcagaaacacacctatcgaagcgcactagcaacgacctaacaacaatggctaccaagatattatccctctttgcgcttcttgccctttttgtgagcgcaacaaatgcgttcattattccacaatgctcacttgctcctagtgccattattccacagttcctccctccagttacttcaatgggcttcgaacacccagctgtgcaagcctacaggctacaacaagcgcttgcggcgagcgtcttacaacaaccaattgcccaattacaacaacaatccttggcacatctaaccatacaaaccatcgcaacgcaacagcaacaacaatttctaccagcacttgaccaactagcttgggtgaaccct

SEQ ID NO: 1938 - DNA, 439 bp, Zea mays
  unsure (1)..(439): unsure at all n locations; Clone ID: LIB3061-022-Q1-K1-F1
gtcagcctagcaattagctcatcgactccagattggagaactcgacaccatgaaagtgctgatcgttgcccttgctctcctggcgctcgctgcgagcgccgnctccagtacaagcggcggctgtggctgccagacaccaccgtttcatctaccgcctccgttctatatgccgcctccgttctatctgccgccgcagcagcagccgcagccatggcaatacccccactcaaccaccgcagctaagcccgtgccagcagttcggatcctgcggcgtcggcagcgtcggcagcccgttcctgggccagtgcgtcgagttcctgaggcaccagtgcagcccggcggcgacgccctacggctcgccacagtgccaggcgctgcagcagcagtgctgccaccagatcaggcaagtggagccgctgcaccggtaccaggcgacata

SEQ ID NO: 1939 - DNA, 410 bp, Zea mays
  Clone ID: LIB3061-022-Q1-K1-F10
tgcgcttcttgcccttttagtgagcgcatcaaatgcgttcattattccacagtgctcacttgctcctagtgccattattccacagttcctcccaccagttacttcaatgggcttcgaacatccagccgtgcaagcctacaggctacaactagcgcttgcggcgagcgccttacaacaaccaattgcccaattgcaacaacaatccttggcacatctaaccctacaaaccattgcaacgcaacaacaacaacaacaacagtttctgccatcactgagccacctagccgtggtgaaccctgtcacctacttgcaacagcagctgcttgcatccaacccacttgctctggcgaacgtagctgcataccagcaacaacaacagctgcaacagtttatgccagtgctcagtcaac

SEQ ID NO: 1940 - DNA, 323 bp, Zea mays
  Clone ID: LIB3061-022-Q1-K1-F11
aacaaaggaatccattacaagagtaccatgtggcccatatccctggtgctttgttctttgatgttgatggaatatccgacagaacatctagtttaccacacatgctgccatctgaaaaggcattttcagctgctgtatctgctcttggcatctacaacaaagacgggatagtagtttatgatggaaaggggctgttcagtgctgctcgtgtttggtggatgttccgtgtatttggacatgataaagtttgggtgttggatggaggtttgccccaatggcgcgcttctgggtatgatgttgaatcaagtgcctctaagtgatgc

SEQ ID NO: 1941 - DNA, 453 bp, Zea mays
  Clone ID: LIB3061-022-Q1-K1-F12
attgagaccaactagcaacatagaaagcacaatagtgtaccaacaatggcagccaaaatattgtgccttcttatgctccttggtctttctgcaagtgctgctacggcgaccattttcccacaatgctcacaagctcctatagcttcccttcttcccccgtacctctcaccagcggtgtcttcggtatgtgaaaacccaattcttcaaccctataggatccaacaggcaatcgcagctggcatcttacctttatcacccttgttcctccaacaatcatcagccctattacagcagttacctttggtgcatttattggcacaaaacatcagggcacaacaactacaacaacttgtgctagcaaaccttgctgcctactctcagcaacaacagtttcttccattcaaccaactagctgcattgaactctgcttcttatttgcaacaacaacaacta

SEQ ID NO: 1942 - DNA, 416 bp, Zea mays
  Clone ID: LIB3061-022-Q1-K1-D9
cacaatctcacagccctcgaaggcaccatccgcgccgccgccaccgctccgaaattacagccatcgtagtgcggcggctaggtcggccggcgtttggaggagctccgaagatgtggtgccagtcgtgcaaggaagggtacgacgaggaggacgccgggacctgcaaggagtgctacgaggaggccagcgagacggaggaggagctcaagcgggagatcgacgacctccgctcccgcctcctcttcctccgcctaccctcccctaccctcgacgccgcatccggccccaactgcgacctcctcctccacgccatcccctccaccggcgcgggaggcgaacgcgatgctgggcgcaccctcgacacacccgccgtgcccgcccatcgcgtcatccctgccagcagatctcctgttttc

SEQ ID NO: 1943 - DNA, 439 bp, Zea mays
  Clone ID: LIB3061-022-Q1-K1-C6
cacgcatacaagcggcggctgcggctgccagccaccgccgccggttcatctaccgccgccggtgcatctgccacctccggttcacctgccacctccggtgcatctcccaccgccggtccacctgccgccgccggtccacctgccaccgccggtccatgtgccgccgccggttcatctgccgccgccaccatgccactaccctactcaaccgccccggcctcagcctcatccccagccacacccatgcccgtgccaacagccgcatccaagcccgtgccagctgcagggaacctgcggcgttggcagcaccccgatcctgggccagtgcgtcgagttcctgaggcatcagtgcagcccgacggcgacgccctactgctcgcctcagtgccagtcgttgcggcagcagtgttgccagcagctcaggcaggtggagccgcac

SEQ ID NO: 1944 - DNA, 435 bp, Zea mays
  unsure (1)..(435): unsure at all n locations; Clone ID: LIB3061-022-Q1-K1-C7
cacatatgcctgtacctcctctacactcagttccattatcagttgcacttaagcagcatccagtagagggtacagccacacaacagtttgttcataacgtgccaatagacaagtctggtacaaataaccgatttcaggagtcctctgcttctgctgggccatcagacggcaacaaaaccttcccaaatgcagccgtttctcagtacagggatgagttaggtcttgtcgaacagccagcctcaaccagctcaagctcccaaactgttcagccttcgtttggccaggcgggcttgatcagcaatgaagtcccaaccagtgccaaagccatggttagggtgaccccatccaaagtcaaccctggaattgcagcaggggcggctggcagcacgaacgcccnccaggtcaccagcataccttccaagacccatcagtcct

SEQ ID NO: 1945 - DNA, 299 bp, Zea mays
  Clone ID: LIB3061-022-Q1-K1-C8
cagaaacacacgaagcgaagcgcactatctacgacctaacaacatgggctacacaagatattacacctactagcgcttattgcgctagctgcgagcgcatcaaatgcgcacattattccacaatgctcactagctcctagagcgatacattccacgattatctgccaccagttactatcaatgagcatttaaacacgctagctgcgcaaggcaacacgcaacatcaagcgcatgcagagagcgtgttacaactaccaatagccgaatggcaacaacaatccttgccacatctaacaata

SEQ ID NO: 1946 - DNA, 426 bp, Zea mays
  Clone ID: LIB3061-022-Q1-K1-C9
agtgccagtattccacagttcctcccactagttacttcaatgggcttcgaacatccagccgtgcaagcctacaggctacaactagcgcttgcggcgagcgccttacaacaaccaattgcccaattgcaacaacaatccttggcacatctaaccctacaaaccattgcaacgcaacaacaacaacaacagtttctgccatcactgagccacctagccgtggtgaaccctgtcacctacttgcaacagcagctgcttgcatccaacccacttgctctggcgaacgtagctgcataccagcaacaacaacagctgcaacagtttatgccagtgctcagtcaactagccatggtgaaccctgccgtctacctacaactactttcatctaacccgctcgcggtgggcaatgcacctacgtacctacaacaa

SEQ ID NO: 1947 - DNA, 388 bp, Zea mays
  Clone ID: LIB3061-022-Q1-K1-D1
acgatctgaaatagctgatgcgtctgctattcctcaaggtctacttcatggaggtcctgcatacgggtggatattccactgcactgacataacctccgatggcttcagaatctgctgtaaaccggttgtatgctagcagcttggaccgaattgatgctgaacattacactgctcccaggatggttcttgcagcatcacgagttgatcatgatgcgctgatgtcagtagtagaaccacttctgtctgaccttacgagcgtgaaacgtcctgtagagccaaaatctgtgtacatgggaagagactatctgtgtctagcagattgttcaaacacacgcatggcacttgcttttgacgtgccacgttgatggaatcactagataactgctat

SEQ ID NO: 1948 - DNA, 441 bp, Zea mays
  Clone ID: LIB3061-022-Q1-K1-D10
caaagagatgagcttgaggcacagctgaagaaggttaatatatcactaaatgctgctgctggacggctcaaacaaactagggaagagagggaccaatttgacgaagcaaacaatcaaatcatatttagcttgaaaaaaaaggaggatgacctctcaaaatccattgccttatgtaatgtggaatccaatgttgtcaagatctggatcggtttccttgaggactcgtggaagctgcagtcctcatacaatgaacagaaggataataaaacgtgtgatgagctggagaaatgtgtgagtgattttctaaagttgacaaaacatcatctttcagcattcaaggaagtcctaagccaattgattgagaatatcgaaacatatgtcggtaacttggctgtcttaacctcaaaggaagaagaaaaagaacatggggatgatgaggca

SEQ ID NO: 1949 - DNA, 424 bp, Zea mays
  Clone ID: LIB3061-022-Q1-K1-D11
gcaacatagaaagtggaatccagtagcatcaatagagcaacaatggcgaccaagatactttccctccttatgctccttgctctttctgcatgtgttgctaacgcgacaattttccctcaatgctcacaagctcctatagcttcccttcttcccccataccttccatcaatgatagcttcagtatgtgaaaacccagctcttcaaccctataggctccaacaagcaatcgcagcaagcaacatacctttatcacccttgtttcaacaatcgccagccctatctttggtgcagtcattggtacaaaccatcaaggcacagcagctgcagcaactcgtgctacctgtgatcaaccaagtagctcttgcaaacctttctccctactatcagcaacaacaatttcttccatgcaaccaactatctacac

SEQ ID NO: 1950 - DNA, 407 bp, Zea mays
  Clone ID: LIB3061-022-Q1-K1-D12
cagcctagcaattagctcatcgactccagattggagaactcgacaccatgaaggtgctgatcgttgcccttgctctcctggcgctcgctgcgagcgccgcctccagtacaagcggcggctgtggctgccagacaccaccgtttcatctaccgcctccgttctatatgccgcctccgttctatctgccgccgcagcagcagccgcagccatggcaataccccactcaaccaccgcagctaagcccgtgccagcagttcggatcctgcggcgtcggcagcgtcggcagcccgttcctgggccagtgcgtcgagttcctgaggcaccagtgcagcccggcggcgacgccctacggctcgccacagtgccaggcgctgcagcagcagtgctgccaccagatcaggcaagtg

SEQ ID NO: 1951 - DNA, 439 bp, Zea mays
  Clone ID: LIB3061-022-Q1-K1-D2
attgagaccaactagcaacatagaaagcacaatagtgtaccaacaatggcagccaaaatattttgcttccttatgctccttggtctttctgcaagtgttgctaccgcaaccattttcccacaatgctcacaagctcctatagcttcccttcttcccccatacctctcaccagcggtgtcttcaatgtgtgaaaacccaattgttcaaccctacaggatccaacaggcaatcgcaacaggcatcttaccattatcacccttgttccttcaacaaccgtcagccctattacagcagttacctttggtccatttggtggcacaaaacatcaaggcacaacaactacaacaacttgtgctagcaaaccttgctgcatactctcagcaacatcaagttcttccattcaaccaactggctgcattgaactctgctgcttatttgc

SEQ ID NO: 1952 - DNA, 431 bp, Zea mays
  Clone ID: LIB3061-022-Q1-K1-D3
ggcatcttacctttatcacccttgtttcttcaacaaccgtcagccctattacagcagttacctttggtgcatttgttggcacaaaacatcaaggcacaacaactacaacaacttgtgctaggaaaccttgctgcctactctcagcaacagcagtttcttccattcaaccaactggctgcattgaactctgctgcttatttgcaacaacaactaccattcagtcagctagctgctgcctacccccagcaatttcttccattcaaccaactggcagcattgaactctgctgcttatttacaacagcaacagctaccaccattcaaccagctagctgatgtgagcccttgtgccttcttgacacaacaacagttgttgccgttctacctgcacgctgcgcctaacgctggcaccctcttacaactgcaacaatt

SEQ ID NO: 1953 - DNA, 426 bp, Zea mays
  Clone ID: LIB3061-022-Q1-K1-D4
aaaagtcgagcataaatttgacatggaacctcacagcgataatttggcgaactatggaaagttatgccgtgaaagaacacaaaagtacatggttaaatctagacaagtgcaggtacttgacaatgaccatggaatgagcatgaggccaatgcctggcattgttggtctcatatcttctagttcaaaggaaaagaagaagcaagcaccagtgaaaccatctgatgccaaaagaactcgtagggatcgcacggagatggaaaacgttatattcaagctttttgaaaggcagcccaattgggccctaaaagcactcgtgcaagaaactgaccagccagagcaattcctgaaagagatattgaacgatctgtgtgtgtataataaacgaggtccaaaccagggaacgcatgagctcaagcctgagtacaa

SEQ ID NO: 1954 - DNA, 286 bp, Zea mays
  Clone ID: LIB3061-022-Q1-K1-D5
gcgggcacctagctgtgttgaaccttgattcctactcgcaacagcaactgcttgcggccgacccatttgctctggcgaacgtcgctgcataccagcaacaacaacagctgcaacagcttatgccaatgctcagacaactagccatggtgaaccctgccgtctacctacaactactatcatctaacccgctcgcggagttcaatgcacctacatacctacaacaacaatcgctgcaacaaattgtaccagctctgactcacctagctctgacaaaccatgcttccta

SEQ ID NO: 1955 - DNA, 437 bp, Zea mays
  Clone ID: LIB3061-022-Q1-K1-D6
gcgaagcgcactagcaacgacctaactccaatggctaccaagatattagccctccttgcgcttcttgcccttttagtgagcgcaacaaatgcgttcattattccacagtgctcacttgctcctagtgccattattccacagttcctcccaccagttacttcaatgggcttcgaacatccagccgtgcaagcctacaggctacaactagcgcttgcggcgagcgccttacaacaaccaattgcccaattgcaacaacaatccttggcacatctaaccctacaaaccattgcaacgcaacaacaacaacaacaacagtttctgccatcactgagccacctagccgtggtgaaccctgtcacctacttgcaacagcagctgcttgcatccaacccacttgctctggcgaacgtagctgcataccagcaacaacaacagct

SEQ ID NO: 1956 - DNA, 438 bp, Zea mays
  Clone ID: LIB3061-022-Q1-K1-D7
gcaacatagaaagcacaatattgtactaataatggcagccaaaatattttgcctcattatgctccttggtctttctgcaagtgctgctacggcgagcattttcccgcaatgctcacaagctcctatagcttcccttcttcccccatacctctcaccagcgatgtcttcagtatgtgaaaatccaattcttctaccctacaggatccaacaggcaatcgcagcaggcatcttacctttatcacccttgttcctccaacaatcatcagccctattacagcagttacctttggtgcatttattggcacaaaacatcagggcacaacaactacaacaactcgtgctagcaaaccttgctgcctactctcagcaacagcagttacctttggtgcatttgttggcacaaaacatcagggcacaacaactacaacaactcgtgct

SEQ ID NO: 1957 - DNA, 436 bp, Zea mays
  Clone ID: LIB3061-022-Q1-K1-D8
ctggcaaacctttctccctactctcatcaacaacaatttcttccattcaaccaactgtctacactgaaccctgctgcttatttgcagcaacaactattaccatttagccagctagctactgcctactctcagcaacaacaacttcttccatttaaccaattggccgcactgaaccccgctgcttatttgcagcagcaaatactactgccatttagcgagctagctgcagcaagtcgtgcttccttcttgacacagcaacagttgctgcctttctacaagcagtttgcggctaaccccgcaaccctcttacaactacaacaattggtgccctttgtccaacttgctttgacaaacccagcaaccttctaccaacaacacatcattggtggtgccctcttttagatttcttatgagttatagttcaataataaagttt

SEQ ID NO: 1958 - DNA, 307 bp, Zea mays
  Clone ID: LIB3061-022-Q1-K1-C5
gcgagaagcgcctgccctaccggtttccgtacccgcggtcacgctccgtcgtttggagcgcgtttatcttaactcgatgctggagtgggcgtcggaccccgaggtgacggtgttcatggcgtgtgacgcctgcacgtcccgggacgctctcctggcgttcctgcgcgacgcggtgctgccgcacccttggttccgcgccgtctgactcggcggtggccgacactgtcgtaccgtggtcacggtgtccgtgacgcctatcgtcgacgcctgccgcgccgagctccttgtcgtgcttgctcgcgcgcac

SEQ ID NO: 1959 - DNA, 452 bp, Zea mays
  Clone ID: LIB3061-039-Q1-K1-H7
acgagcaacatagaaagcacaatagtgtaccaacaatggcagccaaaatattttgcgtccgtatgctccttggtctttctgcaagtgctgctacggcgaccattttcccgcaatgctcgcaagctcctatagcttcccttcttgcaccgtacctctcaccagcggtgtcttcggtatgtgaaaacccaattcttcaactctacaggatccaacaggtaatcgcagctggcatcttacctttatcacccttgctcctccaacaatcatcagccctattacaacagttacctttggtgcattaattggcacactacatcagggcacagcatctacaacaactcgtgctagcaaaccttgctgcctactctcagcaacagcagcttcttccattcaaccaactaggttcattgaactctgcttgttatatgcagcaacaacaactaccattcagg

SEQ ID NO: 1960 - DNA, 217 bp, Zea mays
  Clone ID: LIB3061-039-Q1-K1-H8
tcgggagccgctgactagctacctagctcgctagtttactcatttagcggcgatgagtaacgtagtgtcacccatcaccatgggtggcagtgtgagcaatgacctgaatgaaccattgaaatggaaaggaataatatataaggaaaaaagatgattggaaaaaaaaaaaaaaaaaaaaaaaaaaaaaaaaaaaagaaaaacaataaaaatagacaaa

SEQ ID NO: 1961 - DNA, 402 bp, Zea mays
  Clone ID: LIB3061-039-Q1-K1-H9
cggacgcgtgggcggacgcgtggtcggacgcgtgggcggacgcgtggggccgtcgtcggtgcagtgtccatagccaccgcaggagactgaaatggggggttttgtcaagacccacaagagcaatgcatacttcaagcgtttccaggtgaagttcaagagaaggcgcgctggcaagacagactacagggccaggataaggctgattaaccaagacaaaaacaagtacaatacacccaaatacagatttgttgtgcgaattaccaacaaggacatcacagcacatatcatatctgctagtatagcatgtgatatggttcttgcttctgcttactcgcatgagttgccacgatatggtctcgaagttggtctgaccaactatgcagctggctactgcactggcct

SEQ ID NO: 1962 - DNA, 346 bp, Zea mays
  Clone ID: LIB3061-040-Q1-K1-A1
cgagcatgcacgcacgctgatcatccatctataaatacgccaattagcaaactagagctactagcagcaggccaatggagaaccctccgagcatcctagtgactcccatggctccggccatgtcggcgcagttcacaagaataaccttcagcaacctgtttgtccgtcgggctggcccaggcagcacggagctgaccgtggagggaaggccatccgaccagctgggcaggagaaacctcactgacagccccgtatttgacggccgtggccctgacgccagcctcgtggctcgcgtacagggagtcgctacccagatgggcgacgtgcgccagttgtacaccgtcgt

SEQ ID NO: 1963 - DNA, 170 bp, Zea mays
  Clone ID: LIB3061-040-Q1-K1-A10
ctggcttctcctccccctcttaccaagtcctcttcgggttagggttacttagggttttgtggaggggcgatggcggcggctgatgtggagtaccgttgcttcgtcggcgggcttgcctgggccaccagcaacgagtcgctggagaatgccttcgccttctacggcgagat

SEQ ID NO: 1964 - DNA, 211 bp, Zea mays
  Clone ID: LIB3061-040-Q1-K1-A11
agcttggcttggattggcaaaggattacttatgagaggagacgagaaagtgaaggacatttcaaggttggcttcttaagatcctatgctcagatgagattttgtctacagttccatgccaccaggaagaaccttatggcggtgattcatcagatacttctcttgcaatatctgcaactagtgcattccatgtgatgatgaatgattcaaaa

SEQ ID NO: 1965 - DNA, 417 bp, Zea mays
  Clone ID: LIB3061-040-Q1-K1-A12
gaatcctcgctctgccgagcgcttaacagcacatgaagttctatgccatccatggattcgtgaccatggagtagcttctgaccgtccactggatccagctgtcttatctcgcattaagcaattctctgcaatgaataagttgaagaaaatggctttgagagtaatagctgagagcctatcagaagaggaaattgcggggttgaaggaaatgttccaaccatggacactgacaacaggggcgcaattacctacaatgaactaaagaaaggatggaaaaaatttggttccacactgaagacacttaaaatcgtgaacttaatggatccacttgatttcaccaccatgggaccattggcctccttggaatcaatggttgcaactttgattttaattagcctgaaccccaaaaacattttg

SEQ ID NO: 1966 - DNA, 379 bp, Zea mays
  Clone ID: LIB3061-040-Q1-K1-A3
ctgggtcttcagaccattagctttatctactccagagcgcagaagaacccgatcgacaccatgagggtgttgctcgttgccctcgctctcctggctctcgctgcgagcgccacctccacgcatacaagcggcggctgcggctgccagccaccgccgccggttcatctaccgccgccggtgcatctgccacctccggttcacctgccacctccggtgcatctcccaccgccggtccacctgccgccgccggtccacctgccaccgccggtccatgtgccgccgccggttcatctgccgccgccaccatgccactaccctactcaaccgccccggcctcagcctcatccccagccacacccatgcccgtgccaacagccgc

SEQ ID NO: 1967 - DNA, 346 bp, Zea mays
  unsure (1)..(346): unsure at all n locations; Clone ID: LIB3061-040-Q1-K1-A4
gaagagcaacggtcaggtcctggccattaacgagatcttcgagcgtaacccgacgacgagcaagaactatggcatctggctgcgctaccagagcagaaccggctaccacaacatgtacaaggagtaccgcgacacaaccctgaacggcgctgtagagcagatgtacaatgagatggcttctcgccaccgcgtgaggtccccctgcatccagatcatcaagaccgccacagtacacttcaagctgtgcaagagggacaacaccaagcagtttcacaacagtgagatcaagttcccactcgtgtaccgcaaggtcaggccgncgaccaggaagctgaagaccacgttc

SEQ ID NO: 1968 - DNA, 378 bp, Zea mays
  Clone ID: LIB3061-040-Q1-K1-A5
gcgaggacatgaagttcttcgccaccccgccggtgcacggctcgctggcgaaccaggtggtgcacccggccgacctgtgcttcaagctccccgacggggtgagcctggaggagggcgccatgtgcgagccgctgagcgtgggcgtgcacgcgtgccgccgcgcgggggtggggcccgagacgggcgtgctcgtggtgggcgccggccccatcggcctggtgtcgctgctggcggcgcgggccttcggcgcgccgcgcgtggtggtcgtggacgtggacgagcaccgcctggccgtggccaggtcgctgggcgcggacgcggcggtgcgggtgtcgccccgcgcggaggacctggcggacgaggtggagcgcatccgcg

SEQ ID NO: 1969 - DNA, 364 bp, Zea mays
  Clone ID: LIB3061-040-Q1-K1-A6
gccatatgttgcgtacggataccccaatctgaagagcgttagggagttgatctacaagagaggttacgggaagctgaacaagcagaggattccacttagcaacaacagtgtcatcgaggagggcctcgggaagcacaatatcatctgcattgaggaccttgtccacgagatcatgacggtgggcccgcacttcaaggaggccaacaacttcctctggccgttcaagctgaatgcacccctcggcggcctcaagaagaagaggaaccactacgtatagggcggtgacgccggaaaccgtgagaactacatcaacgagctcatcaagaggatgaactaggttctctcttgtatcctgtgagaatgc

SEQ ID NO: 1970 - DNA, 404 bp, Zea mays
  unsure (1)..(404): unsure at all n locations; Clone ID: LIB3061-040-Q1-K1-A8
caatgatcaggttcgctttgagcttacattctatgctttaaatcctgaacttaaagtggtggcaccttggagggagtgggatatcacaggacgtgaagatgctattgaatatgcaaagaaacataatgtacctgttccagtttcaaagaaatcaatatacagccgagaccgaaacttgtggcaccttagccatgagggtgacatcctggaagacccagcaaatgagccaaaggaagatatgtatatgatgtcgattgctccagaaaatgcgcnctcgaaacctgagtaattggagaatggtatcatnngctgtgtncctgtttcaatcaatggccgagacctgtaaccagcatccctcttngcggagctcaatgaaaatcgtggaaagcccaaattgggggggg

SEQ ID NO: 1971 - DNA, 215 bp, Zea mays
  Clone ID: LIB3061-040-Q1-K1-A9
ctccggtggctccaccactagcaacccgtgcagcgagcccaccccgaccactgccatgtcgaggcgcggcgactgggtctacgagaacaacggcaggacctgcgtggccatacgacggctccgattactgagtcgtcgcggcggacacccgtctctctgaccgatacaggcatcctaacgcgcgaccactctaagatctgcgacctggctgccaa

SEQ ID NO: 1972 - DNA, 344 bp, Zea mays
  Clone ID: LIB3061-040-Q1-K1-B1
gaccagcaggcaccttagaaggtggattccattaccaccattggagcaccattggcaaccaagattttttccttcctaaggctcctggttcttcttccaggggtggttacgccaccatttttccttaatggttacaaggttctatatggttccttttttccccatatactttcattaattatatggttagagtgtgagaaccccgatctttaaacctatatgcgttaacacgcgctctcagcgagcgacatacccttatagcccctgtggttgtaacaatcaccagacctatatttggtgcagacattggtgcaacaccatcatggcggcacaactgctgcaac

SEQ ID NO: 1973 - DNA, 304 bp, Zea mays
  Clone ID: LIB3061-040-Q1-K1-B11
ccatggccgacgtccgcgcgcagaacgcgctcgcggagatccaggagttcacctccttcctcagggtgctcgggagctaccccatggacatgacgccgtgggacgccgcgctctgctctcgcgccagccagtactagtgattgggcgaacaatggtcaagccgccaaaggataacggcaattcattggtttttaatcagtccggcattaccagaaaccgtgctttgggtctttttatccattctcttttctggatggcttttcttaaaaaaaaaaacggagaggagcgagggtcgattgggggg

SEQ ID NO: 1974 - DNA, 116 bp, Zea mays
  Clone ID: LIB3061-040-Q1-K1-B12
gcaagctatagtcgaattatcagtagcacaacataaccctctgatatgttcgtggtttatccgtggtttctgaattgtagacttctgcgttgaagctcgtgctactgtttgttttc

SEQ ID NO: 1975 - DNA, 308 bp, Zea mays
  Clone ID: LIB3061-040-Q1-K1-B2
cacgcgtacgcaggagcagcggtcatgtcctggccattttcgtttatcttcgagcgtaacccgaccaccgtcaggaactatcgcatctgggtgcgctaccagagcagaaccggctaccacaacatgtacaaggagtaccgcgacacaaccctgaacggcgctataaagcagatgtacaatgagatggattctcgccaccgcgtgaagtccccctgcatacagatcatctcgaccgtcacagtacactttaagctgtgcaagagggacaacaccaagcagtttcacaacacttagatcaagtttccact

SEQ ID NO: 1976 - DNA, 442 bp, Zea mays
  Clone ID: LIB3061-039-Q1-K1-H6
attgagaccaacaagcaacatagaaagtggaatccagtagcaacaacagagcaacaatggcgaccaagatattttccctccttatgctccttgctctttctgcatgtgttgctaacgcgacaattttccctcaatgctcacaagctcctatagcttcccttcttcccccataccttccatcaatgatagcttcagtatgtgaaaacccagctcttcagccctataggctccaacaagcaatcgcagcaagcaacatacctttatcacccttgttgtttcaacaatcgccagccctatctttggtgcagtcattggtacaaaccatcagggcacagcagctgcagcaactcgtgctacctgtgatcaaccaagtagctctggcaaacctttctccctactctcagcaacaacaatttcttccattcaaccaactgtctacact

SEQ ID NO: 1977 - DNA, 385 bp, Zea mays
  Clone ID: LIB3061-040-Q1-K1-B3
cccacgcgtccggcaacatagaaagcacaatagtgtaccaacaatggcagccaaaataggttgcctccttatgctccttggtctttctgcaagtgctgctacggcgaccattttcccgcaatgctcgcaagctcctatagcttcccttcttcccccgtacctctcaccagcggtgtcttcggtatgtgaaaacccaattcttcaaccctacaggatccaacaggcaatcgcagctggcatcttacctttatcacccttgttcctccaacaatggcagccaaaatattttgcctccttatgctccttggtctttctgcaagtgctgctacggcgaccattttcccgcaatgctcgcaagctcctatagcttcccttcttcccccgt

SEQ ID NO: 1978 - DNA, 454 bp, Zea mays
  Clone ID: LIB3061-039-Q1-K1-G12
atagaaagcacaatattgtaccaataatggcagccaaaatattttgcctcattatgctccttggtctttgtgcaggtgctgctacggcgagcattttcccgcaatgctcacaagctcctatagcttcccttcttcccccatacctctcaccagcgatgtcttcagtatgtgaaaatccaattcttctaccctacaggatccaacaggcaatcgcagcaggcatcttacctttatcacccttgttcctccaacaatcatcagccctattacagcagttacctttggtgcatttattggcacaaaacatcagggcacaacaactacaacaactcgtgctagcaaaccttgctgcctactctcagcaacagcagttacctttggtgcatttgttggcacaaaacatcaaggcacaacaactacaacaactcgtgctagcaaaccttgctgcctactc

SEQ ID NO: 1979 - DNA, 417 bp, Zea mays
  Clone ID: LIB3061-039-Q1-K1-G2
gtgtaccaacaatggcagctaaaatattttgcctccttatgctccttggtctttctgcaagtgctgctacggcgaccattttcccacaatgctcacaagctcctatagcttcccttcttcccccgtacctctcaccaacggtgtcttcggtatgtgaaaacccaattcttcaaccctacaggatccaacaggcaatcgcagctggcatcttacctttatcacccttgttcctccaacaatcatcagccctattacagcaggtacctttggtgcatttattggcacaaaacatcagggcacaacaactacaacaacttgtgctagcaaaccttgctgcctactctcagcaacagcagtttcttccattcaaccaactagctgcattgaactctgcttcttatttggcacaacaacaac

SEQ ID NO: 1980 - DNA, 400 bp, Zea mays
  Clone ID: LIB3061-039-Q1-K1-G4
ctcgaaggttccagcgagcgactgtgtcgagcaggagagagcgcgatggggaagatgcggcagctgatctgcctcgtggccgccgtcgccgccgcggccatcctcctgacagcgtcggccaagaagtccggcgacgtcaccgagcttcagatcggcgtcaagtacaagcctgagtcatgtacgctgcaagcacacaaaggagacaaaattaaggttcactatcgtgggacactcactgatggatcagttttcgattctagctatgacagaggtgacccgtttgaattcactcttggaaatggccaagtgataaaaggttgggaccaaggattgctcggtatgtgccgtggtgaaaagaggaagctaaagatacctgcaaagatgggttatggtgagcgag

SEQ ID NO: 1981 - DNA, 451 bp, Zea mays
  Clone ID: LIB3061-039-Q1-K1-G5
cccgtacctctcaccagcggtgtcttcggtatgtgaaaacccaattcttcaaccctacaggatccaacaggcaatcgcagctggcatcttacctttatcacccttgttcctccaacaatcatcagccctattacaacagttacctttggtgcatttattggcacaaaacatcagggcacaacaactacaacaacttgtgctagcaaaccttgctgcctactctcagcaacagcagtttcttccattcaaccaactaggttcattgaactctgcttcttatttgcaacaacaacaactaccattcagccagctacctgctgcctacccccagcaatttcttccattcaaccaactagcagcattgaactctcctgcttatttacagcagcaacaactactaccattcagccagctagctggtgtgagccctgctaccttcttgacacaacca

SEQ ID NO: 1982 - DNA, 450 bp, Zea mays
  Clone ID: LIB3061-039-Q1-K1-G6
cggacgcgtgggctagcaacatagaaagcacaatagtgtaccaacaatggcagccaaaatattttgcttccttatgctccttggtctttctgcaagtgctgctaccgcaaccattttcccacaatgctcacaagctcctatagcttcctttcttcccccatacctctcaccagcggtgtcttcagtatgtgaaaacccaattcttcaaccctacaggatccaacaggcaatcgcagcaggcatcttacctttatcacccttgttcctccaacaaccgtcagccctattacagcagttacctttggtgcatttgttggcacaaaacatcaaggcacaacaactacaacaacttgtgctaggaaaccttgctgcctactctcagcaacagcagtttcttccattcaaccaactggctgcattggactctgctggttatttcaacaacaacta

SEQ ID NO: 1983 - DNA, 450 bp, Zea mays
  Clone ID: LIB3061-039-Q1-K1-G7
gttcctttgttcattgatactgatcaaggaactagtgggaaatggggcctgtggattgtccacaaacttgtgcttactggagtctatgggctgattgttttcatgcatcattcaagatggagagacaggctgcctgcaaaaccagcatactacaactatgtatgtgtgatgttgctactgaatggcatatcactgtttggatgtttccttattgcaagtggagctggatttggtttatggttatataatctcacaaccgtatgctatcattctctttaccttcccctcctatatgtgactttcttagcagacttcttccaggaggaagacatgctcctagagaacgtctactattctgaaatgaaggatgctgggttcttcgatgctgactgggattaatccgtggctactgtgctgtatgacccatcccatatgaagtacgctgtattt

SEQ ID NO: 1984 - DNA, 430 bp, Zea mays
  Clone ID: LIB3061-039-Q1-K1-G8
attttaaattaatttttatacaatatcatattttggtaaaaggatcggttgccatgttgtgctgttctttttgtgttccttagcacggggtagcattagtatttgacgcccttttgtgttgttggaaagacaaattagtttgaatgggaattacatatcttgttttactgttttagggttccttctttgctactgtgctcctgtgggtcggtactgcatttatgtttcttttttttttctggtctgatgtaatttgtgccactattctgttggcaaaggagttcaggattattttggccgtgtatagcaatagcaactgacaccttttgtgttcattgaaagtttttggtctagagtgtgcagtgttgcaagtcttaactgttgtcaagaaagtaatgtgttcaacatgattgtaaactgaatgcaattc

SEQ ID NO: 1985 - DNA, 439 bp, Zea mays
  Clone ID: LIB3061-039-Q1-K1-G9
gcggcttcaacaagcaatcgcagcaagcaacatacctttatcgcccttgttgtttcaagaatgaccagccctatctttggtgcagtcattggtacaaaccatcagggcacaacagctgcagcaactcgtgctacctgtgatcaaccaagtagctctggcaaacctttctccctactctcagcaacaacaatttcttccattcaaccaactgtctacactgaaccctgctgcttatttgcagcaacaactattaccatttagccagctagctactgcctactctcagcaacaacaacttcttccatttaaccaattggccgcactgaaccccgctgcttatttgcagcagcaaatactactgccatttagcgagctagctgcagcaagtcgtgcttccttcttgacacagcaacagttgctgcctttctacaagcagttt

SEQ ID NO: 1986 - DNA, 251 bp, Zea mays
  Clone ID: LIB3061-039-Q1-K1-H1
atttgacaacaaaggagatgatactgtttaatttactaatgtgaaatgtagcctgtgggggggtcacaaacttttgcttactggagtctattggctgattgttttcatgcattattcaagatggagagacaggctttctactaattcattatactacaactatgtatgtgtgatgttgctactgaatggaatatcactgtttggatagtttcttattgcaagtggaacttgattttgtttattggtatata

SEQ ID NO: 1987 - DNA, 233 bp, Zea mays
  Clone ID: LIB3061-039-Q1-K1-H11
acaaactcatccaacatattttgggtacgtatactcataaatctctctgcaaccgctactacgccaaccatttttccacaatgctcacaagctcctataactacccttcttcccccgatcctctcaccatcttcgtcttccatatgtcaaaacccaattcttcaaccctatagcatccatcaaccaatcgcaactcacatcttacctttatcacccttgctccttcaacaatc

SEQ ID NO: 1988 - DNA, 442 bp, Zea mays
  Clone ID: LIB3061-039-Q1-K1-H12
atcgcaacaggcatcttaccattatcacccttgttcctccaacaaccgtcagcggtagtacagcagttacctttggtccatttggtggcacaaaacatcagggcacaacaactacaacaacttgtgctagcaaaccttgctgcatactctcagcaacatcagtttcttccattcaaccaactggctgcattgaactctgctgcttatttgcaacaacaattaccattcagccagctagttgctgcctacctccagcaatttcttccattcaaccaactagcagcattgaactctgctgcttatttacagcagcaacaactactaccattcagccagctagctgatgtgagccctgctgccttcttgacacaacaacagttgttgccgttctacctgcacgctatgcctaacgctggcaccctcttacaactgcaacaattgc

SEQ ID NO: 1989 - DNA, 468 bp, Zea mays
  Clone ID: LIB3061-039-Q1-K1-H2
ctacaacaacttgtgctagcaaaccttgctgcctactctcagcaacagcagtttcttccattcaaccaactagctgcattgaactctgcttcttatttgcaacaacaacaactaccattcagccagctacctgctgcctacccccagcaatttcttccattcaaccaactggcagcattgaactctcctgcttatttacagcagcaacaactactaccattcagccagctagctggtgtgagccctgctaccttcttgatacaaccacagttgttgccgttctaccagcacgctgcgcctaacgctggcaccctcttacaactgcaacaattgctgccattcaaccaacttgctttgacaaacccagcagcgttctaccaacaacccatcattggtggtgccctcttttagatttcttatgaggtatagttcaataataaaagtttttggctgaagttggggccttcc

SEQ ID NO: 1990 - DNA, 423 bp, Zea mays
  Clone ID: LIB3061-039-Q1-K1-H3
caacaacaacaacagtttctgccatcactgagccacctagccgtggtgaaccctgtcagctacttgcaacagcagctgcttgcatccaacccacttgctctggcgaacgtagctgcataccagcaacaacaacagctgcaacagtttatgccagtgctcagtcaactagccatggtgaaccctgccgtctacctacaactactttcatctagcccgctcgcggtgggcaatgcacctacgtacctacaacaacagttgctgcaacaaattgtaccagctctgactcagctagctgtggcaaaccctgctgcctacttacaacagttgcttccattcaaccaactggctgtgtcaaactctgctgcgtacctacaacagcgacaacagttacttaatccattggcagtggctaacccattggtc

SEQ ID NO: 1991 - DNA, 431 bp, Zea mays
  Clone ID: LIB3061-039-Q1-K1-H4
attgagaccaactagcaacatagaaagcacaatagtgtaccaacaatggcagccaaaagatggtgcctccttatgctccttggtctttctgcaagtgctgctacggcgaccattttcccgcaatgctcgcaagctcctatagcttcccttcttcccccgtacctctcaccagcggtgtcttcggtatgtgaaaacccaattcttcaaccctacaggatccaacaggcaatcgcagctggcatcttacctttatcacccttgttcctccaacaatcatcagccctattacaacagttacctttggtgcatttattggcacaaaacatcagggcacaacaactacaacaacttgtgctagcaaaccttgctgcctactctcagcaacagcagtttcttccattcaaccaactaagttcattgaactctgcttc

SEQ ID NO: 1992 - DNA, 444 bp, Zea mays
  Clone ID: LIB3061-039-Q1-K1-G11
gcacaatagtgtaccaacaatggcagctaaaatattttgcctccttatgctccttggtgtttctgcaagtgctgctacggcgaccattttcccacaatgctcacaagctcctatagcttcccttcttcccccgtacctctcaccaacggtgtcttcggtatgtgaaaacccaattcttcaaccctacaggatccaacaggcaatcgcagctggcatcttacctttatcacccttgttcctccaacaatcatcagccctattacagcagttacctttggtgcatttattggcacaaaacatcagggcacaacaactacaacaacttgtgctagcaaaccttgctgcctactctcagcaacagcagtttcttccattcaaccaactagctgcattgaactctgcttcttatttgcaacaacaacaactaccattcagccagctatc

SEQ ID NO: 1993 - DNA, 449 bp, Zea mays
  Clone ID: LIB3061-039-Q1-K1-E8
gttggtacactattacagcagttacctttggtgcatttgttggcacaaaacatcaaggcacaacaactacaacaacttgtgctaggaaaccttgctgcctactctcagcaacagcagtttcttccattcaaccaactggctgcattgaactctgctgcttatttgcaacaacaactaccattcagtcagctagctgctgcctacccccagcaatttcttccattcaaccaactggcagcattgaactctgctgcttatttacaacagcaacagctaccaccattcagccagctagctgatgtgagccctgttgccttcttgacacaacaacagttgttgccgttctacctgcacgctgcgcctaacgctggcaccctcttacaactgcaacaattgctgccattcaaccaacttgctttgacaaacccaacaacgttctaccaacaacc

SEQ ID NO: 1994 - DNA, 444 bp, Zea mays
  Clone ID: LIB3061-039-Q1-K1-E9
gcaacatagaaagcacaatagtgtaccaacaatggcagccaaaatattttgcctgctgatgctccttggtatttctgcaagtgctgctacggcgaccattttcccgcaatgctcacaagctcctatagcttcccttcttcccccgtacctctcaccagcggtgtcttcggtatgtgaaaacccaattcttcaaccctacaggatccaacaggcaatcgcagctggcatcttacctttatcacccttgttcctccaacaatcatcagccctattacagcagttacctttggtgcatttattggcacaaaacatcagggcacaacaactacaacaacttgtgctagcaaaccttgctgcctactctcagcaacagcagtttcttccattcaaccaactagctgcattgaactctgcttcttatttgcaacaacaacaactaccatt

SEQ ID NO: 1995 - DNA, 441 bp, Zea mays
  Clone ID: LIB3061-039-Q1-K1-F1
cccacgcgtccggcagcccaaggtatagcttattcatctgaggctatggttttacattctgtaaatggctatcagttacctgcatctacagcaactcaacaaccagtgccccagatgttttctcaacaattccaagcacctcagtatccaaactttttgccatatcggcatgttttctcaccacagtttgggtctctaatggttgttccaaactattcaagcaaccatgcatttcctcagttgccacatgccagcagctatctggtaatgccaaatggagcctcacaactagctgccaatggcatgaaatatggatcaaaccatcagtataagcaagtatttcaaggagcccctgctggatatggctacggaaatcataatgggtaccctaacggtgttattggcggcacaggtgctattgaagatatgaatatgagtaaa

SEQ ID NO: 1996 - DNA, 439 bp, Zea mays
  Clone ID: LIB3061-039-Q1-K1-F10
atcaaatccatgcgtgcagcaatatctgaaacatttcctgagcctaataggcggctgggacagagacttttgaaaatgatgcataccattgcttctcatactgccgagaatagaatgactccatcagcagttgctgcatgtatggccccgctcttgttgcgtccccttcttgctggtgaatgcgagatggaagatgacttagacatgaatggtgacagtgctgctcagcttattgccgctgcaaatgctgctaacagtgctcaaggcattgtaactactctattagaggaatacgagagtatattcaatgatgagcactttaggtgctccttatcacctgattctcaaacaggagatagtggaagtgaagaatcaactgatgacgaaactgtggataccaagggtaatggatttcatgatgcggaaaatgatgtagatc

SEQ ID NO: 1997 - DNA, 445 bp, Zea mays
  Clone ID: LIB3061-039-Q1-K1-F11
gcacaatagtgtaccaacaatggcagccaaaatattttgcctccttatgctccttggtgtttctgcaagtgctgctacggcgaccattttcccacaatgctcacaagctcctatagcttcccttcttcccccgtacctctcaccagcggtgtcttcggtatgtgaaaacccaattcttcaaccctataggatccaacaggcaatcgcagctggcatcttacctttatcacccttgttcctccaacaatcatcagccctattacagcagttacctttggtgcatttattggcacaaaacatcagggcacaacaactacaacaacttgtgctagcaaaccttgctgcctactctcagcaacaacagtttcttccattcaaccaactagctgcattgaactctgcttcttatttgcaacaacaacaactaccattcagccagctatct

SEQ ID NO: 1998 - DNA, 440 bp, Zea mays
  Clone ID: LIB3061-039-Q1-K1-F12
cccccctctctctcaccgctcaggtcaggccaggcccggcgggagagagatccggcgagagacgcggcctcttgctcccctcaacccccttaaagaagcgcatagaagcttcggaaggtgcccctccgcggctcgaaggaggggaggggacgccgcggacaatgacggcgatggaagccgccgtcgacgctatgctcgccgccgcgagccgtgccttcacgagcacctttgccatcgccatccagatccaggggtgcatgatctgtttagtccttgctctcgggtgggcggctgcttcaattgtcagaaaaggggttataaagaacatgaggcgcaacattgtagatggaaatagttttgcatttctttgtgacaacatagatgagcttgagcactctgttcaggagaatttacctagagtctctgtagtcatgcctttg

SEQ ID NO: 1999 - DNA, 331 bp, Zea mays
  Clone ID: LIB3061-039-Q1-K1-F2
atatgttggcacaaaacatgaggggggcaacatctacaacaacttgtgctacgaaacctcgctaactactgtcagcaacaacagtttcttacattcaaccaactaactatattgaactctgctgcttatttgcaacaacaactaccatttaatcagatagctgctgactacccccatcaattactagcattcaaacaactggcagacactgaactctgctgcttatttacaacagccacatctaccaccatttaaccatctaactgatgtgagccctagtgccttcttgacacatcaacagttgttgccagtctaccttcacgcttctcct

SEQ ID NO: 2000 - DNA, 443 bp, Zea mays
  Clone ID: LIB3061-039-Q1-K1-F3
ggtcttcagaccattagctttatctactccagagcgcagaagaacccgatcgacaccgtgagggtgttgctcgttgccctcgctctcctggctctcgctgcgagcgccacctccacgcatacaagcggcggctgcggctgccagccaccgccgccggttcatctaccgccgccggtgcatctgccacctccggttcacctgccacctccggtgcatctcccaccgccggtccacctgccgccgccggtccacctgccaccgccggtccatgtgccgccgccggttcatctgccgccgccaccatgccactaccctactcaaccgccccggcctcagcctcatccccagccacacccatgcccgtgccaacagccgcatccaagcccgtgccagctgcagggaacctgcggcgttggcagcaccccgatcctgggccagtgcgt

SEQ ID NO: 2001 - DNA, 448 bp, Zea mays
  Clone ID: LIB3061-039-Q1-K1-F4
ctacaacaacttgtgctagcaaaccttgctgcctactctcagcaacagcagtttcttccattcaaccaactagctgcattgaactctgcttcttatttgcaacaacaacaactaccattcagccagctacctgctgcctacccccagcaatttcttccattcaaccaactggcagcattgaactctcctgcttatttacagcagcaacaactactaccattcagccagctagctggtgtgagccctgctaccttcttgatacaaccacagttgttgccgttctaccagcacgctgcgcctaacgctggcaccctcttacaactgcaacaattgctgccattcaaccaacttgctttgacaaacccagcagcgttctaccaacaacccatcattggtggtgccctcttttagatttcttatgagttatagttcaataataaagtttttt

SEQ ID NO: 2002 - DNA, 233 bp, Zea mays
  Clone ID: LIB3061-039-Q1-K1-F6
ggagccgatgactagctacctatctcgctagtttactcatttagcggcaattagtaacggaatgtcacccatcaacatgcatggcagtgtgagcaatgacctgaacgaaccattgaaatggatcggaataatatatgaagctaacagatgattggaaaataaggtcaacaacaaatccaagagcagcaacataatacactacaacataatccacaataacaacaacatcaacc

SEQ ID NO: 2003 - DNA, 398 bp, Zea mays
  Clone ID: LIB3061-039-Q1-K1-F8
attttgcctccttatgctccttggtctttctgcaagtgctgctacggcgaccattttgccgcaatgctcgcaagctcctatagcttcccttcttcccccgtacctctcaccagcggtgtcttcggtatgtgaaaacccaattcttcaaccctacaggatccaacaggcaatcacagctggcatcttacctttatcacccttgttccttcaacaatcatcagccctattacatcagttacctttggtgcatttattggcacaaaacatcagggcacaacaactacaacaacttgtgctagcaaaccttgctggctactctcagcaacagcagtttcttccattcaaccaactagctgcattgaactctgctttttatttgcaacaacaacaactaccat

SEQ ID NO: 2004 - DNA, 442 bp, Zea mays
  Clone ID: LIB3061-039-Q1-K1-F9
attgagaccaactagcaacatagaaagcacaatattgtaccaataatggcagccaaaggattttgcctcattatgctccttggtctttctgcaagtgctgctacggcgagcattttcccgcaatgctcacaagctcctatagcttcccttcttcccccatacctctcaccagcgatgtcttcagtatgtgaaaatccaattcttctaccctacaggatccaacaggcaatcgcagcaggcatcttacctttatcacccttgttcctccaacaatcatcagccctattacagcagttacctttggtgcatttattggcacaaaacatcagggcacaacaactacaacaactcgtgctagcaaaccttgctgcctactctcagcaacagcagttacctttggtgcatttgttggcacaaaacatcagggcacaacaactacaac

SEQ ID NO: 2005 - DNA, 427 bp, Zea mays
  unsure (1)..(427): unsure at all n locations; Clone ID: LIB3061-039-Q1-K1-G1
gaacgaagctgaagtagttcgttgtgaacccagtatggcaaacgcgccgaggatcctggccctcggcctgctgctagcgctcctgtgcgctgccgccggcccggccgccgcgcagaactgcggctgccagcctaacttctgctgcagcaagttcggctactgcggcacgaccgacgactactgcggcgacgggtgccagtcgggcccgtgccgctcgggcggcggcggcggcggcggcggaggcggaggcagtggcggtgcgaacgtggctaacgtggtcagcgacgcgttcttcaacggcatcaagaaccaggccgggagcgggtgcgagggcaagaacttctacacccggagcgcgttcctgagcgccgtcaacaagtacccgggcttcgcccatggcgggacggangtggagggcaagcgcgag

SEQ ID NO: 2006 - DNA, 445 bp, Zea mays
  Clone ID: LIB3061-039-Q1-K1-G10
tgagcattcagaaacacacctagcgaagcgcactagcaacgacctaacaacaatggctgccaagacattatccctccttgcgcttcttgccctttttgtgagtgcaacaaatgcgttcattattccacaatgctcacttgctccgagtgccattattccacagttcctccctccagttacttcaatgggcttcgaacacccagctgtgcaagcctataggctacaacaagcgcttgcggcgagcgtcttagaacaaccaattgcccaattacaacaacaatccttagcacatctaaccatacaaaccatcgcaacgcagcagcaacaagcactgagccacctagccgtggtgaaccctatcgcctacttgcaacaacagctgcttgcatccaacccacttgctttggcaaacgtagctgcataccaacaacaacaacagttgcaa

SEQ ID NO: 2007 - DNA, 440 bp, Zea mays
  Clone ID: LIB3061-039-Q1-K1-E7
cttgtgctcctgttgatgagagccgagcttctaaaaatgggctagtgaagattgatcatactggacgtgtacttcaattctttgaaaaaccaaagggtgctgatttgaattctatgagagttgagaccaacttcctgagctatgctatagatgatgcacagaaatatccataccttgcatcaatgggcatttatgtcttcaagaaagatgcacttttagaccttctcaagtcaaaatatattcaattacatgactttggatctgaaatcctcccaagagctgtactagatcatagtgtgcaggcatgcatttttacgggctattgggaggatgttggaacaatcaaatcattctttgatgcaaacttggccctcactgagcagccttccaagtttgatttttatgatccaaaaacacctttcttcactgcaccccgatgc

SEQ ID NO: 2008 - DNA, 432 bp, Zea mays
  Clone ID: LIB3061-022-Q1-K1-B11
gcggggagatggtggcgccccccgcgccgctgcccggggtggcacagggccgcggcgccgacgtggcgctgtcgccgcatttcggccttggcggcgcggtgcccgtgccggtgtcggcagacgcggcgcaagcgctggagggcgactgcgcggcgggccgcgtggagctacgcctcgtcgtcatgggccgggtcaagtacatgagcgggccattcaggaccggatggcgcgggctatacctgcgctgcgatgtcaccgtcggcctctgggtggacgccaccgcgggcgacgacggagccggggacgtgccactgctcgagtaccccaagtgctccgtcgacgcttgagttgatccttgatcggcgcaatgcatgagcgctcagatgatcagattttcagaattctggtggagaataaggaaattgggaaaaa

SEQ ID NO: 2009 - DNA, 447 bp, Zea mays
  unsure (1)..(447): unsure at all n locations; Clone ID: LIB3061-022-Q1-K1-B12
gtttctgtctgctaccagcaccatcctagcaccccaccgcgtctagggtttcctgctccaatggccgccgcgggggcagacggggagcgcaggatcggggtggccatcgactactcggagagcgccaagaaggcgctggactgggccatcgacaacctgctccaccacggggacaccctcgtcgtcgtccacgtcctgcaccacggcgcggaggagaccaagcacacgctctgggccaagtccggatccccgctgatcccactctccgagttccgggagcccgaggtgatgcanggctacggcgtgcgccccgacgccgaagtgctcgacgcgatcgacacggcagcgcgccagaagcagctgaaggtggtggcgaagctgtactggggcgacgccagggagaagctctgcgacgccgtctaggatctcaagatccgattcctcgtc

SEQ ID NO: 2010 - DNA, 366 bp, Zea mays
  unsure (1)..(366): unsure at all n locations; Clone ID: LIB3061-022-Q1-K1-B2
cgttagcacgaaaagtcagcggacgatctggacggtggattattacaggggccgcaagtcgacggttcagagattcggatgcatatctggccaacctgcacgtttctgaagcgacaaccacacggacgggtgcatcccgacgcccaaatccatggcgagctcgccgcgatctcctccgccggcgcctacgccggaattcgagatctctcggcagtcccgcctctttgcggcgctgtccaagaaggtgatagatctcgatgaactgangatgctggcggctcaaggagtcccagacgcggcgggcgtccgagcaactgtatggaaactgctactgggctatcttgccaatgaccgctcgctgtggga

SEQ ID NO: 2011 - DNA, 403 bp, Zea mays
  unsure (1)..(403): unsure at all n locations; Clone ID: LIB3061-022-Q1-K1-B3
gtacagagatactactagcgagcacgccatggagcaaaccggggcggcggcgcgcggcgcgcctggagcggaagtggaaggtggcgacaagacggcgaggaaggcgctgaaggtggtggcggccgtggacgcgagcgaggagagcctgcacgcgctgtcgtgggcgctggacaacgtcgtgcggtgccacccggacgcgacgctcgtcgtcgttcacgcccagcacgccgncgaccacttcgcctaccccgtcgccgcgcacggcatcgtgtacgccccgtcctcggcggtggagtccgtgcgggcggcgcaggaggagagctcccgcagggtcgtggcgcgcgcgctggacatctgcaaggagaggcaggtggacgccacgggggccgtcgtggagggcgac

SEQ ID NO: 2012 - DNA, 303 bp, Zea mays
  Clone ID: LIB3061-022-Q1-K1-B4
atccaatccagatcagcaaagcggcagtgcgtagagaggatcgtcgaacagaacagcatgaagatggtcatcgttctcgtcgtgtgcctggctctgtcagctgccagcgcctctgcaatgcagatgccctgcccctgcgcggggctgcagggcttgtacggcgctggcgccggcctgacgacgatgatgggcgccggcgggctgtacccctacgcggagtacctgaggcagccgcagtgcaacctgttggctgctgtgccctactacgccgtgtgtgggctgtcgagcgccatgttccagtcg

SEQ ID NO: 2013 - DNA, 418 bp, Zea mays
  Clone ID: LIB3061-022-Q1-K1-B5
gcgcgggcaagactattaccttggttgattagagctctgacaccattgacaatgtgaagggcaagatccaggacaaggagggcattcccccagaccagcagcgtctgatctttgcgggcaagcagctggaggatggccgcactctcgcggactacaacatccagaaggagagcacccttcaccttgttctccgactcaagggtggtatgcagatctttgtgaagaccctgactggaaaaaccataaccctggaggttgagagctcggacaccatcgacaatgtgaaggcgaagatccaggacaaggagggcatccacacggaccagcagcgtctgatcttcgccggcaaacagctggaagatggccgcaccctaacagactacaacattcataaagagagcacccttcaccttgtgct

SEQ ID NO: 2014 - DNA, 435 bp, Zea mays
  unsure (1)..(435): unsure at all n locations; Clone ID: LIB3061-022-Q1-K1-B6
gaaggccgagaggagtgacatcccagtcatcgacaagaaaaaagtaccttgtccccgccgacctcacagtgggacagtttgtgtacgtggtgcggaagcgcatcaagctcagcgccgagaaggcgatcttcatcttcgtgaagaacaccctcccaccaacagctgccctgatgtctgccatctacgaggagaacaaggacgaggacgggttcctctacatgacctacagcggcgagaacacctttgggctgctatgagtggcgccgcgccgccgtggatcgacgtcggacaatgcccctccttctgtaaatacttaaaaaaaaaataggcgtctcaagaatccgtgtacataataatctggcatgtcttgcatcaaaagcaactcgttgcgtccactgtctgttgaaactattgaagcgtactanacatttaagc

SEQ ID NO: 2015 - DNA, 454 bp, Zea mays
  Clone ID: LIB3061-022-Q1-K1-B7
attttgagcattcagaaacacaccaagcgaagcacattagcatcaacctaacaacaatggctaccaagatattatccctccttgcgcttcttgcgctttttgcgagcgcaacaaatgcgttcattattccacaatgctcacttgctccaagttccattattacacagttcctcccaccagttacttcaatgggcttcgaacacccagctgtgcaagcctataggctacaacaagcaattgcggcgagcgtcttacaacaaccaatttcccagttgcaacaacaatccttggcacatctaacaatacaaaccatcgcaacgcaacagcaacaacaattcctaccagcactgagccacctagccatggtgaaccctgccgcctacttgcaacagcagttgcttgcatcaaacccacttgctctggcaaacgtagttgcaaaccagccacaacaaca

SEQ ID NO: 2016 - DNA, 298 bp, Zea mays
  Clone ID: LIB3061-022-Q1-K1-B8
acggagaccaactagcaacatagaaagcacaatagcgtaccaacaatggcagccaaaagatcttgctgccttatgctcctgggcctctctgcaagtgatgctaccgcaacgattattcgacaatgctcacatgctcatatagcttctcttattacccaatacctctcaccagcagcgtctacaatgtctgaaacctcaattgctcaacgctacaggatccagcatgcaatagcaacaggcatcttaccagcatcacccttgctcgtccaacatccgacagccctattacagcacttac

SEQ ID NO: 2017 - DNA, 435 bp, Zea mays
  Clone ID: LIB3061-022-Q1-K1-B9
gaccaacaagcaacatagaaagtggaatccagtagcaacaatagagcaacaatggcgaccaagatactttccctccttatgctccttgctctttctgcatgtgttgctaacgcgacaattttccctcaatgctcacaagctcctatagcttcccttcttcccccataccttccatcaatgatagcttcagtatgtgaaaacccagctcttcaaccctataggctccaacaagcaatcgcagcaagcaacatacctttatcacccttgtttcaacaatcgccagccctatctttggtgcagtcattggtacaaaccatcaaggcacagcagctgcagcaactcgtgctacctgtgatcaaccaagtagctctggcaaacctttctccctactatcagcaacaacaatttctttcattcaaccaactatctacactg

SEQ ID NO: 2018 - DNA, 436 bp, Zea mays
  unsure (1)..(436): unsure at all n locations; Clone ID: LIB3061-022-Q1-K1-C1
gcacatagaagcgcaatatgtactatctatggcagccaaaatattttgcctccttatgctccttggtctttctgcaagtgctgctacngcgaccattttcccgcaatgctcgcaagctcctatagcttcccttcttcccccgtacctctcaccagcggtgtcttcggtatgtgaaaacccaattcttcaaccctacaggatccaacaggcaatcgcagctggcatcttacctttatcacccttgttccttcaacaatcatcagccctattacaacagttacctttggtgcatttattggcacaaaacatcagggcacaacaactacaacaacttgtgctagcaaaccttgctgcctactctcagcaacagcagtttcttccattcaaccaactaggttcattgaactctgcttcttatttgcaacaacaacaacta

SEQ ID NO: 2019 - DNA, 428 bp, Zea mays
  Clone ID: LIB3061-022-Q1-K1-C10
gcaacatataaagcacaatagtgtaccaacaatggcagctcaaatattttgcctccttatgctccttggtctttctgcaagtgctgctacggcgaccattttcccacactgctcacaagctcctatagcttccctgcttgcacggtacctttcaccaacggtgtcttcggtatgtgaaaacccaattcttcaaccctacaggatccaacaggcaatcgcagctggcatcttacctttatcacccttgttccttcaacaatcatcagccctattacagcagttacctatggtgcatatatcggcacataacatcagggcacaacaactaccacaacttgtgctagcaaaccttgctgcctactctgagcaacagcagtttcttccattcaaccaactagctgcattgaactctgcttcttatatgcaac

SEQ ID NO: 2020 - DNA, 445 bp, Zea mays
  Clone ID: LIB3061-022-Q1-K1-C12
agaagtggaatccagtagcaacaatagagcaacaatggcgaccaagatactttccctgcttatgctccttgctctttctgcatgtgttgctaacgcgacaattttccctcaatgctcacaagctcctatagcttcccttcttcccccataccttccatcaatgatagcttcagtatgtgaaaacccagctcttcaaccctataggctccaacaagcaatcgcagcaagcaacatacctttatcacccttgtttcaacaatcgccagccctatctttggtgcagtcattggtacaaaccatcaaagcacagcagctgcaacaactcgtgctacctgtgatcaaccaaatagctctggcaaacctttctccctactatcagcaacaacaatttctttcattcaacccactatctacactgaaccctgctgcttatttgcagcaacaa

SEQ ID NO: 2021 - DNA, 427 bp, Zea mays
  unsure (1)..(427): unsure at all n locations; Clone ID: LIB3061-022-Q1-K1-C3
cttcggtcgccgtcctcgcaagcagactccgtcgcgcccagcgcggagggatgctttggatggctcgatcgtagcggctacgctggcgcatgagttgtcttggacccgtgactgcttggaggacccccgctgccgtgcggccgactcccggcgcccgtgtcccatcgctcgtgcgggcatcccgtgcctgctgcgttgagaagtgcttgcgtgctgctacccgtcccacgggaagccgtgctcgatacacgttgccttcgtcgagctcaccccccggggtgcggctcgtcggctcgagagcgcccgcggcgtttgcctcgtgccgncgtcagcctatggccggcggcaccgaggacacctcgctggcgcttttggtctcggatgtggctcacgctgaaggccggagacgcgttggcgtcacgcgccc

SEQ ID NO: 2022 - DNA, 442 bp, Zea mays
  Clone ID: LIB3061-022-Q1-K1-C4
ccctacaggatccaacaggcaatcgcttcatgcatcttaccattatcacccttgttcgctccaacaaccgtcagccctattacagcagttacctttggtccatttggtggcacaaaacatcagggcacaacaactacaacaacttgtgctagcaaaccttgctgcatactctcagcaacatcagtttcttccattcaaccaactggctgcattgaactctgctgcttatttgcaacaacaattaccattcagccagctagttgctgcctacccccagcaatttcttccattcaaccaactagcagcattgaactctgctgcttatttacagcagcaacaactactaccattcagccagctagctgatgtgagccctgctgcctttttgacacaacaacagttgttgccgttctacctgcacgctatgcctaacgctggcacc

SEQ ID NO: 2023 - DNA, 386 bp, Zea mays
  Clone ID: LIB3061-022-Q1-K1-B10
caactagcaacatagaaagcacaatagtgtaccaacaatggcagccaaaatattttgcttccttatgctccttggtctttctgcaagtgttgctaccgcaaccattttcccacaatgctcacaagctcctatagcttcccttcttcccccatacctctcaccagcggtgtcttcaatgtgtgaaaccccaattgttcaaccctacaggatccaacaggcaatcgcaacaggcatcttaccattatcacccttgttcctccaacaaccgtcagccctattacagcagttacctttggtccatttggtggcacaaaacatcagggcacaacaactacaacaacttgtgctagcaaaccttgctgcatactctcaacaacatcagtttc

SEQ ID NO: 2024 - DNA, 416 bp, Zea mays
  Clone ID: LIB3061-021-Q1-K1-H5
catcaagcaacatacaaagtggaatccagtatcaacaacagagcaacaatggcgaccaagatatgctccatccttatgctccttgctctttctgcatgtgttgctaacgcgacaattttccctcaatgctcacaagctactatagcttatcttattcacacataccttccatcaatgatagcttcagtatgtgaaaacccagctcttcagccctataggctgcaacaagcaatcgcagcaagcaacatacctttatcacccttgttggttcaacaatcgacagccctatatgcggtgcactcattggttcaaaccatcatggcacagtatctgcagcaactcgtgctacctgtgatcaaccaagtagctatggcaaacctttctacctactctcagcaacaaacaatttcttccat

SEQ ID NO: 2025 - DNA, 451 bp, Zea mays
  unsure (1)..(451): unsure at all n locations; Clone ID: LIB3061-021-Q1-K1-H6
cattttgagcattcagaaacacaccaagcgaagcgcactagcaactacctaacaacaatggctaccaagatattagccctccttgcgcttcttgccctttttgtgagcgcaacaaatgcgttcattattccacaatgctcacttgctcctagtgccattattccacagttcctcccaccagttacttcaatgggcttcgaacacctagctgtgcaagccaacatgcaacaacaagcgcttgcggcgagcgtcttacaacaaccaattgcccaattgcaacaacaatccttgccacatctaacaatacaagccatcacaacgcaacagcaacaacagttcctaccagcactgagccacctagccatggtgaaccctgccgnctacttgcaagagcagctgcttgcatccaacccacttgctctggcgaacgtagttgcaaaccagcaacaac

SEQ ID NO: 2026 - DNA, 437 bp, Zea mays
  Clone ID: LIB3061-021-Q1-K1-H8
cttctctccgggctcacctaccggatcatcctccatggccaccctcgccttgccgccgaccaccaaggctgccggccaggacgccacccaggaaagcctagcagagaatcctgccaaggacgccgcagatccgggcagcatggagtccgagtgggttcttctcggaaaatcggacatcgtcccggccgatgtggccgccgccgccgccgcggggcaccaccacctcaacttctcgccgctgccgatgatccctatctgggtgcagatggttctcgggggcgtggtttacacggctgtgccgttctacaagagggtgctgaaggtcgaaggtgaaacgttggccaatgtagaaactgcagtggaggtcgtggagcatgtcgccgaggtgacggagaagttggctgcagatgcggccagttccctgccagagaacggat

SEQ ID NO: 2027 - DNA, 437 bp, Zea mays
  Clone ID: LIB3061-021-Q1-K1-H9
caactagcaacatagaaagcacaatagtgtaccaacaatggcagccaaaatattttgcctccttatgctccttggtctttctgcaagtgctgctacggcgaccattttcccgcaatgctcgcaagctcctatagcttcccttcttcccccgtacctctcaccagcggtgtcttcggtatgtgaaaacccaattcttcaaccctacaggatccaacaggcaatcgcagctggcatcttacctttatcacccttgttcctccaacaatcatcagccctattacaacagttacctttggtgcatttattggcacaaaacatcagggcacaacaactacaacaacttgtgctagcaaaccttgctgcctactctcagcaacagcagtttcttccattcaaccaactaggttcattgaactctgcttcttatttgcaacaac

SEQ ID NO: 2028 - DNA, 434 bp, Zea mays
  unsure (1)..(434): unsure at all n locations; Clone ID: LIB3061-022-Q1-K1-A1
acagtggcaccagttctaaccagggttaattcacttggccttggggaaccttatggcctacttacaccaggcacaacttctttcatctagcccgctcgctatgggcaatgcacctacatacctgcaacaacagttgttgcaacaacagttgctgcaacaaattgtaccagctcttactcagctagctgtggcaaaccctgctgcctacttgcaacaactacttccattcaaccaactgactgtgtcgaactctgctgcgtacctacaacagcgacaacagttacttaatccactagcggtggcttaacccatggtcgctgcctttctacagcagcaacaattgctgccatacaaccagttctctttgatgaaccctgccttgtcgtggcagcaacccatcgntggtggtgccatcttttagattacatatgaga

SEQ ID NO: 2029 - DNA, 113 bp, Zea mays
  Clone ID: LIB3061-022-Q1-K1-A10
tccgggtcgaccccgcgtccgcggacgcgtgggttttgggcagcgctgttctggttcctagtatggtgagaattggctgcaccttttgcttcgaataaaaatgcctgctcgtt

SEQ ID NO: 2030 - DNA, 396 bp, Zea mays
  Clone ID: LIB3061-022-Q1-K1-A11
gcggcggctgcggctgccagccaccgccgccggttcatctaccgccgccggtgcatctgccacctccggttcacctgccacctccggtgcatctcccaccgccggtccacctgccgccgccggtccacctgccaccgccggtccatgtgccgccgccggttcatctgccgccgccaccatgccactaccctactcaaccgccccggcctcagcctcatccccagccacacccatgcccgtgccaacagccgcatccaagcccgtgccagctgcagggaacctgcggcgttggcagcaccccgatcctgggccagtgcgtcgagtttctgaggcatcagtgcagcccgacggcgacgccctactgctcgcctcagtgccagtcgttgcggcagcagt

SEQ ID NO: 2031 - DNA, 445 bp, Zea mays
  unsure (1)..(445): unsure at all n locations; Clone ID: LIB3061-022-Q1-K1-A12
caacgtgccaaaccaccagatgcgaaacactctcccggacataatgcagcaagagtctctcggacggctgcagggtttggacattgggaaggggcctctggttgtgaagttagagagcagctcgatctctgcaagtgaaagcagcagcaccttctaacgaggcctacaagtgaaaacccaccgtttcagtaggttccattgttcatagtagcctgacatccttgtgctgcttcctgctctgtaagcccatttgttatttaattcattcatttagttgaaattatacgctgtcgcactggctgatcaatcatgttgtagaatggtccaggaacccttcaattatgtttgttttgggctcgtttcctggttctgtgactggtatcatcaaggcatttgggttttggagtgaaattctctaatggtactttntgtgtgttttaactat

SEQ ID NO: 2032 - DNA, 178 bp, Zea mays
  Clone ID: LIB3061-022-Q1-K1-A2
ctcgacgtcgacagcttcgacgaggccgtcgccaagcaccccttcatggtcgtcgagttctacgccccctggtgtgggcactgcaagaaacttgcttcagagtatgagaatgcggccaaagcacttagcaagcatgacccaccgattgttctcgctaaggttgatgctaacgaggaga

SEQ ID NO: 2033 - DNA, 436 bp, Zea mays
  Clone ID: LIB3061-022-Q1-K1-A4
agcaaaccttgctgcctattttaagatccaccagttctggcctttaaaccaactagcggattggaactctgctgctaattggcagcaccaccaactactaccattcagccagctagctgctgcctaccccgggcaatttctttcattcaaccaactggcagcattgaactctcatgcttatgtacaacaaccaacaactactaccattcagccagctagctgctgtgagccctgcttgcttcttgacacagcaacatttgttgccgttctacctgcacactgcgcctaacgttggcaccctcttacaactgcaacaattgctgccattcgaccaacttgctttgacaaacccagcagtgttctaccaacaacccatcattggtggtgccctcttttagattgcttatgagttatagttcaataataaagttttttt

SEQ ID NO: 2034 - DNA, 246 bp, Zea mays
  Clone ID: LIB3061-022-Q1-K1-A5
gctcgctatggccaatgcacctacatacctgacacaacagctgctgcaccaacaggcgcctctacatatcgtactacctcagactcacctagctgtggcgacacctgcatcctactacccacaactactaccattcaaccaacagcatgcaaccaactctgctatatacctacaacaacgacaacagctacttcatccacaatcagtattataacaaatgctctctgtcaactacagcacaacaaa

SEQ ID NO: 2035 - DNA, 465 bp, Zea mays
  Clone ID: LIB3061-022-Q1-K1-A7
ggaaaacccgccccaacaagcaccatagagggagcataccatttacaacttaagtgcaacaatggagccacaatgacgaccaagggatattctctacttatgctccttgctctttctacatgtgttgctaacgcgacaattttccctcaatgctcacaagctcctatagcttcccttcttcccccataccttccatcaattatagcttcagtatgtgaaaacccagctcttcaaccatataggcttcaacaagcaatcgcagcaagcaacatacctttatcgcccttgttgtttcaacaatcaccagccctatctttggtgcagtcattggtacaaaccatcagggcacaacagctgcagcaactcgtgctacctgtgatcaaccaagtagctctggcaaacctttctccctactctcagcaacaacaatttcttccattcaaccaactgtctacactgaaccct

SEQ ID NO: 2036 - DNA, 410 bp, Zea mays
  Clone ID: LIB3061-022-Q1-K1-A9
cagccattagctttatctactccagagcgcagaagaacccgatcgacaccatgagggtgttgctcgttgccctcgctctcctggctctcgctgcgagcgccacctccacgcatacaagcggcggctgcggctgccagccaccgccgccggttcatctaccgccgccggtgcatctgccacctccggttcacctgccacctccggtgcatctcccaccgccggtccacctgccgccgccggtccacctgccaccgccggtccatgtgccgccgccggttcatctgccgccgccaccatgccactaccctactcaaccgccccggcctcagcctcatccccagccacacccatgcccgtgccaacagccgcatccaagcccgtgccagctgcagggaacctgcggcgttggc

SEQ ID NO: 2037 - DNA, 428 bp, Zea mays
  Clone ID: LIB3061-022-Q1-K1-B1
gttaggctagggttcgaccagctagcgtaaaatgggggccttcaggttccatcagtaccagggggtggggcgcgcgctgccgacgcccggcgatgagcaccccaagatctaccgcatgaagctctgggccaccaacgaggtccgcgccaagagcaagttctggtacttcttgaggaagttgaagaaggttaagaagagcaacggccaggtcctggccatcaacgagatctttgagcgtaacccgacgacaatcaagaactacggcatctggctgcgctaccagagcagaaccggctaccacaacatgtacaaggagtaccgcgacacaaccctgaatggcgctgtggagcagatgtacaacgagatggcctctcgccaacgcgtgaggtccccctgcatccagatcatcaagactgcgacggtgcact

SEQ ID NO: 2038 - DNA, 342 bp, Zea mays
  Clone ID: LIB3061-021-Q1-K1-H4
gcaacatagaaagcacaatagtgtaccatcaatgtcagccaaaatattttgcttccttatgctccgtggtctttctgcaagtgctgctaccgcaaccattttcccacaatgctcacaagctcctatagcttcctttcttcccccatacctctcaccagcggtgtcttcagtatgtgaaaacccaattcttcaaccctacaggatccaacaggcaatcgcagcaggcatgttacctttatcacccttgatcctacaacaaccgtgagccctattacagcagctacctttggtgcatttgctgtcacaaaacatcaaggcacaacaactacaacaacttgtgct

SEQ ID NO: 2039 - DNA, 473 bp, Zea mays
  Clone ID: LIB3061-021-Q1-K1-F8
aattccgcgattcgaggccacgacccacgcgtctcggcaacatagaaagcacaatagtgtaccaacaatggcagccaaaatattttgcctccttatgctccttggtctttctgcaagtgctgctacggcgaccattttcccgcaatgctcgcaagctcctatagcttcccttcttcccccgtacctctcaccagcggtgtcttcggtatgtgaaaacccaattcttcaaccctacaggatccaacaggcaatcacagctggcatcttacctttatcacccttgttcctccaacaatcatcagccctattacatcagttacctttggtgcatttattggcacaaaacatcagggcacaacaactacaacaacttgtgctagcaaaccttgctgcctactctcagcaacagcagtttcttccattcaaccaactagctgcattgaactctgcttcttatttgcaacaacaacaac

SEQ ID NO: 2040 - DNA, 428 bp, Zea mays
  Clone ID: LIB3061-021-Q1-K1-F9
gtattttgcagcaaaaggcagatgagggtaagttaaaatctcaaattgcttccctggagtctagggtgagtatcagtgagggtaggttgtcggcaacacgtgaacaggctgattctgctcaagaggaagcatccgaatggaaacgcaaatatgacgttgctgttagtgaggccaaaacagctctgcagagagcggcggtagcacaggaacacacaaataagaaagtgcaagagagggaagatgctttgagggtagagcttgctaaccgactatctgagaaggaagagaaaattgcaagattacatgcaaaacttagtcaaatggaaattcatgctacaagtttgatctcgaggcttgaggccactgaagcgaagtcgaagagccatgagtctgattcgttggctttgatggaggagatcagattactg

SEQ ID NO: 2041 - DNA, 437 bp, Zea mays
  Clone ID: LIB3061-021-Q1-K1-G1
attcaaaaacacaccaagcgaagcgcactagcaacgacctaacaccaatggctaccaagatattagccctccttgcgcttcttgcccttttagtgagcgcaacaaatgcgttcattattccacagtgctcacttgctcctagtgccagtattccacagttcctcccaccagttacttcaatgggcttcgaacatccagccgtgcaagcctacaggctacaactagcgcttgcggcgagcgccttacaacaaccaattgcccaattgcaacaacaatccttggcacatctaaccctacaaaccattgcaacgcaacaacaacaacaacagtttctgccatcactgagccaactagccgtggtgaaccctgtcacctacttgcaacagcagctgcttgcatccaacccacttgctctggcgaacgtagctgcataccac

SEQ ID NO: 2042 - DNA, 417 bp, Zea mays
  Clone ID: LIB3061-021-Q1-K1-G11
tcagaaacacacctagcgaagcgcactagcaacgacctaacaacaatggcttccaagacattatccctccttgcgcttcttgccctttttgtgagtgcaacaaatgcgttcattattccacaatgctcacttgctccgagtgccattattccacagttcctccctccagttacttcaatgggcttcgaacacccagctgtgcaagcctataggctacaacaagcgcttgcggcgagcgtcttagaacaaccaattgcccaattacaacaacaatccttggcacatctaaccatacaaaccatcgcaacgcagcagcaacaagcactgagccacctagccgtggtgaaccctatcgcctacttgcaacaacagctgcttgcatccaacccacttgctttggcaaacgtagctgcatac

SEQ ID NO: 2043 - DNA, 435 bp, Zea mays
  Clone ID: LIB3061-021-Q1-K1-G12
caacaagcaacatagaaagtggaatacagtagcaaaaatagagcaacaatggcggccaagatattttccatccttatgctccttgctctttctgcatgtgttgctaacgcgaccatttttcctcaatactcacaagctcctatagctgcccttcttcccccataccttccatcaatgaccgctttagtatgtgaaaacccagcccttcaaccctacaggatccagcaagcaatcgcaacaagcaacttacctttatcacacctgttctttcaacaatcgccagccctatctttggtgcagtcattggtacaaaccatcagggcagaacagttgcagcaactcgtgctaccagtgatcagccaagtagctctggcaaacctttccccctactctcagcaacaacaatttcttccattcaaccaactgtctatactg

SEQ ID NO: 2044 - DNA, 310 bp, Zea mays
  Clone ID: LIB3061-021-Q1-K1-G2
caactagcaacatagaaagcacaatagtgtaccaacaatggcagccaaaatattttgcctgcttatgctccttggtcctttttgcaggtgctgttacgggaacaattttcccgcattgctcgcaggctctaatagcttcccttcttcccccgtacctttaaccagcggtgtcttcggtatgtgaaaacccaattcttcaaccctacaggatccaacaggcaatcacagttggcatcttacctttatcaccctggttcctccaacaatcatcagccctattacatcagttaccttgggcgcatatattggc

SEQ ID NO: 2045 - DNA, 418 bp, Zea mays
  Clone ID: LIB3061-021-Q1-K1-G3
ctccgctgaccccgcatcttcccatacgagctgtgtttctccaagttcgctgctggccatatcgacgtcgtcatcctcgatccagacgagtgtgtgtgctatctccacgggtcttcgacagatttagattgcattgtaccaaggataagaaaaatggataagcgaactaggaatagaagagaagaggaggacgaggagttaatgctctttcttttccctgctctttatctaattactaatggagggagagagaaaagagcaaggcatgcttctattctacctggcaaggagagacttaaagagattcttgaaaggcatgagaagaactgtcttgtcgcattccgtatggagcctcgtatattcaaagatatagcaacatttcttagagaagaacacatactatgtgacacaaggggtg

SEQ ID NO: 2046 - DNA, 441 bp, Zea mays
  Clone ID: LIB3061-021-Q1-K1-G4
ctagcaacatagaaagcacaatagtgtaccaacattggcagccaaaatattttgcctccgtatgctccttggtctttctgcaagtgctgctacggcgaccattttcccgcaatgctcgcaagctcctatagcttcccttcttcccccgtacctctcaccagcggtgtcttcggtatgtgaaaacccaattcttcaaccctacaggatccaacatgcagtcacagctggcatcttacctttatgacccttgtttctgcaacaatcatcagccctatctcatcagttacctttgttgcattgatcggcacataccatcacggcacatcaactacaacaacttgtgctagcaaaccttgctgcctactctcagcaacagcagtttcttccattcaaccaactagctgcattgaactctgcttcttatttgcaacaacaacaact

SEQ ID NO: 2047 - DNA, 418 bp, Zea mays
  unsure (1)..(418): unsure at all n locations; Clone ID: LIB3061-021-Q1-K1-G5
caactagcaacatagaaagcacaatagtgtaccaacaatggcagccaaaatattttgcctccttatgctccttggtctttctgcaagtgctgctacggcgaccattttcccacaatgctcacaagctcctatagcttcccttcttcccccgtacctctcaccagcggtgtcttcggtatgtgaaaacccaattcttcaaccctataggatccaacaggcaatcgcagctggcatcttacctttatcacccttgttcctccaacaatcatcagccctattacagcagttacctttggtgcatttattggcacaaaacatcaaggcacaacaactacaacaactngtgctagcaaaccttgctgcctactctcagcaacaacagtttcttccattcaaccaactagctgcattgaactct

SEQ ID NO: 2048 - DNA, 413 bp, Zea mays
  Clone ID: LIB3061-021-Q1-K1-G7
cgtaaattatctaccaaaaaaatttcaagattttttattgattgtctccgctctctgtataatatttttttttgatttggctaactgatgttattgtttacaccatgcaatatgtcttggtacaacacggctaatgaagtgagcgattagaagagagttcacaacgactgactgaacgaacaaagattataaaatgacataattccaccataaagagaccaaataagagaaagtttgtgagctcaagtttctaaaataagtcacatgaactcaaacttataaaaagatagatcaaaatatgaagtgattgctaaagtcatgcatcaataaaaactggatgcgctctttgtagcaattattaacatttaaaaccaacaaataactttttattttactgttagtgtgataaatca

SEQ ID NO: 2049 - DNA, 351 bp, Zea mays
  unsure (1)..(351): unsure at all n locations; Clone ID: LIB3061-021-Q1-K1-G8
catttaaccaattggccgcactgaaccctgctgcttatttgcagcagcaaatactactgccatttagcgagctagctgcagcaagtcgtgcttccttcttgacacagcaacagttgctgcctttctacaagcagtttgcggctaaccccgcaaccctcttacaactacaacaattgttgccctttgtccaacttgctttgacaaacccagcagcctnctaccaacaacacatcattggtggtgccctcttttagattgattattagttgtaattcaataataaaagtttttggatgatgtatgttggcaaccagaaataagaagttacattttcagattctaaaaaataaa

SEQ ID NO: 2050 - DNA, 434 bp, Zea mays
  Clone ID: LIB3061-021-Q1-K1-H1
caactagcaacatagaaagcacaatagtgtaccaacaatggcagccaaaatattttgcctccttatgctccttggtctttctgcaagtgctgctacggcgaccattttcccgcaatgctcgcaagctcctatagcttcccttcttcccccgtacctctcaccagcggtgtcttcggtatgtgaaaacccaattcttcaaccctacaggatccaacaggcaatcacagctggcatcttacctttatcacccttgttcctccaacaatcatcagccctattacatcagttacctttggtgcatttattggcacaaaacatcagggcacaacaactacaacaacttgtgctagcaaaccttgctgcctactctcagcaacagcagtttcttccattcaaccaactagctgcattgaactctgcttcttatttgcaac

SEQ ID NO: 2051 - DNA, 437 bp, Zea mays
  Clone ID: LIB3061-021-Q1-K1-H10
aacaagcaacatagaaagtggaatccagtagcaacaatagagcaacaatggcgaccaagatactttccctccttatgctccttgctctttctgcatgtgttgctaacgcgacaattttccctcaatgctcacaagctcctatagcttcccttcttcccccataccttccatcaatgatagcttcagtatgtgaaaacccagctcttcaaccctataggctccaacaagcaatcgcagcaagcaacatacctttatcacccttgtttcaacaatcgccagccctatctttggtgcagtcattggtacaaaccatcaaggcacagcagctgcagcaactcgtgctacctgtgatcaaccaagtagctctggcaaacctttctccctactatcagcaacaacaatttcttccattcaaccaactatctacactgaaccct

SEQ ID NO: 2052 - DNA, 442 bp, Zea mays
  Clone ID: LIB3061-021-Q1-K1-H11
cagaaacacacctagcgaagcgcactagcaacgacctaacaacaatggctaccaagatattatccctctttgcgcttcttgccctttttgtgagcgcaacaaatgcgttcattattccacaatgctcacttgctcctagtgccattattccacagttcctccctccagttacttcaatgggcttcgaacacccagctgtgcaagcctacaggctacaacaagcgcttgcggcgagcgtcttacaacaaccaattgcccaattacaacaacaatccttggcacatctaaccatacaaaccatcgcaacgcaacagcaacaacaatttctaccagcactgagccaactagctgtggtgaaccctgtcgcctacttgcaacagcagttgcttgcatccaacccacttgctctggcaaacatagttgcataccaacaacaacaaca

SEQ ID NO: 2053 - DNA, 356 bp, Zea mays
  Clone ID: LIB3061-021-Q1-K1-H3
gtccttgcgggcggcaagcaccttcgtcccggagacatctgccgctgcagcatagaccaccatgtcctcgctcggcagcaccgatgttgatgatggcaacgaggaggaggacggctccgcgagcacccccgagatctaccgctgccactcccacgcagttgcgtgtagcctctccatgtgatttccccaatgtttcccttcctctgtagcctctccgacggcgccgccgccgttcttcctcggccgtcggcgacattttaagaacgcctgaggctgttcaaccacttcatcgtctttttgactgcctcacattgaaaggaactttgcagcggactgttatatgatctaatgaagaa

SEQ ID NO: 2054 - DNA, 362 bp, Zea mays
  Clone ID: LIB3061-021-Q1-K1-F7
cgaagatcacattctcaagagaagctgtgtcgagcgtgtgctcctttgtgtcagagcacgtcccttccatagacttggaatcctgggatgaaagtgccatgaccgaaggcacacccccagccaaagcacagctgttttgccccgagggtaaaagtatatcttccgtgaagtttgcgagcttgggaaaccccagtggaacctgtagatcataccaaatggggcgctgccaccacccgaactccttatctgttgctgagaaggcttgtctgaacaccaacagctgtacagtctccctgacagacgagagctttgggaaggatctatgccctggagtcaccaaaacactcgacatcgaagcggac

SEQ ID NO: 2055 - DNA, 166 bp, Zea mays
  Clone ID: LIB3061-039-Q1-K1-D12
tgagcattcatatacacaccaagttattttcactatcaacaacctaacaacaatggctgccaatatattatctctgcttgctcttctttcgcttatcgcgagctcaataaatgcgctcattatttcacaatctacactaactcttagtttcattattccatatttc

SEQ ID NO: 2056 - DNA, 414 bp, Zea mays
  Clone ID: LIB3061-039-Q1-K1-D3
gcagcaagcaacatacctttatcgcccttgttgtttcaacaatcgccagccctatctggggtgcagtcattggtacaaaccatcagggcacaacagctgcagcaactcgtgctacctctgatcaaccaagtagctctggcaaacctttctccctactctcagcaacaacaatttcttccattcaaccaactgtctacactgaaccctgctgcttatttgcagcaacaactattaccatttagccagctagctactgcctactctcagcaacaacaacttcttccatttaaccaattggccgcactgaaccccgctgcttatttgcagcagcaaatactactaccatttagccagctagctgcatcaaaccgagcttacttcttgacacagcaacagttgctgcctttctaccag

SEQ ID NO: 2057 - DNA, 239 bp, Zea mays
  Clone ID: LIB3061-039-Q1-K1-D4
ctgcgcttgtgcttgcatgcattgcgccttgtctctcacacatcagcagcggagcagatcgagccatggcgcttctctcgctcctcgccttcctgctggcaacggctgcagccccggccgcagtcgccgccgtgggcaacgcaacatacgacggcagcaagacggacgcgtccccggcggtcctatgcaacggcgaggggtgtgagccaccggcgcagccgctgccgatctacgggtac

SEQ ID NO: 2058 - DNA, 444 bp, Zea mays
  Clone ID: LIB3061-039-Q1-K1-D5
cccacgcgtccgcacaaatgcattgacaacattgtaatcttgagtggcgatcagctttatcggatgaattacatggaacttgtgcagaaacatgtcgaggacgatgctgatatcactatatcatgtgctcctgttgatgagagccgagcttctaaaaatgggctagtgaagattgatcatactggacgtgtacttcaattctttgaaaaaccaaagggtgctgatttgaattctatgagagttgagaccaacttcctgagctatgctatagatgatgcacagaaatatccataccttgcatcaatgggcatttatgtcttcaagaaagatgcacttttagaccttctcaagtcaaaatatattcaattacatgactttggatctgaaatcctcccaagagctgtactagatcatagtgtgcaggcatgcatttttacgggctat

SEQ ID NO: 2059 - DNA, 435 bp, Zea mays
  unsure (1)..(435): unsure at all n locations; Clone ID: LIB3061-039-Q1-K1-D6
gctcacttgctccaagttccattattacacagttcctcccaccagttacttcaatgggcttcgaacacccagctgtgcaagcctataggctacaacaagcaattgcggcgagcgtcttacaacaaccaatttcccagttgcaacaacaatccttggcacatctaacaatacaaaccatcgcaacgcaacagcaacaacaattcctaccagcactgagccacctagccatggtgaaccctgccgcctacttgcaacagcagttgcttgcatcaaacccacttgctctggcaaacgtagttgcaaaccagccacaacaacagctgcaacagtttctgccagcgctcagtcaactagccatggtgaaccctgccgnctacctacaacagcaacaactgctttcatctagcccgctcgctgtggccaatgcacctacat

SEQ ID NO: 2060 - DNA, 442 bp, Zea mays
  Clone ID: LIB3061-039-Q1-K1-D7
cagaaacacaccaagcgaagcacattatcaacaacctaacaacaatggctaccaagatgttatccctccttgcgcttcttgcgctttttgcgagcgcaacaaatgcgttcattattccacaatgctcacttgctccaagttccattattacacagttcctcccaccagttacttcaatgggcttcgaacacccagctgtgcaagcctataggctacaacaagcaattgcggcgagcgtcttacaacaaccaatttcccagttgcaacaacaatccttggcacatctaacaatacaaaccatcgcaacgcaacagcaacaacaattcctaccagcactgagccacctagccatggtgaaccctgccgcctacttgcaacagcagttgcttgcatcaaacccacttgctctggcaaacgtagttgcaaaccagccacaacaaca

SEQ ID NO: 2061 - DNA, 407 bp, Zea mays
  unsure (1)..(407): unsure at all n locations; Clone ID: LIB3061-039-Q1-K1-D8
tgcacactgaaccttctactcaagaacctgaggctcaatccattgggtggggacaaggtgttgaccatgctggcgagtcagctgcgcaagggaacggtcatggatggcaatggctcaaagatcctcggttggactaccttggttacagaggaatttttccagctgacacgataccacccctagttgagtctgacaaagaagcagatgaacgccattatcaactttggcggatagaaaatggagtcgcagaaggttcgactgagatcccaaaaggcgaagcaatcccgctggagtacaatcttgctggcttgaacgccatttcgttcgagaagggctgctacatcgggcaggagcttatcgctcggacgcaccatcgcggtgtcatncggaagcgcctaatgccaatg

SEQ ID NO: 2062 - DNA, 442 bp, Zea mays
  Clone ID: LIB3061-039-Q1-K1-D9
gagaccaactagcaacatagaaagcacaatagtgtaccaacaatggcagccaaagtaggttgcttccttatgctccttggtctttctgcaagtgttgctaccgcaaccattttcccacaatgctcacaagctcctatagcttcccttcttcccccatacctctcaccagcggtgtcttcaatgtgtgaaaccccaattgttcaaccctacaggatccaacaggcaatcgcaacaggcatcttaccattatcacccttgttcctccaacaaccgtcagccctattacagcagttacctttggtccatttggtggcacaaaacatcagggcacaacaactacaacaacttgtgctagcaaaccttgctgcatactctcagcaacatcagtttcttccattcaaccaactggctgcattgaactctgctgcttatttgcaacaac

SEQ ID NO: 2063 - DNA, 448 bp, Zea mays
  Clone ID: LIB3061-039-Q1-K1-E1
aacaattcctaccagcactgagccacctagccatggtgaaccctgccgcctacttgcaacagcagttgcttgcatcaaacccacttgctctggcaaacgtagttgcaaaccagccacaacaacagctgcaacagtttctgccagcgctcagtcaactagccatggtgaaccctgccgcctacctacaacagcaacaactgctttcatctagcccgctcgctgtggccaatgcacctacatacctgcaacaacaattgttgcaacagattgtaccagctctgactcagctagttgtggcaaaccctgctgcctacttgcaacagctgcttccattcaaccaactgactatgtcgaactctgctgcgtacctacaacagcgacaacagttacttaatccactagcagtggctaacccattggtcgctgccttcctacagcagcaacaatt

SEQ ID NO: 2064 - DNA, 441 bp, Zea mays
  Clone ID: LIB3061-039-Q1-K1-E10
caactagcaacatagaaagcacaatagtgtaccaacaatggcagccaaaatattgtgcgtgcttatgctccttggtctttctgcaagtgctgctacggcgaccattttcccgcaatgctcgcaagctcctatagcttcccttcttcccccgtacctctcaccagcggtgtcttcggtatgtgaaaacccaattcttcaaccctacaggatccaacaggcaatcacagctggcatcttacctttatcacccttgttcctccaacaatcatcagccctattacatcagttacctttggtgcatttattggcacaaaacatcagggcacaacaactacaacaacttgtgctagcaaaccttgctgcctactctcagcaacagcagtttcttccattcaaccaactagctgcattgaactctgcttcttatttgcaacaacaaca

SEQ ID NO: 2065 - DNA, 466 bp, Zea mays
  Clone ID: LIB3061-039-Q1-K1-E11
tcggaacggaattcccgacccaagccacgcgtgcaacgcactgacactacgtaccaacaatggctaccaagatattaggcctccttaggctgcttggcctttcagcgagcgctgctactgcgaccattattccacaatgctcactagctcctatagccattattctacagttgcacctatcaccaactgtaacgtgcttatgacataacccaattcatgaactactacatgatccaacaggcaagcgcagatggcatactacctctataacgctagttgctacaacaatcattaggcactattacaacatacaaactatggcgcatgcacagccacaacacatccaggcacatcaactactgcaacatgtactagcagacaacgctgtctactattagcaacagcagctgcttgcattcaaccaactatgctcatcgaactgtgcttcataccagcaacaacaaca

SEQ ID NO: 2066 - DNA, 441 bp, Zea mays
  Clone ID: LIB3061-039-Q1-K1-E12
gcaacatagaaagtagaatccattagcaacaatagagcaacaatggcgaccaagatatgttccctccttatgctccttgctctttctacatgtgttgctaacgcgacaattttccctcaatgctcacaagctcctatagcttcccttcttcccccataccttccatcaattatagcttcagtatgtgaaaacccagctcttcaaccatataggcttcaacaagcaatcgcagcaagcaacatacctttatcgcccttgttgtttcaacaatcaccagccctatctttggtgcagtcattggtacaaaccatcagggcacaacagctgcagcaactcgtgctacctgtgatcaaccaagtagctctggcaaacctttctccctactctcagcaacaacaatttcttccattcaaccaactgtctacactgaaccctgctgct

SEQ ID NO: 2067 - DNA, 327 bp, Zea mays
  Clone ID: LIB3061-039-Q1-K1-E2
cccacgcgtccgcttctctacgtggtttatcatgacgcgcatcaccatttgatgctcgctatgatgcttgcaaccgtcgatgcccctattgccttgtcagtgccgataccagcgcatagacgctcagatctcctatctagtcccgtagccagacgggacgcccaaattggcaggcttagctcgaagtgcaatgcctaccgactcggtggcgcggtggctcggcggggcaatcttcgcggctcgcccgtagcgacgcagatcgtcctcttcgcatcccgcttgcgtgcgatcctgcgcgccatacagcagcacccaacgcagagcgcg

SEQ ID NO: 2068 - DNA, 451 bp, Zea mays
  Clone ID: LIB3061-039-Q1-K1-E3
cccacgcgtccgcaactagcaacatagaaagcacaatagtgtaccaacaatggcagccaaagtattttgcctccttatgctccttggtctttctgcaagtgctgctacggcgaccattttcccgcaatgctcgcaagctcctatagcttcccttcttcccccgtacctctcaccagcggtgtcttcggtatgtgaaaacccaattcttcaaccctacaggatccaacaggcaatcacagctggcatcttacctttatcacccttgttcctccaacaatcatcagccctattacatcagttacctttggtgcatttattggcacaaaacatcagggcacaacaactacaacaacttgtgctagcaaaccttgctgcctactctcagcaacagcagtttcttccattcaaccaactagctgcattgaactctgcttcttatttgcaacaacaa

SEQ ID NO: 2069 - DNA, 421 bp, Zea mays
  Clone ID: LIB3061-039-Q1-K1-E4
cggaattcccggagttacctttggtgcatttattggcacaaaacatcagggcacatcaactacaacaacttgtgctagcaaaccttgctgcctactctcagcaacagcagtttcttccattcaaccaactagctgcattgaactctgcttcttatttgcaacaacaaatactactaccatttagccagctagctgcagcaaaccgtgcttccttcttgacacagcaacagttgctgcctttctaccagcagtttgcggctaaccccgcaaccctcttacaactacaacaattgttgccctttgtccaacttgctttgacagacccagcgggcttctaccaacaacacatcattggtggtgccctctttaaattgcttattagttgtaattcattaataaaggttttttggatgatgtatgt

SEQ ID NO: 2070 - DNA, 169 bp, Zea mays
  Clone ID: LIB3061-039-Q1-K1-E5
ctcatgctcaagttcgtagtcaggtcgatttaaaccatcaccaccatttctagcaagagggtacctatcatagatactctttcgactcacgacaaccacatgtacaaggacgttattcaacaacatgccatcaatgccagaagagttcatggacaccctgtccatctta

SEQ ID NO: 2071 - DNA, 438 bp, Zea mays
  Clone ID: LIB3061-039-Q1-K1-D11
ctgcctccccacttcgcaccgccaccgtctcccgaccgcgacgccggcgacctccgcgccgcatcgctccagccgatcgttccgagatttgttgatcaaagaaccatggaaggatcgttccagttgaatcccaacgccagtcctttcatacctggattgctgggttcatctgcacaaaaagccccagaaaaacaaggagggtcatcatcaaagggagagccttctggtagcacctttgatccttctgagtatgaggaaaatgacatggatgaacttgctctagtcaaaatggtcttttcaatgttcccaaatgtctccacggacttcattgatgagttaatcaaggcaaatgattttgacatgaatctgactgttgatatgctttatgagctgaactcacaagatatggttcatgatgattctgaggttatcaatcat

SEQ ID NO: 2072 - DNA, 446 bp, Zea mays
  Clone ID: LIB3061-039-Q1-K1-B9
attgagaccaacaagcaacatagaaagtggaatccagtagcaacaatagagcaacaatggcgaccaagatacttgccctccttatgctccttgctctttctgcatgtgttgctaacgcgacaattttccctcaatgctcacaagctcctatagcttcccttcttcccccataccttccatcaatgatagcttcagtatgtgaaaacccagctcttcaaccctataggctccaacaagcaatcgcagcaagcaacatacctttatcacccttgtttcaacaatcgccagccctatctttggtgcagtcattggtacaaaccatcaaggcacagcagctgcagcaactcgtgctacctgtgatcaaccaagtagctctggcaaacctttctccctactatcagcaacaacaatttcttccattcaaccaactatctacactgaaccct

SEQ ID NO: 2073 - DNA, 444 bp, Zea mays
  Clone ID: LIB3061-039-Q1-K1-C1
tccagatcagcaaagcggcagtgcgtatagaggatcgtcgaacagaacagcatgaagatggtcatcgttctcgtcgtgtgcctggctctgtcagctgccagcgcctctgcaatgcagatgccctgcccctgcgcggggctgcagggcttgtacggcgctggcgccggcctgacgacgatgatgggcgccggcgggctgtacccctacgcggagtacctgaggcagccgcagtgcagcccgctggcggcgggccctactacgccgggtgtgggcagccgagcgccatgttccagccgctccggcaacagtgctgccagcagcagatgaggatgatggacgtgcagtccgtcgcgcagcagctgcagatgatgatgcagcttgagcgtgccgctgccggcagcagcagcctgtacgagccagctctgatgcagcagcagcagcagc

SEQ ID NO: 2074 - DNA, 442 bp, Zea mays
  Clone ID: LIB3061-039-Q1-K1-C10
attgagaccaactagcaacatagaaagcacaatagtgtaccaacaatggcagccaaaagattttgcctccttatgctccttggtctttctgcaagtgctgctacggcgaccattttcccgcaatgctcgcaagctcctatagcttcccttcttcccccgtacctctcaccagcggtgtcttcggtatgtgaaaacccaattcttcaaccctacaggatccaacaggcaatcgcagctggcatcttacctttatcacccttgttcctccaacaatcatcagccctattacaacagttacctttggtgcatttattggcacaaaacatcagggcacaacaactacaacaacttgtgctagcaaaccttgctgcctactctcagcaacagcagtttcttccattcaaccaactaggttcattgaactctgcttcttatttgcaac

SEQ ID NO: 2075 - DNA, 428 bp, Zea mays
  Clone ID: LIB3061-039-Q1-K1-C11
aacatagaaagcacaatagtgtaccaacaatggcagccaaaatattttgcttccttatgctccttggtctttctgcaagtgttgctaccgcaaccattttcccacaatgctcacaagctcctatagcttcccttcttcccccatacctctcaccagcggtgtcttcaatgtgtgaaaccccaattgttcaaccctacaggatccaacaggcaatcgcaacaggcatcttaccattatcacccttgttcctccaacaaccgtcagccctattacagcagttacctttggtccatttggtggcacaaaacatcagggcacaacaactacaacaacttgtgctagcaaaccttgctgcatactctcagcaacatcagtttcttccattcaaccaactggctgcattgaactctgctgcttatttgcaacac

SEQ ID NO: 2076 - DNA, 435 bp, Zea mays
  Clone ID: LIB3061-039-Q1-K1-C12
aatattttgagcattcagaaacacaccaagcgaagcgcactagcaacgacctaagaacaatggctaccaagatattagccctccttgcgcttcttgccctttttgtgagcgcaacaaatgcgttcattattccacaatgctcacttgctcctagtgccattattccacagttcctcccaccagttacttcaatgggcttcgaacacctagctgtgcaagccaacatgcaacaacaagcgcttgcggcgagcgtcttacaacaaccaattgcccaattgcaacaacaatccttgccacatctaacaatacaagccatcacaacgcaacagcaacaacagttcctaccagcactgagccacctagccatggtgaaccctgccgcctacttgcaagagcagctgcttgcatccaacccacttgctctggcgaacgtag

SEQ ID NO: 2077 - DNA, 233 bp, Zea mays
  Clone ID: LIB3061-039-Q1-K1-C2
gcagcaactgctccaggacttcttcaactgctaggagctgtgcaagaacatcaaccccgatgaggctgtctccttatggtgctgttgtccatgctgccattctgagcggtgaggtctattagaaggtgctggacctgcttgctgtgtacattaatcctctgttcatgtgtatacagacttattcaatagtactggctgcaataagccatcagaacaagcattttaccatcatt

SEQ ID NO: 2078 - DNA, 441 bp, Zea mays
  Clone ID: LIB3061-039-Q1-K1-C3
cttcccttcttcccccgtacctctcaccagcggtgtcttcggtatgtgaaaacccaaggcttcaaccctataggatccaacaggcaatcgcagctggcatcttacctttatcacccttgttcctccaacaatcatcagccctattacagcagttacctttggtgcatttattggcacaaaacatcagggcacaacaactacaacaacttgtgctagcaaaccttgctgcctactctcagcaacaacagtttcttccattcaaccaactagctgcattgaactctgcttcttatttgcaacaacaacaactaccattcagccagctatctgctgcctacccccagcaatttcttccattcaaccaactgacagctttgaactctcctgcttatttacagcagcaacaactactaccattcagccagctagctggtgtgagcc

SEQ ID NO: 2079 - DNA, 418 bp, Zea mays
  Clone ID: LIB3061-039-Q1-K1-C4
cgacattcaatgagctgaaccagctcgcggaagaggcccgcaggagagccgagatggcgaggttgcgagaagtgagcaccctgaaggggaggatggagtcagtggtgaagcagaagggtctggacatcgagaccatccagcagtcctacaccgtgtgactggctgaccgacgacgacggggtttatagaggtttcttcttcttatactatacaatctgtactaggtagcaataaggatcaaggaaggaacccctatatattggctgtggttcgcgggaaatgaatgatggtcatatttatgatgtcggtgtggtgcttctgtcgccaactctcgaccatactaccctcaactcaccccttgtatgctgtggcattaaccacccccggcaccaccggcaggcattgatattgagagatg

SEQ ID NO: 2080 - DNA, 282 bp, Zea mays
  unsure (1)..(282): unsure at all n locations; Clone ID: LIB3061-039-Q1-K1-C5
cggacgcgtgggtttcttatgagttatagttcaataataaatctaaaagaggtctcttgatatttataattttntgccgggcattgtaagttgcattttacctttcattccctatctcctgcaactattattatgtttattacatgtgctacctttggtgcctctattcatacataccttactgctacaacaacttcaactacttgtgctagctgacttcgctgactactctcagctacaacaatttttcctactcaatcaactgtattcatttgactatgc

SEQ ID NO: 2081 - DNA, 439 bp, Zea mays
  unsure (1)..(439): unsure at all n locations; Clone ID: LIB3061-039-Q1-K1-C6
gtgtgtgtgtgggtgcagcgctgaggaggatcggagtgaagggggtggaggtgcgcaagccggagcagctccggggcatcgactcgctcatcatccccggtggcgagagcaccaccatggccaagctcgccaactaccacaacctgttccctgcacttcgagagttcgttggaggtggaaagcctgtctggggaacctgtgctgggctcatctttcttgcaaacaaagcagtagggcaaaaaacaggggggcaggaacttgttggaggattagattgtacagtccaccgaaacttttttgggagtcagcttcaaagctttgagacagagctttcggtgccaaagctttcggagaaggaaggagggaatgatacatgccgcggtgtatntatacgggcacctgctatattggaagtaggtccagatgttgaaatattggc

SEQ ID NO: 2082 - DNA, 449 bp, Zea mays
  Clone ID: LIB3061-039-Q1-K1-C7
gaccaacaagcaacatagaaagtggaatccagtagcaacaacagagcaacaatggcgagcaagatattttccctccttatgctccttgctctttctgcatgtgttgctaacgcgacaattttccctcaatgctcacaagctcctatagcttcccttcttcccccataccttccatcaatgatagcttcagtatgtgaaaacccagctcttcagccctataggctccaacaagcaatcgcagcaagcaacatacctttatcacccttgttgtttcaacaatcgccagccctatctttggtgcagtcattggtacaaaccatcaaggcacagcagctgcagcaactcgtgctacctgtgatcaaccaagtagctctggcaaacctttctccctactctcagcaacaacaatttcttccattcaaccaactgtctacactgaaccctgctgt

SEQ ID NO: 2083 - DNA, 434 bp, Zea mays
  Clone ID: LIB3061-039-Q1-K1-C8
tgcagccctttggtaatgccttttctccaatcacgtttgatacaaccaagtagctgccaggtattgcagcaacaatgttgtcatgatcttaggcagattgagccacaatacattcaccaagcaatctacaacatggttcaatccataatccaggaggagcaacaacaacaaccatgtgagttatgtggatctcaacaagctactcaaagtgcggtggcaatcttgacagcagcacaatacctaccatcaatgtgcggcttgtaccactcatactaccaaaataatccatgcagcagcaatgacattagtggtgtttgcaattgaagaattgtgtctacctagccgttatactcctataacggtgttaagcaataaagtaccatacattatgatgtttgtactatgatatttgaataagaatactaattgtaatt

SEQ ID NO: 2084 - DNA, 432 bp, Zea mays
  Clone ID: LIB3061-039-Q1-K1-C9
cgcaaattgcaccaagaaatccatcgagaggccgtcgacaggggaattaatggcgtcggcgtctagcagcagccaccgccgcctcatcctcgcagccgccgtcctgctctccgtgctcgcggctgccagcgccagcgccgggacctcctgcgtgccggggtgggccatcccgcacaacccgctcccgagctgccgctggtacgtgaccagccggacctgcggcatcgggccgcgcctcccgtggccggagctgaagaggagatgctgccgggagctggcggacatcccggcgtactgccggtgcacggcgctgagcatcctcatggacggcgcgatcccgccgggcccggacgcgcagctggagggccgcctagaggacctgccgggctgcccgcgggaggtgcagaggggattcgccgtcaccctcgtcac

SEQ ID NO: 2085 - DNA, 447 bp, Zea mays
  Clone ID: LIB3061-039-Q1-K1-D1
ctcagcaacaacagtttcttccattcaaccaactagctgcattgaactctgcttcttagttgcaacaacaacaactaccattcagccagctatctgctgcctacccccagcaatttcttccattcaaccaactgacagctttgaactctcctgcttatttacagcagcaacaactactaccattcagccagctagctggtgtgagccctgctaccttcttgacacaaccacaattgttgccgttctaccagcacgctgcgcctaacgctggcaccctcttacaactgcaacaattgctgccattcaaccaacttgctttgacaaacccaacagcattctaccaacaacccatcattggtggtgccctcttttagatttcttatgagttatagttcaataataaagttttttgtctgatgtttgtggcttcccagaaataagaaagta

SEQ ID NO: 2086 - DNA, 439 bp, Zea mays
  Clone ID: LIB3061-039-Q1-K1-D10
ctctagggaagcaaggtgttgccaaacccaaaggaccgctggaggcacttaggcgcaagcttcagccaacacgccaacaacagcaacaacgtgcaaggcgccctatttacacttcgtcagaaaacgaggacggagacggtgctggtgctgaggatatgaacatcaattgaagtggagtggaatgcctgctcagattggttgatgagcaagtcgtcactatatgtcaagtgctgtagtttgctttgcaattattggaggaattaaatgatcgtctgctgggttcatgagtcgaacatttgatatatatggcctattatttactactatatatttttattatctgtggataaacatttgatatgcatgaggtggccgagctgtgactgtgagtagggctggacgagatactcgtagcttgataactcgctcgattcggctc

SEQ ID NO: 2087 - DNA, 406 bp, Zea mays
  Clone ID: LIB3061-039-Q1-K1-A4
ctggacgtcagcctagcaattagctcatcgactccagattggagaactcgacaccatgaaggtgctgatcgttgcccttgctctcctggcgctcgctgcgagcgccgcctccagtacaagcggcggctgtggctgccagacaccaccgtttcatctaccgcctccgttctatatgccgcctccgttctatctgccgccgcagcagcagccgcagccatggcaataccccactcaaccaccgcagctaagcccgtgccagcagttcggatcctgcggcgtcggcagcgtcggcagcccgttcctgggccagtgcgtcgagttcctgaggcaccagtgcagcccggcggcgacgccctacggctcgccacagtgccaggcgctgcagcagcagtgctgccaccagatc

SEQ ID NO: 2088 - DNA, 409 bp, Zea mays
  Clone ID: LIB3061-039-Q1-K1-A5
cgcgagaccgccggcgaatttgttgcagtgcactgaagccaacagctgcaggacaggaggaggaggaggagctgtttcaacaattatcccccgcgcgcccaggccagccccgcccccgcccgcccactctcccgaggattccaggttctcaacacaacagacaacaccgctcaccgcatatatatatatatagatgggttccgaggggccttctcccgtcaccgtccacgtcaccggattcaagaggttccatggagtcgccgagaacccgacggagaggatcgtgcgcggtctccagccattcatggagacgagagggttgcccaagggccttgttctcgggagctgcaccgtccttgaggccgccgggcagggcgcgcttggcccgctgtatgaactgctggagtcg

SEQ ID NO: 2089 - DNA, 447 bp, Zea mays
  Clone ID: LIB3061-039-Q1-K1-A6
attgtgagcattcagaaacacaccaagcgaagctacctagcaacgacttaacaacaatggctaccaagatattagccctccttgcgcttcttgccctttttgtgagcgcaacaaatgcgttcattattccacaatgctcacttgctcctagtgccattataccacagttcctccgaccagttacttcaatgggcttcgaacacctagctgtgcaagcctacaagctacaacaagcgcttgcggcgagcgtcttacaacaaccaattaaccaattgcaacaacaatccttggcacatctaaccatacaaaccatcgcaacacaacagcaacaacagttcctaccagcactgagccaactagatgtggtgaaccctgtcgcctacttgcaacagcaggtgcttgcatccaacccacttgctctggcaaacgtagctgcataccaacaac

SEQ ID NO: 2090 - DNA, 445 bp, Zea mays
  Clone ID: LIB3061-039-Q1-K1-A7
caggcaatcacagctggcatcttacctttatcacccttgttcctccaacaatcatcaggcctattacatcagttacctttggtgcatttattggcacaaaacatcagggcacaacaactacaacaacttgtgctagcaaaccttgctgcctactctcagcaacagcagtttcttccattcaaccaactagctgcattgaactctgcttcttatttgcaacaacaacaactaccattcagccagctacctgctgcctacccccagcaatttcttccattcaaccaactggcagcattgaactctcctgcttatttacagcagcaacaactactaccattcagccagctagctggtgtgagccctgctaccttcttgatacaaccacagttgttgccgttctaccagcacgctgcgcctaacgctggcaccctcttacaactgcaac

SEQ ID NO: 2091 - DNA, 360 bp, Zea mays
  Clone ID: LIB3061-039-Q1-K1-A8
cccacgcgtccgcccacgcgtccttaatcacacctagcgaagcgcactagcaacgacgtaacaacaatggcttccaagacattatccctccttgcgcttcttgccctttttgtgagtgcaacaaatgcgttcattattgcactttgctcacttgctccgagtgccattattccacagttcctccctccagttacttcaatgggcttcgaacacctagctgtgcaagcctataggctactacatgcgcttgcggcaagcgtcttataacttccaattgtccagttacaacaacaattcttggcactatgtatctatacataccatcgcaacgcagcagcaacaagcactttgcctcctatt

SEQ ID NO: 2092 - DNA, 447 bp, Zea mays
  unsure (1)..(447): unsure at all n locations; Clone ID: LIB3061-039-Q1-K1-B1
atcgctcgtaaccgcaagacaggaaagtccaagcactatggattcattgagtttgagaaccctgctgtggcaaaggtcgtagcagatgagatgaataactatctcttgtttgagcgcaccttgcaagttgcacttgttgagccagagaaagttcatcctaaattatggaaaggggtgcgaaggggatttatacctgttgatcgagtagcaattgaacggaagagacacaacaaggataagactgtagcagagcacaaaaagatggttgaaggaattgtaaagcgggatggaaagcgtcgcaaaagaatcaaggcagctggtattgactatgagtgtccagctcttatagggagcattcaaccatcagcgaaaaagatcaagttcgatgaggcatagtattttattctaatgggctgttggatccttagtagacgaggcngtggaatg

SEQ ID NO: 2093 - DNA, 223 bp, Zea mays
  Clone ID: LIB3061-039-Q1-K1-B10
cgaactagcaacatacatagtgaagtacactagcaacatcttagcaccaatggcagccaagatttttgccatccttgccctccttgctctttcagcaagcgttgctaccgcgactattattccacaatgctcacaacaatacctctctccggtgacagccgcgagatttgaatacccaactatacaatcctacaggctacaagaggccatcgcagcaagcatc

SEQ ID NO: 2094 - DNA, 442 bp, Zea mays
  unsure (1)..(442): unsure at all n locations; Clone ID: LIB3061-039-Q1-K1-B11
agcaaagcggcagtgcgtagagaggatcgtcgaacagaacagcatgaagatggtcatcgttctcgtcgtgtgcctggctctgtcagctgccagcgcctctgcaatgcagatgccctgcccctgcgcggggctgcagggcttgtacggcgctggcgccggcctgacgacgatgatgggcgccggcgggctgtacccctacgcggagtacctgaggcagccgcagtgcagcccgctggcggcggcgccctactacgccgggtgtgggcagccgagcgccatgttccagccgctccggcaacagtgctgccagcagcagatgaggatgatggacgtgcagtccgtcgcgcagcagctgcagatgatgatgcagcttgagcgtgccgctgccgncagcagcagcctgtacgagccagctctgatgcagcagcagcagcagctgctg

SEQ ID NO: 2095 - DNA, 289 bp, Zea mays
  unsure (1)..(289): unsure at all n locations; Clone ID: LIB3061-039-Q1-K1-B12
cggcagtaataaagctggcaagaatgagtctcactcatccncaattgatgcagcattgcccgataagcccaaggagaaagggaaacctcaaaagcaaccaccccactctcttccatcaaaagagatgaagaacagtcaaatggtgagagtgcaaagcctcgaaaaggtggaagcacgccatcatatgggttcaccttcaagtgtgatgagagatctgaaaaaagaccagagttctattcgaagcttgaagagaagattcatgcaagaaagttagaaataagcaatttgc

SEQ ID NO: 2096 - DNA, 417 bp, Zea mays
  Clone ID: LIB3061-039-Q1-K1-B2
ggttcgggttcgggttcgtgaggttctccggggttcggtttcgtgggtgagcggatcgagatggcggcgtcggatgttgagtaccgctgcttcgtcggcggcctcgcctgggccacggacgaccactccctccacaacgccttcagcacctacggcgaggtcctcgagtccaagatcatcctcgatcgggagacgcagaggtcccgcggcttcggcttcgtcaccttctccacggaggaggcgatgcggaacgccatcgagggcatgaacggcaaggagctggacggccgcaacatcaccgtcaacgaggcccagtcccgcggcggccgtggaggcggcggcggcggcgggtacggtggtggccgtggaggcggcggctacggcggtggcgggcgccgtgatggcggcggcggctac

SEQ ID NO: 2097 - DNA, 404 bp, Zea mays
  Clone ID: LIB3061-039-Q1-K1-B4
attttgagcattcagaaacacaccaagcgaagcgcactagcaacgacctaacaacaatggctaccaagatattagccctccttgcgcttcttgccctttttgtgagcgcaacaaatgcgttcattattccacaatgctcacttgctcctagtgccattattccacagttcctcccaccagttacttcaatgggcttcgaacacctagctgtgcaagccaacatgcaacaacaagcgcttgcggcgagcgtcttacaacaaccaattgcccaattgcaacaacaatccttgccacatctaacaatacaagccatcacaacgcaacagcaacaacagttcctaccagcactgagccacctagccatggtgaaccctgccgcctacttgcaagagcagctgcttgca

SEQ ID NO: 2098 - DNA, 451 bp, Zea mays
  Clone ID: LIB3061-039-Q1-K1-B5
caacaacaacaacaacaacaacagcaccaacaacaacatcaatgtgaaggccaacaacaacatcaccaacaatcacaaggccatgtgcaacaacacgaacagagccatgagcaacaccaaggacagagccatgagcaacaacatcaacaacaattccagggtcatgacaagcagcaacaaccacaacagcctcagcaatatcagcagggccaggaaaaatcacaacagcaacaatgtcattgccaggagcagcaacagactacaaggtgcagctataactactatagcagtagctcaaatctaaaaaattgtcatgaattcctaaggcagcagtgcagacctttggtaatgccttttctccaatcacgtttgatacaaccaagtagctgccaggtattgcagcaacaatgttgtcatgatcttaggcagattgagccacaatacatttacc

SEQ ID NO: 2099 - DNA, 468 bp, Zea mays
  Clone ID: LIB3061-039-Q1-K1-B6
cagggcacaacaactacaacaacttgtgctagcaaaccttgctgcctactctcagcaacagcagtttcttccatgcaaccaactagctgcattgaactctgcttcttatttgcaacaacaacaactaccattcagccagctacctgttgcctacccccaacaatttcttccattcaaccaactggcagcattgaactctcctgcttatttacagcagcaacaactactaccattcagccagctagctggtgtgagccctgctaccttcttgacacaaccacagttgttgccgttctaccagcacgctgcgcctaacgctggcaccctcttacaactgcaacaattgctgccattcaaccaacttgctttgacaaacctagcagtgttctaccaacaacccatcattggtggtgccctcttttagatttcttatgagttatagttcaataataaagttttttggctgat

SEQ ID NO: 2100 - DNA, 446 bp, Zea mays
  Clone ID: LIB3061-039-Q1-K1-B7
cccatacctctcaccagcggtgtcttcagtatgtgaaaacccaattcttcaaccctacaggatccaacaggcaatcgcagcaggcatcttacctttatcacccttgttcctccaacaaccgtcagccctattacagcagttacctttggtgcatttgttggcacaaaacatcaaggcacaacaactacaacaacttgtgctaggaaaccttgctgcctactctcagcaacagcagtttcttccattcaaccaactggctgcattgaactctgctgcttatttgcaacaacaactaccattcagtcagctagctgctgcctacccccagcaatttcttccattcaaccaactggcagcattgaactctgctgcttatttacaacagcaacagctaccaccattcagccagctagctgatgtgagccctggtgccttcttgacacaac

SEQ ID NO: 2101 - DNA, 435 bp, Zea mays
  Clone ID: LIB3061-039-Q1-K1-A3
ctcacgtgtcagctctggatgtgaactcaaggactccgtgatgatgggagcggacatctatgaaactgaagaagaagcttcaaagctactgttagctgggaaggtcccagttggaataggaaggaacacaaagataaggaactgtatcattgacatgaatgctaggattgggaagaacgtggtgatcacaaacagtaagggcatccaagaggctgatcacccggaagaagggtactacataaggtctggaatcgtggtgatcctgaagaatgcaaccatcaacgatgggtctgtcatatagatcggctgcgtttgcgtctacaaaacaagaacctacaatggtattgcatcgatggatcgtgtaaccttggtatggtaagagccgcttgacaggaagtcgagcgttcgggcgcaagatgcgtaatctggcatgct

SEQ ID NO: 2102 - DNA, 437 bp, Zea mays
  Clone ID: LIB3061-021-Q1-K1-E2
cagatcagcaaagcggcagtgcgtagagaggatcgtcgaacagaacagcatgaagatggtcatcgttctcgtcgtgtgcctggctctgtcagctgccagcgcctctgcaatgcagatgccctgcccctgcgcggggctgcagggcttgtacggcgctggcgccggcctgacgacgatgatgggcgccggcgggctgtacccctacgcggagtacctgaggcagccgcagtgcagcccgctggcggcggcgccctactacgccgggtgtgggcagccgagcgccatgttccagccgctccggcaacagtgctgccagcagcagatgaggatgatggacgtgcagtccgtcgcgcagcagctgcagatgatgatgcagcttgagcgtgccgctgccgccagcagcagcctgtacgagccagctctgatgcagcagcagc

SEQ ID NO: 2103 - DNA, 437 bp, Zea mays
  Clone ID: LIB3061-021-Q1-K1-E3
tgagcattcagaaacacaccaagtctaagcgcactagcaacaacctaacaacaatggctaccaagatattatccctccttgcgcttcttgcgctttttgcgagcgcaacaaatgcgtccattattccacaatgctcacttgctcctagttccattattccacagttcctcccaccagttacttcaatggccttctgaacacccagctgtgcaagcctataggctacaacaagcgattgcggcgagcgtcttacaacaaccaattgcccaattgcaacaacaatccttggcacatctaacaatacaaaccatcgcaacgcaacagcaacaacagttcctaccagcactgagccacctagccatggtgaaccctgtcgcctacttgcaacagcagctgcttgcattcaacccacttgctctagcaaacgtagttgcaaa

SEQ ID NO: 2104 - DNA, 436 bp, Zea mays
  Clone ID: LIB3061-021-Q1-K1-E4
ctagcaacatagaaagcacaatagtgtaccaacaatggcagccaaaatattttgcctccttatgctccttggtctttctgcaagtgctgctacggcgaccattttcccgcaatgctcgcaagctcctatagcttcccttcttcccccgtacctctcaccagcggtgtcttcggtatgtgaaaacccaattcttcaaccctacaggatccaacaggcaatcacagctggcatcttacctttatcacccttgttcctccaacaatcatcagccctattacatcagttacctttggtgcatttattggcacaaaacatcagggcacaacaactacaacaacttgtgctagcaaaccttgctgcctactctcagcaacagcagtttcttccattcaaccaactagctgcattgaactctgcttcttatttgcaacaacaa

SEQ ID NO: 2105 - DNA, 348 bp, Zea mays
  Clone ID: LIB3061-021-Q1-K1-E5
tgcagaacgtactgagcaagaaggtggatgtgtcgttcgagaagagttagattgagaaactccaaaaggaaattgacagtgataactcgtctgccgtgcaacttcagtatgagcttgaagtgtagaggaaggcatcatctatggcaaggtcttgagcagacgacgaagcccaaaaggtacggcagcatgcactcgcccttgaggaggcctggaatcaatgggagcgtcaaggaatcagagatgatgtagaaggataactgactgatgactactcacctcgcgtgacatgggcttacgctggcatataacacgcataccacgagtctatcaaccgatcggaagctctgc

SEQ ID NO: 2106 - DNA, 419 bp, Zea mays
  unsure (1)..(419): unsure at all n locations; Clone ID: LIB3061-021-Q1-K1-E6
aaagcttacaccaagggggcattgcttgttgaagttcctgcaaatagtgttggctctaatctggattcggcgccattggctgcagaaaaaactgactccattgaccttgcatgtccattgtgtcgtggcaaggtgaaagggtggacggtggtggaaccagctcgaagctacctcaatggaaaacgaagaacatgcatgcaggatggttgctcatttgtggtgacctacaaggagctccgcaagcatgtcaagttggaacaccctcttgcaaagccaagggaagttgatcctgtccttgagcaaaaatggagattgctcgagattganagagagctgcaagatgcgctcagcacgatcacggcaacaatgggcagagcccgtgtttttcgtgattatgtgctagacttggacgatggaat

SEQ ID NO: 2107 - DNA, 302 bp, Zea mays
  Clone ID: LIB3061-021-Q1-K1-E7
cttgcaacaacaacaattgctgccattctacccacaggatgtggcaaacattgtcgccttcttacaacaacagcaattgctgccatttagccaactcgctttgacgaatcctaccaccttattgcatcagcccaccattggtggtaccatcttctagattttttatgctttatactgtaataataaatttctcatactgatatgtgcaacttctcagtaataaaagattagagatctataaaaaaaacgaaaaaaaacaaacaaaagaccaaaagcaacaacaaaacaaggcacatctaaca

SEQ ID NO: 2108 - DNA, 391 bp, Zea mays
  Clone ID: LIB3061-021-Q1-K1-E8
gcgagctttgacattagagaggagccaattaaaagacgccatgggatttgccttggataatgctgatgcagctggcgagattgttgaagttcttacagaatccttgacactcaaggagacgtctattccaacataggttgctcggcttatgctagcgtctgacatccttcataacagtagcgctcctgtgaagaacgcatctgcattccgaacgaaatttgaagcttctttgccagatgctatggagagctttaatgacttgtatcgcagtatcactgggaggattactgctgaagcccttgaagagagggttatgatagttctacaagtttgtgcagactggttcctggtttctgatgcatttcttaatgggctgagggctacttttctt

SEQ ID NO: 2109 - DNA, 434 bp, Zea mays
  Clone ID: LIB3061-021-Q1-K1-F1
gtgaataacctatccaaaggcttagaagaacaaacaacacatgttcatggtagtaaggaagctagcctaaaatctggttcaaaccttgcatgcaacactcatgatgggataaatgaccactctggcacactaaagttgcaatcagctgggcaaagcacattgcttgaagtggatgagtacagtgaactgggaaacctttcctcagaagtatcagcaatatatcttgctatgcagcagtctaagttggagtgcattgatgaacagagtcaagattctacctcaacagaaggttatggtgaagctgaggagactgaagagtatgatgattttgacccctactcctttatcaaagatttacctgatttatctatggtggtccccaaatttcgtcctgttctccttccaaagcagacccggagttgtcctactatgac

SEQ ID NO: 2110 - DNA, 434 bp, Zea mays
  Clone ID: LIB3061-021-Q1-K1-F10
gctgtggtgaaccctgtcgcctacttgcaacagcagttgcttgcatccaacccacttgctctggcaaacatagttgcataccaacaacaacaacaattgcaacagtttctaccagcgctcagtcaactagccatggtgaaccctgccgcctacctacaacagcaacaactgatttcatctagccctctcgctgtggttaatgcacctacatacctgcaacaacagttgctgcaacagattgtaccagctctgactcagctagctgtggcaaaccctgctgcctacttgcaacagctgcttccattcaaccaactgactgtgtcgaactctgctgcgtacctacaacagcgacaacagttacttaatccactagcggtggctaacccattggtcgctgccttcctacagcagcaacaattgctgccatacaacca

SEQ ID NO: 2111 - DNA, 438 bp, Zea mays
  Clone ID: LIB3061-021-Q1-K1-F11
acaggatccaacaggcaatcgcaacaggcatcttaccattatcacccttgttcctccaacaaccgtcagccctattacagcagttacctttggtccatttggtggcacaaaacatcagggcacaacaactacaacaacttgtgctagcaaaccttgctgcatactctcagcaacatcagtttcttccattcaaccaactggctgcattgaactctgctgcttatttgcaacaacaattaccattcagccagctagttgctgcctacccccagcaatttcttccattcaaccaactagcagcattgaactctgctgcttatttacagcagcaacaactactaccattcagccagctagctgatgtgagccctgctgccttcttgacacaacaacagttgttgccgttctacctgcacgctatgcctaacgctggcaccc

SEQ ID NO: 2112 - DNA, 437 bp, Zea mays
  Clone ID: LIB3061-021-Q1-K1-F12
agcaacatagaaagcacaatagtgtaccaacaatggcagctaaaatattttgcctccttatgctccttggtctttctgcaagtgctgctacggcgaccattttcccacaatgctcacaagctcctatagcttcccttcttcccccgtacctctcaccaacggtgtcttcggtatgtgaaaacccaattcttcaaccctacaggatccaacaggcaatcgcagctggcatcttacctttatcacccttgttcctccaacaatcatcagccctattacagcagttacctttggtgcatttattggcacaaaacatcagggcacaacaactacaacaacttgtgctagcaaaccttgctgcctactctcagcaacagcagtttcttccattcaaccaactagctgcattgaactctgcttcttatttgcaacaacaacaa

SEQ ID NO: 2113 - DNA, 434 bp, Zea mays
  Clone ID: LIB3061-021-Q1-K1-F2
gcaacatagaaagcacaatagtgtaccaacaatggcagccaaaatattttgcctccttatgctccttggtctttctgcaagtgctgctacggcgaccattttcccgcaatgctcgcaagctcctatagcttcccttcttcccccgtacctctcaccagcggtgtcttcggtatgtgaaaacccaattcttcaaccctacaggatccaacaggcaatcacagctggcatcttacctttatcacccttgttcctccaacaatcatcagccctattacatcagttacctttggtgcatttattggcacaaaacatcagggcacaacaactacaacaacttgtgctagcaaaccttgctgcctactctcagcaacagcagtttcttccattcaaccaactagctgcattgaactctgcttcttatttgcaacaacaac

SEQ ID NO: 2114 - DNA, 452 bp, Zea mays
  Clone ID: LIB3061-021-Q1-K1-F3
cattgagaccaactagcaacatagaaagcacaatattgtaccaataatggcagccaaaatattttgcctcattatgctccttggtctttctgcaagtgctgctacggcgagcattttcccgcaatgctcacaagctcctatagcttcccttcttcccccatacctctcaccagcgatgtcttcagtatgtgaaaatccaattcttctaccctacaggatccaacaggcaatcgcagcaggcatcttacctttatcacccttgttcctccaacaatcatcagccctattacagcagttacctttggtgcatttattggcacaaaacatcaaggcacaacaactacaacaactcgtgctagcaaaccttgctgcctactctcagcaacagcagttacctttggtgcatttgttggcacaaaacatcagggcacaacaactacaacaactcgtgc

SEQ ID NO: 2115 - DNA, 209 bp, Zea mays
  Clone ID: LIB3061-021-Q1-K1-F4
gagagagatggatagaggagatttcccatatatcatgaatcagtagtagggcggaatggcagcggagacgccacacattatcatgtgtggtatgaccaataatatatgcatggtcataataaagttttggttttaatgaatcaaaaaaaaaaaaaaaaaaaaaagaaaaataaaaaaaaataaaaaacaaaaaaaaaaacatacaagaa

SEQ ID NO: 2116 - DNA, 433 bp, Zea mays
  Clone ID: LIB3061-021-Q1-K1-F6
aggccatcgcagcaagcatcttacggtcgttagcattgaccgtccaacaaccatatgccctattgcaacaaccatccttaatgaatctatatctccaaagaatcgcagcacaacaactacaacaacagttgcttccaacaatcaatcaagtagttgcagcgaaccttgctgcttacctccagcaacaacaatttcttccattcaatcaactagctggggtgaaccctgctgcttacttgcaggcacaacagctactaccattcaaccaacttgtcaggagccctgctgccttcttactgcagcaacagttgcttccattccatctacaagttgtggcaaacattgctgctttcttgcaacaacaacaacaattgctgccattttacccacaggttgtgggaaacattaacgcctacctacaacagcaacaact

SEQ ID NO: 2117 - DNA, 432 bp, Zea mays
  Clone ID: LIB3061-021-Q1-K1-E12
gaaagcacaatagtgtaccaacaatggcagccaaaatattttgcctccttatgctccttggtctttctgcaagtgctgctacggcgaccattttcccgcaatgctcgcaagctcctatagcttcccttcttcccccgtacctctcaccagcggtgtcttcggtatgtgaaaacccaattcttcaaccctacaggatccaacaggcaatcgcagctggcatcttacctttatcacccttgttcctccaacaatcatcagccctattacaacagttacctttggtgcatttattggcacaaaacatcagggcacaacaactacaacaacttgtgctagcaaaccttgctgcctactctcagcaacagcagtttcttccattcaaccaactaggttcattgaactctgcttcttatttgcaacaacaacaactac

SEQ ID NO: 2118 - DNA, 368 bp, Zea mays
  Clone ID: LIB3061-021-Q1-K1-C8
gctgccaccagatcaggcaggtggagcctctgcaccggtaccaggcgacatacggtgtggtcctgcagtccttcctgcagcagcagccgcagggcgagctcgcggcgctgatggcggcccaggtagcgcagcagctgacggcgatgtgcggcctgcagctgcagcagccaggtccctgcccttgaacgcagctgccggcggtgtctactactgaagaaactatgtactgtagtaataatgtaatggagccgctgactagctacctagctagctagttgagtcatttagcggcgatgattgagtaataatgtgtcacgcatcaccatgggtggcagagtcagtgtgagcaatgacctgaatgaacaatt

SEQ ID NO: 2119 - DNA, 404 bp, Zea mays
  Clone ID: LIB3061-021-Q1-K1-D10
cgcaaattgcaccaagaaatccatcgagaggccgtcgacaggggaattaatggcgtcgtcgtctagcagcagccaccgccgcctcatcctcgcagccgccgtcctgctctccgtgctcgcggctgccagcgccagcgccgggacctcctgcgtgccggggtgggccatcccgcacaacccgctcccgagctgccgctggtacgtgaccagccggacctgcggcatcgggccgagcctcccgtggccggagctgaagaggagatgctgccgggagctggcggacatcccggcgtactgccggtgcacggcgctgagcatgctcatggacggcgcgatcccgccgggcccggacgcgcagctggagggccgcctagaggacctgccgggctgcccgcgggaggtgc

SEQ ID NO: 2120 - DNA, 401 bp, Zea mays
  Clone ID: LIB3061-021-Q1-K1-D11
attttgagcattcagaaacacaccaagctaagctacctagcaacgacttaacaacaatggctaccaagatattagccctccttgcgcttcttgccctttttgtgagcgcaacaaatgcgttcattattccacaatgctcacttgctcctagtgccattataccacagttcctccgaccagttacttcaatgggcttcgaacacctagctgtgcaagcctacaggctacaacaagcgcttgcggcgagcgtcttacaacaaccaattaaccaattgcaacaacaatccttggcacatctaaccatacaaaccatcgcaacacaacagcaacaacagttcctaccagcactgagccaactagatgtggtgaaccctgtcgcctacttgcaacagcaggtgctt

SEQ ID NO: 2121 - DNA, 414 bp, Zea mays
  Clone ID: LIB3061-021-Q1-K1-D12
cttcctttcttcccccatacctctcaccagcggtgtcttcagtatgtgaaaacccaattcttcaaccctacaggatccaacaggcaatcgcagcaggcatcttacctttatcacccttgttcctccaacaaccgtcagccctattacagcagttacctttggtgcatttgttggcacaaaacatcaaggcacaacaactacaacaacttgtgctaggaaaccttgctgcctactctcagcaacagcagtttcttccattcaaccaactggctgcattgaactctgctgcttatttgcaacaacaactaccattcagtcagctagctgctgcctacccccagcaatttcttccattcaaccaactggcagcattgaactctgctgcttatttacaacagcaacagctaccaccat

SEQ ID NO: 2122 - DNA, 436 bp, Zea mays
  Clone ID: LIB3061-021-Q1-K1-D4
aatgaggttgagttcaagacagcttcaggtcagctgctggaccttatcactacccatgagggagaaaaagatctaacaaagtataacataacagttcacggtcgaattgttcaatacaagacagcctattattcattttatctgccggttgcatgtgccctgctgctctctggcgagaatttggacaattatggtgatgtagagaacatccttgttgaaatgggaacatactttcaagtccaggatgactatctggattgttatggtgatcctgaatttatcggcaagattggaacggacattgaagattacaagtgctcatggctagttgtgcaagcccttgagcgtgctgatgagagccaaaagcgcattctatttgaaaattatggcaagaaagatccagcctgtgtggcaaaagtgaagaacctctacaaag

SEQ ID NO: 2123 - DNA, 423 bp, Zea mays
  Clone ID: LIB3061-021-Q1-K1-D5
gaaagcacaatagtgtaccaacaatggcagccaaaatattttgcctccttatgctccttggtctttctgcaagtgctgctacggcgaccattttcccgcaatgctcgcaagctcctatagcttcccttcttcccccgtacctctcaccagcggtgtcttcggtatgtgaaaacccaattcttcaaccctacaggatccaacaggcaatcgcagctggcatcttacctttatcacccttgttcctccaacaatcatcagccctattacaacagttacctttggtgcatttattggcacaaaacatcagggcacaacaactacaacaacttgtgctagcaaaccttgctgcctactcttaacaacagcagtttcttccattcaaccaactaggttcattgaactctgcttcctatttgcaacaac

SEQ ID NO: 2124 - DNA, 380 bp, Zea mays
  Clone ID: LIB3061-021-Q1-K1-D6
catcaagcaacatagaaagtggcatactttagcatcaatagagcaacaatggcggccatggaatattccatccttacgttcagagctctttctgcatgtgttgctaacgcgaccatcatatctcattacttacaagctactatagctgccctttttgcggcatccttacattaatgaccgcttcagtttgcgagatcccatgcatttaaccgtacaggctccaacacgtctatctagcacgccatgttacctgtatgacctgtgtggtttcaatcaatggcagccttatatctggtgcatgtcattgatacagaccatcacggcacaccagctgcatcaactcgtgctaccagtgatcagccaagtagctctggcaaacc

SEQ ID NO: 2125 - DNA, 365 bp, Zea mays
  Clone ID: LIB3061-021-Q1-K1-D7
aattcccgggctgccaaaacactgacttgtgtctgatgaacttagatgtttacattgatgatgaaaagttgcgtgaaatcggtggtgtgtatggcaatattacttgttgcaaggttatgctggattcgtatggtgtcagcagacgttctggatacggtgcattcagatctgctgtagatgctaaccgagctcttaccgagatgaatggcacaatggttggaagcaagcccctttatgtcgctcttgcacagcctagcgatgacacacatgcaaagctacgggcacagagttcacaaatgcgtcctgttgcagtggcaccttcagtaggttctcgcatgcccatgtttacacctagtgttcctgga

SEQ ID NO: 2126 - DNA, 353 bp, Zea mays
  Clone ID: LIB3061-021-Q1-K1-D8
aatagcaacacatatagcacagtcagacatcaacattggcgcccaaaatattgtgcctctgtatgctcttcgatatgcttgcaagtgatgctactgcgaccatgatgacgaaatgctcacaagctactatagctacaattcttgccaaggacctctgacgagcgatgacttcggtaggcgaaaacgcaattcttgaatgctacaggatacaacaggcgatcgcaacaggcatcttagatttatcacgctcgatgctgcaacaatcatcagccatatcacagcagatgcactatcgagcatatattgacgcaaaacatcaggacacaacaactacaacaacttatgctagcaaa

SEQ ID NO: 2127 - DNA, 386 bp, Zea mays
  Clone ID: LIB3061-021-Q1-K1-D9
gggttcgtgaggttctccggggttcggtttcgtgggtgagcggatcgagatggcggcgtcggatgttgagtaccgctgcttcgtcggcggcctcgcctgggccacggacgaccactccctccacaacgccttcagcacctacggcgaggtcctcgagtccaagatcatcctcgatcgggagacgcagaggtcccgcggcttcggcttcgtcaccttttccacggaggaggcgatgcggaacgccatcgagggcatgaacggcaaggagctggacggccgcaacatcaccgtcaacgaggcccagtcccgcggcggccgcggaggcggcggcggcggcgggtacagtggtggccgtggaggcggcggctacggcggtggcgggcgcc

SEQ ID NO: 2128 - DNA, 434 bp, Zea mays
  Clone ID: LIB3061-021-Q1-K1-E1
gttccaaaacactaacttgtatctgaagaacttagatgataacattgatgatgaaaagttgcgtgaaatctttgctgagtatggcaatattacttcttgcaaggttatgcgggattcttatggtgttagcagagggtctggatttgttgcattcaaatctgctgaagatgctaaccgagctcttaccgagatgaatggcaaaatggttggaagcaagcccctttatgtagctcttgcacagcgtaaagatgacagaaaggcaaagctacaggcacagttttcacaaatgcgtcctgttgcaatggcaccttcagtaggtcctcgcatgcccatgttttcacctagtgttcctggagttggtcagcagctgttttatggtcagccaccttcagccttcattaacccttaggctggatttgctttccagcaaccta

SEQ ID NO: 2129 - DNA, 428 bp, Zea mays
  Clone ID: LIB3061-021-Q1-K1-E10
attagcggctacacaaatgcctgaagagccagctggatggttccagggtacagcagactctatcagaaaatttatctgggtactcgaggattattacagtcacaaatccattgacaacattgtaatcttgagtggcgatcagctttatcggatgaattacatggaacttgtgcagaaacatgtcgaggacgatgctgatatcactatatcatgtgctcctgttgatgagagccgagcttctaaaaatgggctagtgaagattgatcatactggacgtgtacttcaattctttgaaaaaccaaagggtgctgatttgaattctatgagagttgagaccaacttcctgagctatgctatagatgatgcacagaaatatccataccttgcatcaatgggcatttatgtcttcaagaaagatgcacttttag

SEQ ID NO: 2130 - DNA, 420 bp, Zea mays
  unsure (1)..(420): unsure at all n locations; Clone ID: LIB3061-021-Q1-K1-E11
caatcgcagcaagcaacatacctttatcgcccttgttgtttcaacaatcaccagccctatctttggtgcagtcattggtacaaaccatcagggcacaacagctgcagcaactcgtgctacctgtgatcaaccaagtagctctggcaaacctttctccctactctcagcaacaacaatttcttccattcaaccaactgtctacactgaaccctgctgcttatttgcagcaacaactattaccatttagccagctagctactgcctactctcagcaacaacaacttcttccatttaaccaattggccgcactgaaccccgctgcttatttgcagcagcaaatactactgccatttagcgagctagctgcagcaagtcgtgcttncttcttgacacagcaacagttgctgcctttctacaagc

SEQ ID NO: 2131 - DNA, 435 bp, Zea mays
  Clone ID: LIB3061-021-Q1-K1-B3
gcaacatagaaagtagaatccattagcatcaatagagcaacaatggcgaccaagatattttccctccttatgctccttgctctttctacatgtgttgctaacgcgacaattttccctcaatgctcacaagctcctatagcttcccttcttcccccataccttccatcaattatagcttcagtatgtgaaaacccagctcttcaaccatataggcttcaacaagcaatcgcagcaagcaacatacctttatcgcccttgttgtttcaacaatcaccagccctatctttggtgcagtcattggtacaaaccatcagggcacaacagctgcagcaactcgtgctacctgtgatcaaccaagtagctctggcaaacctttctccctactctcagcaacaacaatttcttccattcaaccaactgtctacactgaaccct

SEQ ID NO: 2132 - DNA, 431 bp, Zea mays
  Clone ID: LIB3061-021-Q1-K1-B4
ctagcaacatagaaagcacaatagtgtaccaacaatggcagccaaaatattttgcttccttatgctccttggtctttctgcaagtgttgctaccgcaaccattttcccacaatgctcacaagctcctatagcttcccttcttcccccatacctctcaccagcggtgtcttcaatgtgtgaaaccccaattgttcaaccctacaggatccaacaggcaatcgcaacaggcatcttaccattatcacccttgttcctccaacaaccgtcagccctattacagcagttacctttggtccatttggtggcacaaaacatcagggcacaacaactacaacaacttgtgctagcaaaccttgctgcatactctcagcaacatcaggttcttccattcaaccaactggctgcattgaactctgctgcttatttgcaac

SEQ ID NO: 2133 - DNA, 382 bp, Zea mays
  Clone ID: LIB3061-021-Q1-K1-B5
ccgacccacgcgtgcggaagcaccatctgttgttgctccagtggtcgaaattatgcccctgcaagacatcaacagcgatgaaaatgctttggtgaatgatgtggaagagagatccaaagaagaacatccttgtactgagagcctgaaaggcagcaagaggaggtcttcattctcagctaagcctgaatatccagaaaatggctccaaaaattctccagctctgccaagctacatggctgctacacaatcagcaaaggcgaaactgcggtgaaatagctcaccaaaacttagctctgattcagcagagaaaaacggcttcactcgtcgtcactcccttccatcctctaacaacggtaagatgggttcacattctccacgtaca

SEQ ID NO: 2134 - DNA, 420 bp, Zea mays
  Clone ID: LIB3061-021-Q1-K1-B6
cggacgcgtgggtagagaggctagtaggtggtcctcgaacgaagatgttggcggtgttcagcgggcaggtggtggaggtgccggcggagctggtggcggcgggcagccggacgccgtcgcccaagacgaaggcgtcgcagctcgtggggcgcttcctggccgcgtccgagccggccgtgtccgtgcagctcggcgaccacggccacctcgcctactcccacaccaaccaggcgctcctccgccccaggtcgttcgcggccaaggacgaggtgttctgcctgttcgaaggggtgctggacaacctgggtcggctgagccagcagcacgggctgtcaagcaagggcgccaacgaggtgctcctcgtcatcgaggcctacaagacgctgcgcgaccgcgcgccctacccggccagcttcatgc

SEQ ID NO: 2135 - DNA, 428 bp, Zea mays
  Clone ID: LIB3061-021-Q1-K1-B7
caatcatcattcatcttagtagtataggtaccaaatcaaatctgcaacatcaattatctaactccaaaaaccatgaagctggtgcttgtggttcttgctttcattgctttagtatcaagtgtttcttgtacacagacaggcggctgcagctgtggtcaacaacaaagccatgagcagcaacatcatccacaacaacatcatccacaaaaacaacaacatcaaccaccaccacaacatcaccagcagcagcaacaccaacaacaacaagttcacatgcaaccacaaaaacatcagcaacaacaagaagttcatgttcaacaacaacaacaacaaccgcagtaccaacaacaacaacaaccacaacagcaccaaacacaacattaatgtgaaagcaacatacacataaccaacaatcacaaggccatgtg

SEQ ID NO: 2136 - DNA, 428 bp, Zea mays
  Clone ID: LIB3061-021-Q1-K1-B8
tccagatatccttgtaaggtgtgaagagttggaaagggaggaagggcttcgtctggaagaacaagctgcagaagatgctttccagattgatggtcatgaactaactcaggaacagaaggagattttggctcagattatgaagaagaaggcattacttatccaagagcatagaatgaagaagagaactgcagaaagccgtcctattgtccctagaaagtttgacaccagataggaaattcacaactgataggatgggacgccagctatcatccatgggtatggatcctagtgctgccatgaatagaattcgcagtcagtctaggggtcgcaagcgtgagaggtcagtgagcagagctgcagcggatggtgacggtatggagatagatggccagcaaagcaacaagaaattgcgtcggacatcaaggtct

SEQ ID NO: 2137 - DNA, 430 bp, Zea mays
  Clone ID: LIB3061-021-Q1-K1-B9
tcggaaagtagaatccattagcaactatagatcaacaatggcgaccaagatattttggctgcttatgctccttgctcttactacatgcgtcgctaacgcgacaatcatctctcaaggctctcaagctcagtatagctttccatttaaccaaataccatccatcgaactctgctgctgattgacagcaccaacaactactaccattcaggctgctagctgctgtgagccctggtgacttattgacacaacaacagttgttgccgctctaactggacgctatgcctaacgctggcacgctactacaactgcaacaactgctgccagttaaccaacttgctttgacaaaccccacagtggtctaccaacaacccatcattggaggtgccctctattagattgcttatgaggtatagctcaataatgaaagttt

SEQ ID NO: 2138 - DNA, 333 bp, Zea mays
  Clone ID: LIB3061-021-Q1-K1-C1
acgggcggccctggctgactgcgcgctgcttttctggttcggcgactgccggcgctgactcgacgaggcagctgtgaccgacgtgggcctcgctgtcagcctacccgttccggatcctgtagcacgtgcccttcagcttcgaccgggacgacgtggccatggtctgcatggcacgcgtggactggcgcgagacccccgacgcgcacgagatcgtggtcgacgtgcccaggatagcgcacggaggacctcaggatcgaggattacgacaacatggtgctgcgcgttagcagctagcggccgagcgcttaagagcgcaagggcgaccaatggcac

SEQ ID NO: 2139 - DNA, 422 bp, Zea mays
  unsure (1)..(422): unsure at all n locations; Clone ID: LIB3061-021-Q1-K1-C10
gacaagcagcaacaaccacaacagcctcagcaatatcagcagggccaggaaaaatcacagcagcaacaatgtcattgccaggagcagcaacagactacaaggtgcagctataactactatagcagtagctcaaatctaaaaaattgtcatgaattcctaaggcagcagtgcagccctttggtaatgccttttctccaatcacgtttgatacaaccaagtagctgccaggtattgcagcaacaatgttgtcatgatcttaggcagattgagccacaatacattcaccaagcaatctacaacatggttcaatccataatccaggaggagcaacaacaacaaccatgtgagttatgtggatctcaacaagctactcanagtgcggtggcaatctagacagcagcacaatacctaccatcaatgtg

SEQ ID NO: 2140 - DNA, 422 bp, Zea mays
  unsure (1)..(422): unsure at all n locations; Clone ID: LIB3061-021-Q1-K1-C11
agctgatgtggggcaagcctcatgccccaaagcctgaggaggatgagtctgggaggctggggcaggtttcccacggagggctgctccctagggctgtcatatctcagcagcagagcggtgaccagcctcagccccccgggatggagggccaacagcaacaggctgcaccagcatcgtactacttcaacattccagcaccaccagcaacggagcggactgtgtatccatccatggatccacagaggatgggtgctatagtaaaaccacatgacagtgaaggcaaaccatggccgcagcaagccgggcaagctcatgcatcaagcaacccagcacaagggggcggctatcctgcaccaccgncatactaccatggtcagtatccaccatactatccacccncaccaccatacggtggctacatg

SEQ ID NO: 2141 - DNA, 387 bp, Zea mays
  Clone ID: LIB3061-021-Q1-K1-C12
atggacgtcagcctagcaattagctcatagactccagataggagaactcgacaccatgaaggcgctgatcgttgcccttgctctcctggcgctcgctgcgagcgccgcctccaatacaagcggaggctgtggctgccagacaccaccgtcacatctaccgcctccgatctatatgccgcctccgttctatctgacgacgcagcagcagccacagccatggcaataccccactcaaccaccgcagctaagcccgtgccagcagctcggatcctgcggcgtcagcagcagtcggcagaccgttcctgggccagtgcgtcaagttcctgaggcaccagtgcagcccggatgcgacgccatacggctagtcacagtgccaggcgctgcaat

SEQ ID NO: 2142 - DNA, 364 bp, Zea mays
  unsure (1)..(364): unsure at all n locations; Clone ID: LIB3061-021-Q1-K1-C2
cgcacaagcagggacaaggaagtgcaccggcggcgtcgccatcgatcgagtagatactagatagtgtgtcaggttgctgtcagctagagccatggcgtccatgcagaagagccgcgagcagcgcgcccaggccgcggcgcagaaggcggccgacgagctccacgcgtcgaggcaggacagagtccccgaggaggcgcccgtcagcccccgcggcggcggcggcatcctgggcagcctgcaggaggggaaggcgaacgccaggggcgtggcggacgccgccatgggcaaggccagcgagacgaaggacgcggcggcggacaaggcgggtggcgtcagggaccgcgcngcggacaggacggggaat

SEQ ID NO: 2143 - DNA, 466 bp, Zea mays
  Clone ID: LIB3061-021-Q1-K1-C3
gaatacccgggaacacaccaagcgaagcacattagcaacaacctaacaacaatggttaccaagatattatccctccttgcgcttcttgcgctttttgcgagcgcaacaaatgcgttcattattccacaatgctcacttgctccaagttccattattacacagttcctcccaccagttacttcaatgggcttcgaacacccagctgtgcaagcctataggctacaacaagcaattgcggcgagcgtcttacaacaaccaatttcccagttgcaacaacaatccttggcacatctaacaatacaaaccatcgcaacgcaacagcaacaacaattcctaccagcactgagccaactagccatggtgaaccctgccgcctacttgcaacagcagttgcttgcataaaaccaacttgctctggcaaacgtagttgcaaaccagccacaacaacagctgcaacagtttttgc

SEQ ID NO: 2144 - DNA, 434 bp, Zea mays
  unsure (1)..(434): unsure at all n locations; Clone ID: LIB3061-021-Q1-K1-C4
cacaagtttcgtgggtagaggaggcactagatactgtgccagatcggggtctggtagtggcagttgggtgattacgacggagtgggatgggcctcctcgacaagctgtgggacgacaccgtcgcgggcccgcgcccggacaccggcctcggccgcctccgcaagcagcccgcgcgccccgccgccgttaagatcagtgatccggccggggacgctgcagcgctcgtgccgccctcgccggcttcgggtagcgaggagacgccggtgaaggtgacgcgcagcatcatgatcaagcgtcccgcggggtacccgtcttcgccgaggagcgcggcaagcacgccgncggcctctccactagggactaccccgcccatctcgccgtttgccggcgctggtggtcgcttcagaaagaaatcatcatccgacgcatatgag

SEQ ID NO: 2145 - DNA, 162 bp, Zea mays
  Clone ID: LIB3061-021-Q1-K1-C5
agaaactatgtgctgtagtatagccgctggctagctagctagttgagtcatttagcggcgatgattgagtaataatgtgtcacgcatcaccatgggtggcagtgtcagtgtgagcaatgacctgaatgaacaattgaaatgaaaagaaaaaagtattgttcc

SEQ ID NO: 2146 - DNA, 210 bp, Zea mays
  unsure (1)..(210): unsure at all n locations; Clone ID: LIB3061-021-Q1-K1-C6
agcgcattcgcgtacgtcaacggacgtctaacccatcgcccatgggaggagggcacgaggagcaggatggtggcggcgcataggccgggggctactcctncggtctcccgccgtcggacccgccgcaggagtccgggtaccgcacgttccagggccctcggcatcctcccgtcgggttcccgcagcctgccccggctcccgggttcggcg

SEQ ID NO: 2147 - DNA, 432 bp, Zea mays
  Clone ID: LIB3061-021-Q1-K1-B2
ccgctttaatttctttcctcggtccctccaccccccttcgccctttccgacgcgccgcccgaaaccctagccccactgattctctccagcccagcccagccaaggggaggggatgtcggcggcgccagcggcgggagggcagggtggcgggggcattgacgccgcgctcctcgacgacatcatccgccgcctgctcgaggtgcggaccgcgcgcccagggaagcaggtgcagctctctgagtcggagatccgccagctgtgcaccgtctcccgcgccatcttcctcagccagcccaacctcctcgagctcgaggcgcccatcaagatctgcggtgacatccatggtcaatacagtgatcttctaaggctttttgaatatggaagttttcctcctgaagccaattatctattcttaggtgattatgttgatcg

SEQ ID NO: 2148 - DNA, 421 bp, Zea mays
  Clone ID: LIB3061-038-Q1-K1-G8
agcccatgtaagagtgtgcctgcaaaatattctagcactgacaagagacgcttagaaggaatggatgcttctgatgtgaaatcgaagggtccctcaggtatcaaggagaaagagccagtacaagtgaggatagacttggaagacaaagagacaactccgtcatttcaagtgctaaacgacaaaacatggagtccagacccaaagttatcttcgcacatggacaggctgaagaagcaacatgctgaagctgagagttatcagataaggaccaggaatgagaatgctgtcgagacccaaagccctccaaaaaatggagtgtcgttgttgtctaagccatatgttgataggagggaacagaatggtgattctgatctattggggcatggcctaagagagacaggtgtgaagaggaaaagatcac

SEQ ID NO: 2149 - DNA, 418 bp, Zea mays
  Clone ID: LIB3061-038-Q1-K1-G9
gaccattagctttatctactccagagcgcagaagaacccgatcgacaccatgagggtggtgctcgttgccctcgctctcctggctctcgctgcgagcgccacctccacgcatacaagcggcggctgcggctgccagccaccgccgccggttcatctaccgccgccggtgcatctgccacctccggttcacctgccacctccggtgcatctcccaccgccggtccacctgccgccgccggtccacctgccaccgccggtccatgtgccgccgccggttcatctgccgccgccaccatgccactaccctactcaaccgccccggcctcagcctcatccccagccacacccatgcccgtgccaacagccgcatccaagcccgtgccagctgcagggaacctgcggcgttggcagcaccccg

SEQ ID NO: 2150 - DNA, 106 bp, Zea mays
  Clone ID: LIB3061-038-Q1-K1-H1
ctgggtttgtcaaagcaagttggttgaatggcagcaacccatcattggtggtgccctcttttagatttctgatgggttatagttcaatgataaagttttttatctg

SEQ ID NO: 2151 - DNA, 391 bp, Zea mays
  Clone ID: LIB3061-038-Q1-K1-H11
cgtgatcagagagggatatatagctagctagctagcatagcatggcgcttgtagccgacgacgacgccgagctcaaggccaaggccaaggccaaggccgaggtctactacggcgacgaggcctgtcagctgtgcgcgcagctcctgctgagggaagcaggcctccccaacggcctgctgccgctggaggacctgacggagtgcggctacgtccaggagaccgggtacgtgtggctgaagcagggcaggagggtcgaccacgtcttccggagcctcggacgcctcgtctcctacggcgccgagatcaccgggtacgccgagaagggccggatcaggaaggtgaaggggataaagaccagggagctcatgctgtgggtgcccgtcgaggagat

SEQ ID NO: 2152 - DNA, 398 bp, Zea mays
  Clone ID: LIB3061-038-Q1-K1-H12
tttcagcattcaaaaacacaccaagcgaagcgcactagcaacgacctaacaccaatggctaccaagatattagccctccttgcgcttcttgcccttttagtgagcgcaacaaatgcgttcattattccacagtgctcacttgctcctagtgccagtattccacagttcctcccaccagttacttcaatgggcttcgaacatccagccgtgcaagcctacaggctacaactagcgcttgcggcgagcgccttacaacaaccaattgcccaattgcaacaacaatccttggcacatctaaccctacaaaccattgcaacgcaacaacaacaacaacagtttctgccatcactgagccacctagccgtggtgaaccctgtcacctacttgcaacagcagct

SEQ ID NO: 2153 - DNA, 404 bp, Zea mays
  Clone ID: LIB3061-038-Q1-K1-H2
cttgtatcagtaccatcaatcatcattcatcttagtagtataggcaccaaatcaaatcgtcggcatcaattatctaactgcaaaaaccatgaagctggtgcttgtggttcttgctttcattgctttagtatcaagtgtttcttgtacacagacaggcggctgcagctgtggtcaacaacaaagccatgagcagcaacatcatccacaacaacatcatccacaaaaacaacaacatcaaccactaccacaacatcaccagcagcagcaacaccaacaacaacaagttcacatgcaaccacaaaaacatcagcaacaacaaggagttcatgttcaacaacaacaactacaaccgcagcaccaacaacaacaacaacaacaacagcaccaacaacaacatcaatgtg

SEQ ID NO: 2154 - DNA, 396 bp, Zea mays
  Clone ID: LIB3061-038-Q1-K1-H3
ggaaaatgttgagagcacctcaagagcaacctcggaggcctcgtaggagagctgccccgtcatctagcaacaccagcactagatcgcgaccaggtgctttaaccgcagcagatgcttgttcatcagcagattcaagagcacacgaagcagtcaaccagcttttccagccagtaaatctgactcttgagcagcttgtcaggcataagctaagcgaagggcgaaggttcacatgccgcttgcttggtgtgattttagaagaaacagctccagaggagcttcagaaccatgtcacagtgaagccttccgtggtggaggttctccttgagattgcaaaattctgtgatgtgtatttgatggagcgtattcttgatgatgagagtgagggaaaggttttat

SEQ ID NO: 2155 - DNA, 185 bp, Zea mays
  Clone ID: LIB3061-038-Q1-K1-H4
ccgacccaagcgacgcgtactagctgcattgaactctgcttcttatttgcaacaacaacaactaccattcagccggctgcctgctgcctacccccagcaatttcttccattcaaccaactggcagcattgaactctcctgcttatttacagcagcaacaactactaccattcagccagctagctg

SEQ ID NO: 2156 - DNA, 423 bp, Zea mays
  unsure (1)..(423): unsure at all n locations; Clone ID: LIB3061-038-Q1-K1-H5
cgacatcgtcccttcgtccccacgagcaaccgataatccgccggcgttgagatgttgggttatcaggatctcctatctggcgacgagctcctgtcggattcattcacctacaaggagctcgagaacggcgtcctgtgggaggtcgagggaaagtgggtcacccaaggtcctgttgatgtggacattggtgccaatccatccgccgagggtggtgaggacgaaagcgttgatgacacagctgtgaaggtggttgatattgttgacacattccgtctacaggagcaacctccttttgacaagaaatcatttgtgtcttacatcaaaaaatacatcaagaatctcactgctgtgttggagccagagaaagcggatgagttcaaaaagggtgtcgagggtgcaaccaagtttctncttagcaagctg

SEQ ID NO: 2157 - DNA, 428 bp, Zea mays
  Clone ID: LIB3061-038-Q1-K1-H7
ggaagaccgaagaccgagccgtgcgggggctcgggacgggaacgggacaggaccccaggtctcagatccttcctgcccgcccgcccgtgcccgtcgacgcgtcgttcttgccggccgcgcctcacctccgccctctcctactccagggggatcggatacgccacaggctgcgcgatggtgctgtgggtcttcggctacggctccctcatctggaaccccggcttcgacttcgacgacaaaatcctcggcttcatcaagggctacaagcgcacctttaatctcgcttgcattgaccacagaggcacaccggagcatccggcgaggacctgcacgcttgaaaccgacgacgaggccatatgctggggaattgcatattgtgtcaagggtggtccagaaaaagagctaaaagcaatgcagtacttggagag

SEQ ID NO: 2158 - DNA, 432 bp, Zea mays
  Clone ID: LIB3061-038-Q1-K1-H8
acccacgcgtccgcttaccaagcaggtgatctgcaagtgagccaagtgccatgtactcataaaccaggagccgttgatctccatctgcacaatagcccaccaaattgactaagtttggatggtgcaataagctgagcatcaggacctcaactaggaactctctgttgccttgatacccattcaggtctagttgcttgacagcaacaagctgttcacgcaaaccggaaacaagtcagccactaatgactgtagatgaattagcaagcttgtgtatacgtagaacgtttgaatgttttttttctgtgtggtgtgtacctgtccgttttcaagcctgcccttgtataccctgccgaatcccccttctccgagaaggcagtcagagcggaagtttttcgtggccgtggctagctcacggaacgtgaatgcttttgc

SEQ ID NO: 2159 - DNA, 424 bp, Zea mays
  Clone ID: LIB3061-039-Q1-K1-A1
cctggtttagttgatcgcattgttgtttcaaataaatcagtagcgaaggtctacatcaggaattcacctcatccaaagagccaaggccaagatagtgatatccatattactaccactgatgctccaggcaagcctgctcccagcagatgcaagtattacttcaatattggtagtgttgatttgtttgaagagaagttagaggaagcccaggaagctttgggaatagatccacatgattttgtcccagtaacttatgttgctgaagtaaattggttccaagaagttatgaggtttgccccaacagcattgattattggtctattatatttcacgggaaaaaggatgcagagtggtttcaatattggaggtggtgctggcaaaggaagaggaggtattttcaacattggaaaagctacagtgatga

SEQ ID NO: 2160 - DNA, 360 bp, Zea mays
  Clone ID: LIB3061-039-Q1-K1-A11
gaccaacaagcaacatagaaagtggaatccagtagcatcaacagagcatcaatggcgagcaagatattatccctccttatgctccttgctctttctgcatgtgttgctaacgcgacaattttacctcaatgctcacaagcttctatagcttcccttcttcccccatacctttcatcaatgatagcttcagtatgtgaaaacccagctcttcagccctatacgctccaacaagcaatcgcagcaagcaacatacctttatcacccttgttgattcaacaatcgccagccctatctatggtgcagtcattgctacaaaccatcagggcacagcagctgcagcaactcgggctacctgtgatc

SEQ ID NO: 2161 - DNA, 443 bp, Zea mays
  Clone ID: LIB3061-039-Q1-K1-A12
aagaatgtcttcatctctgccatacgatttgctacgtgcatggaaacgctgttccctcgttttctggatgacctcaagacttctgctcaggagcaaactgactttatgatccatgaagacgatgaaactgctctggttatgatggatgaagatgtcagatctgtggtgcaggaaggtataacaaaactgttatctggacttaggaccgggcttgatctgttggcaaccgagtttgatcaatcacctgatcaagcagagaaagggattctgtgtagcttagctgacatcgactgggtagctaatctgtcgaccaagattgagatgacgcatgcctttgtttctggctggtcagaaatctcgtgccatattctttcagtggttcaggacagcaagtatagctcaggcttgtgggctgtcaaggcaaagcttatcgaagtgactgg

SEQ ID NO: 2162 - DNA, 426 bp, Zea mays
  unsure (1)..(426): unsure at all n locations; Clone ID: LIB3061-039-Q1-K1-A2
ttttgagcattcagaaacacaccaagctaagcacattagcaacaacctaacaacaatggctaccaagatattatccctccttgcgcttcttgcgctttttgcgagcgcaacaaatgcgttcattattccacaatgctcacttgctccaagttccattattacacagttcctcccaccagttacttcaatgggcttcgaacacccagctgtgcaagcctataggctacaacaagcaattgcggcgagcgtcttacaacaaccaatttcccagttgcaacaacaatccttggcacatctaacaatacaaaccatcgcaacgcaacagcaacaacaattcctaccagcactgagccacctagccatggtgaaccctgccgnctacttgcaacagcagttgcttgcatcaaacccacttgctctggcaaa

SEQ ID NO: 2163 - DNA, 425 bp, Zea mays
  unsure (1)..(425): unsure at all n locations; Clone ID: LIB3061-038-Q1-K1-G7
atctcctcgcatttcttcccatccgatccccccttcgcaaccaaaaccccaactcgcccgccgggaagaagccgaaggcggagaagcgggtccccgctggcaagtccgctgccaaggaaggcggcgagggcaagaggggcaagaagaagggcaagaagagcgtggagacctacaagatctacatcttcaaggtgctgaagcaggtgcacccggacattggcatctcctccaaggccatgtccatcatgaactccttcattaacgatatcttcgagaagctcgctgctgaggccgccaagctcgcgcgctataacaagaagcctaccatcnacctccgtgagatccagacctccgtgcgcctcgtccttcccggggagctcgccaagcacgccgtctccgagggcaccaaggccgtcaccaagttc

SEQ ID NO: 2164 - DNA, 379 bp, Zea mays
  unsure (1)..(379): unsure at all n locations; Clone ID: LIB3061-038-Q1-K1-F2
gcctagcaattagctcatcgactccagattggagaactcgacaccatgaaggtgctgagcggtgcccttgctctcctggcgctcgctgcgagcgccgcctccagtacaagcggcggctgtggctgccagacaccaccgtttcatctaccgcctccgttctatatgccgnctncgttctatctgccgncgcagcagcagccgcagccatggcaataccccactcaaccaccgcagctaagcccgtgccagcagttcggatcctgcggcgtcggcagcgtcggcagcccgttcctgggccaatgcgtcgagttcctgaggcaccagtgcaacccggcggcgacgccctacggctcgccacagtgccaggcgctgcagcagc

SEQ ID NO: 2165 - DNA, 409 bp, Zea mays
  Clone ID: LIB3061-038-Q1-K1-F3
aggtgctgggcgacaaggtggagaaggtggtggtctccgaccgcgtggtggactgcccgtgctgcctggtgaccggcgagtacggttggaccgccaacatggagcggatcatgaaagcccaggcgctgagggactccagcatgtctgggtacatgtcctccaagaagacgatggagatcaaccccgagaacgccatcatggaggagctccgcaagcgtgccgaggctgacaagaacgacaagtccgttaaggaccttgtcatgctgctgttcgagacggcgctgctcacttctggctttagcctcgacgatcccaacacctttggcagccgcatccaccgcatgctcaagctgggcctgagcatcgacgaggacgaggaagctccggaggctgacaccgacatgccccc

SEQ ID NO: 2166 - DNA, 311 bp, Zea mays
  Clone ID: LIB3061-038-Q1-K1-F4
gagaccaacaagcaacatagaaagtggaatccagtagcaacaacagagcaacaatggcgaccaggatattttccctccttatgctccttgctctttctgcatgtgttgctaacgcgacaattttccctcaatgctcacaagctcctatagcttcccttcttcccccataccttccatcaatgatagcttcagtatgtgaaaacccagctcttcagccctataggctccaacaagcaatcgcagcaagcaacatacctttatcacccttgttgtttcaacaatcgccagccctatctttggtgcagtcattg

SEQ ID NO: 2167 - DNA, 410 bp, Zea mays
  Clone ID: LIB3061-038-Q1-K1-F5
catatttgagtgcaaagtttacagagaaaactggcggctcaacttatgaaagcaaaaggagactcatgggggcgtacttcagcaagaaaaggcttgtcaacagaggaggctggctgttgcagtgataatgacgaggctcatattgcgaagcttgaaaacaagaagacccatctccaatctaaacttacggaggaggtaaaagaaaacacagtcctccaggcaaatttagaaaggcgaaaagcagcactacatgagcgtcgtgtagcacttgaaaaagaagtggaaaatttacgagaccagttgcagaaagagagaaatttgaaggcttcattggagtctgggttaatgaatatgcgaagaggacaagtgtccttcccatcaacgatagacaccaagactaaagctgatct

SEQ ID NO: 2168 - DNA, 404 bp, Zea mays
  unsure (1)..(404): unsure at all n locations; Clone ID: LIB3061-038-Q1-K1-F7
attagctcatcgactccagattggagaactcgacaccatgaaggtgctgatcgttgccgttgctctcctggcgctcgctgcgagcgccgnctncagtacaagcggcggctgtggctgccagacaccaccgtttcatctaccgccttcgttctatatgccgcctccgttctatctgccgccgcagcagcagccgcagccatggcaataccccactcaaccaccgcagctaagcccgtgccagcagttcggatcctgcggcgtcggcagcgtcggcagcccgttccttgggccagtgcgtcgagttcctgaggcaccagtgcagcccggcggcgacgccccaacggttggccacagtgccaggcgctgcagcagcagtgctggcaccagatcaggcaggtggagcc

SEQ ID NO: 2169 - DNA, 432 bp, Zea mays
  Clone ID: LIB3061-038-Q1-K1-F8
attttgagcattcagaaacacaccaagcgaagcacattagcaacaacctaacaacaatggctaccaagatattatccctccttgcgcttcttgcgctttttgcgagcgcaacaaatgcgttcattattccacaatgctcacttgctccaagttccattattacacagttcctcccaccagttacttcaatgggcttcgaacacccagctgtgcaagcctataggctacaacaagcaattgcggcgagcgtcttacaacaaccaatttcccagttgcaacaacaatccttggcacatctaacaatacaaaccatcgcaacgcaacagcaacaacaattcctaccagcactgagccacctagccatggtgaaccctgccgcctacttgcaacagcagttgcttgcatcaaacccacttgctctggcaaacgtaa

SEQ ID NO: 2170 - DNA, 321 bp, Zea mays
  Clone ID: LIB3061-038-Q1-K1-G1
tcggtaattaacagaaaatatattccatcattgaaaatgagttccgttgttttgggtgctagtggtatggagaataagacatcatggcctgaggtggtgggcatgtccatcaaggaggcaagagagatcattcttaaagacatgcccaacgctaacattcaaggtctaccggttggctcgcttgtgacccaagactttcgccctgatcgagttcgcatcttcgctgatattgttgcccagactccaacagttggctgacaaggatatgccctatctataggccgaataaacaaagcctactcttatgtatcatggctaata

SEQ ID NO: 2171 - DNA, 446 bp, Zea mays
  unsure (1)..(446): unsure at all n locations; Clone ID: LIB3061-038-Q1-K1-G10
attttgagcattcagaaacacacctagcgaagcgcactagcaacgacctaacaacaatggctaccaagatattatccctctttgcgcttcttgccctttttgtgagcgcaacaaatgcgttcattattccacaatgctcacttgctcctagtgccattattccacagttcctccctccagttacttcaatgggcttcgaacacccagctgtgcaagcctacaggctacaacaagcgcttgcggcgagcgtcttacaacaaccaattgcccaattacaacaacaatccttggcacatctaaccatacaaaccatcgcaacgcaacagcaacaacaatttctaccagcactgagccaactagctgtggtgaaccctgtcgcctacttgcaacagcagttgcttgcatccaacccacttggtctggcnacatagttgcataccaacaac

SEQ ID NO: 2172 - DNA, 420 bp, Zea mays
  Clone ID: LIB3061-038-Q1-K1-G12
attttgcctccttatgctccttggtctttctgcaagtgctgctacggcgaccatttgtgccgcaatgctcgcaagctcctatagcttcccttcttcccccgtacctctcaccagcggtgtcttcggtatgtgaaaacccaattcttcaaccctacaggatccaacaggcaatcacagctggcatcttacctttatcacccttgttcctccaacaatcatcagccctattacatcagttacctttggtgcatttattggcacaaaacatcagggcacaacaactaccacaacttgtgctagcaaaccttgctgcctactctcagcaacagcagtttcttccattcaaccaactagctgcattgaactgctgttcttaattgcaacaacatctactaccattcagccagctacctgctgcct

SEQ ID NO: 2173 - DNA, 426 bp, Zea mays
  Clone ID: LIB3061-038-Q1-K1-G2
gtcaaaagtgttgggtcatctattgcgatgcatattgttgcggcaaagccattattctgatcggaagaactggtttctgcttcggctttagaaaatgagcgtgaaatacttcgaactcaggcccaaagttcagggaaatcccaaatggctatggataagatggtggaaggacgattgaggaagtactttgaggaagttgtgctcatggagcaaaaatatgttttaaatgacagcactaacattaagaccgtgctgaatgacttgtcgaaagaagttggttctaaagtaacaatcggtaacttcatcagaatggaagttggcgaaaggattgagagaactgaagccgctgatggtttaaaagttgctggtggcgctatgtagattccaagcagagatggttcgaacgagatcattaggatctatatg

SEQ ID NO: 2174 - DNA, 426 bp, Zea mays
  Clone ID: LIB3061-038-Q1-K1-G3
cagaaacacacctagcgaagcgcactatcaacgacctaacaacaatggcttccaggacgtgtatccctccttgcgcttcttgccctttttgtgagtgcaacaaatgcgttcattattccacaatgctcacttgctccgagtgccattattccacagttcctccctccagttacttcaatgggcttcgaacacccagctgtgcaagcctataggctacaacaagcgcttgcggcgagcgtcttagaacaaccaattgcccaattacaacaacaatccttggcacatgtaaccatacaaaccatcgcaacgcatcagcaacaagcactgagccacctagccgtggtgaaccctatcagctacttgcaacaacagctgcttgcatccaacccacttgctttggcaaacgtagctgcataccatcaacaa

SEQ ID NO: 2175 - DNA, 429 bp, Zea mays
  unsure (1)..(429): unsure at all n locations; Clone ID: LIB3061-038-Q1-K1-G5
acagtttctgccatcactgagccacctagccgtggtgaaccctgtcacctacttgcacggcagctgcttgcatccaacccacttgctctggcgaacgtagctgcataccagcaacaacaacagctgcaacaggttatgccagtgctcagtcaactagccatggtgaaccctgacggctacctacaactactgtcatctagcccgctcgcggtgggcaatgcacctacgtacctactacaacagttgctgcaacaaattgtaccagctctgactcagctagctgtggcaaaccctgctgcctacttacaacagttgcttccattcaaccaactggctgtgtcaaactctgctgcgtacctacaacagcgacaacagttacttaatccattggcagtggctaacccattggtcgctaccttnctgcagcag

SEQ ID NO: 2176 - DNA, 411 bp, Zea mays
  Clone ID: LIB3061-038-Q1-K1-G6
caactagcaacatagaaagcacaatagtgtaccaacaatggcagccaaaatattgtgcggtccttatgctccttggtctttctgcaagtgctgctacggcgaccattttcccgcaatgctcgcaagctcctatagcttcccttcttcccccgtacctctcaccagcggtgtcttcggtatgtgaaaacccaattcttcaaccctacaggatccaacaggcaatcacagctggcatcttacctttatcacccttgttcctccaacaatcatcagccctattacatcagttacctttggtgcatttattggcacaaaacatcaaggcacaacaactacaacaacttgtgctagcaaaccttgctgcctactctcagcaacagcagtttcttccattcaaccaactagctgcat

SEQ ID NO: 2177 - DNA, 403 bp, Zea mays
  unsure (1)..(403): unsure at all n locations; Clone ID: LIB3061-038-Q1-K1-F12
cggcaacattagaaagcacaatagtgtaccaacaatggcagccaaaatattttgcttccttatgctccttggtctttctgcaagtgttgctaccgcaaccattttcccacaatgctcacaagctcctatagcttcccttcttcccccatacctctcaccagcggtgtcttcaatgtgtgaaaccccaattgttcaaccctacaggatccaacaggcaatcgcaacaggcatcttaccattatcacccttgttcctccaacaaccgtcagccctattacagcagttacctttggtccatttggtggcacaaaacatcanggcacaacaactacaacaactngtgctagcanaccttgctgcatactctcagcaacatcaagttcttccattcaaccaaactgct

SEQ ID NO: 2178 - DNA, 270 bp, Zea mays
  Clone ID: LIB3061-038-Q1-K1-D9
gccagctagctggtgtgagccctgctaccttcttgacacaaccacagttgttgccggggtaccagcacgctgcgcctaacgctggcaccctcttacaactgcaacaattgctgccattcaaccaacttgctttgacaaacccagcagcattctaccaacaacccatcattggtggtgccctcttttagatttcttatgagttatagttcaataataaagttttttgtctgatgtttgtggcttcccagaaataagaaagtacatttctag

SEQ ID NO: 2179 - DNA, 424 bp, Zea mays
  Clone ID: LIB3061-038-Q1-K1-E1
caatagtgtaccaacaatggcagccaaaatattttgcctccttatgctccttggtcttgctgcaagtgctgctacggcgaccattttcccgcaatgctcgcaagctcctatagcttcccttcttcccccgtacctctcaccagcggtgtcttcggtatgtgaaaacccaattcttcaaccctacaggatccaacaggcaatcacagctggcatcttacctttatcacccttgttcctccaacaatcatcagccctattacatcagttacctttggtgcatttattggcacaaaacatcagggcacaacaactacaacaacttgtgctagcaaaccttgctgcctactctcagcaacagcagtttcttccattcaaccaactagctgcattgaactctgcttcttatttgcaacaacaacaacta

SEQ ID NO: 2180 - DNA, 366 bp, Zea mays
  Clone ID: LIB3061-038-Q1-K1-E10
cccacgcgtacgggttggcttcttctccccctgcggttcgggttcgggttcgtgaggggcttcggtgttcggtttggtgggtgagcggatcgagatggcggcgtcagatgttgagtaccgatgcttcgtcggcggcctcgcctgggccacggacgaccactctctacacaacgccttcagcacctacggcgaggtcctcgagtccaagatcatcctcgatcgggagacgcagaggttccgcggcttcggcttagtcaccttctccacggaggaggcgatgcggaacgccatcgagggcatgaacggcacggagctggacggccgtaacatcaccgtcaacgaggcccagtcccgctgatgtcgtgg

SEQ ID NO: 2181 - DNA, 419 bp, Zea mays
  Clone ID: LIB3061-038-Q1-K1-E11
gtctgcatctgaaccgtcgaacggacctggtgttgtggactctgaggacaaggatgaggcagatgaggagtctgacgatgaaggcgaggacgaggaggaagagaagacgtcatcggcgaagaagctgtggcgtttcctcatcacatgatttatttatctttgtcgtacgataaaaaaaatagcacggctaactgtaggttctatatgatggtaggaggccacttaggcatccaaagctctgctagtttcattggctttgtcatggcgtgtcctctggtgtgtagtagaggtggaagaaggtactggtttggttgtgtgcttcaggtgttgtgagtagcgcggtggctttggaaggcgctgtggactgtctgtcccccacctactaccacccatggctttttttttcttcctgtttatct

SEQ ID NO: 2182 - DNA, 419 bp, Zea mays
  Clone ID: LIB3061-038-Q1-K1-E12
gtttagtcctatacgctccaacatgctatcacaggaagcaacatacctcaattaccgtggttgattcaacactcgacaaccctatctacgttgcagctcattgttacaaaccatctagtcacaacgcctgcaccaactcgtgctacctgtgaacaaccaagtagatcttgctaacctttctgcttactctgagcagcaacaatctcttctattcaaccaactgtctacactgaaccctgctgcttatttgcatcatcaactattaccattgaatcatctagctactgtatactctcagcaactacaacttcttccatgtaaccaattggtcacactgaaccccactgcttatttgcagcatcaaatactactaccatgtagccagctagctgcagcaaaccgtgcttccttctttacac

SEQ ID NO: 2183 - DNA, 410 bp, Zea mays
  Clone ID: LIB3061-038-Q1-K1-E3
ggctaccaagatattagccctccttgcgcttcttgccctttttgtgagcgcaacaaatgcgttcattattccacaatgctcacttgctcctagtgccattattccacagttcctcccaccagttacttcaatgggcttcgaacacctagctgtgcaagccaacatgcaacaacaagcgcttgcggcgagcgtcttacaacaaccaattgcccaattgcaacaacaatccttgccacatctaacaatacaagccatcacaacgcaacagcaacaacagttcctaccagcactgagccacctagccatggtgaaccctgccgcctacttgcaagagcagctgcttgcatccaacccacttgctctggcgaacgtagttgcaaaccagcaacaacaacagctacaacagtttc

SEQ ID NO: 2184 - DNA, 278 bp, Zea mays
  Clone ID: LIB3061-038-Q1-K1-E4
cgcagggcgagctcgcggcgctgatggcggcccaggtagcgcagcagctgacggcgatgtgcggcctgcagctgcagcagccaggtccctgcccttgcaacgcagctgccggcggtgtctactactgaggaaactatgactgataataatgtaatggagccgtgactagctactactcgctagttactatacggcagatacgatgtaccatacatggtgcaggtagcatgactgatgaccatgaatgaaaggaatattataggaaaaaagatgaatgg

SEQ ID NO: 2185 - DNA, 422 bp, Zea mays
  Clone ID: LIB3061-038-Q1-K1-E5
agcatatggatgggtcgtgtgtactatgtatttgggttcctcttcgtcgtcttgctgcgcctggttattgtctgtgctgaggtttccctggttctaacttacatgcacctgtgtgttgaggattggaagtggtggtggaagtcattcttctcatctggatcggtggcaatctacattttcttgtactccatcaactatcttgtttttgacctcaaaagcttgagtgggccagtgtctgctaccctctacatcggttactcactcttcatggtgattgctatcatgctggcaactggcacagttgggtttatttcttcattctgctttgtccactatcttttctcatcggtgaaagcagattaagtttcttcctgctgaggattcaagtcactcaattgagaggtgagcagaatggacagtga

SEQ ID NO: 2186 - DNA, 370 bp, Zea mays
  Clone ID: LIB3061-038-Q1-K1-E6
ggcggcgcagatagcgcagcaactgacggcgatgtgcggcctgcagcagccgacggcaggcccctacgctgctgccggcggcgtcccccactgaagaaactatgcgctgaagtatagccgctggctagctagctagttgagtcatttagcggcgatgattgagtaataatgtgtcacgcatcaccatgggtggcagggtcagcgtgagcaatgacctgaatgaacaattgaaatgaacagaaataataaaccactatacataaagcatacctatggagcataaatagacacaaagcatcaaagacactacaactacaacaacaaggggcggccgatcctagggacccaatcttagctacccgtgcttgca

SEQ ID NO: 2187 - DNA, 391 bp, Zea mays
  Clone ID: LIB3061-038-Q1-K1-E7
gacgatgccagtgatgatgccacagatgatgacgcctaacatgatgtcaccattgatgaggcggagcatgatgtcaccaatggtcttgccgagcatgatgtcgcaaatgatgatgccacaatgtcactgcgacgccgtctcgcagattatgctgcaacagcagttaccattcatgttcaacccaatggccatgacgattccacccatgttcttacagcaaccctttgttggtgctgcattctagatagaaatatttgtgttgtatcgaataatgagttgacatgccaaaacaaaaacctgatgcctaccaccaacaataacttccattcaaccaactggcagcaattgaactatcctgcttatttacagcagcaacaaactactaccattc

SEQ ID NO: 2188 - DNA, 414 bp, Zea mays
  unsure (1)..(414): unsure at all n locations; Clone ID: LIB3061-038-Q1-K1-E9
gtgaagtacactagcaacatcttagcaccaatgggagccaagattttttccctccttgccctccttgctctttcagcaagcgctgctacctctactattattccacaatgctcacaacaatacctctctccggtgacagccgcgggatttcaacacccaactatacaatcctacatgctacatgaggccatcgtagcaagcatcttacggtcattagcattaaccctccaacagccatatgccctattgcaacaaccatccttagtgcatctgtatctccaaagaatcgcgacacaacaactacaacaacagttgctaccaacaatcaatcaagtagttgcagcgaaccttgctgcttatctncagcaacaacaatntcttccattcaatcaactagctggngtgaaccctgct

SEQ ID NO: 2189 - DNA, 426 bp, Zea mays
  Clone ID: LIB3061-038-Q1-K1-F1
caccagaagcgaaggcggaggcggtggagcggaggtaggagatctcgagcaagggggaggcagaggagatgaagacgttcgacccgtggccggtcttcttccgccgggagtggaagcgcaactggcccttcctcacgggtttcgccatcaccggattcatcatcacgaagatgacggccaacttcaccgaggaggatctcaagaactccaagttcgtccaggaacacaagaagaagcactgacgaaccaggtgaaggagttgtcagaaacgcatgtttggccagccagttctgttatgcttttgaatgaaaaatttagacccttctttctcgtttccttaatcgaaatgcttgcactctatgttccatttgtaatgtaataagaggcaaatggattgaaccaacaacaatcaacttctgattgaaa

SEQ ID NO: 2190 - DNA, 433 bp, Zea mays
  Clone ID: LIB3061-038-Q1-K1-F10
gaaagcacaatagtgtaccaacaatggcagccaaaatattttgcttccttatgctcctgggtctttctgcaagtgttgctaccgcaaccattttcccacaatgctcacaagctcctatagcttcccttcttcccccatacctctcaccagcggtgtcttcaatgtgtgaaaccccaattgttcaaccctacaggatccaacaggcaatcgcaacaggcatcttaccattatcacccttgttcctccaacaaccgtcagccctattacagcagttacctttggtccatttggtggcacaaaacatcaaggcacaacaactacaacaacttgtgctagcaaaccttgctgcatactctcagcaacatcagtttcttccattcaaccaactggctgcattgaactctgctgcttatttgcaacaacaattaccatt

SEQ ID NO: 2191 - DNA, 428 bp, Zea mays
  Clone ID: LIB3061-038-Q1-K1-F11
gcaacatagaaagcacaatagcgtaccaacaatggcagccaaaatattttgcctcctggtgctccttggtctttctgcaagtgctgctacggcgaccattttcccgcaatgctcgcaagctcctatagcttcccttcttcccccgtacctctcaccagcggtgtcttcggtatgtgaaaacccaattcttcaaccctacaggatccaacaggcaatcacagctggcatcttacctttatcacccttgttcctccaacaatcatcagccctattacatcagttacctttggtgcattcattggcacaaaacatcagggcacaacaactacaacaacttgtgctagcaaaccttgctgcctactctcagcaacagcagtttcttccattcaaccaactagctgcattgaactctgcttcttatttgcaac

SEQ ID NO: 2192 - DNA, 355 bp, Zea mays
  Clone ID: LIB3061-038-Q1-K1-D8
cggacgcgtggggtctccaccagccggtcggacttcttgcgctccaagaactcggcgaggatggaaatgttttttggcagctttctcagtgaatcagtatcaccgcagaaccttttcggacacccggatgttgagaaatgcccattcctgaggaatatcaatggagctacaaccttttccctcgcttctgctttgccagtagctgttcaaggaggcaagggtccaatttttaaggaaggtccaggttttaagcctgattcaagccttttccatggccgagatggaatagttcccctttcagaaagatcatatgtatctgatgaaacccacattgagagcattgatgtcaggactg

SEQ ID NO: 2193 - DNA, 432 bp, Zea mays
  Clone ID: LIB3061-020-Q1-K1-H9
agcagtgcaacaagcaagatttacctgctcatcgatcatatcgtcaactggtccggcagttcgcgacaccatgagctccacggagtgcggcggcggcggcggcggcgccaagacgtcgtggcctgaggtggtcgggctgagcgtggaggacgccaagaaggtgatcctcaaggacaagccggacgccgacatcgtggtgctgcccgtcggctccgtggtgaccgcggattatcgccctaaccgtgtccgcatcttcgtcgacatcgtcgcccagacgccccacatcggctgataatatataagctagccgctatttcctttccttgccccagaacttgaaataaatatatatacgatgaaataacgcgggcatgccgaataatggatgtgtgaattctcactaattaagtaatgcattaataaacgtattcc

SEQ ID NO: 2194 - DNA, 437 bp, Zea mays
  unsure (1)..(437): unsure at all n locations; Clone ID: LIB3061-021-Q1-K1-A1
cgccccctcttgccttccctcctccgccttaccgctgctgtccgcctccaaccctccaggtcgacgcaggcggcgacggcggcgcgccgagatgaaggtctccgtgaagacgctcaagggatctagcttccagatcgaagtggagcccaccgacaaggttgctgctgtgaaaaaggtcatagagaatatgcaagagcaggcttcctatccagctgaccaacaagtccttatacatcaaggaaaggtgctcagcgatgacaccacattagaggaaaatcaagtgactgagaataatttccttgttataatgctcagacagaacaagggatcatcaagtgcagcaccggctaagacaactgcgaatcaggcacctnctactcagacagtgcctgttgttccacctcaaacgtcagcagccccagctgcaccagcaccta

SEQ ID NO: 2195 - DNA, 431 bp, Zea mays
  Clone ID: LIB3061-021-Q1-K1-A10
actcgatggcagcgacttggttggccgatcgcgcaccggtcagggaaaaactttggctgttgtcttgcccatattggagtctttggttaatggggcaaacaaggcatctagacggactgaacatggcaggaccccaagtgttctcgttctactaccaacaagagagctggccaatcaggtgcacgctgactttgagttttatggtgcaacatttgggctctctgcatgttgtgtgtatgggggatcaccttatcgtcctcaagaaatggcattgagaagaggtgtggatattgttgttggaactcctggtcgtgtcaaggatttcattgttaaaggaactctcaatttgaaatgcttgaaattccgtgtccttgatgaagctgatgagatgctaaacatgggttttgttgatgatgtcgagctcattcttg

SEQ ID NO: 2196 - DNA, 409 bp, Zea mays
  Clone ID: LIB3061-021-Q1-K1-A11
cagcaaccacagcgtcctgctggtagacgtgctggtggaatgcagcagcccatgccaatgggtggtcagcaacaggtgttccctagaggtggtcgtggctatcgctatcctactggacgtggaatgcctgatcctggcatgcacagtgttggtgctgtgatgccaccttcatatgagatgggagggatgccaatgagagaagctgccccccaacctgttccaattggggcgctagccactgcacttgctaacgccccaccagatcagcagagacttatgcttggtgagaacctgtatcctcttgttgaacagctggaacgtgagcaggctgccaaggtcactggcatgcttttggagatggatcagacggaggttcttcacctgctggagtcgccagatgctctgaaag

SEQ ID NO: 2197 - DNA, 431 bp, Zea mays
  Clone ID: LIB3061-021-Q1-K1-A2
ctagcaacatagaaagcacaatagtgtaccaacaatggcagctaaaatattttgcctccttatgctccttggtctttctgcaagtgctgctacggcgaccattttcccacaatgctcacaagctcctatagcttcccttcttcccccgtacctctcaccaacggtgtcttcggtatgtgaaaacccaattcttcaaccctacaggatccaacaggcaatcgcagctggcatcttacctttatcacccttgttcctccaacaatcatcagccctattacagcagttacctttggtgcatttattggcacaaaacatcagggcacaacaactacaacaacttgtgctagcaaaccttgctgcctactctcagcaacagcagtttcttccattcaaccaactagctgcattgaactctgcttcttatttgcaac

SEQ ID NO: 2198 - DNA, 415 bp, Zea mays
  Clone ID: LIB3061-021-Q1-K1-A3
acgcatctagcagacatcagtaaagcacaatattgtaccaacaatggcagccaaaatattatgcctgcttatgctccttggtctatctgcaagtgctgctaccgcgaccattttgccgcaatgctcgcaagctcctatagcttatcttcttacaacgtacatttgatcagcggtgtattatgactgtgaaaacccaattattcaaccctacaggatccaacaagcaatctcagctggcatattagctatatcacgcatttgcctccaacaattatcagccctattacatcaagtacctacggcgcatctattggcacataacattacggcacatcaactacaacaacttgtgctagcaaaacttgctgtgtactatcatcaacagcagaatcttgcattctaccaactaactgca

SEQ ID NO: 2199 - DNA, 435 bp, Zea mays
  Clone ID: LIB3061-021-Q1-K1-A4
atccaatccagatcagcaaagcggcagtgcgtagagaggatcgtcgaacagaacagcatgaagatggtcatcgttctcgtcgtgtgcctggctctgtcagctgccagcgcctctgcaatgcagatgccctgcccctgcgcggggctgcagggcttgtacggcgctggcgccggcctgacgacgatgatgggcgccggcgggctgtacccctacgcggagtacctgaggcagccgcagtgcagcccgctggcggcggcgccctactacgccgggtgtgggcagacgagcgccatgtaccagccgctccggcacagtgctgccagcagcagatgaggatgatggacgtgcagtccgtcgcgcagcagctgcagatgatgatgcagcttgagcgtgccgctgccgccagcagcagcctgtacgagccagctctgatgc

SEQ ID NO: 2200 - DNA, 333 bp, Zea mays
  Clone ID: LIB3061-021-Q1-K1-A5
caagtagcagcatagatagcacaatagtttaccaactaaggcagccaaaaaattagccggaccatgcaccaagggctatcagcatatgctgctaccgtgagcatcttgcgctaatggtcagcggatcatatacgttcattatttcacaatgatcacttactacaagtgtcattattacacagataactcccaccagttactccaacgggattcaaacagccagcatagcaagcctataagctacatcaagcaattgctgccaagcgtcttacaacacccaatattccagttgcaacaacgatcctttggacatctaacaatacagaccatcgc

SEQ ID NO: 2201 - DNA, 256 bp, Zea mays
  unsure (1)..(256): unsure at all n locations; Clone ID: LIB3061-021-Q1-K1-A6
acgaggtgaactcggtctacgtcggcggtcttccctacgaggccaacgaggagatgctgcgcgacgccttcgggtactacggcaccatcgtctccgtcaaggtgattaatgatcatgctgtcaaaggcaagtgttatggttctgntactttcactcaccccagagctgctgagcaagcaattgcgggcatggacggtaagaaattatgcaaccgtattgctcgagtaaatgaagtgcgtacaagaggcccccggga

SEQ ID NO: 2202 - DNA, 344 bp, Zea mays
  unsure (1)..(344): unsure at all n locations; Clone ID: LIB3061-021-Q1-K1-B1
agtttccatctgtcttggttaacagtgctactggaaaactcgaagaatgcttccaaacatatgttcggccgacgtatcatcaattnttgactgatttttgcaaggagcttactggcatacaacagattcaggtggacagaggtgtgcctctaggtgaagccttactcatgcacgataaatggctagaggacaagggcatcaagaacacaaactttgctattgtgacctggtctaactgggactgccgtataatgctggagtcggaatgcagatttaagagaatcaggaagcccccttattttaacaggtggatcaacttgagggtaccgttccaggaagtgtac

SEQ ID NO: 2203 - DNA, 404 bp, Zea mays
  Clone ID: LIB3061-021-Q1-K1-B10
ccgccgccaacgcaacccttgcagccccaatccctcacagcaaccatggctggcgcgcaggagtccctctctctggtgggcacgatgcgcggccacaacggcgaggtgacggcgatcgcgaccccgatcgacaactcgccgttcatcgtctcctcctcccgcgacaagtccctgctggtgtgggacctgaccaacccggtccactccaccccggaatccggcgccaccgccgactacggcgtccccttccgccgcctcaccggccactcccacttcgtccaggacgtcgtcctcagttccgacggccagttcgccctttccggctcctgggatggagagctccgcctctgggacctctccaccggcctcaccacccgccgcttcgtcggccacgagaaggatgt

SEQ ID NO: 2204 - DNA, 403 bp, Zea mays
  Clone ID: LIB3061-021-Q1-K1-B11
ctggacgtcagcctagcaattagctcatcgactccagattggagaactcgacaccatgaaggtgctgatcgttgcccttgctctcctggcgctcgctgcgagcgccgcctccagtacaagcggcggctgtggctgccagacaccaccgtttcatctaccgcctccgttctatatgccgcctccgttctatctgccgccgcagcagcagccgcagccatggcaataccccactcaaccaccgcagctaagcccgtgccagcagttcggatcctgcggcgtcggcagcgtcggcagcccgttcctgggccagtgcgtcgagttcctgaggcaccagtgcagcccggcggcgacgccctacggctcgccacagtgccaggcgctgcagcagcagtgctgccaccag

SEQ ID NO: 2205 - DNA, 421 bp, Zea mays
  Clone ID: LIB3061-021-Q1-K1-B12
cctagatcttctgctagctgagacgcaaccagcgaagatctgttctcaggttggcctgtgcacttttgatggcactcacggtgttagcactggaattcgtagcgtagtggatgacaaagctgggaaatcaaatggtggtctcaagagtgatccaatgtgcaatgcctgtgagatggctgtggtatggatgcagaaccaactggcccagaacaagacacaggagctcatcctgacctacattaatcagctttgtgagcgtcttccttctcccatgggagaatcagccgtggactgtgccagtcttgggtccatgcccgacattgcgttcaccattggaggcaagaagttcaagctgaaaccggagcagtacattctgaaggtcggtgaaggacaagctgcccagtgcatcagtggattcaca

SEQ ID NO: 2206 - DNA, 449 bp, Zea mays
  Clone ID: LIB3061-020-Q1-K1-H8
cttgcattcaaccaactgtctacactgatccctgctgcttatttgcagcaacaactattaccatttagccagctagctactgcctactctcagcaacaacaacttcttccatttaaccaattggccgcactgaaccctgccgcctacctacaacagcaacaactgatttcatctagccctctcgctgtggttaatgcacctacatacctgcaacaacagttgctgcaacagattgtaccagctctgactcagctagctgtggcaaaccctgctgcctacttgcaacagctgcttccattcaaccaactgactgtgtcgaactctgctgcgtacctacaacagcgacaacagttacttaatccactagcggtggctaacccattggtcgctgacttcctacagcagcaacaattgctgccatacaaccagttctctttgatgaaccctgc

SEQ ID NO: 2207 - DNA, 337 bp, Zea mays
  Clone ID: LIB3061-020-Q1-K1-G2
cttgtactcccactccggttcgggttcgggttcgtgaggctctccggcgttcggtttcgcgggtgggcggatcgagatggcggcgtcggatgttgagtaccgctgcttcgtccgcggactcgcctgggccacggacgaccacttactgcacaacgccttcagcacctacggcgaggtcctcgagtccaagatcatcctcgatcgggagacgcagaggtcccgcggcttcggcttcgtcaccttctccacggaggacgcgatgcggaacgccatcgacggcatgaacggcaaggagctggacggccgcaacatcaccgtcaacgaggcccagtcccgc

SEQ ID NO: 2208 - DNA, 414 bp, Zea mays
  Clone ID: LIB3061-020-Q1-K1-G3
acggtttgtggcttcccagaaataagaaagtacatttctaaaaaaaaaaaaaaaaaaaaaaagaaaaagaaaaaaaaaaaaaaaaaaaaaaaaaaaaaaaaaaaaaaaaaaaaaaaaaaaaaaaaaaaaaaaaaaaaaaaaaaaaaaaaaaaaaaaaaaaaaaaaaaaaataaaaaaaataaaagaaaaaaaaaaaagaaaagaaaaaaaaaaaagggggggggtttttaagagaaccaagtttattacaggagtggaggaaaataaaaatttttttaaaggggaacctaaattaaagatagggggagattttttaaaaattggatggggggaaaaacctgggggtccaaaaataaatggtcttggaaaataagcccttttttgggggggagggaaaacgaaaagggcccccac

SEQ ID NO: 2209 - DNA, 445 bp, Zea mays
  Clone ID: LIB3061-020-Q1-K1-G4
gaccaactagcaacatagaaagcacaattgtgttccaacaatggcagccaaaatatttggcttgcttatgctccttggtctttctgcaagtgctgctaccgcaaccattttcccacaatgctcacaagctcctatagcttcctttcttcccccatacctctcaccagcggtgtcttcagtatgtgaaaacccaattcttcaaccctacaggatccaacaggcaatcgcagcaggcatcttacctttatcacccttgttcctccaacaaccgtcagccctattacagcagttacctttggtgcatttgttggcacaaaacatcaaggcacaacaactacaacaacttgtgctaagaaaccttgctgcctactctcagcaacagcagtttcttccattcaaccaactggctgcattgaactctgctgcttatttgcaacaacaacta

SEQ ID NO: 2210 - DNA, 447 bp, Zea mays
  Clone ID: LIB3061-020-Q1-K1-G5
gaccaactagcaacatagaaagcacaatagtgtaccaacaatggcagctaaaatattttgcctccttatgctccttggtctttctgcaagtgctgctacggcgaccattttcccacaatgctcacaagctcctatagcttcccttcttcccccgtacctctcaccaacggtgtcttcggtatgtgaaaacccaattcttcaaccctacaggatccaacaggcaatcgcagctggcatcttacctttatcacccttgttcctccaacaatcatcagccctattacagcagttacctttggtgcatttattggcacaaaacatcagggcacaacaactacaacaacttgtgctagcaaaccttgctgcctactctcagcaacagcagtttcttccattcaaccaactagctgcattgaactctgcttcttatttgcaacaacaacaact

SEQ ID NO: 2211 - DNA, 421 bp, Zea mays
  Clone ID: LIB3061-020-Q1-K1-G6
caccatctaacgcacaataaagtaccatcaatggccgacaaagtattctgcttgcttatgcttcctgatccttctgcaagtgttggtacctgatccatcttccaacattgctcacaagctcctatagcttcccttatttccccatacctctcaccaccggtgacttgaatgtgtgaaaacccaattgttcaaccctacaggatccaacaggctatagcaacaggcatcttaccataatcacccttgatcatccatcatccgtcagccctattacagcagatacctgcggtccattgggtggcacataacatcacggcacatcaactaccacaacctgcgctagctaaccttactgcatactgtcagctacatcaagcaattgcattcaaccaactggctgcattgaactctgctgcttatt

SEQ ID NO: 2212 - DNA, 399 bp, Zea mays
  Clone ID: LIB3061-020-Q1-K1-G8
cccacgcgttcgaccacgcgtccggcaacatataaagcacaatagtgtaccaacaatggcagccaaaatattgtgcttccttatgctccttgatctttctgcaagtgctgctaccgaaaccattttgccacaatgctcacaagctcctatagcttcctttcttcccacatacctctcaccagcggtgacttcagtatgtgaaaacccaattcttcaaccctacaggatccaacaggcaatcgcagcaggcatcttacctttatcaccctcgtacctacaacaaccgtcagccctattacagcagctacctttggcgcatgtgacggcacaaaacatcaaggcacagcaactacaacaacttgtgctaggaaaccttgctgcctactctcagcaacagca

SEQ ID NO: 2213 - DNA, 393 bp, Zea mays
  Clone ID: LIB3061-020-Q1-K1-G9
attcaaaaacacaccaagcgaagcgcactagcaacgacctaacaccaatggctaccaagatattagccctccttgcgcttcttgcccttttagtgagcgcaacaaatgcgttcattattccacagtgctcacttgctcctagtgccattattccacagttcctcccaccagttacttcaatgggcttcgaacatccagccgtgcaagcctacaggctacaactagcgcttgcggcgagcgccttacaacaaccaattgcccaattgcaacaacaatccttggcacatctaaccctacaaaccattgcaacgcaacaacaacaacaacaacagtttctgccatcactgagccacctagccgtggtgaaccctgtcacctacttgcaacagcagc

SEQ ID NO: 2214 - DNA, 393 bp, Zea mays
  Clone ID: LIB3061-020-Q1-K1-H1
acgagaaccccaagcacaaggtcaccgctgtccccgccgacgaagaagagatctgcggtgccactttcaaggtggtggaagggtctactgtcctgacggcgctgcactgatcgatcatcatcaggcggaggcgatgcgacgatacagaactttgtacatgcgtggtgggtgtaacatagtggctggcaacaagccatgctcatgcaaaccgatgaatctatctctgtatcatgcatcgatctcggttgcttgctagtccagactccagactccagacatggctatatatagctggtgctaataaataggagtataatcgtcatatcgatcggttgcgtgtggaatgccaatcaagtgtgtaatctgttccaaataacaaacctatgttcctcc

SEQ ID NO: 2215 - DNA, 324 bp, Zea mays
  Clone ID: LIB3061-020-Q1-K1-H10
tatgctcgttgctctttctgcatgtgttgctaacacgaccatttctgatgagtactcacatgctcctatagacgcccttattgcgatataccattgatcactcaccgctttagattgtgaaatcccaggccttctaaccctacgagatccaattatcaatctaaccaggcacctaacctttatcacatctgttctttgaacaatcgccagccctatctttgatgcagccattggtacaaaccattaggttgcaacagactcggcaactcgtgctaccagagatcattcaagtagctttggcaaacctttgctgctactattatc

SEQ ID NO: 2216 - DNA, 420 bp, Zea mays
  Clone ID: LIB3061-020-Q1-K1-H11
acgatagcttcccttcttcccccgtacctcttaccatcggggtcttcggtatgggaaaaccgagtctgtaacccttacaggatccaacaggcaatcacagctggcatcttacctttataacccttgttcctgcaacaatcatcagccctattacatcagttacctttggtgcatttattggcacataacatcagggcacaacaactacaacaacttgtgctagcaaaccttgctgcctactctcagcaacagcagtttcttccattcaaccaactatctgcattgaactctgcttcttatttgcaacaacaacaactaccattcagtcagctacctgctgcctacccccagcaatttcttccattcaaccaactggcagcattgaactctcctgcttatttacagctgcaacaactacta

SEQ ID NO: 2217 - DNA, 130 bp, Zea mays
  Clone ID: LIB3061-020-Q1-K1-H12
ccccaacaacacacaagcagcccataacacaccagacacccccagaccaaccatcaacgcaaaccacaaaaagacaaaacccaccacaacaaccccatacacaccaacacagccatactcaccaagcaac

SEQ ID NO: 2218 - DNA, 423 bp, Zea mays
  Clone ID: LIB3061-020-Q1-K1-H2
ggcgaggagggcaggaagaccgaagaccgagccgtgcgggggctcgggacgggaacgggacaggaccccaaaatctcagatccttcctgcccgcccgcccgtgcccgtcgacgcgtcgttcttgccggccgcgcctcacctccgccctctcctcctccagggggatcggatacgccacaggctgcgcgatggtgctgtgggtcttcggctacggctccctcatctggaaccccggcttcgacttcgacgacaaaatcctcggcttcatcaagggctacaagcgcacctttaatctcgcttgcattgaccacagaggcacaccggagcatccggcgaggacctgcacgcttgaaaccgacgacgaggccatatgctggggaattgcatattgtgtcaagggtggtccaaaaaaagagctaaaag

SEQ ID NO: 2219 - DNA, 379 bp, Zea mays
  Clone ID: LIB3061-020-Q1-K1-H3
caactagcaacatagaaagcacaatagtgtaccaacaatggcagctaaaatattttgcctccttatgctccttggtctttctgcaagtgctgctacggcgaccattttcccacaatgctcacaagctcctatagcttcccttcttcccccgtacctctcaccaacggtgtcttcggtatgtgaaaacccaattcttcaaccctacaggatccaacaggcaatcgcagctggcatcttacctttatcacccttgttcctccaacaatcatcagccctattacagcagttacctttggtgcatttattggcacaaaacatcagggcacaacaactacaacaacttgtgctagcaaaccttgctgcctactctcagcaacag

SEQ ID NO: 2220 - DNA, 440 bp, Zea mays
  Clone ID: LIB3061-020-Q1-K1-H4
acgaagcaacatagaaagtggaatacagtatcaaaaatagagcaacaatggcggccaagatgttttcgatccttatgctccttgctctttctgcatgtgttgctaacgcgaccatttttcctcaatactcacaagctcctatagctgcccttcttcccccataccttccatcaatgaccgctttagtatgtgaaaacccagcccttcaaccctacaggatccagcaagcaatcgcaacaagcaacttacctttatcacacctgttctttcaacaatcgccagccctatctttggtgcagtcattggtacaaaccatcagggcagaacagttgcagcaactcgtgctaccagtgatcagccaagtagctctggcaaacctttccccctactctcagcaacaacaatttcttccattcaaccaactgtctatactgaaccct

SEQ ID NO: 2221 - DNA, 371 bp, Zea mays
  Clone ID: LIB3061-020-Q1-K1-H5
cccgaccaagaggcagtggccgtgcgccgcggggcagaagtactacgggcgcggcccgctgcagatctcgtggaactacaactacgggcccgcggggagggccatcggcttcgacgggctcggggaccccggcagggtggcgcgggacgccgtggtggcgttcaaggcggcgctctggttctggatgaacagcgtgcacggggtggtgccgcaggggttcggcgccaccaccagggccatcaacggcgccctcgagtgcggcgggaacaaccccgaccagatgaacgcgcgcgtcggctactacaggcagtactgccgccagctcggcgtcgaccccgggcccaacctcacctgctaggctaggcggcatc

SEQ ID NO: 2222 - DNA, 409 bp, Zea mays
  unsure (1)..(409): unsure at all n locations; Clone ID: LIB3061-020-Q1-K1-H7
atgaaccaactagcacatataaagctcatattgtaccaataatggcagccaaaatatttgactcatagctccttgtctttctgcaagtgctgctcgggagcatttaccgcaatgctcacaagctgctatagcttcccttcttcccccgatacctctcccaacgagtcttcagtatgagaaaatccaattcttctaccctacaggatccaacaggcaatcgcagcaggcatcttacctttatcacccttgttcctacaacaatcatcagccctattacagcagttacctatggtgcattgattggcacaaaacatcagggcacaacaactacaacaactcgtgctagtgcaccttgctgcctactctcagcatcagcttttacctatggtgcatttggaagcacanaaca

SEQ ID NO: 2223 - DNA, 300 bp, Zea mays
  Clone ID: LIB3061-020-Q1-K1-G12
ccgttcggattccgccagcgccgctgtcggtgcctgctctgcagtgtacgcccggcaggaaagccctcggtggcgggctgaggctggacggactgcgccggctgacgacagatggcgccggcggctgtaccctacgcggatacctgagcagcgcagtgcatcccgctgcggcgggccctactacgccggtgtgggcagccgacgccatgtccaccgctcggcaacatgctgcagcagcagatgagatgatggacgtgcagccgtccgcacagctgagatgagatgcacttgagcgtgccg

SEQ ID NO: 2224 - DNA, 403 bp, Zea mays
  Clone ID: LIB3061-020-Q1-K1-E8
cgtgatcagagagggatatatagctagctagctagcatagcatggcgcttgtagccgacgacgacgccgagctcaaggccaaggccaaggccaaggccgaggtctactacggcgacgaggcctgtcagctgtgcgcgcagctcctgctgagggaagcaggcctccccaacggcctgctgccgctggaggacctgacggagtgcggctacgtccaggagaccgggtacgtgtggctgaagcagggcaggagggtcgaccacgtcttccggagcctcggacgcctcgtctcctacggcgccgagatcaccgggtacgccgagaagggccggatcaggaaggtgaaggggataaagaccagggagctcatgctgtgggtgcccgtcgaggagatcgccgctcttgg

SEQ ID NO: 2225 - DNA, 314 bp, Zea mays
  Clone ID: LIB3061-020-Q1-K1-E9
tcagtaacacattctattttatctacctagcaacaacttaacaagaaaggctaccaagatattaaccctgcttgcgcttattgccctttatgagatcgcaacaaatgcgttcattattccacaatgctcacttgctcctagtgccattataccacagttcctccgaccagttacttcaatgagcttcgaacaccttactgagcaagcctacaggctacaacaagcgcttgcggctaacgtcttacaacaaccaattaaccaattgcaacaacaattcttggcacatttaaccatacaaaccattgcaactcaac

SEQ ID NO: 2226 - DNA, 408 bp, Zea mays
  Clone ID: LIB3061-020-Q1-K1-F1
gagaccagcaagcaacatagaaagtagaatccattagcaacaatagagcaacaatggcgaccaagatattttccctccttatgctccttgctctttctacatgtgttgctaacgcgacaattttccctcaatgctcacaagctcctatagcttcccttcttcccccataccttccatcaattatagcttcagtatgtgaaaacccagctcttcaaccatataggcttcaacaagcaatcgcagcaagcaacatacctttatcgcccttgttgtttcaacaatcaccagccctatctttggtgcagtcattggtacaaaccatcagggcacaacagctgcagcaactcgtgctacctgtgatcaaccaagtagctctggcaaacctttctccctactctcagcaacaac

SEQ ID NO: 2227 - DNA, 419 bp, Zea mays
  Clone ID: LIB3061-020-Q1-K1-F10
gcattcagaaacacacctagcgaagcgcactagcaacgacctaacaacaatggcttccaagacattatccctccttgcgcttcttgccctttttgtgagtgcaacaaatgcgttcattattccacaatgctcacttgctccgagtgccattattccacagttcctccctccagttacttcaatgggcttcgaacacccagctgtgcaagcctataggctacaacaagcgcttgcggcgagcgtcttagaacaaccaattgcccaattacaacaacaatccttggcacatctaaccatacaaaccatcgcaacgcagcagcaacaagcactgagccacctagccgtggtgaaccctatcgcctacttgcaacaacagctgcttgcatccaacccacttgctttggcaaacgtagctgcat

SEQ ID NO: 2228 - DNA, 419 bp, Zea mays
  Clone ID: LIB3061-020-Q1-K1-F11
cggacgcgtgggcagccgtgcagctcgttcgcgtcgtccgccgcggtgcttgccccaggctcgacctccgtccgggcctgcctgtcgcgctgctatggtgctcaagtccggcgctgccctctccgtccagcagtctggcgctgaagtccccaacctcctctctgctgaagccctccgctcgccgagctccgtacacgcgcgccccatctctgctggcgccctgatcttcagtcatcccccttggccggcgtcctccccatttttttacaggttcgttaattgatcacgtgatgcagaggacaagagttgagttgatcccaacatgaagatgatgaatgaacctgaagcttggatgatctggtcaagcaccagaatggaagatcctcatcaagtggtcgtcaattaacaacactaacata

SEQ ID NO: 2229 - DNA, 440 bp, Zea mays
  Clone ID: LIB3061-020-Q1-K1-F12
gcaacatagaaagcacaatagtgtaccatcaatggcagccaaaatattttgcctccttatgctccttggtctttctgcaagtgctgctacggcgaccattttcccacaatgctcacaagctcctatagcttcccttcttcccccgtacctctcaccagcggtgtcttcggtatgtgaaaacccaattcttcaaccctataggatccaacaggcaatcgcagctggcatcttacctttatcacccttgttcctccaacaatcatcagccctattacagcagttacctttggtgcatttattggcacaaaacatcagggcacaacaactacaacaacttgtgctagcaaaccttgctgcctactctcagcaacaacagtttcttccattcaaccaactagctgcattgaactctgcttcttatttgaacaacaacaactacc

SEQ ID NO: 2230 - DNA, 414 bp, Zea mays
  Clone ID: LIB3061-020-Q1-K1-F3
caaacaacaaacttattcatgatttgtcatagttctgggtagtacgcacacacaacacaaccggtccattattaaaccaacactgacacgaacagcagatacttcgacaacctccatatggagagggcaccagacgacgcaggcacatcggcagcttaaacgacccatgacttactgaccaccacggagacggagcacaaggtggagggtgctctccttttggatgttgtagtctgctagggtgcggccatcctccagctgtttgccggcgaagatcagacgctgctggtccggggggatgccctccttgtcctggatcttcgccttcacattgtcgatggtgtccgagctctcaacctccagggttatggtttttccagtcagggtcttcacaaagatctgcataccacccct

SEQ ID NO: 2231 - DNA, 424 bp, Zea mays
  Clone ID: LIB3061-020-Q1-K1-F4
ctggggggaaggagagagagagagcgatagagatagagagatctagtagagaggctagtaggtggtcctcgaacgaagatgttggcggtgttcagcgggcaggtggtggaggtgccggcggagctggtggcggcgggcagccggacgccgtcgcccaagacgaaggcgtctcagctcgtggggcgcttcctggccgcgtccgagccggccgtgtccgtgcagctcggcgaccacggccacctcgcctactcccacaccaaccaggcgctcctccgccccaggtcgttcgcggccaaggacgaggtgttctgcctgttcgaaggggtgctggacaacctgtgtctgctgagccagcagcacgggctgtcaagcaagggcgccaacgaggtgctcctcgtcatcgaggcctacaagacgctgcgcg

SEQ ID NO: 2232 - DNA, 441 bp, Zea mays
  Clone ID: LIB3061-020-Q1-K1-F5
cctctgggtgccgtcctccaagtgctacttctcgatcgcttgctacttccactcgcgctacaagtcagggcagtcaagcacttacaagaagaacggaaaacctgctgccattcgctatggaactggttccattgctggttttttcagtgaggatagcgttacattaggtgatctggttgtgaaggatcaggaatttattgaagctacaaaggagccagggcttaccttcatggttgcaaaatttgatggcattcttgggctaggctttcaagaaatctctgttgggaatgcaacaccagtgtggtataacatggtgaaacaaggtctcatcagcgaccctgttttctctttctggtttaaccgacatgctgatgaaggagaaggtggtgaaattgcgtttggtggaatggattctagccactacaagggcgatcacacgtt

SEQ ID NO: 2233 - DNA, 427 bp, Zea mays
  unsure (1)..(427): unsure at all n locations; Clone ID: LIB3061-020-Q1-K1-F6
gtttttgtggcagcagagtatgagactccacagaatgctttgaatcaagtttccctttgggatggcattatacctgcaaaggagcatgccaagtttttgatccataccacaaacaagtacagatttattgaccagggaagcaatctaaagggcaaggaattcaacttgacaatgcactggcacattatgccaaagactggcaaaatgtttgcagataagatagtaatgacaggctatcgtctccctgagctatacagatagtcagatagatcatggacaggactaagtggcctgcaagaagtgttagtggcagtggcataattgatcctgagcgttntgttctaatctaagtggagcatgtaaccttataagctngtacttaagctgaaccaggcanaacanagttgtaatttgagaggatatgtat

SEQ ID NO: 2234 - DNA, 80 bp, Zea mays
  Clone ID: LIB3061-020-Q1-K1-F7
atttcttatgagttatagttcaataataaagttttttgtctgatgtttgtggcttcccagaaataagaaagtacatttct

SEQ ID NO: 2235 - DNA, 439 bp, Zea mays
  Clone ID: LIB3061-020-Q1-K1-F8
acgccatgctggcgctggttgaggacgatacgctatcgtcggtctcctgcgcgtgctcggcgtccgacgaagaggcaggccggacgcagctgaggcgcccgtcgtcggggagctacgggcggcggtcagccgaggagccggtggtgtgcagccccgcgagctcgctggtggccgtcatggtgcaggccctcgcgcacagggtgagctacgtgtgggtcctcgacgaggacagcgactgccgtcttgctggcatcgtcacgttcgcggacgtactgagggtgttacgggagcagctgctgtgagatctggcagagtgtttgctgtttcctcctcgatcgcatcttgtgctgtaatgagagaagaacatgagctcttgtcacggaccgagcgccttcggttctcaaaaaacattctggttagcatcatagtatgtatgtgt

SEQ ID NO: 2236 - DNA, 392 bp, Zea mays
  Clone ID: LIB3061-020-Q1-K1-F9
gagaccaactagcaacatagaaagcacaatagtgtaccaacaatggcagccaaaatattttgcttccttatgctccttggtctttctgcaagtgttgctaccgcaaccattttcccacaatgctcacaagctcctatagcttcccttcttcccccatacctctcaccagcggtgtcttcaatgtgtgaaaccccaattgttcaaccctacaggatccaacaggcaatcgcaacaggcatcttaccattatcacccttgttcctccaacaaccgtcagccctattacagcagttacctttggtccatttggtggcacaaaacatcagggcacaacaactacaacaacttgtgctagcaaaccttgctgcatactctcagcaacatcagtttct

SEQ ID NO: 2237 - DNA, 391 bp, Zea mays
  Clone ID: LIB3061-020-Q1-K1-G1
tgagcattcagaaacacacctagcgaagcgcactagcaacgacctaacaacaatggctaccaagatattatccctctttgcgcttcttgccctttttgtgagcgcaacaaatgcgttcattattccacaatgctcacttgctcctagtgccattattccacagttcctccctccagttacttcaatgggcttcgaacacccagctgtgcaagcctacaggctacaacaagcgcttgcggcgagcgtcttacaacaaccaattgcccaattacaacaacaatccttggcacatctaaccatacaaaccatcgcaacgcaacagcaacaacaatttctaccagcactgagccaactagctgtggtgaaccctgtcgcctacttgcaacagcag

SEQ ID NO: 2238 - DNA, 383 bp, Zea mays
  Clone ID: LIB3061-020-Q1-K1-G10
acggcaaagcggcagtgcgtagagaaggatcgtcgaccagaccagcttgaaaatggtcatcgtgctcgtcgtgtccctggctctgtcagctgccagcgcctctgcaatgcagatgccctgcccctgcgcggagctgcagggcttgtacggcgctggcgccggcctgacgacgatgatgggcgccggcgggctgtacccctacgcggagtacctgaggcagccgcagtgcagcccgctggcggcggcgccctactacgccgggtgtgggcagacgagcgccatgtaccagccgctccggcaacagtgctgccagcagcagatgaggatgatggacgtgcagtccgtcgcgcagcagctgcagatgatgatgcagcttgagcgtg

SEQ ID NO: 2239 - DNA, 426 bp, Zea mays
  Clone ID: LIB3061-020-Q1-K1-G11
caacaactcgagctagcaaaccttgctgtctactctcagcaacagcagttacctttggtgcatttgttggcacaaaacatcagggcacaacaactacaacaactcgtgctagcaaaccttgctgcctactctcagcaacaacagtttctgccattcaaccaactagctgcattgaactctgctgcttatttgcagcaacaacaactactaccattcagccagctagctgctgcctacccccggcaatttcttccattcaaccaactggcagcattgaactctcatgcttatgtacaacaacaacaactactaccattcagccagctagctgctgcgagccctgctgccttattgacacagcaacattcgttgccagtttacctgcacactgcgcctaacgttggcaccctcttacaacttgcacaa

SEQ ID NO: 2240 - DNA, 445 bp, Zea mays
  Clone ID: LIB3061-020-Q1-K1-E7
cttcccttcttcccccgtacctctcaccagcggtgtcttcggtatgtgaaaacccaattcttcaaccctacaggatccaacaggcaatcgcagctggcatcttacctttatcacccttgttcctccaacaatcatcagccctattacagcagttacctttggtgcatttattggcacaaaacatcagggcacaacaactacaacaacttgtgctagcaaaccttgctgcctactctcagcaacagcagtttcttccattcaaccaactagctgcattgaactctgcttcttatttgcaacaacaacaactaccattcagccagctacctgttgcctacccccaacaatttcttccattcaaccaactggcagcattgaactctcctgcttatttacagcagcaacaactactaccattcagccagctagctggtgtgagccctgc

SEQ ID NO: 2241 - DNA, 429 bp, Zea mays
  Clone ID: LIB3061-038-Q1-K1-C2
gccgacggccacctggtccacggggaacgattccgtcgtcctcaacaccacggggcagcgctacttcctctgcggctacccgggccactgcgctgccggccagaaggtggacatccgcgtcgcctcctctgctgccccttccgccgcaccgtcgccgaccccctccggctccaagccctccggcggcgccacggccgcgccgtcgccgcaccctaacgccgcgccgaaggccctctccgccagctccgtagccgcggctgtcgccacgtccctgctctccctggccgcggccgtgctggcatgatcacttgatcaggatcgtgtagtgctggccaggggacggcgcctttgtgaattgtgagagctcgtactgtgtctgtgtgactgtctctgtggccgtatgagcatttagccctggatctgcgtttg

SEQ ID NO: 2242 - DNA, 418 bp, Zea mays
  unsure (1)..(418): unsure at all n locations; Clone ID: LIB3061-038-Q1-K1-C3
gaccaactagcaacatagaaagcacaatattgtaccaataatggcagccaaaatatttggccgcattatgctccttggtctttctgcaagtgctgctacggcgagcattttcccgcaatgctcacaagctcctatagcttcccttcttcccccatacctctcaccagcgatgtcttcagtatgtgaaaatccaattcttctaccctacaggatccaacaggcaatcgcagcaggcatcttacctttatcacccttgttcctccaacaatcatcagccctattacagcagttacctttggtgcatttattggcacaaaacatcagggcacaacaactacaacaactcgtgctagcaaaccttgctgcctactctcagcaacagcagttacctttggtgcatntgttggcacaaaacatc

SEQ ID NO: 2243 - DNA, 421 bp, Zea mays
  Clone ID: LIB3061-038-Q1-K1-C4
aataaatgtgtggaatacagctacacgaactctcaagggaacccttgagggttccggggcaggttttgagtggcttaaatggcattctcggggacatttgataatcgcaggatcagaggattgtaatgtatggatgtggaatgccgaccataatgccattctgaatacctttgctggacatagtaacacagtgacatgtggtgattttactccagatggtaaacttatatgcactggatcggatgatgcgtctttgaggatatgggacccaagaagtgcacaaagcagacatgttgttcgaggccatggctaccattctgatggattgacatgcttatcgatgacttcggattcacaaacggttgttagcggctccaaggacagttctgtgcacattgtgaatttaaactcgggccaggtc

SEQ ID NO: 2244 - DNA, 146 bp, Zea mays
  Clone ID: LIB3061-038-Q1-K1-C5
gtgtcaagaaggtagcagggctcacaccagctagctggctgaatggtagtagttgttggtgctgtaaataagcaggagagttcaataataaagttttttgtctgatgtttgtggcttcccagaaataagaaagtacatttctagat

SEQ ID NO: 2245 - DNA, 427 bp, Zea mays
  Clone ID: LIB3061-038-Q1-K1-C6
attgtgagcattcagaaacacacctagcgtaacgcactagcaacgacctaacaacaatggctgtcaaaacattatccctgcttgcgcttcttgccctttttgtgagtgcaacaaatgcgttcattattccacaatgctcacttgctccgagtgccattattccacagttcctccctccagttacttcaatgggcttcgaacacccagctgtgcaagcctataggctacaacaagcgcttgcggcgagcgtcttagaacaaccaattgcccaattacaacaacaatccttggcacatctaaccatacaaaccatcgcaacgcagcagcaacaagcactgagccacctagccgtggtgaaccctatcgcctacttgcaacaacagctgcttgcatccaacccacttgctttggcaaacgtagctgcata

SEQ ID NO: 2246 - DNA, 420 bp, Zea mays
  Clone ID: LIB3061-038-Q1-K1-C7
attgagaccaactagcaacatagaaagcacaatagtgtaccaacaatggcagccggaagattttgcttccttatgctccttggtctttctgcaagtgctgctaccgcaaccattttcccacaatgctcacaagctcctatagcttcctttcttcccccatacctctcaccagcggtgtcttcagtatgtgaaaacccaattcttcaaccctacaggatccaacaggcaatcgcagcaggcatcttacctttatcacccttgttccttcaacaaccgtcagccctattacagcagttacctttggtgcatttgttggcacaaaacatcaaggcacaacaactacaacaacttgtgctaggaaaccttgctgcctactctcagcaacagcagtttcttccattcaaccaactggctgcattg

SEQ ID NO: 2247 - DNA, 421 bp, Zea mays
  Clone ID: LIB3061-038-Q1-K1-C9
gagaccaactagcaacatagaaagcacaatagtgtaccaacaatggcagccaaaatattttgcctccttatgctccttggtctttctgcaagtgctgctacggcgaccattttcccgcaatgctcgcaagctcctatagcttcccttcttcccccgtacctctcaccagcggtgtcttcggtatgtgaaaacccaattcttcaaccctacaggatccaacaggcaatcacagctggcatcttacctttatcacccttgttcctccaacaatcatcagccctattacatcagttacctttggtgcatttatggcacaaaacatcaaggcacaacaactaccacaacttgtgctagcaaaccttgctgcctactctcagcaacagcagtttcttccattcaaccaactagctgcattgaactc

SEQ ID NO: 2248 - DNA, 438 bp, Zea mays
  Clone ID: LIB3061-038-Q1-K1-D1
ccggaatctcaattcccgacctacacctcccgcaacaacaacttcttccatttaaccaattgcccgcactgaacctcgctgcttatttgggggaggccatcctactgacatccagagatctctctacagaaaattgatcaagcgaccacacatacagtcctttgctgacattatacaatcacatagcagccagaacaagtgcgcacaatctattactatgagatgggggcatatattcgacttggactacccaacatctgctgcccacacagatgatgaatcatctgagcgagctgcatcaacatccagtactactgcaaacctagcacaactgcgcatttcatacactgatgaagaacttccaggtttataacgtttccggtgcatactttcaagaggaaatccatcatcagactgaagcgacacagaaaccggtat

SEQ ID NO: 2249 - DNA, 401 bp, Zea mays
  Clone ID: LIB3061-038-Q1-K1-D10
cagcattcaaaaacacaccaagctaagcgcactagcaacgacctaacaccaatggctaggaagatattagccctgcttgcgcttcttgcccttttagtgagcgcaacaaatgcgttcattattccacagtgctcacttgctcctagtgccagtattccacagttcctcccaccagttacttcaatgggcttcgaacatccagccgtgcaagcctacaggctacaactagcgcttgcggcgagcgccttacaacaaccaattgcccaattgcaacaacaatccttggcacatctaaccctacaaaccattgcaacgcaacaacaacaacaacagtttctgccatcactgagccacctagccgtggtgaaccctgtcacctacttgcaacagcagctgcttgc

SEQ ID NO: 2250 - DNA, 363 bp, Zea mays
  Clone ID: LIB3061-038-Q1-K1-D11
agcattcagaaacacacctagcgtagcgcactagcaacgacctaacaacaatggctacgagagatattatccctctttgcgcttcttgccctttttgtgagcgcaacaaatgcgttcattattccacaatgctcacttgctcctagtgccattattccacagttcctccctccagttacttcaatgggcttcgaacacccagctgtgcaagcctacaggctacaacaagcgcttgcggcgagcgtcttacaacaaccaattgcccaattacaacaacaatccttggcacatctaacccttccaaacattggaacggaaccggcaccaccatttctaccagcactttgcccaatatatttgggg

SEQ ID NO: 2251 - DNA, 338 bp, Zea mays
  unsure (1)..(338): unsure at all n locations; Clone ID: LIB3061-038-Q1-K1-D12
tgcgctctcttgcaccctttttagtgagcgccaacaaatgcccgttcattaatctccacaatggctcactatgcttcctagttgccattattctcacaagttcctcctctccagttaccttcaatgggncttgcgaacactccatgctgtgcaaagcctacanggctatcaacatagcgcttgcgagcgagccgtcttacaacaactcaatttgcccaattacaacaacaatnccttggcacatctaaccatacaaaccatcgcaacgcaacagcaacaacaatttctaccagcactgagccaactagctgtggtgaaccctgtcgcctacttgcaac

SEQ ID NO: 2252 - DNA, 415 bp, Zea mays
  Clone ID: LIB3061-038-Q1-K1-D2
caattaccaccctgagcactggcagccttcatggagtgtccgcacagctttggtagcggtgattgccttcatgccgacgaacccaggtggggcattgggctcactggattacaaaccagaagacagacgagcacttgctataaaatcacgtgaggtgccgccgaaatttggctccccacaacgtcagaaactaattgatgagatccatgagcaaatgctcagtaaggctcctcctatcccccaaacgctgccaaatgtgccaaacgaggagctcgcacctgactcttgtgatgagcatgcagacaaggtagatgaaagtggcaacacatccaagtccatgtcaggctcgtcgagtggccatcctgtgcctgaagctgaatcgctggctgcagaaaacacgggtgaagcatcagca

SEQ ID NO: 2253 - DNA, 422 bp, Zea mays
  Clone ID: LIB3061-038-Q1-K1-D3
cgaagctacctagcaacgacttaacaacaatggctaccaagatattagccctccttgcgcttcttgccctttttgtgagcgcaacaaatgcgttcattattccacaatgctcacttgctcctagtgccattataccacagttcctccgaccagttacttcaatgggcttcgaacacctagctgtgcaagcctacaggctacaacaagcgcttgcggcgagcgtcttacaacaaccaattaaccaattgcaacaacaatccttggcacatctaaccatacaaaccatcgcaacacaacagcaacaacagttcctaccagcactgagccaactagatgtggtgaaccctgtcgcctacttgcaacagcaggtgcttgcatccaacccacttgctctggcaaacgtagctgcataccaacaacaa

SEQ ID NO: 2254 - DNA, 421 bp, Zea mays
  Clone ID: LIB3061-038-Q1-K1-D5
gccagccaagattcaggttggagtcttctttgctaccatgccccctgatgccctcgaggtgtaggcgcaagttcatgatcgagccagtgagaattcttgtgaagagagatgagctgactctagagggtatgaagcagatctatgtgaatgagtatatggaagactgcaagctgcacacactgtgtgacctgttcgagactcttgtcataacccacagtgtgatgtatgctaacaccaggagtaaggtggactggctcactgacaagatgaagagcagggaccatactgtttctgacagtcatggagacatggaccagaccactacagacatcatcatgagggaattccggtctggcttcctccgagtgctcatcaccaacgaactggttgcttgtggtattgatggtcaacaaggggtccc

SEQ ID NO: 2255 - DNA, 362 bp, Zea mays
  Clone ID: LIB3061-038-Q1-K1-D6
attggcgccaactctcctaccatgccatcataactccacgccgttagcttaaaattcatgctcgcgcccgtcacatttcttctcaagccagatcaactcactctagagcgtttgaaccccaactactccaaccattatctcaaactctccaagctacacacactgtctgacctgctcgaaactcttttcataaccgacagtgtcctcaatcctaacaccaccacttaggacgactcgctcacttacaagatgcagagcagccaccatactactattcactctcatccagacatgcaccacaccactacatacatcatcatgaaggaattcctttctggctcctcccgagtgctcatcaccac

SEQ ID NO: 2256 - DNA, 425 bp, Zea mays
  Clone ID: LIB3061-038-Q1-K1-D7
cttgtaccttacacattgctagggtaaatgtgagggaccctggtacaataaacgatgggctgggtgctgctcgtgaagcagatgccctattggttcaggatgagtctaccaggagccagcaagagggtcaacagaatggaatttctgagccagctgccaacaatgctctccagtatcaagagcaaaaccctcagcgagctggaagtacccctgcaggctcaggctccctcaacccatttgggtcccttttgctgtggttgctgggaggcggtgcttctgatggcatagtttctttcttctctatgttcagagatgttcgtgatcatggtcaagattacaccgatccacctcgaaatggaaatgatcaggtgacatagaatcatggggatgaaagtgggccaatgactgaactcgagtgcttgggc

SEQ ID NO: 2257 - DNA, 425 bp, Zea mays
  Clone ID: LIB3061-038-Q1-K1-C12
gagaccaacaagcaacatagaaagtggaatacagtagcaacaatagagcaacaatggcggccaagatattttccatccttatgctccttgctctttctgcatgtgttgctaacgcgaccatttttcctcaatactcacaagctcctatagctgcccttcttcccccataccttccatcaagcaatcgcaacaagcaacttacctttatcacccctgttctttcaacaatcgccagccctatctttggtgcagtcattggtacaaaccatcagggcacaacagctgcaacaactcgtgctaccagtgatcagccaagtagctctggcaaacctttctccctactctcagcaacaacaatttcttccattcaaccaactgtctacactgaaccctgctgcttatttacaacaaccacaactactacc

SEQ ID NO: 2258 - DNA, 379 bp, Zea mays
  unsure (1)..(379): unsure at all n locations; Clone ID: LIB3061-038-Q1-K1-B1
cagatcaaacaagtagcgacagctcgacanagattggtgagagtgatccggccctgaggagggatggctaaaatcgccgcagccgccgcggcggcggcggcgctgtgcttcgcggccctggtggccgtggccgtctgccaaggcgaggtcgagcggcagaggctcagggacctgcagtgctggcaggaggtccaggaaagcccgttcgacgcgtgccgccaggtccttgaccggcagctaaccggcggcggcgtctgcggcccgttccggtggggcaccgggctccggatgccgagctgccagcagctccaggacgtgagccgcgagtgccgttgcgccgccatccggagcatggtcaggggctacgaggaggccatgc

SEQ ID NO: 2259 - DNA, 392 bp, Zea mays
  Clone ID: LIB3061-038-Q1-K1-B10
gcttaaagcaatgccttttccagaatgtatagtatattcatgttgttctttgtgccatgtcaagtaatggtccgctgtgcagatggtgtgatggcttgcagcttaactgatctgttctcctgtaatagctaagaggtttgatagcccatttcgactgccaaagtgacactgcacaagcttcaaatgcgatctcgagcgatataccagggggcatgattcttccggtagcatcagaatcgtcctcgagcggcggcgttgttggtggcactggaaacggggagcaaaattgagtaaactgcgccctgtataaagcacgtttggatcttagggacctacgtatattcttgcttccaaacccccaccgttgtatgttcagttagggtaatacacac

SEQ ID NO: 2260 - DNA, 457 bp, Zea mays
  Clone ID: LIB3061-038-Q1-K1-B11
catggtccgcgggcatagccctgacgcacaccgtggcactggcgtccgcagatcttttcctttcctaccgcctacgccgtcgtcgcccagaggcaataccatgatccggtctcggccggcgtcgcacctgacctaaccctgagccctgtgatatgccggttcatgtcggaggcagcaaggtggcggacccgacgccggccaggttggtggacctatcgcccgtaggcgacaggtcccgcgcctgctccaagaagaaccgccgccgccacaagaaggccgacgccgcctcttccgtgtcgcccatgcaaaggctcttcgacaccagcagggaggtcttcgccaactcctacccgggcttcgtaccgacgccggacgccgtctgccgcctatcgggcctcctcagtgagctgaagcctcgtgacgtcagggttgacccaagcatgtccgtcttcaagca

SEQ ID NO: 2261 - DNA, 418 bp, Zea mays
  unsure (1)..(418): unsure at all n locations; Clone ID: LIB3061-038-Q1-K1-B12
caaccaattaaccaattgcaacaacaatccttggcacatctaaccatacaaaccatcggaacacaacagcaacaacagttcctaccagcactgagccaactagatgtggtgaaccctgtcgcctacttgcaacagcaggtgcttgcatccaacccacttgctctggcaaacgtagctgcataccaacaacaacaacaattgcaacagtttctgccagcgctcagtcaactagccatggtgaaccctgccgcctacctacaacagcaacaactgctttcatctagccctctcgttgtgggtaatgcacctacatacctgcaacaacaattgctgcaacagattgtaccagctctgactcagctagctgtggcaaaccctgctgcctacttgcaacagctgcttncattcaaccaactga

SEQ ID NO: 2262 - DNA, 380 bp, Zea mays
  Clone ID: LIB3061-038-Q1-K1-B2
gcaattagctcatcgactccagattggagaactcgacaccatgaaggtgctgatcgggggccttgctctcctggcgctcgctgcgagcgccgcctccagtacaagcggcggctgcggctgccagacaccaccgtttcatctaccgcctccgctctatatgccgcctccgttctatctgccgacgcagcagcagccgcagccatggcaataccccactcaaccaccgcagctaagcccgtgccagcagttcggatcctgcggcgtcggcagcgtcggcagcccgttcctgggccagtgcgtcgagttcctgaggcaccagtgcagcccggcggcgacgccctacggctcgccacagtgccaggcgctgcagcagcagtgct

SEQ ID NO: 2263 - DNA, 384 bp, Zea mays
  Clone ID: LIB3061-038-Q1-K1-B3
caccaagcgaagctacctagcaacgacttaacaacaatggctaccaagatattagcccggcgtgcgcttcttgccctttttgtgagcgcaacaaatgcgttcattattccacaatgctcacttgctcctagtgccattataccacagttcctccgaccagttacttcaatgggcttcgaacacctagctgtgcaagcctacaggctacaacaagcgcttgcggcgagcgtcttacaacaaccaattaaccaattgcaacaacaatccttggcacatctaaccatacaaaccatcgcaacacaacagcaacaacagttcctaccagcactgagccaactagatgtggtgaaccctgtcgcctacttgcaacagcaggtgcttgca

SEQ ID NO: 2264 - DNA, 411 bp, Zea mays
  unsure (1)..(411): unsure at all n locations; Clone ID: LIB3061-038-Q1-K1-B4
ccgacggcgacgccctactgctcgcctcagtgccagtcgttgcggcagcagtgtggccagcagctcaggcaggtggagccgcagcaccggtaccaggcgatcttcggcttggtcctccagtccatcctgcagcagcagccgcaaagcggccaggtcgcggggctgttggcggcgcagatagcgcagcaactgacggcgatgtgcggcctgcagcagccgactccatgcccctacgctgctgccggcggtgtcccccactgaagaaactatgtgctgtagtatagccgctggctagctagctagttgagtcatttagcggcgatgattgagtaataatgtgtcacgcatcaccatgggtggcagtgtcagtgtgagcaatgacctgaatgaacaattganatgaaaagaaaa

SEQ ID NO: 2265 - DNA, 413 bp, Zea mays
  Clone ID: LIB3061-038-Q1-K1-B5
ctgccagccaccgccgccggttcatctaccgccgccggtgcatctgccacctccggttcacctgccacctgcggggcatctcccaccgccggtccacctgccgccgccggtccacctgccaccgccggtccatgtgccgccgccggttcatctgccgccgccaccatgccactaccctactcaaccgccccggcctcagcctcatccccagacacacctatgcccgtgccaacagccgcatccaagcccgtgccagctgcagggaacctgcggcgttggcagcaccccgatcctgggccagtgcgtcgagtttctgaggcatcagtgcaacccgacggcgacgccctactgctcgcctcagtgccagtcgttgcggcagcagtgttgccagcagctcaggcaggtgaagccga

SEQ ID NO: 2266 - DNA, 432 bp, Zea mays
  Clone ID: LIB3061-038-Q1-K1-B6
cgcacggagcgaagctacctagcaacgacttatcatcaatggctaccaagatattactccggctggctcttattgccgggtgtgtgagcgcaacaaatgcgttcattattccacaatgctcacttgctcctagtgccattataccacagttcctccgaccagttacttcaatgggcttctaacacctagctgtgcaagcctacaggctacaacaagcgcttgcggcgagcgtcttacaacaaccaattaaccaattgcaacaacaatccttggcacatctaaccatacaaaccatcgcaacacaacagcaacaacagttactaccagcactgagccaactagatgtggtgaaccctgtcgcctacttgcaacaacaggtgcttgcatccaacccacttgctctggcaaacgtagctgcataccaacaacaac

SEQ ID NO: 2267 - DNA, 399 bp, Zea mays
  Clone ID: LIB3061-038-Q1-K1-B8
gcaggcaggtcggcgaggagggcaggaagaccgaagaccgagccgtgcgggggctcgggacgggaacgggacaggaccccaaaatctcagatccttcctgcccgcccgcccgtgcccgtcgacgcgtcgttcttgccggccgcgcctcacctccgccctctcctcctccagggggatcggatacgccacaggctgcgcgatggtgctgtgggtcttcggctacggctccctcatctggaaccccggcttcgacttcgacgacaaaatcctcggcttcatcaagggctacaagcgcacctttaatctcgcttgcattgaccacagaggcacaccggagcatccggcgaggacctgcacgcttgaaaccgacgacgaggccatatgctggggaattgcata

SEQ ID NO: 2268 - DNA, 448 bp, Zea mays
  Clone ID: LIB3061-038-Q1-K1-B9
ccggcgctttatctactccagagcgcagaagaacccgatcgacaccatgagggtgttgctcgttgccctcgctctcctggctctcgctgcgagcgccacctccacgcatacaagcggcggctgcggctgccagccaccgccgccggttcatctaccgccgccggtgcatctgccacctccggttcacctgccacctccggtgcatctcccaccgccggtccacctgccgtcgccggtccacctgccaccgccggtccatgttgccgccgccggtcatctgccgccgccaccatgccactaccctactcaaccgccccggcctcagcctcatccccagccacacccatgcccgtgccaacagccgcatccaagcccgtgccagctgcagggaacctgcggcgttggcagcaccccgatcctgggccagtgcgtcgagttcctgaggcat

SEQ ID NO: 2269 - DNA, 386 bp, Zea mays
  Clone ID: LIB3061-038-Q1-K1-C1
ggcaggtggagccgcagcaccggtaccaggcgatcttcggcttggtcctccagtccatgctgcggcagcagccgcaaagcggccaggtcgcggggctgttggcggcgcagatagcgcagcaactgacggcgatgtgcggcctgcagcagccgactccatgcccctacgctgctgccggcggtgtcccccactgaagaaactatgtgctgtagtatagccgctggctagctagctagttgagtcatttagcggcgatgattgagtaataatgtgtcacgcatcaccatgggtggcagcgtcagtgtgagcaatgacctgaatgaacaattgaaatgaaaagaaaaaagtattgttccaaaaaaaaatgctgactactctcaacaaca

SEQ ID NO: 2270 - DNA, 355 bp, Zea mays
  Clone ID: LIB3061-038-Q1-K1-C10
agaatgcacaataatgaaccatctatggcgaccataatatcaatgcctacttatgctccgtcctctaccagactaggctgttaccacaaccatgcttgcacattgcttacactctcctatagattccctgctacccacatacctctgatcacagacatcaataccttgagaaaacccaacacttcaacactacaggatccaacaagcattcacagatggcatcttacgtacatcaccctagttcctccaacaatcatcatccgtattacatcagttacctcaggtgcatttattgtcacagaacatcatgacacagctactactacaacttgtgctagcaaacatcgctgcctac

SEQ ID NO: 2271 - DNA, 396 bp, Zea mays
  Clone ID: LIB3061-038-Q1-K1-A9
gaccaactagcaacatagaaagctcaatagtgtaccaacaatggcagccaaaatattgtgcctccttatgctccttggtctttctgcaagtgctgctacggcgaccattttcccgcaatgctcgcaagctcctatagcttcccttcttcccccgtacctctcaccagcggtgtcttcggtatgtgaaaacccaattcttcaaccctacaggatccaacaggcaatcacagctggcatcttacctttatcacccttgtccttcaacaatcattaaccctattacattaagtacctttggtgcatttattggcacataacatcagggcacaacaactacaacaacttgtgctagcaaaccttgctgcctactctcagcaacagcagtttcttccattc

SEQ ID NO: 2272 - DNA, 447 bp, Zea mays
  unsure (1)..(447): unsure at all n locations; Clone ID: LIB3061-037-Q1-K1-H3
aactagcaacatagaaagcacaatagtgtaccaacaatggcagccaaaatattttgcttgcttgtgctccttggtctttctgcaagtgttgctaccgcaaccattttcccacaatgctcacaagctcctatagcttcccttcttcccccatacctctcaccagcggtgtcttcaatgtgtgaaaacccaattgttcaaccctacaggatccaacaggcaatcgcaacaggcatcttaccattatcacccttgttccttcaacaaccgtcagccctattacagcagttacctttggtccatttggtggcacaaaacattanggcacaacaacttcaacaacttgtgctagcaaaccttgctgcatactctcagcaacatcagtttcttccattcaaccaactggctgcattgaactctgctgcttatttgcaacaacaattaccattc

SEQ ID NO: 2273 - DNA, 265 bp, Zea mays
  Clone ID: LIB3061-037-Q1-K1-H4
attatattgggatcggatctgggggcgaccgaactagcatcagctgaaaaaagagagagggggcaatatataatggtgttgttgtccctggaagcgttgaggaagaggaacgtggccggtccgctgctgctgttcaaccttgccctttacgtttccatgttggggttcgcgagctgggcgctcaacgccttcgtcgaccacataggcgaccaccaatactacgacccacctgcaggcgacacgtgcacgtgcatggacacgcaca

SEQ ID NO: 2274 - DNA, 327 bp, Zea mays
  Clone ID: LIB3061-037-Q1-K1-H5
ttcagctctgcaggcagctgaacaagccggtcatcgtcgcctcccagctcctcgagtcgatgagagagtaccccacgcccaccagggccgaggtcgcggacgtctccgaagccgtccgccagcgcgccgacgccctgatgctttccggcgagtcggcaatggggaggtacccggacaaggccctcagcgttctgaggagcgtcagcctgaggatcgagaagtggtggagggaggagaagcgtcacgaggcccttgaacttccgaacgtcttgtccttcttcttcgaccagatatcggaggagatcttcaactcaacggcttaaatgg

SEQ ID NO: 2275 - DNA, 296 bp, Zea mays
  Clone ID: LIB3061-037-Q1-K1-H6
aattcccgctcgacggcgcgtccagctagtcataatctcaccagagaactatgtctagacacctgactccatatttctaggcgcgagtagctatgtcttagagatgacaccctttgccatacatcacataaccgctgtatattgctaacgctgaacttggaatctccaatagggtcatgcgcaacctcttattcattgaccggctataaatcattaccactgtctccagaattgcatctggcctaaaacctggcctccatggatttcatgtgcatgcgcttggtgacaccaccaat

SEQ ID NO: 2276 - DNA, 463 bp, Zea mays
  Clone ID: LIB3061-037-Q1-K1-H7
cggtgacagccgcgggatttcaacacccagctatacaatcctacatgctacatgaggccatcggagcaagcatcttacgggcgttagcattaaccctccaacagccatatgccctattgcaacaaccatccttagtgcatctgtatctccaaagaatcgcgacacaacaactacaacaacagttgctaccaacaatcaatcaagtagttgcagcgaaccttgctgcttatctccagcaacaacaatttcttccattcaatcaactagctggggtgaaccctgctggctacttgcaagcacaacaactactaccatttaaccaacttgtcgggagccctgatgccttcttactgcaacaacagcttctgccattccatctgcaagctgtggaaaacattgcttctttcttgcgacaacaacaattgttgccattttacccacaggttgtgggaaacattaatgc

SEQ ID NO: 2277 - DNA, 363 bp, Zea mays
  Clone ID: LIB3061-037-Q1-K1-H8
gaccaccaagcaacatagaaagtggaatgcattaccaacaatagagcaacaatggcggccaggggattttccatccttatgctccttgctctttctgcatgtgttgctaacgcaaccatttttcctcaatactcacaagctcctatagctgcccttcttcccccataccttccatcaatgaccgcttcaatttgtaaaaacccaacccttaaaccttacaggctccaaccagccattcgaaccaggcactttacctttatcacccctgttttttaaacaatcgccacccctatctttggtgcagtcattggcacaaaccatcggggcacaacagttgcaacaacttgcgctaccagttatcac

SEQ ID NO: 2278 - DNA, 430 bp, Zea mays
  unsure (1)..(430): unsure at all n locations; Clone ID: LIB3061-037-Q1-K1-H9
ctttacgcctacatgtcatcaggccgtcgaggttgccaatgtgcagaggtacatgggcggtttgaggagatcacgttcgaagctgatggagagcggtgtgatttgcaggaatctgcaggcagctctgatgatggaggtggccaaacagagcactatgtcaaaagcaaggagtccactcatgtgaatggccttctacagatgggtagaagagatctttctaatcagctttgcttcagttcattccaagagcaatcatgttcatctaaccattatgagaacgacactaaccatcacacaaatgggttcgacatgaagcatgatgtaaagattgccaagtacaaagcacggaaaatggcacagttaaagagggctatccatccatctcttgacttcgacaatgcanatggagtaaataggatgaagccttcac

SEQ ID NO: 2279 - DNA, 56 bp, Zea mays
  Clone ID: LIB3061-038-Q1-K1-A1
cagaccattagctttatctactccagagcgcagaagaacccgatcgacaccatgag

SEQ ID NO: 2280 - DNA, 329 bp, Zea mays
  Clone ID: LIB3061-038-Q1-K1-A10
gcaacatagaaagcacaatagtgtaccaacaatggcagccaaaatattttgcttccttgatgctccttggtctttctgcaagtgttgctaccgcaaccattttcccacaatgctcacaagctcctatagcttcccttcttcccccatacctctcaccagcggtgtcttcaatgtgtgaaaccccaattgttcaaccctacaggatccaacaggcaatcgcaacaggcatcttaccattatcacccttgttcctccaacaaccgtcagccctattacagcagttacctttggtccatttggtggcacaaaacatcaaggcacaacaacta

SEQ ID NO: 2281 - DNA, 356 bp, Zea mays
  Clone ID: LIB3061-038-Q1-K1-A11
cggtaagacgacacacattatcattgtgtggtatagaccaataatatatagcatcataataagagttctggttgttaaagagaaaaaaaagaaaaaaaaaagaaaaaaaaagaaaacaaaaaataaaaaaacaaaaaataaaataaaaataaattaaaaaataacataaacaacagaggagaaaatcaatgaagaaaaaaaacaatagatcaatccatacaggatccaacaggcaataagcaacaagcatcttaccattatcacccttgttcctacaacaaccgtaacaccttattacagcagttacattaggtacatgggatgagacaaaacatcatggcacaacatctacaaca

SEQ ID NO: 2282 - DNA, 192 bp, Zea mays
  Clone ID: LIB3061-038-Q1-K1-A12
attatcactcttgttcctccaacaaccgttagccctattacagcaggtagccttagttcattatgtggcacaaaacatcagggcacaactactacaacaacttgtgctagcaaaccttgctgcatactctcagcaacatcagagctttccattcaaccaactggctgcattgaactctgatacttatttgca

SEQ ID NO: 2283 - DNA, 387 bp, Zea mays
  Clone ID: LIB3061-038-Q1-K1-A2
ctggaacaaggatcctattcagcctaacggaactgctggtcagtccacactggaggggggttatggaaagttgcaggcaaccgttagaaagatcctggaaatggttgacacacaggaagaatcagtgattccaccaatgacgccctctgattttcttgagctgactgaaagtgtcactgtctttacatgacgctttggtttaaccatgcgtgatgcatgcagccttgagcatacgaatagcattggcttgtttggtggtcgtcgtcgtatcttgcaaccccagcccagaatgaccagatgtatcgcgctgatgtcaaactgctagttatcaccatgcaaagagctttaaatcaacttcagaaggtattataaagttggtgcaaatta

SEQ ID NO: 2284 - DNA, 363 bp, Zea mays
  Clone ID: LIB3061-038-Q1-K1-A3
tgtctttgccttttcccggaatacttgggaattcctggtggaagcttcgttgaagggagcgaatttagtcttgactgtagtagaagtttggcctaagagtttgtaggctttcaagcttcagaaatggtttcttctcagccatcctctctgactgcaattctcgcacagggccccaaccactgcccagtcaatatactcctcccgatggggcccccagatgtcgtctcctcagataatgttgagtacgatttctctgatgttttgggttccaccccggtccaaacaccaacaaacctttggggttttggtccggagagtcctgcacctactgttgagtccaatgaagaattttacagtgatcct

SEQ ID NO: 2285 - DNA, 405 bp, Zea mays
  Clone ID: LIB3061-038-Q1-K1-A4
caacaagcaacatagaaagtggaatacagtagcaaaaatagagcaacaatggcgggcaggatattttccatccttatgctccttgctctttctgcatgtgttgctaacgcgaccatttttcctcaatactcacaagctcctatagctgcccttcttcccccataccttccatcaatgaccgctttagtatgtgaaaacccagcccttcaaccctacaggatccagcaagcaatcgcaacaagcaacttacctttatcacacctgttctttcaacaatcgccagccctatctttggtgcagtcattggtacaaaccatcagggcagaacagttgcagcaactcgtgctaccagtgatcagccaagtagctctggcaaacctttccccctactctcagcaacaacaa

SEQ ID NO: 2286 - DNA, 258 bp, Zea mays
  Clone ID: LIB3061-038-Q1-K1-A5
acgcgtccgatggactttggcgaagcctgatgtttgccagtgcagagattttgctgaaagtgcgaggtgctgcggtagacatgaggcctggtctggccgtgacttgcctggttttgatacacaattcactggctcactgcgcatcctattccctatcatgtgaagtcaagttttcaacaattatatctgttgatttgaggtggaaatataaattgttgtaaagcacaatttgtttgaactgtagagcactacttcgcc

SEQ ID NO: 2287 - DNA, 425 bp, Zea mays
  Clone ID: LIB3061-038-Q1-K1-A6
ctttctacatgtgttgctaacgcgacaattttccctcaatgctcacaagctcctatagcgtcccttcttcccccataccttccatcaattatagcttcaatatgtgaaaacccagctcttcaaccatataggcttcaacaagcaatcgcagcaagcaacatacctttatcgcccttgttgtttcaacaatcgccagccctatctttggtgcagtcattggtacaaaccatcagggcacaacagctgcagcaactcgtgctacctctgatcaaccaagtagctctggcaaacctttctccctactctcagcaacaacaatttcttccattcaaccaactgtctacactgaaccctgctgcttatttgcagcaacaactattaccatttagccagctagctactgcctactctcagcaacaacaact

SEQ ID NO: 2288 - DNA, 428 bp, Zea mays
  Clone ID: LIB3061-038-Q1-K1-A7
cgcatgcgcaggtagcaacatagaaagcacaatagtgtaccaacaatggcagccaaaatagggggcggccttatgctccttgggctttctgcaagtgctgctacggcgaccattttcccgcaatgctcgcaagctcctatagcttcccttcttcccccgtacctctcaccagcggtgtcttcggtatgtgaaaacccaattcttcaaccctacaggatccaacaggcaatcgcagctggcatcttacctttatcacccttggtcctccaacaatcatcagccctattacaacagttacctttggtgcatttattggcacataacatcagggcacaacaactacaacaacttgtgctagcaaaccttgctgcctactctcagcaacagcagtttcttccattcaaccaactaggttcattgaactctgc

SEQ ID NO: 2289 - DNA, 425 bp, Zea mays
  Clone ID: LIB3061-038-Q1-K1-A8
cagggcaaacaagtagcgacagctcgactaagatttgtgagagtgatccggcgctgaggagagatggctaagatcgccggagccgccgcggcggcggcggcgctgtgcttcgcggccctggtggccgtggccgtctgccaaggcgaggtcgagcggcagaggctcagggacctgcagtgctggcaggaggtccaggagagcccgctcgacgcgtgccgccaggtcctcgaccggcagctaaccggcggcggcgtcggcggcccgttccggtggggcaccgggctccggatgcggtgctggcagcagctccaggacgtgagccgcgagtgccgctgcgccgccatccggagcatggtcaggggctacgaggaggccatgccgcctctggagaaaggctggtggccatgggggcggcagcagcagcc

SEQ ID NO: 2290 - DNA, 341 bp, Zea mays
  unsure (1)..(341): unsure at all n locations; Clone ID: LIB3061-037-Q1-K1-H2
gcggccccaactacccncagtctcggaagagaactatccagaagcgcaagactccaaagccgtcgcgttcgtatccattccgttcttggcccggggggtcggctgagatcacatanacaatggtgaaggctgttgctgtgcttggtagcagcgatggtgtcaaggcaccaatctttttcacccaagtggaaaagggccttacaattgcaaccgaaggggcttttgccttaagccttgccttcattggtttcatgggccttcccttggtgaccccacccatggcttcatggtaactggaccacacttccattctgcgaaccagggaccttgagcccccgaag

SEQ ID NO: 2291 - DNA, 377 bp, Zea mays
  Clone ID: LIB3061-020-Q1-K1-D12
acgaaagcacacgaagcgaatcgcactagcattgacctaacaccaatggctaccaagatatggcccggcttgcgcttcttgcccttttagtgagcgcaacaaatgcgttcattattacacagcgctcacttgctcctagagccattattccacagttcctcccaccagttacttcaatgggcttcgaacatccagccgtgcaagcctacaggctacaactagcgcttgcggcgagcgccttacaacaaccaattgcccaattgcaacaacaatccttggcacatataaccctacaaaccatagcaacgcaacatcaacgacaacaacagtttctgccatcactgagccacctatccgtggtgaaccctgtcacctac

SEQ ID NO: 2292 - DNA, 444 bp, Zea mays
  Clone ID: LIB3061-020-Q1-K1-D2
atttctaccagcactgagccaactagctgtggtgaaccctgtcgcctacttgcaacagcagttgcttgcatccaacccacttgctctggcaaacatagttgcataccaacaacaacaacaattgcaacagtttctaccagcgctcagtcaactagccatggtgaaccctgccgcctacctacaacagcaacaactgatttcatctagccctctcgctgtggttaatgcacctacatacctgcaacaacagttgctgcaacagattgtaccagctctgactcagctagctgtggcaaaccctgctgcctacttgcaacagctgcttccattcaaccaactgactgtgtcgaactctgctgcgtacctacaacagcgacaacagttacttaatccactagcggtggctaacccattggtcgttgccttcctacagcagcaacaatt

SEQ ID NO: 2293 - DNA, 407 bp, Zea mays
  Clone ID: LIB3061-020-Q1-K1-D4
agtatagccgctggctagctagctagtttagtcatttagcggcgatgattgagtaataatgtgtcacgcatcaccatgggtggcagtgtcagtgtgagcaatgacctgaatgaacaattgaaatgaaaagaaaaaagtattgttccaaaaaaaaaaaaaaaaaaaaaaaaaaaaaaaaaaaaaaaaaaaaaaaaaaaaaaaaaaaaaaaaaggaaaaaattaaaaaaaaaaaaaaaaaaaaaaaaaaaaaaaaaaaaaaaaaaaaaaaaaatttaaaaaaaaataaaaaaaataaaaaaaaaaaataaaaaaaaataaaaaaaaaaaaaaaaaataaaaaaaaaaaaaaggggggcccctttaaaggaaccaattttaaattcccgggtttggaagaataaaacttt

SEQ ID NO: 2294 - DNA, 424 bp, Zea mays
  Clone ID: LIB3061-020-Q1-K1-D5
atcgcagcaagcaacatacctttatcgcccttgttgtttcaacaatcaccagccctatctttggtgcagtcattggtacaaaccatcagggcacaacagctgcagcaactcgtgctacctgtgatcaaccaagtagctctggcaaacctttctccctactctcagcaacaacaatttcttccattcaaccaactgtctacactgaaccctgctgcctatttgcagcaacaactattaccatttagccagctagctactgcctactctcagcaacaacaacttcttccatttaaccaattggccgcactgaaccccgctgcttatttgcagcagcaaatactactgccatttagcgagctagctgcagcaagtcgtgcttccttcttgacacagcaacagttgctgcctttctacaagcagtttg

SEQ ID NO: 2295 - DNA, 418 bp, Zea mays
  Clone ID: LIB3061-020-Q1-K1-D6
tttgtttttttttttttttttttttttttttttttgttttttttttttttttttggtttttttttttttttttttttttttttttttttttttttttttttttttttttttttttaaaaaaaaaaaaaggggaaaaaaggttttttttggaaagggaaaaaaaaaaaaaaaagaaaaaagaaagggggggggggattaaaaaggggggatgggggggtttaaaaaacaggggggcaataaaagggaaaaaaactcaaaaaaaaatttgggacggggttaaaaacctaattttttgccaaaaaaaaggggggggggaaaaaaaggggcccattgtttattaaaaaaattgaggtatatttcccagggggaaaaaaccaaataaatttttggggagggggtaacgcattttttaatgggg

SEQ ID NO: 2296 - DNA, 383 bp, Zea mays
  Clone ID: LIB3061-020-Q1-K1-D7
gatcagcaaagcggcagtgcgtagagaggatcgtcgaacagaacagcatgaagatggtcatcgttctcgtcgtgtgcctggctctgtcagctgccagcgcctctgcaatgcagatgccctgcccctgcgcggggctgcagggcttgtacggcgctggcgccggcctgacgacgatgatgggcgccggcgggctgtacccctacgcggagtacctgaggcagccgcagtgcagcccgctggcggcggcgccctactacgccgggtgtgggcagccgagcgccatgttccagccgctccggcaacagtgctgccagcagcagatgaggatgatggacgtgcagtccgtcgcgcagcagctgcagatgatgatgcagcttgagcgt

SEQ ID NO: 2297 - DNA, 442 bp, Zea mays
  unsure (1)..(442): unsure at all n locations; Clone ID: LIB3061-020-Q1-K1-D8
ccttcttgaacttagcggaaacaatgccatcattgttatggatgatgtagatatccagctagctgtgcgatctgtcttgttcgctgctgttggtacagcaggacaacgctgcaccacatgtcgtaggctgattcttcatgagaacatatatcaaaccttccttgatcagcttgttgaggtatacaaacaagtccgaattggggatccgttggagaaaggcaccttactgggaccactgcacactcctgcttcaaaagagaactttttgaaaggcattcagactatcaaatctcagggagggaaaatcctttttggaggatctgccattgaatcagaaggaaactntgtgcaaccgacaattgtggaaattacaccttctgcaccagttgtgaaagaagaactctntggtcctgtcctttatgttatgaaatttcagaccttg

SEQ ID NO: 2298 - DNA, 322 bp, Zea mays
  Clone ID: LIB3061-020-Q1-K1-D9
cggcccgacccacgcgtgctaaggtcgagaggttctccgggttccggtttcgagggtgagcggatcgagatgggggcggcggatgttgagtaccgctgcttcgtcggcggcctcgcctgggccacagacgaccactccctccacaacgccttcagcacctacggcgaggtcctcgagtccaagatcatcctcgatcgggagacgcagatgtcccgcggcttcagcttcgtcaccttttccacggaggaggcgatgcggaacgccatcgatggcatgaacggcaaggagctggacggccgctacatcaccgtcaacgaagccc

SEQ ID NO: 2299 - DNA, 396 bp, Zea mays
  Clone ID: LIB3061-020-Q1-K1-E1
tgagcccatccaagacatggatactattgcacaacctactttccagatacaggagggtgataaccacactgggaatcaagaaatcataccaaggagaaaaagtatgggcaggcaacttgaatcgttaagcagaggactgggaatcaatattccaatccaaatcactgaagggaacaaaaggccagagccacctattcaagctgctaagtttgcatcagagggtggaatcacattgaggcagcacattccaatatttaaccattggaaggaatacaagaagagagagaatgaacctataataagaaactacattggcaaagttactgctaatttcacggtggacagtgagagcaagacagtggaagatgcatgtctagacatgctaaagagtggaca

SEQ ID NO: 2300 - DNA, 390 bp, Zea mays
  Clone ID: LIB3061-020-Q1-K1-E10
caaagaacttgagacattgaagccagttgtgcagcggcagattgccgatcataacagaggaggtactgtggaatctaatatgaatagtctaaatggagacaatggtacaactcataggatagagcagcatactccaagctcttatactccacagccatttgtaggtagcactaatggagcatcgcaaaaatccttccatgctgggagacaagtggcatcattactgagtgtccagaaacaatatatgaatctaccatatccaaaagaagaaacactagctagacactccatattaggacctaacggtcttaatggtcgatggaatgggcctgttactggaattaaagttcagtatccaagcaattttgaattaacacaaaacgatataac

SEQ ID NO: 2301 - DNA, 389 bp, Zea mays
  Clone ID: LIB3061-020-Q1-K1-E11
cccaactctggcattcctcagttaggcatttttcagacacagcctatgattcaaccaaactcacattggccaaatcagcaggaagtacacattgtctcacaaccacaagatgaaacaaactatcagacatcccaatcaggtcagactgcattgcaacaagacactattaatactgatgagctgtcccccaaggcaagtgagggtggccatccagaccatcttaatgcccaggggaaacaacagcagagccctgcaagtgcacctactgaatcaactcatgaacttactgttgttgaaacaaacatagctgaacatgtaccttatgatgaacaacaaaaaaccttaaaagaacaggattcactatcaaatataaaaagccatgttggaag

SEQ ID NO: 2302 - DNA, 452 bp, Zea mays
  unsure (1)..(452): unsure at all n locations; Clone ID: LIB3061-020-Q1-K1-E12
ggattcccggtcgaccagcgtncgactctctggttgagtaaacggcttttgattaaaatggtactggtaaagagaggaactctttgcaaatgggtcctatttcgacagggcgccaccaaactcccagagactgaacttgcaagctgcaggcgttgagattgaccgggttggagccatcaaggttgacgaatattctcgtacttctgctcctagtgtatgggctgtgggtgatgtaacaaaccggattaatttaacacctgttgcattgatggaggcaacttgctttgctaaaactgtgtttggtggccagcaagttaagcctgatcacagagatgttccttgtgctgttttctccattccaccactatctgtagtgggcctcagcgaagaacaggccttggaggaagctaatggtgatattcttgttttcatctcatcattcaacccaatga

SEQ ID NO: 2303 - DNA, 312 bp, Zea mays
  Clone ID: LIB3061-020-Q1-K1-E2
ttgcgttacccggcggcttaaaccctatttcccattccatcttcggttccgctccgccggcggcgatggagttctggggtcttgaggtcaaacctggatccactgtcaagtgtgaacctggacatgggtttatcctggacgtttcccaagctggccttggggaatcaaagaaaagtgaccgtgccttaatggatgtcaaagttgatgaccagaagcttggcattggaaccctttctattgaccaatacccaccggttccattccatttggttttcaataaagagattgagccggcacacaccttgaaaactt

SEQ ID NO: 2304 - DNA, 411 bp, Zea mays
  Clone ID: LIB3061-020-Q1-K1-E3
gagagctattccacctcgtctcaggcaccctcgggggtccccttcccccgccgcgtgccggcgagccgcggagatccgggttctgacctcgcctccttctgctgacttgtgaacgaggcagcatcatagttcagtttggaaacatgtcatcgaagaagatagagttggatcacaaggacatggtccatgattctgccatcgactactatggcaagcgccttgccactgcctcttcagacttcaccgtgaagatcgtcaacattggtgctgcaaatgccccatcccaggtccttgcaacgctaagtggccactatggtcctgtgtggcgtgttgcttgggcccatccaaagtatggtgcaatccttgcatcgtgcagttatgatggccgtgtcattatttggaaagaggatg

SEQ ID NO: 2305 - DNA, 444 bp, Zea mays
  Clone ID: LIB3061-020-Q1-K1-E6
agaccattagctttatctactccagagcgcagaagaacccgatcgacaccatgagggtgttgctcgttgccctcgctctcctggctctcgctgcgagcgccacctccacgcatacaagcggcggctgcggctgccagccaccgccgccggttcatctaccgccgccggtgcatctgccacctccggttcacctgccacctccggtgcatctcccaccgccggtccacctgccgccgccggtccacctgccaccgccggtccatgtgccgccgccggttcatctgccgccgccaccatgccactaccctactcaaccgccccggcctcagcctcatccccagccacacccatgcccgtgccaacagccgcatccaagcccgtgccagctgcagggaacctgcggcgttggcagcaccccgatcctgggccagtgcgtcgagtttc

SEQ ID NO: 2306 - DNA, 407 bp, Zea mays
  Clone ID: LIB3061-020-Q1-K1-D11
tcggattcccggtcgaccacgcgtacgaaacccaccaagcgaacgcactaccatcacctaccaccacggcttccaagatattgggccctcctgggcctctttgccctttaaatgggcgcaaccaaatgcgggcattattactaagggctcacttgctcctagagccagatttccacagttactaccaccagttacttcaatgggctcagatcatccaaccgtgctagcctacaggctacaactagcgcttgcggcgagcgccttacatcaaccaattgtccaattgcaacaacaatccttggcacatctaaccctacaaaccattgcaacgcaacatccacaacaacaacagtttatgccatcactgagccacctagccgaggtgaaccctgtcacctacttgcaac

SEQ ID NO: 2307 - DNA, 314 bp, Zea mays
  Clone ID: LIB3061-020-Q1-K1-B9
cccttcgcgatgtaatatgagccgtataattggaatcggaaggctccgatttgtccatgttaaggcggctatgtgacaattgctaaagaagccctggctaaaaaaaaaaaaaaaaaaaaaaaaaaaaaaaaaaaaaaaaaaaaaaaaaaaaaataaaaaaaaaaaaaaaaaagcatcaatatgaaaaaaacccaataaatcaaccataaagagtaacaaaaagcaatcaaataaaaaaaagatgagccatagtttaaaagatcaaacaacaatcaccagccatacttatgaaacagtcttttatacaaaccatt

SEQ ID NO: 2308 - DNA, 445 bp, Zea mays
  Clone ID: LIB3061-020-Q1-K1-C1
cagtagcaacaatagagcaacaatggcgaccaagatactttccctccttatgctccttgctctttctgcatgtgttgctaacgcgacaattttccctcaatgctcacaagctcctatagcttcccttcttcccccataccttccatcaatgatagcttcagtatgtgaaaacccagctcttcaaccctataggctccaacaagcaatcgcagcaagcaacatacctttatcacccttgtttcaacaatcgccagccctatctttggtgcagtcattggtacaaaccatcaaggcacagcagctgcagcaactcgtgctacctgtgatcaaccaagtagctctggcaaacctttctccctactatcagcaacaacaatttcttccattcaaccaactatctacactgaaccctgctgcttatttgcagcaacaactattaccattc

SEQ ID NO: 2309 - DNA, 439 bp, Zea mays
  Clone ID: LIB3061-020-Q1-K1-C10
gaccaactagcaacatagaaagcacaattgtgtaccaacaatggcagccaaaatattttgcttccttatgctccttggtctttctgcaagtgctgctaccgcaaccattttcccacaatgctcacaagctcctatagcttcctttcttcccccatacctctcaccagcggtgtcttcagtatgtgaaaacccaattcttcaaccctacaggatccaacaggcaatcgcagcaggcatcttacctttatcacccttgttcctccaacaaccgtcagccctattacagcagttacctttggtgcatttgttggcacaaaacatcaaggcacaacaactacaacaacttgtgctaggaaaccttgctgcctactctcagcaacagcagtttcttccattcaaccaactggctgcatttgactctgctgcttatttgcaacaa

SEQ ID NO: 2310 - DNA, 434 bp, Zea mays
  Clone ID: LIB3061-020-Q1-K1-C11
tgcgatttcgatctcgcagccaccttttttttgttctgttgtgtatctagtagttggaggagatatgcagtttgcacttgcattggacacgaactcaagtcctcaccagataagatcttgtgagggtgatgggattgacaggttggaaaaattaagtattgggggcagaaagcaggagaaagctttgagaaataggtgctttggtggtagagttgctgcaactacacaatgtattcttacctcagatgcttgtcctgaaactcttcattctcaaacacagtcctctaggaaaaattatgctgatgcaaaccgtgtatctgctatcattttgggcggaggcactggatctcagctctttcctctgacaagcacaagagctacgcctgctgtacctgttggaggatgttacaggcttattgatatccctatgagta

SEQ ID NO: 2311 - DNA, 423 bp, Zea mays
  Clone ID: LIB3061-020-Q1-K1-C12
cctgacgcgcggaactggcggtggcgatctcatctaatggccatccatgccccgctccgcctctgcctccgcctccatgcgaggaaggtagccagacgcgtataaagggcagccagaaattcagatccacctgtatgcgtctccgttcgttcacgccacaggcaaggcacagaggcttgtgagggagagcgaggagcggatgaggacatggtgcacgggacgctggaagtgctgctcgttggggccaagggcctcgagaacaccgattacctctgtaacatggatccgtatgcaattctcaagtgccgttcacaggagcagaagagcagtattgcaactggaaaaggaactacccctgagtggaatgaaaactttatcttcactgtgtcttgacctgacaacagacttgggtatcaagcttat

SEQ ID NO: 2312 - DNA, 422 bp, Zea mays
  unsure (1)..(422): unsure at all n locations; Clone ID: LIB3061-020-Q1-K1-C2
gaactagcaacatacatagtgaagtacactagcaacatcttagcaccaatggcagccaagatttttgccatccttgccctccttgctctttcagcaagcgttgctaccgcgactattattccacaatgctcacaacaatacctctctccggtgacagccgcgagatttgaatacccaactatacaatcctacaggctacaagaggccatcgcagcaagcatcttacggtcgttagcattgaccgtccaacaaccatatgccctattgcaacaaccatccttaatgaatctatatctccaaagaatcgcagcacaacaactacaacaacagttgcttccaacaatcaatcaagtagttgcagcgaaccttgctgcttacctncagcaacaacaatttcttccattcaatcaactagctggggt

SEQ ID NO: 2313 - DNA, 428 bp, Zea mays
  Clone ID: LIB3061-020-Q1-K1-C3
cccacgcgtccgagccctggagtctgacgacctcgtttccctgctgtctcgcctctctttcggttctcacggcgacgactgggcgagcgccgcctcccctccctcgctcgtgaggtcctcgccggcgacgagtgccgccgcccgtttccatgttttttccgccgattagtgtccaccagatctagtgaaggctggtaacttgacgcaaggtgttcaagaaatttaagccacacactcttcatcataggcccaggcaatatttgtgttaatctcagggacctccagtagattgctgagagttatccttgatacaggggaatatagacacagaattttttgaacattgatctgtagccagtgctgcaatggctacaaagcttgtggttctcggtatcccctgggatgttgacactgaagggttacgagag

SEQ ID NO: 2314 - DNA, 452 bp, Zea mays
  Clone ID: LIB3061-020-Q1-K1-C4
cggacgcgtgggcaactagcaacatagatagcacaatagtgtaccaacaatggcagccaaaatattttgcctccttatgctccttggtctttctgcaagtgctgctacggcgaccattttcccgcaatgctcgcaagctcctatagcttcccttcttcccccgtacctctcaccagcggtgtcttcggtatgtgaaaacccaattcttcaaccctacaggatccaacaggcaatcacagctggcatcttacctttatcacccttgttcctccaacaatcatcagccctattacatcagttacctttggtgcatttattggcacaaaacatcagggcacaacaactacaacaacttgtgctagcaaaccttgctgcctactctcagcaacagcagtttcttccattcaaccaactagctgcattgaactctgcttcttattgcaacaacaaca

SEQ ID NO: 2315 - DNA, 446 bp, Zea mays
  unsure (1)..(446): unsure at all n locations; Clone ID: LIB3061-020-Q1-K1-C5
cggacgcgtgggcggacgcgtggggttgagggtctgatgaccactgtccatgccatcactgctacccagaagactgttgatgggccctcatctaaggactggaggggtggaagggctgctagtttcaacatcattcccagcagcactggagctgctaaggctgttggcaaagtgcttcctgtccttaacggaaagttgactggaatgtctttccgtgtcccaaccgtcgatgtttctgttgttgatttgactgttaggcttgaaaagtcagcaacctatgatgagatcaaggctgcggtcaaggccgaggcagaaggtagcctcaagggcatcctgggttacgttgaagaggaccttgtttccaccgatttccagggtgacagcaggtctagcatctntgatgctaaggctggcattgccttgaacggcaacttcgtgaagctcgt

SEQ ID NO: 2316 - DNA, 437 bp, Zea mays
  Clone ID: LIB3061-020-Q1-K1-C6
gccaaaatattttgcctccttatgctccttggtatttctgcaagtgctgctacggcgaccattttcccgcaatgctcacaagctcctatagcttcccttcttcccccgtacctctcaccagcggtgtcttcggtatgtgaaaacccaattcttcaaccctacaggatccaacaggcaatcgcagctggcatcttacctttatcacccttgttcctccaacaatcatcagccctattacagcagttacctttggtgcatttattggcacaaaacatcagggcacaacatctacaacaacttgtgctagcaaaccttgctgcctactcttaacaacagcaggttctttcaattcaaccaactagctgcttggaactctgttcctaatttgccacaccaccaactaccattcagccagctacctgatgcctacccccaac

SEQ ID NO: 2317 - DNA, 430 bp, Zea mays
  Clone ID: LIB3061-020-Q1-K1-C7
cggacgcgtgggcaactagcaacatagaaagcacaatagtgtaccaacaatggcagctaaaatattttgcctccttatgctccttggtctttctgcaagtgctgctacggcgaccattttcccacaatgctcacaagctcctatagcttcccttcttcccccgtacctctcaccaacggtgtcttcggtatgtgaaaacccaattcttcaaccctacaggatccaacaggcaatcgcagctggcatcttacctttatcacccttgttcctccaacaatcatcagccctattacagcagttacctttggtgcatttattggcacaaaacatcagggcacaacaactacaacaacttgtgctagcaaaccttgctgcctactctcagcaacagcagtttcttccattcaaccaactagctgcattgaactct

SEQ ID NO: 2318 - DNA, 407 bp, Zea mays
  Clone ID: LIB3061-020-Q1-K1-C9
cggacgcgtgggcgaccctgtcgtggctttgaggaggttcttgtaaggtatcgacagattgtaccacatttgaacctttcaggaccaacttcttttgcacctcttatttatgcagcgatttctgttgttgaaaacagtaattggcagtaccatgtcctcgtgatcatagctgatggacaggtgactgccgcgaatataaatgatggaagattaagtccacaggaacaagcaactatacaagcaattgtcgatgctagctactatcctctttcaatagtaatggttggggtgggtgatggaccatgggatgcgatgcagcattttgatgactgtatccctgaaagagcttttgacaattttcagtttgtgaacttcactggtattatgtcaacaaagtaggatatgtc

SEQ ID NO: 2319 - DNA, 397 bp, Zea mays
  Clone ID: LIB3061-020-Q1-K1-D1
tgttcttctccactgtacgcaccggcaatgtgaatgagttgagaaattcatggcactccgggtggtggccagtgaagattgccctcttcatggtctgttctctcatctctgtcttggctccatcctggtggatccaaatctatgttatgaaacattgtagagtcagaagacgacgtaccatatgggtatggttttttccattttgccttcgcggcgggctccatgtacgtcaggatggtgtttgtcggctgggacacacatcatacaatgaagcaatggagcgtggatattgggtggatgagcacgtgggttcatatcgccaatgaggctctcgtagtagtattctacatagcaatacttgctgctagaattttcggaataggcttgctccgacatc

SEQ ID NO: 2320 - DNA, 372 bp, Zea mays
  unsure (1)..(372): unsure at all n locations; Clone ID: LIB3061-020-Q1-K1-D10
ggcaatcgcagctggcatcttaccttttcacccttgtcctccacaatatcaccctattacaacagtacctttggtgcatnattggcacaaaacatcaggcacaacactacaacacttgtgctagcaaccttgctgctactctcacaacagcagtttcttccattcaaccaactaggttcattgaactctgcttcttatttgcaacaacaacaactaccattcagccagctacctgctgcctacccccagcaatttcttccattcaaccaactagcagcattgaactctcctgcttatttacagcagcaacaactactaccattcagccagctagctggtgtgagccctgctaccttcttgacacaaccacag

SEQ ID NO: 2321 - DNA, 430 bp, Zea mays
  unsure (1)..(430): unsure at all n locations; Clone ID: LIB3061-020-Q1-K1-B8
gcagggcagccacaagcaaatgtggttcctattccaatccccggtgatggcgttgggcactgttccgaagaaaaacatgagggtgcctgctctgagagcaaacgggaggacacacatgctggagccatcagaacggctgatctgttggcctcagaagtcgctgggagctgggcagtggaaacagctccgtctgtcaatggggagaacgaatctccaaggagcttgggcgatgctacagagcacgatgaagctggaggcagcgctgcaggcgatgctttggtaactctggtgaactcagagggccaggcggctgggagccagaacaacgttgagcgtggcagcttccaaaataacccatcatcatcatcatcaccatcgtgttcttagtgccatgattggaatngntgatcctgagttcangaagcaaatg

SEQ ID NO: 2322 - DNA, 365 bp, Zea mays
  Clone ID: LIB3061-020-Q1-K1-A3
cctcctcgcctttctcgcagcttccgccactctactcgtcgccttacgcggcttcgacggcgtcgggcgtggctgggccgatgggcctgaaccagctcggcccggcccagatccagcagatccaggcccagctcatgttccagcaccagcagcagaggggcctgcacgcggcgttcctgggcccgcgggcgcagccgatgaagcagtccgggtcgccgccggcgcagtcgaagctgtaccgcggcgtgcgccagcgccactggggcaagtgggtggcggagatccgcctccccaagaaccgcacgcggctgtggctcggcaccttcgacaccgccgagggcgcggcgctggcctacgacgaggcg

SEQ ID NO: 2323 - DNA, 397 bp, Zea mays
  Clone ID: LIB3061-020-Q1-K1-A4
agaaagtggaatccagtagcaacaacagttcaacaatggcgaccaagatattttccctccttatgctccttgctctttctgcatgtgttgctaacgcgacaattttccctcaatgctcacaagctcctatagcttcccttcttcccccataccttccatcaatgatagcttcagtatgtgaaaacccagctcttcagccctataggctccaacaagcaatcgcagcaagcaacatacctttatcacccttgttgtttcaacaatcgccagccctatctttggtgcagtcattggtacaaaccatcaaggcacagcagctgcagcaactcgtgctacctgtgatcaaccaagtagctctggcaaacctttctccctactctcagcaacaacaatttct

SEQ ID NO: 2324 - DNA, 265 bp, Zea mays
  Clone ID: LIB3061-020-Q1-K1-A6
gaaggcaggaattgttggcaaatatggaaccaggtatggtgctagcttgcgtaagcaaatcaagaagatggaggtatctcagcattccaagtacttttgcgagttctgtgggaagtttgctgtgaagaggaaagcagttggaatttgggggtgcaaggactgtgtgatggagaaggctggtagagcttacaccatgaacactgcttgtgcagtcaccggttgagcacagattcttagcatgaggatttgccgatgcatgatatat

SEQ ID NO: 2325 - DNA, 467 bp, Zea mays
  Clone ID: LIB3061-020-Q1-K1-A7
atcagatcacagttgacacaaaagcaagctcctgaccagtgaccacacctaatgaagaacaggcagctgcgccgcagcacacacacacacaccgaccagcgcagagagctatttgattcagatgcgcatttggctgattcagatgcgcatttggcagaaggcaatcgctgagcgcgaaggagtaaaagcatgatcagatattcagatcttggatcagtctagactgacaccttaggtcgccctttacaaatatgacttaaaaaggatgtgaacagagtagtacagcacatgctttggaagtttggatattcttgtccgtgtaacttcccacatgaacaacgagcaaagcgtcgcctgcatgcatcaattaatggcttaaagctattgagtgctgatactgagcagttttccagtgagcctgttacacccttcctggctatagagcgtagacgatagcgatagttcaa

SEQ ID NO: 2326 - DNA, 276 bp, Zea mays
  Clone ID: LIB3061-020-Q1-K1-A8
gaattcccggctcaccacctccgatgagttatagttcaataataaatctaaataaggcaccacaacacacctggcacggtacttcctcctactaattcctaactcacaattttcctacatgcttacaaaactataacttccttcttccacataccttcattaatatagcttcatatataaaacccaacttatatcctatagctccacaacaattccacagcaacatacctttaaacccttgatattcaacaatcccaccctatcttctttcaaaat

SEQ ID NO: 2327 - DNA, 351 bp, Zea mays
  Clone ID: LIB3061-020-Q1-K1-A9
ggcctctgtccctcgcaagttcaatctcacctccaaccatgggtaaagagaagtcccacatcaacattgtggttattggtcatgtcgactctggcaagtcgaccaccacaggacaccttatctacaagcttggaggcattgacaagcgtgtgatcgagaggttcgagaaggaggctgctgaaatgaacaagcggtccttcaagtacgcgtgggtgctcgacaagctcaaggctgagcgtgagagaggtatcaccattgatatcgctctgtggaagtttgagaccaccaagtactactgcacggtcattgatgcccctggacaccgtgacttcatcaagaacatgatcactg

SEQ ID NO: 2328 - DNA, 370 bp, Zea mays
  Clone ID: LIB3061-020-Q1-K1-B1
ctctgcttcttatttgcaacaacaacaactaccattcagccagctatctgctgcctacccccagcaatttcttccattcaaccaactgacagcattgaactctcctgcttatttacagcagcaacaactactaccattcagccagctagctggtgtgagccctgctaccttcttgacacaaccacagttgttgccgttctaccagcacgctgcgcctaacgctggcaccctcttacaactgcaacaattgctgccattcaaccaacttgctttgacaaacccagcagcattctaccaacaacccatcattggtggtgccctcttttagatttcttatgagttatagttcaataataaagttttttgtctg

SEQ ID NO: 2329 - DNA, 247 bp, Zea mays
  Clone ID: LIB3061-020-Q1-K1-B10
caacgcgtgccccgtgttcaacaaggacttggactgctgcgtcggctctgcatccaacgactgacacccgaccaactactccacgtactttacggggcagcgccccgacgcgtacagctaccccaaggatgacgccaccagcaccttgacatgcctcgtcgtaaccaactacgaggttgttttttgaccatcaggccgctgaactagcattaccgtgcgcgcctataccatgaacaacatctaaact

SEQ ID NO: 2330 - DNA, 441 bp, Zea mays
  Clone ID: LIB3061-020-Q1-K1-B11
ggctagcaaaccttgctgcatactctcatcaacatcagtttcttccattcaaccaactggctgcattgaactctgctgcttatttgcaacaacaattaccattcagccagctagttgctgcctacccccagcaatttcttccattcaaccaactagcagcattgaactctgctgcttatttacagcagcaacaactactaccattcagccagctagctgatgtgagccctgctgccttcttgacacaacaacagttgttgccgttctacctgcacgctatgcctaacgctggcaccctcttacaactgcaacaattgctgccattcaaccaacttgctttgacaaacccaacagtgttctaccaacaacccatcattggtggtgccctcttttagattgcttatgagttatagttcaataatgaaagtttttggatgatgt

SEQ ID NO: 2331 - DNA, 436 bp, Zea mays
  unsure (1)..(436): unsure at all n locations; Clone ID: LIB3061-020-Q1-K1-B12
gatgagtctgaccgtctgctaaagatggtagagacactgcatacacgtatcattggccaggacgaggctgtcaaagctattagccgtgctatccgccgtgctcgtgttggcctgaagaatccaaataggccaattgccagcttcatattctctggaccaactggagttggcaaatcagagctagcaaaggctctggcagcctactactttggctcagaggaggctatgattaggcttgacatgagtgagttcatggagagacatactgtctccaagcttattggatcacctccaggttatgttgggtacactgagggaggccaactaactgaagcagtccgtcgccgcccatacacagttgttctctttgatgagattgagaaggcacatnctgatgttttcaacatgatgcttcagatattagaggatggggcga

SEQ ID NO: 2332 - DNA, 298 bp, Zea mays
  Clone ID: LIB3061-020-Q1-K1-B3
ccgacccacacgtacgcattggctgcaaaccattagctctaggtttaccttatcgcacaacaacccgatcgacacggtcagggtgtagctcgatgcaacccgtctactggctctcactgcgagcacgaccttcacgcatacaagctgcggctgcagctgccagccaccgacgccggatcatctaccaacgccggcgcatctgccacctacggtgcaccagccacctgctgcgcgtatcacaccgccagtacacctgttgccgccagtgcacctgctatagccggtgcatgtgctcgcg

SEQ ID NO: 2333 - DNA, 316 bp, Zea mays
  unsure (1)..(316): unsure at all n locations; Clone ID: LIB3061-020-Q1-K1-B4
atcgcattccccttccccctcttcgtcttcgtcggcggcgtcggaccgaacccgagcccggagccctaactaaccctaggaggcaggcggcggcggggatggtgtactacgcgctgttggtgggcgcggagctggatggcctcaccaacctgcagccccgccacggctgcgacgaccccaacttcccctactacctcaagctcaagtgcgagaactgcggngaggtcaccgncaagtccacctacgtcaccctcagcgagcaagtcgacctgcccaaaggacacggggccgctcacctcgtccagaagtgcaagct

SEQ ID NO: 2334 - DNA, 450 bp, Zea mays
  unsure (1)..(450): unsure at all n locations; Clone ID: LIB3061-020-Q1-K1-B5
cccacgcgtccgtctaaccatacaaaccatcgcaacgcagcagcaacaagcactgagccacctagccgtggtgaaccctatcgcctacttgcaacaacagctgcttgcatccaacccacttgctttggcaaacgtagctgcataccaacaacaacaacagttgcaacagtttctaccagcgctcagtcaactagccatggtgaaccctatcgcctacctacaacagcaacaacttctttcatctagcccgctcgctatgggcaatgcacctacatacctgcaacaacagttgttgcaacaacagttgctgcaacaaattgtaccagctcttactcagctagctgtggcaaaccctgctgcctacttgcaacaactacttncattcaaccaactgactgtgtcgaactctgctgcgtacctacaacagcgacaacagttacttaatccact

SEQ ID NO: 2335 - DNA, 449 bp, Zea mays
  Clone ID: LIB3061-020-Q1-K1-B6
cagctgctccgtctctcatttcaaactttaccgtaaatggttcgttctacagtatttccccccgtaagaggtgtatacggtgccagatcactaaccctgttggcgtgcattgacatacaatcaattgcagaacagcacaccgcacgtattttgtgcttttgccgcagaggatcctggggctttgcgccctgcttcagcctacaaagaccccgcgcacccaggctgcgtcctggtccttgctcttatcctatcctgcttttcttcgcttctctcttccccgctctctcattcttctcatacaagtctgttgttggagggacacacgtatccagcccaccaaagatttactcaatttatcccagacgagacacacactcgcaacgaccggaccgtcgaatctcgcgactccggcgacatgtcgacggcggtggcagaggtgcggccgctct

SEQ ID NO: 2336 - DNA, 448 bp, Zea mays
  Clone ID: LIB3061-020-Q1-K1-B7
cttcagaccattagctttatctactccagagcgcagaagaacccgatcgacaccatgagggtgttgctcgttgccctcgctctcctggctctcgctgcgagcgccacctccacgcatacaagcggcggctgcggctgccagccaccgccgccggttcatctaccgccgccggtgcatctgccacctccggttcacctgccacctccggtgcatctcccaccgccggtccacctgccgccgccggtccacctgccaccgccggtccatgtgccgacgccggttcatctgccgccgccaccatgccactaccctactcaaccgacccggcctcagcctcatccccagccacacccatgcccgtgccaacagccgcatccaagcccgtgccagctgcagggaacctgcggcgttggcagcaccccgatcctgggccagtgcgtcgagtttc

SEQ ID NO: 2337 - DNA, 278 bp, Zea mays
  Clone ID: LIB3061-020-Q1-K1-A2
cagaaacacaccaagcgaagcgcactagttacgacctaacaacaatggctaccaagatattagcgcttcttgggcttattggcctttttgggaacgccaaaaaaggggttaatatttcccaaaggctaatttgttccaagggcctttattccaaagttcctccaaccagttacttaaaggggctttgaacacctagttgtgcaagccaacttgcaacaacaagcgcttgcggcaagcgttttacaccaaccaattgccaaattggaacaacaatcctt

SEQ ID NO: 2338 - DNA, 273 bp, Zea mays
  Clone ID: LIB3061-037-Q1-K1-F5
tgcttaggttgagcaacaacaattgcttccattcaatcaactagcttgggttaaccctgctgcttacttgcaagcacgacaggtactaccattcaaccaacttgctttgacaaactcaacagtgttctaccaacaacccatcattggtagagccctctatagattgcttatgagttatagaccaataatgaatgatagctggatgatgtgagaaccgtgctataaatccatatgtgcatttctcaagcaatcgcatcaagcaacataccttta

SEQ ID NO: 2339 - DNA, 418 bp, Zea mays
  unsure (1)..(418): unsure at all n locations; Clone ID: LIB3061-037-Q1-K1-F6
tcggggtaattctgaatgagaccttttatgctactgcaacgtctgtgaccacaaatgactgttgcagcaagaccatactgcaggagtggagctgtctatatgaagagtgtaggtagagacaattggctaatattgtacaggttcagtttgcaggatcgtagcaacagggttcaaagacgtgtgtttgaaagggcagttgctgatgatcagcatgatggaaggtggngagttccattgctggtttaagctggagctagcttctgaagtccggtcaggtgtctgtatgtgttgcccttctttatttcatttcatgagagaggattgctatttgatccttgaactgtacttggtcgtacttgtgaataaatgttttagcattggtgttcaataaaaaatacttgcaacaacaaaaaatagg

SEQ ID NO: 2340 - DNA, 175 bp, Zea mays
  Clone ID: LIB3061-037-Q1-K1-F7
gcgcttgcggcgagcgtcttacaacaaccaattgaccaattgcaacaacaattcttgcgacatgtaacaatacaagccatcacaacgcaacagcaacaacagttcctaccagcactgagccacctagccatggtgaaccctgccgtctacttgcaagagcagctgcttgcattca

SEQ ID NO: 2341 - DNA, 479 bp, Zea mays
  Clone ID: LIB3061-037-Q1-K1-F8
caacaagcaacataaaaagtggaatccagtcacaacaatagagcatccatggcgaccaagatattcaccctccggatgcgccttgctcttactacatgtgttgctaacgcgacaattttccctaaatgctcacatgctcctatagcttccattgttacaccataccttgcatcaactatagcttcaatatgtgaaaacccacctcttcaaccatatatgcttcaacaagcaatcgcagcacgcaacatacctctatcgcccttgtggtttcaacaatcgacagccttatctttggtgcagtcattggtccaaaccataagggcacaacagctgcagcaactcgtgctacctatgatcaaccaattatctctggcaaaccttcctccatactctaagcatcaacaattttttccattcaaccaactgtttacactgaaccctgctgcttatttgcaggaccaactattaccatttaccca

SEQ ID NO: 2342 - DNA, 118 bp, Zea mays
  Clone ID: LIB3061-037-Q1-K1-F9
ccaatgatgggttgtcggtgccctgttttagatctcttatgagttatagttcaataggagggttttttgtctgatgtttgtggcattccagaaataagaaagtacatttctagattct

SEQ ID NO: 2343 - DNA, 390 bp, Zea mays
  Clone ID: LIB3061-037-Q1-K1-G1
gcggcccgtcagaactctggccctctgcctcctgtacttcctacaactgggctaatcacatcaggtgctatcacctctggtcagttaaattcatctggtgctcaacgcaaagtatcagggcctcttgattctagtgtatcaatgaagatgcgtaccacatcttttgcacacaacccagctgtcacaaatctcaatgtgggagatggttactcgattaagggcagcattccgaccacaataatctggttggtcgcgttgctctttttgggtgggtttggaactggtggcttcaatcttggtggtattcataatcctaacttgcttatagtcgtggtggtgatatttggctttggtgctgcacttgtgacctggaacatttgctggggaaca

SEQ ID NO: 2344 - DNA, 413 bp, Zea mays
  Clone ID: LIB3061-037-Q1-K1-G10
gcccttgctagcttaccacagccaggctctttgctctcaagctacgttggcggctggggaactgcaagcaacatgcctggaaatttccctctgaatcaaagcacaacagcagcaacaacaactcttgggtttgatgggacggtcccttcacatttcaaagatggaaatcaatttatttctcttcagcagaatgagaaccctgcaatgtggatgcatggagctagttcacgagggatgcccccacttgcagccagtaccatgtatggctatcaagggcagagtcatcaggccggccttcggcagggccaactaccttcacaatttggctctgcgctagggcagtcacagccaggcctgggccctgaaacaccgaaccctagcgatagtaacctaagtggcgctgctcaagctaa

SEQ ID NO: 2345 - DNA, 404 bp, Zea mays
  Clone ID: LIB3061-037-Q1-K1-G11
cgcttgcggcgagcgtcttacaacagctaattaaccaattgcaacaacaatccttggggcatctaaccatacataccaactggcagcattgaactctcatgcttatgtacaacaacaacaactactaccattcagccagctagctgctgtgagccctgctgccttcttgacacagcaacatttgttgccgttctacctgcacactgcgcctaacgttggcaccctcttacaactgcaacaattgctgccattcgaccaacttgctttgacaaacccagcagtgttctaccaacaacccatcattggtggtgccctctattagattgcttatgagttatagttcaataataaagttctttatctgatgtatgtggctttccagatataagactgtacatttctaa

SEQ ID NO: 2346 - DNA, 269 bp, Zea mays
  Clone ID: LIB3061-037-Q1-K1-G12
catcaatgcagcccgacggcgacgccctactgctcgcctaaatgcccatcggtgccgcagcaacgttgacagcagctcaagcatgtggagcctcataaaccgtaccaagcgatcttcagcttggcccttcagtccatcctgcagcagcagcctcaaagcggccacgttgcggggctgttcgctgcgcaaatagcgcaacaactgacagcgatatgcggcctgcatcaatcgactgcatgcccctacgctgatgtcggaagtgtccccca

SEQ ID NO: 2347 - DNA, 400 bp, Zea mays
  Clone ID: LIB3061-037-Q1-K1-G2
gcggtcaccggagaagaaggtcccggagctatggttctacacagagctcaaaactaggaccagctggatggggctcgccatacgcatggacaacctgtacctcgtgggcttcaggaccccgggcggggtgtggtgggagttcggcaaggacggcgacacccacctcctcggcgacaaccccaggtggctcggcttctgcggcaggtaccaggacctcatcggcaacaagggtctggagaccgtcaccatgggccgcgccgaaatgaccagggccgtcaacgacctggcgaagaagaggacgatggcgacactgaaggaggaggaggtgcagatgcaaatgcaaatgccggaggccgttgatctggcggcggcggcagcggttgacccacaggccgacacg

SEQ ID NO: 2348 - DNA, 295 bp, Zea mays
  Clone ID: LIB3061-037-Q1-K1-G3
gttgcaaaccatggacatggctttggcgtgtaaagcctcccctccgccatggaatgccaccgggcgggagcagccaattccaaagcgtgacaaagccgctgcaaatgattcaacatacctcaatcctcatgctcatgatagtgctcttggaatcattctgagaggtggtgctgtgactagattgtaccctttgacaaagaagcgtgccaatgcctgcagtgccattgggtgccaactatagactgattgatatttctgtcaataattgtttgaacagcaacattttccagatcta

SEQ ID NO: 2349 - DNA, 284 bp, Zea mays
  Clone ID: LIB3061-037-Q1-K1-G4
caactagcaacatagaaagcacaatagtgtaccaacaatggcagctaaaatattttgcctccggatgctccttggtctttctgcaagtgctgctacggcgaccattttcccacaatgctcacaagctcctatagcttcccttcttaccccgtacctctcaccaacggtgtcttcggtttgtgaaaacccaattcttcaaccttacaggatccaacaggcaatcgcagctggcatcttacctttatcacccttgttcctacaacagtcatcacccctattacagc

SEQ ID NO: 2350 - DNA, 416 bp, Zea mays
  Clone ID: LIB3061-037-Q1-K1-G5
gaccagcaagcaacatagaaagtagaatccattagcaacaatagagcaacaatggcgacgaagagattttccctccttatgctccttgctctttctacatgtgttgctaacgcgacaattttccctcaatgctcacaagctcctatagcttcccttcttcccccataccttccatcaattatagcttcagtatgtgaaaacccagctcttcaaccatataggcttcaacaagcaatcgcagcaagcaacataccttaatcgcccttgttgtttaaccaatcacaacccttatcttggtgccatcattgggtccaaccaataaggcacaaccacttccaccacctcggcctacctgtatccaaccaattacttttgccaaaccttcttcctaatcttaacaaccaccatttctttca

SEQ ID NO: 2351 - DNA, 75 bp, Zea mays
  Clone ID: LIB3061-037-Q1-K1-G6
attctaccttcgacatcgatcgtgtaagttacagggaccttaaaactagtaccagcgcgatgggccttgccatac

SEQ ID NO: 2352 - DNA, 369 bp, Zea mays
  Clone ID: LIB3061-037-Q1-K1-G7
gcggctcaggagccagccacagcccacagctattcatcagcttgacctccccgtccgcccgcttctggcgtcgaggtcggccgcgcgccactctgaatccccagggcaccacaccgccggacaacctcgagaagaagcaccggcaacgacgacgagctagcactagcagtcagtcacagccgggcaagattgattcggacgagcagccgatgatgatgcacgggaacgggcacgggcacggccgtgtccacccggcgtcctccagctccgacttctccggcgagatgaaccagtcggccgtgtccgacccttcttccagccggttctacagtttcaacttcaagaagccggtccggccgccgccgcccg

SEQ ID NO: 2353 - DNA, 427 bp, Zea mays
  Clone ID: LIB3061-037-Q1-K1-G9
cccacgcgtccggcgagcgtcttacaacaaccaattgcccaattgcaacaacaatccgtggcacatctaacaatacagaccatcgcaacgcaacagcaacaacagttcctaccagcactgagccacctagccatggtgaaccctgtcgcctacttgcaacagcagctgcttgcatccaacccacttgctctagcaaacgtagttgcaaaccagcatcaacaacaactgcaacagtttctgccagcgcttagtcaactagccatggtgaaccctgccgtctacctacaacagcaacaactgctttcatctagcccgctcgctgtggccaatgcacctacatacctgcaacacgaattgttgcaacagattgtaccagctctaactcagctagctgtggcaaaccctgttgcctacattcaacagctgc

SEQ ID NO: 2354 - DNA, 351 bp, Zea mays
  Clone ID: LIB3061-037-Q1-K1-H1
gctcgttccaggacgaggtcgtccgccccggctacgagaaggtgatcgccgtcgagggcgtgcgggtccccgggcagaagggcgcgcgcggcgacctgagggtcaagttggacgtcgtcttccccaaggagctcacccccgagcagcgcgccggcctcgccgagatcctcagagggtcctgctgatccatcggccccagttccaagcgtatcaagttttcttggccgtgtccgtgtgttaaattttaatatgtatcctcatagcgcgtgtgatgaagatataagttccttaaagagagaggtgagggggcctcgttgtacatacatgtcgtttatatattatatatgtaag

SEQ ID NO: 2355 - DNA, 268 bp, Zea mays
  Clone ID: LIB3061-037-Q1-K1-H10
gcctcccgcgaaccggtcaaccactgcggcaccgtcgccgccgccatcctcgacccctgaagtgaggaggcaacccgaggacgcctctcccatccacgcgcgaatcctaccgccctcccactcccaaaaacctagccgcgcgcgccacctgcatcccatggcggcaaccgcggccgtggcggggaccgggtcgtccctctcctcgcgccgcagtcgcagcgttgtctcctcgtccttccgcgcagctgcctcgcgcttccgctcgccg

SEQ ID NO: 2356 - DNA, 337 bp, Zea mays
  Clone ID: LIB3061-037-Q1-K1-H12
cggaaaccttccgcaaccgggtctttcgtattggaaaacccaattttttaacccttccagatccaaccgggcagtccaacttgcattttaaccttaataaccttggttcttccaccatcattaaccctattacagcaagtacctttggtgcatttattggcacaaaacatcagggcacaacaactacaacaacttgtgctagcaaaccttgctgcctactctcagcaacagcagtttcttccattcaaccaactagctgcattgaactctgcttcttatttgcaacaacaacaactaccattcaaccagctaccttgtgcctacccccaacaatttc

SEQ ID NO: 2357 - DNA, 327 bp, Zea mays
  unsure (1)..(327): unsure at all n locations; Clone ID: LIB3061-037-Q1-K1-F4
gngaaaatggtcgccgtagcagcacttgcagaaataccaaggagcataaggaggcaatcgcagctggcgatcttacctttatcacccttgttcctccaacaatcatcagccctattacagcagttacctttggtgcatttattggcacaaaacatcagggcacaacaactacaacaacttgtgctagcaaaccttgctgcctactctcagcaacagcagtttcttccattcaaccaactagctgcattgaactcctggctctaattggcaccaccaccacctccaatcaacccgcttacttgtggcttacccccaccaattctttca

SEQ ID NO: 2358 - DNA, 400 bp, Zea mays
  Clone ID: LIB3061-037-Q1-K1-E1
ccaactagcaacatagaaagcacaatagtgtaccaacaatggcagccaaaatattttgcctccgtatgctccttggtctttctgcaagtgctgctacggcgaccattttcccgcaatgctcgcaagctcctatagcttcccttcttcccccgtacctctcaccagcggtgtcttcggtatgtgaaaacccaattcttcaaccctacaggatccaacaggcaatcacagctggcatctaaccttaataacccttgttcctccaacaatcatcagccctattacatcagttacctttggtgcattaattggcccaaaccatcagggcccaccacctacaacaacttgggctagcaaaccttgctgcctactttaagcaccagcagttccttccattcaacca

SEQ ID NO: 2359 - DNA, 414 bp, Zea mays
  Clone ID: LIB3061-037-Q1-K1-E11
ggtgttctgcctgttcgagggggtgctggacaacctgggtcgtctgagccagcagcgggggctgtcaagcaagggcgccaacgaggtgctcctcgtcatcgaggcctacaagacgctgcgcgaccgcgcgccctacccggccagcttcatgctcgcccagctcaccggctcctacgccttcgtcctcttcgacaagtccaccaactccctgctcgtcgcatccgaccccgagggcagggtgccgctcttctgggggatcaccgccgacggctgcgtcgccttctccgacgacatcgacatgctcaaaggctcatgcggcaagtcgctcgcgccgttcccgcaaggctgcttctactccaacgccctcggagggctcaagtgctacgagaaccccaagcacaaggtcaccgctgt

SEQ ID NO: 2360 - DNA, 292 bp, Zea mays
  Clone ID: LIB3061-037-Q1-K1-E12
ttcaaacatgggctccaaccacatgctcctcgtcatccaggcctacaatactctgctctaccactctccctacccacccagcttcatgctcacccatctcaccttctcctactccttcttcctcttccacaagtccaccaactccctgctcgtctcatcctacccccaactcaggttgccgctcttctggaggatcacctcctacggctgcgtcgccttcttctacgacatcgacatgctcaaaggctcatgcagcaaatctctttctccgttccctcaaagcttcttctac

SEQ ID NO: 2361 - DNA, 258 bp, Zea mays
  Clone ID: LIB3061-037-Q1-K1-E2
attgagaccaactagcaacatagaaagcacattagtttaccaacaatggcagccaaaatattgtgctgccttatgctccttggtctttctgcaagtgttgctaccgaaaccattttcccacaatcctaacaacctcctataccttcctttcttcccccatacctttaaccaccggtgtcttcaatgcttgaaaccccatttgttcaaccttacaggatccaacagccattcgcaccaggcatctaaccataataaccc

SEQ ID NO: 2362 - DNA, 393 bp, Zea mays
  Clone ID: LIB3061-037-Q1-K1-E3
cccacgcgtccgtagcaacatagaaagcacaatagtgtaccaacaatggcagccaaaatatttggctgccttatgctccttggtctttctgcaagtgttgctaccgcaaccattttcccacaatgctcacaagctcctatagcttcccttcttcccccatacctctcaccagcggtgtcttcaatgtgtgaaaccccaattgttcaaccctacaggatccaacaggcaatcgcaacaggcattttaccataataacccttgttcttcaaccacccgtaagccttataacagcagttaccttgggtcaattgggggccccaaaccttcaggccccaccacctccaccacctgggcctaccaaacttggttgattcctttaagaaccttaagttc

SEQ ID NO: 2363 - DNA, 192 bp, Zea mays
  Clone ID: LIB3061-037-Q1-K1-E4
catgcaggcaggtcggcgaggagggcaggattaccgaagaccgagccgtgcggtggctcggggcggtgactgtacaggaccccagaatctcagatccttcctgcccgcccgcccgtgcccgtcgacgcgtcgttcttgccggccgcgcctcacctccgccctctcctcctacagggggatcggatacgccac

SEQ ID NO: 2364 - DNA, 458 bp, Zea mays
  Clone ID: LIB3061-037-Q1-K1-E5
caactagcaacatagaaagcacaatagtgtaccaacaatggcagccaaaatattttgcctgctgatgctccttggtctttctgcaagtgctgctacggcgaccattttcccgcaatgctcgcaagctcctatagcttcccttcttcccccgtacctctcaccagcggtgtcttcggtatgtgaaaacccaattcttcaaccctacaggatccaacaggcaatcacagctggcatcttacctttatcacccttggtccttcaacaatcatcagccctattacatcagttacctttggtgcatttattggcacaaaacatcagggcacaacaactacaacaacttgtgctagcaaaccttgctgcctactctcagcaacagcagtttcttccattcaaccaactagctgcattgaactctgcttcttatttgcaacaacaacaactaccattcagccagc

SEQ ID NO: 2365 - DNA, 393 bp, Zea mays
  unsure (1)..(393): unsure at all n locations; Clone ID: LIB3061-037-Q1-K1-E6
cttgctcctagttccattattccacagtggttaacaccagttacttcaatggccttcgaacagccatctgtacaagcctatatgctacaacatgcgattgcggcgagcgtcttacaacaactaattgcccaactgcaacatcaatccttngcacatctaacaatacataccatcctaacgcaacagcaacaacagtttctaccagcactgaaccacctaaccatggtgaaccctgtcgcctacttgcaacaacaactgcttgcatacaacccacttgctctagcaaacgtacttgcaaaccagcaacaactacaactgcaacagtttctgccaccgcttaatcaactagccatggtgaaccctgccgcctacctacaacagcaacaactgctt

SEQ ID NO: 2366 - DNA, 439 bp, Zea mays
  Clone ID: LIB3061-037-Q1-K1-E7
ctacggaccactggtctttggggaaagattttggagatactgttagatctcaggtacttgtttgtccagtatggggttgtataccagctgaagatagcaaacaatagcagaagtattgctgtctatctgctttcctggatatgtgtggctgtgatttttggtctgttcgtgctaatgtcctatgctcgagacaagtatgccgcaaagcagcacctttactaccgggttggtcaaactggttgcatcactcttggaatgctagtgctggttttggttctgaagttcacggaatttcaaatcattgacatcttcactagtcttttggcatttattcctactggttggggcttgatttcgatcgctcaagtaattcggccattcatcgaatccactggggtctgggacaggattaattctggggctccgttggatgaaatac

SEQ ID NO: 2367 - DNA, 269 bp, Zea mays
  Clone ID: LIB3061-037-Q1-K1-E8
caggcaggcaggtcggcgaggagggcaggaagaccgaagaccgagccgtgcgggggctcggggcgggggcgggacaggaccccaaaatctcagatccttcctgcccgcccgcccgtgcccgtcgacgcgtcgttcttgccggccgcgcctcacctccgccctctcctcctccagggggatcggatacgccacaggctgcgcgatggtgctgtgggtcttcggctacggcttccttatctggaaccccggcttcgacttcgacgaccaaa

SEQ ID NO: 2368 - DNA, 425 bp, Zea mays
  Clone ID: LIB3061-037-Q1-K1-E9
gctgcagcaactcgtgctacctgtgatcaaccaagtagctctggcaaacctttctcgctagtctcagcaacaacaatttcttccattcaaccaactgtctacactgaaccctgctgcttatttgcagcaacaactattaccatttagccagctagctactgcctactctcagcaacaacaacttcttccatttaaccaattggccgcactgaaccccgctgcttatttgcagcagcaaatactactgccatttagcgagctagctgcagcaagtcgtgcttccttcttgacacagcaacagttgctgcctttctacaagcagtttgcggctaaccccgcaaccctcttacaactacaacaattgttgccctttgtccaacttgctttgacaaacccagcagccttctaccaacaacacatcattg

SEQ ID NO: 2369 - DNA, 415 bp, Zea mays
  Clone ID: LIB3061-037-Q1-K1-F1
agaccagcaagcaacatagaaagtagaatccattagcaacaatagagcaacaatggcgaccaagatagtttccctccttatgctccttgctctttctacatgtgttgctaacgcgacaattttccctcaatgctcacaagctcctatagcttcccttcttcccccataccttccatcaattatagcttcagtatgtgaaaacccagctcttcaaccatataggcttcaacaagcaatcgcagcaggcaccataccttaatcgcccttgttgtttcaccattcacaagccttatctttggtccagccattgttccaacccatcaggccccaccagttgcagcacctgggcctacttggaaccaaccaattacttttgccaaactttcttcctaactttaagcaccaccatttcttt

SEQ ID NO: 2370 - DNA, 422 bp, Zea mays
  unsure (1)..(422): unsure at all n locations; Clone ID: LIB3061-037-Q1-K1-F10
ctccggggcatctcccaccgccggtccacctgccgccgccggtccacctgccaccggcgggccatgtgccgccgccggttcatctgccgccgccaccatgccactaccctactcaaccgccccggcctcagcctcatccccagccacacccatgcccgtgccaacagccgcatccaagcccgtgccagctgcagggaacctgcggcgttggcagcaccccgatcctgggccagtgcgtcgagtttctgaggcatcagtgcagcccgacggcgacgccctactgctcgcctcagtgccagtcgttgcggcagcagtgttgccagcagctcaggcaggtggagccgcagcaccggtaccaggcgatcttcggcttggtcctncagtccatcctgcagcagcagccgcaaagcggccaggtcgcg

SEQ ID NO: 2371 - DNA, 423 bp, Zea mays
  Clone ID: LIB3061-037-Q1-K1-F11
ttggcgattccatttctaccccgagactctccagccgtgcgcccctgaaccctcaggcgtggccgtcccgcctcggcactcgacggccgccggcacacaccgcgcagtctcgagacagatcccgatctcgttctgccaaccgccgagggagggttgcgctcgccggatcccgtccgagtcacgtgcggctttgattcgctgcacctgtcgtgcaggaaccggaggaacgaggatggaggatgactctccgctgacgaagacgatgaacggtgcggtgacagtactcgcctcagtgaccatctggggcaccgtcgtcgtcacctggtacgacgtgccccgtgtggagcgccacgtctcgctccatggccttatccggactctcaagatgtgcggcacctacggcgccaccttcgccaccatcgg

SEQ ID NO: 2372 - DNA, 380 bp, Zea mays
  Clone ID: LIB3061-037-Q1-K1-F12
ctcgagccttccatgaggaaattcgtgctggctgggggcttcagcaaggggcagccgcacgtcgccgagaacatcttcaaagggatcgacgcccggttcctgagcgaagccctgggcgtcagcatgcacgtcgccgagaagctgcagagccggcgtgaccagcgaggcgagatcgtccgcgtggagccggagcacggctttcaccagctgaatccgtcgtcgtcgtcgtcgtcgttttcgttcccatcgtcacaagtccagtaccaaacgtgccagcgcgacgtcgacaggcacaacgtctgcgccatggaagtgaagcacagcgtcgaacggctggaccaggccgacgtctacagcccttggggctggaggatcacacg

SEQ ID NO: 2373 - DNA, 341 bp, Zea mays
  Clone ID: LIB3061-037-Q1-K1-F2
attttgagcattcagaaacacaccaagcgaatcacattagcaacaacctaacaacaatggctggcaagatattatccctccttgcgcttcttgcgctttttgcgagcgcaacaaatgcgttcattattccacaatgctcacttgctccaagttccattattacacagttccttccaccagttacttcaatgggcttcgaacacccagctgtgcaagcctataggctacaacaagcaattgcggcgagcgtcttacaacaaccaatttccaagttgcaacaccaatccttggcccatttaacaatccaaaccatggaaacgcaacagcaccaccaattccta

SEQ ID NO: 2374 - DNA, 380 bp, Zea mays
  Clone ID: LIB3061-037-Q1-K1-F3
gctgcttggcttcagcaacaacaatttcttccattcaatcaactagctggggtgaaccctgctgcttacttgcaggcagaacagctactaccgttcaaccaactggctttgacaaactcaacagtgttctaccaacaacccatcattggtggtgccctctttaagattgcttatgagttatagttcaataatgaagttttttgaatgatgtttggggcgtccaaaaattaagaaggtccatttctaaaaaaaaaatgtaagataatataaataaaaaatattaaaaaaaaaaaaaaagggcgccccttttaagggtcccaagtttacattcccggttatgcaaattaaaaacttttttataggtaccccaaatttaaatt

SEQ ID NO: 2375 - DNA, 430 bp, Zea mays
  Clone ID: LIB3061-037-Q1-K1-D9
gaaaagggcaaagttcagctgttgcgtgactcaaaggacagcattgaaatgactgcggctgaactgcagaagaaccctatcaactacacacaggttgccgtgctcgcggatgacatattgaaaaatgtggaatatgatgctctgagggttattttcaacaagttccaatctgtcatatcgtttaagcccacaatggtaacaatactttcccccgaggttgcagaaaaagaatcagaagctggtgggaagatgggtgacctagattcttatgagattgaaggcggcgagacaaaatcagagattttgcagaatctagctgagttccagttttcttgtgtcctgtacaatggtgccctagagaatgcatgcagtgagcttggagcccgtatgtctgccatggacagctctagcagaaatgctggcgatatgc

SEQ ID NO: 2376 - DNA, 244 bp, Zea mays
  Clone ID: LIB3061-037-Q1-K1-C1
acccgcccttcaaatttacctttccaccctttccttaatttgtttccattctccgcaccccccaacatcgtaaaatgtttgcatccataaacctacctaaatcttaacacttattccactaattccaaccaaactcttctcttcaacacccctactatcaatctcctataccagtacaccaataatatacccatctaccccaattatcccttcacctataataatatccatctcattccccatc

SEQ ID NO: 2377 - DNA, 253 bp, Zea mays
  Clone ID: LIB3061-037-Q1-K1-C10
aacctacaacatccaacatacaatcaaaactaacatcttacctttatcacacttattactccaacaatcattatccctattacatcaataacctttactccatttatttacacaaaacatcataacacaacaactacaacaacttatactatcaaaccttaacttcctactttcataaacaataattacttccatacaaccaactatcttcaattaaactctacttattaattacaacaacaacaactaccat

SEQ ID NO: 2378 - DNA, 415 bp, Zea mays
  Clone ID: LIB3061-037-Q1-K1-C11
cgcaagttgcaccaagaaatccatcgagaggccgtcgacaggggaattaatggcgtcgtcgtctagcagcagggacggccgcctcatcctcgcagccgccgtcctgctctccgtgctcgcggctgccagcgccagcgccgggacctcctgcgtgccggggtgggccatcccgcacaacccgctcccgagctgccgctggtacgtgaccagccggacctgcggcatcgggccgcgcctcccgtggccggagctgaagaggagatgctgccgggagctggcggacatcccggcgtactgccggtgcacggcgctgagcatcctcatggacggcgcgatcccgccgggcccggacgcgcagctggagggccgcctagaggacctgccgggctgcccgcgggaggtgcagaggggattc

SEQ ID NO: 2379 - DNA, 341 bp, Zea mays
  Clone ID: LIB3061-037-Q1-K1-C12
catccttatgctccttgctctttctgcatgtgttgctaacgcgaccatttttcctcaatactcacaagctcctatagctgcccttcttcccccataccttccatcaatgaccgcttcagtttgtgaaaacccaacccttcaaccctacaggctccaacaagcaatcgcaacaagcaacttacctttatcacccctgttctttcaacaatcgccagccctatctttggtgcagtcattggtacaaaccatcagggcacaacagctgcaacaactcgtgctaccagtgatcagccaagtagctctggcaaacctttctccctactctcagcaacaacaatttc

SEQ ID NO: 2380 - DNA, 275 bp, Zea mays
  Clone ID: LIB3061-037-Q1-K1-C4
tgcccactgaagctgttgggggcattataattggggccccacctttttgtaggtggaagacaggtaggatgtaaacttgaatgtgttgctgactcaaacagaccagtgctctgctctggctaagcacctggccatcttacacatcgtgtaagccccatagtaacttgaatgtgttacacatcgtgtgcctgtctttgctatccagtctttacacagcatttcaggaaccaaaagatatattatgtaaaaattaattggaattttaagaattgatg

SEQ ID NO: 2381 - DNA, 345 bp, Zea mays
  Clone ID: LIB3061-037-Q1-K1-C5
atctgccgctccagcctttcgctagggtgtatccaccggcggcgcgcgcgacggcggcaagatggtgcggcgtctgacctaccgctagcggcacatctatgccacgaagtccatccagacgcgggtcgttaagacccctggtggcaagctcgtgtaccactacaccaagaatagagccagcgggcccaagtgtccagtgaccggtaagaagatccacggcattcaccatctgaggccagctgagtacataaggtccaggttgtctaggaaccgcagaactgcgaaccgtccctatacaggagtactatctggaactgcagatggaggacggatcatccgtgcttt

SEQ ID NO: 2382 - DNA, 425 bp, Zea mays
  Clone ID: LIB3061-037-Q1-K1-C6
gctctcgctgcgagcgccacctccacgcatacaagcggcggctgcggctgccagccaccgccggcggttcatctaccgccgccggtgcatctgccacctccggttcacctgccacctccggtgcatctcccaccgccggtccacctgccgccgccggtccacctgccaccgccggtccatgtgccgccgccggttcatctgccgccgccaccatgccactaccctactcaaccgccccggcctcagcctcatccccagccacacccatgcccgtgccaacagccgcattcaagcccgtgccagctgcagggaacctgcggcgttggcagcaccccgatcctgggccagtgcgtcgagttcctgaggcatcagtgcagcccgacggcgacgccctactgctcgcctcagtgccagtcgttgcggca

SEQ ID NO: 2383 - DNA, 429 bp, Zea mays
  unsure (1)..(429): unsure at all n locations; Clone ID: LIB3061-037-Q1-K1-C9
cacaatgctcacaagctcctatagcttcccttcttcccccgtacctctcaccaacggggtgttcggtatgtgaaaacccaattcttcaaccctacaggatccaacaggcaatcgcagctggcatcttacctttatcacccttgttcctccaacaatcatcagccctattacagcagttacctttggtgcatttattggcacaaaacatcagggcacaacaactacaacaacttgtgctagcaaaccttgctgcctactctcagcaacagcagtttcttccattcaaccaactagctgcattgaactctgcttcttatttgcaacaacaacaactaccattcagccagctatctgctgcctacccccagcaatttcttccattcaaccaactgacagcattgaactctnctgcttatttacagcagcaac

SEQ ID NO: 2384 - DNA, 266 bp, Zea mays
  Clone ID: LIB3061-037-Q1-K1-D10
cttagtagtataggcaccaaatcagatctgcaacatcaattatctaactccaaaaagcatgaagctgatgcttgtggttcttgctttcattgctttagtatcaagtgtttcttgtacacagacagtctgctgcatgctgcgtgtaacaacaaatccatgagcagcaacatcatccatatcaacatcatccacaatggcaacaatcataaccaccaccacagcatcaccagcatcagcaactcctacaacaacaagttcacatgcat

SEQ ID NO: 2385 - DNA, 431 bp, Zea mays
  Clone ID: LIB3061-037-Q1-K1-D11
gaccaactagcaacatagaaagcacaatagtgtaccaacaatggcagccaaaatatgttggctccttatgctccttggtctttctgcaagtgctgctacggcgaccattttcccacaatgctcacaagctcctatagcttcccttcttcccccgtacctctcaccagcggtgtcttcggtatgtgaaaacccaattcttcaaccctataggatccaacaggcaatcgcagctggcatcttacctttatcacccttgttcctccaacaatcatcagccctattacagcagttacctttggtgcatttattggcacaaaacatcagggcacaacaactacaacaacttgtgctagcaaaccttgctgcctactctcagcaacaacagtttcttccattcaaccaactagctgcattgaactcttgcttttatt

SEQ ID NO: 2386 - DNA, 425 bp, Zea mays
  unsure (1)..(425): unsure at all n locations; Clone ID: LIB3061-037-Q1-K1-D12
tgcaagtgctgctactgcgaccatgttcccgcaatgctcgcaagctcctatagcttgcctgcttcccccgtacctctcaccagcggtgtcttcggtatgtgaaaacccaattcttcaaccctacaggatccaacaggcaatcgcagctggcatcttacctttatcacccttgttcctccaacaatcatcagccctattacaacagttacctttggtgcatttattggcacataacatcagggcacaacaactacaacaacttgtgctagcaaaccttgctgcctactctcagcaacagcagtttcttccattcaaccaactaggttcattgaactctgcttcttatttgcaacaacaacaactaccattcagccagctacctgctgcctacccncagcaatttcttccattcaaccaactagcag

SEQ ID NO: 2387 - DNA, 429 bp, Zea mays
  Clone ID: LIB3061-037-Q1-K1-D2
tcaacgcctaccaaattgcttcaacaaatggtcccacctctgcctcacctgccttcgccaaacgggggggcctattaacatcaggtgcttcattctaaccaactgcctggaccaaactttgtttcgaacttacaccaccaccaccagtgcctaatcccattgcaaactgttaacccatggttcgatacctttctgcaacagcaacaacaattgcttgcatacaacccgttttttttgatgaacccttcctttcaacaacccattgttgaagggcccaacttttaaattacctttgacatttacttcacaatggggccctttttccgaccttgtgttcctaaaaaaaatcaattatttgattggaattaattctcattaaaaaaaaaaataatttcaattccattccattcatttgtattggttattaac

SEQ ID NO: 2388 - DNA, 456 bp, Zea mays
  Clone ID: LIB3061-037-Q1-K1-D3
caactagcaacatagaaagcacaatagtgtaccaacaatggcagccaaaatattttgcctccggatgctccttggtctttctgcaagtgctgctacggcgaccattttcccgcaatgctcgcaagctcctatagcttcccttcttcccccgtacctctcaccagcggtgtcttcggtatgtgaaaacccaattcttcaaccttacaggatccaacaggcaatcgcagctggcatcttacctttataacccttgttcctacaacaatcatcacccttattacaacagtaacctttgcagcattaattggcacaaaacatcagggcacaacaactacaacaacttgtgctagcaaaccttgctgcctactttcagcatcagcagtttcttccattcaaccaactaggttcatagaactctgcttcttatttgcaacaacaccaattaccattcagcca

SEQ ID NO: 2389 - DNA, 295 bp, Zea mays
  Clone ID: LIB3061-037-Q1-K1-D4
cccacgcgtacgagtgcttgcgttataccagcagttgtcgttggcccatttggtggcacaaaagatcaggcaacatcagctacaacaactggtgctagcaaaccttgctgcatacttttagcaacatcagtttcttccattaacccaactggctgcattgaactctgctgcttatttgcaacaacaattaccattcagccagctagttgctgcctacccccagcaatttcttccattcaaccaactagcagcattgaactctgctgcttatttacagcagcaacaactactacca

SEQ ID NO: 2390 - DNA, 222 bp, Zea mays
  Clone ID: LIB3061-037-Q1-K1-D5
gcgacccgttacaactaccacaaaaggcgcactagggcaccatcactggcgaacacaacccatcacgcttctgtatgctccacatcattggtgcaaccgttgctacacaagccatttacccacaatgctcacatgctgctatagcgtacattcatgcgccatacctataaccagcagtgtctttaatgagtgaaaccccaattgttcaaccctacaggatcc

SEQ ID NO: 2391 - DNA, 407 bp, Zea mays
  Clone ID: LIB3061-037-Q1-K1-D6
cccacgcgtccgagttgctgcaacaaatggtaccagctctgactcagctagctgtggcaaaccgtgctgcctacttacaacagttgcttccattcaaccaactggctgtgtcaaactctgctgcgtacctacaacagcgacaacagttacttaatccattggcagtggctaacccattggtcgctaccttcctgcagcagcaacaacaattgctgccatacaaccagttctctttgatgaaccctgccttgcaacaacccatccttggaagtgccatcttttaaattacatatgagatgtactcgaccatggtgcccttataacgacatggggttcctaaaaattatcaatatattgattgaaaattatctcgattaaaaaaaaataacctataataaatggaaaaa

SEQ ID NO: 2392 - DNA, 372 bp, Zea mays
  Clone ID: LIB3061-037-Q1-K1-D7
gctagctgctgcctactctcagcaacaacaacttcttccatttaaccaattggccgcactgaaccccgctgcttatttgcagcagcaaatactactaccatttagccagctagctgcagcaaaccgtgcttccttcttgacacagcaacagttgctgcctttctaccagcagtttgcggctaaccccgcaaccctcttacaactacaacaattgttgccctttgtccaacttgctttgacagacccagcggcctcctaccaacaacacatcattggtggtgccctcttttagaatgcttattagttggaattcaataataaaggtttttggatgatgtatgtggccaaccagaaataagaagttacatttcc

SEQ ID NO: 2393 - DNA, 161 bp, Zea mays
  Clone ID: LIB3061-037-Q1-K1-D8
tactctcagcaaccaccacttattgcatttaacttttccacctcactcaaccccactacttattttgatcatcctatactactaccattcaaccatctatctccaacccaccttgctacacttctcacacactaacatatcctcccttcttaccacctacc

SEQ ID NO: 2394 - DNA, 417 bp, Zea mays
  Clone ID: LIB3061-037-Q1-K1-B9
attgagaccaacaagcaacatacagagtggaatccagtagcaacaacagagcaacagtggcgaccaagagattttccctccttatgctccttgctctttctgcatgtgttgctaacgcgacaattttccctcaatgctcacaagctcctatagcttcccttcttcccccataccttccatcaatgatagcttcagtatgtgaaaacccagctcttcagccctataggctccaacaagcaatcgcagcaagcaacatacctttatcacccttgttgtttcaacaatcgccagccctatctttggtgcagtcattggtacaaaccatcagggcacagcagctgcagcaactcgtgctacctgtgatcaaccaagtagctctggcaaacctttctccctactctcagcaacaacaatttc

SEQ ID NO: 2395 - DNA, 445 bp, Zea mays
  unsure (1)..(445): unsure at all n locations; Clone ID: LIB3061-018-Q1-K1-H4
tgagcattcagaaacacacctagcgaagcgcactagcaacgacctaacaacaatggcttccaagacattatccctccttgcgcttcttgccctttttgtgagtgcaacaaatgcgttcattattccacaatgctcacttgctccgagtgccattattccacagttcctccctccagttacttcaatgggcttcgaacacccagctgtgcaagcctataggctacaacaagcgcttgcggcgagcgtcttagaacaaccaattgcccaattacaacaacaatccttggcacatctaaccatacaaaccatcgcaacgcagcagcaacaagcactgagccacctagccgtggtgaaccctatcgnctacttgcaacaacagctgcttgcatccaacccacttgctttggcaaacgtagctgcataccaacaacaacaacagttgcaa

SEQ ID NO: 2396 - DNA, 394 bp, Zea mays
  Clone ID: LIB3061-018-Q1-K1-H5
aaacaagtagcgacagctcgacaaagatttgtgagagtgatccggcgctgggaagaggtggctaacatcgtcgcagccgccgcggcggcggcggcgctgtgcttcgcggccctggtggccgtggccgtctgccaaggcgaggtcgagcggcagaggctcagggacctgcagtgctggcaggaggtccaggagagcccgctcgacgcgtgccgccaggtcctcgaccggcagctaaccggcggccgcgtcggcggcccgatccggcggggcaccgggctccggatgcggtgctgccagcagctccaggacgtgagccgtgagtgccgctgcgccggcatccggagcatggtcaacggctacgaggaggccatgccgcctctggagaaaggctggt

SEQ ID NO: 2397 - DNA, 434 bp, Zea mays
  Clone ID: LIB3061-018-Q1-K1-H6
tggttcttcaaggaacggcttgatgttaatccaaaagaggagagcaggagattctggacatttgtcatccctcatcacaaagaaccacttctgacgagattctttggagagttgcaagacagggaaggggagtttggaatatcagacattcaactcggtctgacaacacttgaagaggtgttcctgaacattgcaaagcaggcagagctggagacctctactgctgaaggtaccctggtgactctcaacctgtcatcaggaacaacaattcagattcccaaagtggctcgtttcgttggtattccctgaactgagacagaggagcatccaaaaggcatcatggtgatgtgtactgggatcaggatgaaatggatcgctctgcatttctgggcactctgacgagatgcccgtgccagttcatgctgagctgagga

SEQ ID NO: 2398 - DNA, 439 bp, Zea mays
  Clone ID: LIB3061-018-Q1-K1-H7
ttgagaccaactagcaacatagaaagcacaatagtgtaccaacaatggcagccaaaggattttgcttccttatgctccttggtctttctgcaagtgttgctaccgcaaccattttcccacaatgctcacaagctcctatagcttcccttcttcccccatacctctcaccagcggtgtcttcaatgtgtgaaaacccaattgttcaaccctacaggatccaacaggcaatcgcaacaggcatcttaccattatcacccttgttcctccaacaaccgtcagccctattacagcagttacctttggtccatttggtggcacaaaacatcagggcacatcaactacaacaacttgtgctagcaaaccttgctgcatactctcagcaacatcagtttcttccattcaaccaactggctgcattgaactctgctgcttatttgca

SEQ ID NO: 2399 - DNA, 338 bp, Zea mays
  Clone ID: LIB3061-018-Q1-K1-H8
cgtccgattcccggtcgcccaccgtccgccgtgcatctcccaccgccggtccacctgccgccgccggtccacctgccaccgccggtccatgtgccgccgccggttcatctgccgccgccaccatgccactaccctactcaaccgccccggcctcagcctcatccccagccacacccatgcccgtgccaacagccgcatccaagcccgtgccagctgcagggaacctgcggcgttggcagcaccccgatcctgggccagtgcgtcgagtttctgaggcatcagtgcagcccgacggcgacgccctactgctcgcctcagtgccagtcgttgcggcagca

SEQ ID NO: 2400 - DNA, 430 bp, Zea mays
  unsure (1)..(430): unsure at all n locations; Clone ID: LIB3061-018-Q1-K1-H9
ctnccgcaacatacatagtgaagtacactagcttcatcttagcaccaatggcagccaagattggtgcgctccttgccctccttgctctttcagcaagtgttgctaccgcgactattattccacaatgctcacaacaatacctctctccagtgatagccgcgagatttgaatacccatctatacaatcctacaggctacaagaggccatcacagcaagcatcttacggtcgttagcattgaccgtccaacaaccatatgccctattgcaacaaccatccttagtgaatctgtatctccaaagaatcacagcacaacaactacaacaacggttgcttccaacaattaatcaagtagttgcagcgaaccttgctgcttaccttcagcaacaacaatttcttccattcaatcaactagcntgggtgaaccctgc

SEQ ID NO: 2401 - DNA, 182 bp, Zea mays
  Clone ID: LIB3061-019-Q1-K1-A10
ccaacacatccaccacaatacatccaccaacaatctacaacaatctcacaccacaatccaacaaaacaacacaacaaccatcctactattaaatctcaacaactactcaaactctcacacaatctaacaacaccacatcacctaccaccaaaccctactacaccactcatactaccaaaata

SEQ ID NO: 2402 - DNA, 422 bp, Zea mays
  Clone ID: LIB3061-019-Q1-K1-C12
gtggaatccagtagcaacaacagagcttctttggcgaccaagatattttccctccttagtctccttgctctttctgcatgtgttgctaacgcgacaattttccctcaatgctcacaagctcctatagcttcccttcttcccccataccttccatcaatgatagcttcagtatgtgaaaacccagctcttcagccctataggctccaacaagcaatcgcagcaagcaacatacctttatcacccttgttgtttcaacaatcgccagccctatctttggtgcagtcattggtacaaaccatcagggcacagcagctgcagcaactcgtgctacctgtgatcaaccaagtagctctggcaaacctttctccctactctcagcaacaacaatttcttccattcaaccaactgtctacactgaaccc

SEQ ID NO: 2403 - DNA, 352 bp, Zea mays
  Clone ID: LIB3061-019-Q1-K1-D11
cccccccccacccccccacccccccccctcccccccccccccctcctcccccccccccccccccccccccccccccccctccttctcctccctctccccccccccacccccccctcccctccccccctcccccccccccccccccccccccccccccccccccccctctcccccccctccccctcccccccctctcccccccaccctcaccctctccctcccctcctctctcccctccccccccccccccctctcccccccccccccctccccccccctctcccccccccccctcctcccccccctcccccccccccccccccccccctcctccccctccccacctcctccc

SEQ ID NO: 2404 - DNA, 327 bp, Zea mays
  Clone ID: LIB3061-019-Q1-K1-E11
aactatccatggtgaaccctaccgcctacctacaacatcaactactgctttcatctagcccactctctatgtccaattcacctacatacctgcaacaagaattgttgcaacagattgtaccatctctaactcatctagctattacaaaccctgtttcctacttgcaacatctgctttcattctaccaactaactatttctaactctagagcgtacctacttcagcgacaacatttacttaatccattggcaatttctaacccattgttcactaccttcctacatcatcatcaattgctgccatacaaccgattctctttgatgaatc

SEQ ID NO: 2405 - DNA, 371 bp, Zea mays
  unsure (1)..(371): unsure at all n locations; Clone ID: LIB3061-019-Q1-K1-G10
cctaccaacaatagcagccaaaaagatnttcttaaatattctgcgtactctttctacaagttctactacctcaaccattttcccacaatgctcacaatctcctatatcttcctttcttcccccatacctctcaccatctttatcttcagtatgtcaaaacccaattcttcaaccctacattatccaacatgcaatcacatcatccatcttacctttatcacccttattcctccaacaaccgtcatccctattacatcatttacctttggtgcatttatttgcacataacatcatatcacaacaactactacaactttttctataaaacctttcttcctactctcatcaacaacaatatccttcattcaacc

SEQ ID NO: 2406 - DNA, 211 bp, Zea mays
  Clone ID: LIB3061-019-Q1-K1-H10
tcatattccacaatatcactaactcctactccattattacacaaattctcccaccatatacttcaataaacttcaaacacctaacttttcattccaacattcatcaacaatctcttgcacctaccatcttacaacaaccaattacccaattacaacaacaatactttcctcatctaacaatacaaagccatcacatctcatcatcaacaac

SEQ ID NO: 2407 - DNA, 160 bp, Zea mays
  Clone ID: LIB3061-019-Q1-K1-H11
acatccaccaagcaatctacaacatactcaccccatcaccacacgatcccatctacaaccatataactattccatctcacaacctactcaaactcccctccaatctgacaccaacacaattcctaccatcaatttacaccttcttccacccattctacca

SEQ ID NO: 2408 - DNA, 121 bp, Zea mays
  Clone ID: LIB3061-019-Q1-K1-H12
attccacaccgacccactctcctattgataccaacaacaacatataaatttaatccagtagcaacaatatatcatcaatgactaccattatactttccctccttattctcctttctctttc

SEQ ID NO: 2409 - DNA, 421 bp, Zea mays
  unsure (1)..(421): unsure at all n locations; Clone ID: LIB3061-020-Q1-K1-A1
gcgtatgattgagaccagcaagcaacatatattgtagaatccattagcaacaatagagcaacgatggcgaccaagatattttgccttcttatgcttcttgctctttctacatgtgttgctaacgcgacaatttttcctcaatgctcacaagctcctatagcttcacttcttgccccataccttgcatcaattatagcttcagtatgtgaaaacccagctcttgaaccatataggcttcaacaagcaatcgcagcaagcaacatacctttatcggccttggagcttcaacaatcaccagccctatctttggtgcagtcattggtacaaaccatcagggggcaacagctgcagcaactagtgctacctgtgatcaaccaagtagctctgggaaacctttctncctactttcagtaccaacaat

SEQ ID NO: 2410 - DNA, 436 bp, Zea mays
  Clone ID: LIB3061-020-Q1-K1-A10
actcgatgagcagcgacttggttaggccgttcgcgcaccggtcaagggaaaaactttggctggtgtcttgcccatattggagtctttggttaatggggcaaacaaggcatctagacggactgaacatggcaggaccccaagtgttctcgttctactaccaacaagagagctggccaatcaggtgcacgctgactttgagttttatggtgcaacatttgggctctctgcatgttgtgtgtatgggggatcaccttatcgtcctcaagaaatggcattgagaagaggtgtggatattgtcgttggaactcctggtcgtgtcaaggatttcattgctaaaggaactctcaatttgaaatgcttgaaattccgtgtccttgatgaagctgatgagatgctaaacatggggttcgttgatgatgtcgagctcattcttggc

SEQ ID NO: 2411 - DNA, 375 bp, Zea mays
  Clone ID: LIB3061-020-Q1-K1-A11
gcaacatagaaagcacaatagtgtaccatcaatggcagctaaaatattttgcctccttatgctccttggtctttctgcaagtgctgctacggcgaccattttcccacaatgctcacaagctcctatagcttcccttcttcccccgtacctctcaccaacggtgtcttcggtatgtgaaaacccaattcttcaaccctacaggatccaacaggcaatcgcagctggcatcttacctttatcacccttgttcctccaacaatcatcagccctattacagcagttacctttggtgcatttattggcacaaaacatcagggcacaacaactacaacaacttgtgctagcaaaccttgctgcctactctcagcaacagca

SEQ ID NO: 2412 - DNA, 409 bp, Zea mays
  Clone ID: LIB3061-018-Q1-K1-H3
cgacgactcccgcaacaccgctcgcctgctggcacttctgatgcaccggcgcttcaaggtctcgatcaccaactcactggtgtggcaacctgccgtcgctccgcagtcaaccgccgccacctgacacttgtccccggaccgatcttcggacccagtcgtcgtccagctccagcaccagcagcagcagcacaagccgaaggaggcgctgtagtctcccgcgttgctgttgaacccatcgtacgccaccctcgcgcgagggaaggacagagccctgtactgctactgcggagtgctgagccgctagagcgtagtgcgcaagccgggacccatgcatgagcgctactacttcggatgcgggaactggaccgtcacccggcgcgccatctgcccgtacttcgcatgggcctcg

SEQ ID NO: 2413 - DNA, 428 bp, Zea mays
  Clone ID: LIB3061-018-Q1-K1-G10
gcgtccgattgagacccacttgccaccttaaaaggcccattatggtcccaccattgccagccaaaggattttgcttccttatcctccttggtctttctgcaagtgctgctaccgcaaccattttcccacaatgctcacaagctcctatagcttcctttcttcccccatacctctcaccagcggtgtcttcagtatgtgaaaacccaattcttcaaccctacaggatccaacaggcaatcgcagcaggcatcttacctttatcacccttgttcctccaacaaccgtcagccctattacagcagttacctttggtgcatttgttggcacaaaacatcaaggcacaacaactacaacaacttgtgctaggaaaccttgctgcctactctcagcaacagcagtttcttccattcaaccaactggctgcattg

SEQ ID NO: 2414 - DNA, 416 bp, Zea mays
  unsure (1)..(416): unsure at all n locations; Clone ID: LIB3061-018-Q1-K1-G11
cccacgcgtncggcggaaaatcactagtgattcactgaacaaaaaaaaattacaagaaggagtcgagagcaaatgctatcttcaaccacactccgaccgccggcgccggcgccggcgccggcacacctcaccatctgctcctcgcccgcagcgtggcggcgtgcgccggcggtgcgcgcggtgcggaactacgactccatcccgaagcgggagcccttcagctccagccgcagcatcctccacgagttcctcaggcaggacaagcccctcatccagcgcaccaaggaccagatcacagattattgcacggccatcgaaggcgatgagtgctgcagctgttgggacgcttactttgaactgaataaacttgagcaagagctgcccaaagacgaaatcgcaaggatggtgaaggactc

SEQ ID NO: 2415 - DNA, 390 bp, Zea mays
  Clone ID: LIB3061-018-Q1-K1-G12
ccctcgctctcctggctctcgctgcgagcgccacctccacgcatacaagcggcggctgcggctgccagccaccgccgccggttcatctaccgccgccggtgcatctgccacctccggttcacctgccacctccggtgcatctcccaccgccggtccacctgccgccgccggtccacctgccaccgccggtccatgtgccgccgccggttcatctgccgccgccaccatgccactaccctactcaaccgccccggcctcagcctcatccccagccacacccatgcccgtgccaacagccgcatccaagcccgtgccagctgcagggaacctgcggcgttggcagcaccccgatcctgggccagtgcgtcgagttcctgaggcatcagtgca

SEQ ID NO: 2416 - DNA, 443 bp, Zea mays
  unsure (1)..(443): unsure at all n locations; Clone ID: LIB3061-018-Q1-K1-G2
cccacgcgtccgtgagaccagcaagcaacatagaaagtagaatccattagcaacaatagagcagcaatggcgaccaagatattttccctccttatgctccttgctctttctacatgtgttgctaacgcgacaattttccctcaatgctcacaagctcctatagcttcccttcttcccccataccttccatcaattatagcttcagtatgtgaaaacccagctcttcaaccatataggcttcaacaagcaatcgcagcaagcaacatacctttatcgcccttgttgtttcaacaatcaccagccctatctttggtgcagtcattggtacaaaccatcagggcacaacagctgcagcaactcgtgctacctgtgatcaaccaagtagctctggcaaacctttcntcctactctcagcaacaacaatttcttccattcaaccaact

SEQ ID NO: 2417 - DNA, 435 bp, Zea mays
  unsure (1)..(435): unsure at all n locations; Clone ID: LIB3061-018-Q1-K1-G3
cagcaagcaacatagaaagtggaatacagtagcaacaatagagcaacaatggcggccgggatatgttccatccttatgctccttgctctttctgcatgtgttgctaacgcgaccatttttcctcaatactcacaagctcctatagctgcccttcttcccccataccttccatcaatgaccgcttcagtttgtgaaaacccagcccttcaaccctacaggctccaacaagcaatcgcaacaagcaacttacctttatcacccctgttctttcaacaatcgccagccctatctttggtgcagtcattggtacaaaccatcagggcacaacagctgcaacaactcgtgctaccagtgatcagccaagtagctctggcaaacctttctccctactctcagcnacaacaatttcttccattcaaccaactgtctacactg

SEQ ID NO: 2418 - DNA, 416 bp, Zea mays
  Clone ID: LIB3061-018-Q1-K1-G4
agagagtatcgtcagctagcagagagagtgcgtagcaactagcaatggcggagaacgctgctcggagttccccgctagtgacttctcccgacgccgctgcgccgcctctgccagcggagttcaccaagctcaccttccgtagcctgtacatccgtcggacaggtccaggcagccgggagatgactgtggacgggaggccgtctgaccagctgggacgacggttcgtgagcgactttcccatatacgatggccgtggctccggcgcccacctcgtcgctcgcttgcagggagtcactgtccaaatcggcagctcgcaccagctagtcagcatcgtcttcgaggccgagaggcttaagggcttcacgctgctcaccaacggagtgataacggatgggtcagacgagtgggccatctac

SEQ ID NO: 2419 - DNA, 403 bp, Zea mays
  Clone ID: LIB3061-018-Q1-K1-G5
gcctggcaatctcaaggttgcgtattttgtgaattctgggaccgaagcgaatgagtgggcaatgttgatggcccggctgtatagtgggaatctcagtatggttgcgctcagaaatgcatatcatggcggaagtgccggtacgattggattgactggtatgcagacgtggaaatacccaattcctcagggtgaaatacatcatgtcatgaaccctgatccttatcgggggactttcgggtctgatgctgcagcttatgctaaggaagtcgaagaacacataacttatggaagttcaggaagggttgcaggcttcattgcagaaacattccaaggtgtgggaggtgctgatgaactagctcctggatacctaaagttagcttatgacattgtgcgcaaggctggt

SEQ ID NO: 2420 - DNA, 357 bp, Zea mays
  Clone ID: LIB3061-018-Q1-K1-G6
cccacgcgtccgattattgagaccaactagcaacatagaaagcacaatagggtaccggcaatggcagccaaaatattgtgcctccttatgctccttggtctttctgcaagtgctgctactgcgaccattttcccgcaatgctcacaagctcctatagcttaccttcttcccccgtacctgtcaccagcggtgtcttcggtatgtgaaaacccaattcttcaaccctacaggatccaacaggcaatcacagctggcatcttacctttatcacccttgttcctgcaacaatcatcagccctattacatcagttacctttggtgcatatattggcacaaaacatcatggcacaacaacta

SEQ ID NO: 2421 - DNA, 429 bp, Zea mays
  Clone ID: LIB3061-018-Q1-K1-G7
cactagcaacatagaaagcacaatattgtaccaacaatggcagccaaagtattttggctccatatgctgcttggtctttctgcaagtgcttctacggcgaccatttatccacaatgcttacaagctcctatagcttgccttctttcgccgtacctatcaccagcggtgtcttcggtatgtgaaaacccaattcttcaatcctatagtatccaacaggcaatcgcatctggcatcttacctttatcacacatgttccttcaacaatcatcagccctattacagcatttacctttgcatgcattcattgccacaaaacatcagggcacatcaactacaacaacttgtgctagcaaaccttgctgtctactctcagcaacaacatactctttcattcaaccaactagctgcattgaactctgcttattattt

SEQ ID NO: 2422 - DNA, 167 bp, Zea mays
  Clone ID: LIB3061-018-Q1-K1-G8
aaagctttctggttaccaatagaatccttcctgaactgcaaactagaagtatctgtgtgtgagtagtcaccaatcagaataatcggaagcaccaaggtttaggtttgattcttgtgctatttttaagtacaataaagtaaaaaatgatgaaaataaacgagactaac

SEQ ID NO: 2423 - DNA, 429 bp, Zea mays
  Clone ID: LIB3061-018-Q1-K1-H1
gcaacatagaaagtggaatccagtagcaacaacagagcaacaatggcgaccaagatggtttccgtccttatgctccttgctctttctgcatgtgttgctaacgcgacaattttccctcaatgctcacaagctcctatagcttcccttcttcccccataccttccatcaatgatagcttcagtatgtgaaaacccagctcttcagccctataggctccaacaagcaatcgcagcaagcaacatacctttatcacccttgttgtttcaacaatcgccagccctatctttggtgcagtcattggtacaaaccatcagggcacagcagctgcagcaactcgtgctacctgtgatcaaccaagtagctctggcaaacctttctccctactctcagcaacaacaatttcttccattcaaccaactgtctacactg

SEQ ID NO: 2424 - DNA, 430 bp, Zea mays
  Clone ID: LIB3061-018-Q1-K1-H10
agccttccgttgaagaaccacaccaagcgaaccgcactaccaccgacctaccaccaatggctaccaaggtattatccctccttgcgcttcttgccctttttgtgagcgcaacaaatgcgttcattattccacaatgctcacttgctcctagtgccattattccacagttcctcccaccagttacttcaatgggcttcgaacacctagctgtgcaagccaacatgcaacaacaagcgcttgcggcgagcgtcttacaacaaccaattgcccaattgcaacaacaatccttgccacatctaacaatacaagccatcacaacgcaacagcaacaacagttcctaccagcactgagccacctagccatggtgaaccctgccgcctacttgcaagagcagctgcttgcatccaacccacttgctctggcgaacgt

SEQ ID NO: 2425 - DNA, 440 bp, Zea mays
  unsure (1)..(440): unsure at all n locations; Clone ID: LIB3061-018-Q1-K1-H11
caagcaacataganagtggattacagtagcaaaaatagagcaacattggcggccaagatattttccatccttattgtccttgctctttctgcatgtgttgctaacgcgaccatttttcctcaatactcacaagctcctatagctgcccttcttcccccataccttccatcaatgaccgctttagtatgtgaaaacccagcccttcaaccctacaggatccagcaagcaatcgcaacaagcaacttacctttatcacacctgttctttcaacaatcgccagccctatctttggtgcagtcattggtacaaaccatcagggcagaacagttgcagcaactcgtgctaccagtgatcagccaagtagctctggcaaacctttccccctactctcagcaacaacaatttcttccattcaaccaactgtctatactgaaccctgc

SEQ ID NO: 2426 - DNA, 416 bp, Zea mays
  Clone ID: LIB3061-018-Q1-K1-H12
attgagaccaacaagcaacatagaaagtggaatccagtagcaacaatagagcaacagtggcgaccaagatactttccctccttatgctccttgctctttctgcatgtgttgctaacgcgacaattttccctcaatgctcacaagctcctatagcttcccttcttcccccataccttccatcaatgatagcttcagtatgtgaaaacccagctcttcaaccctataggctccaacaagcaatcgcagcaagcaacatacctttatcacccttgtttcaacaatcgccagccctatctttggtgcagtcattggtacaaaccatcaaggcacagcagctgcagcaactcgtgctacctgtgatcaaccaagtagctctggcaaacctttctccctactatcagcaacaacaatttctt

SEQ ID NO: 2427 - DNA, 446 bp, Zea mays
  Clone ID: LIB3061-018-Q1-K1-H2
ggctgcattgaactctgctgcttatttgcaacaacaattaccattcagccagctaggtgctgggtacccccagcaatttcttccattcaaccaactagcagcattgaactctgctgcttatttacagcagcaacaactactaccattcagccagctagctgatgtgagccctgctgccttcttgacacaacaacagttgttgccgttctacctgcacgctatgcctaacgctggcaccctcttacaactgcaacaattgctgccattcaaccaacttgctttgacaaactcaacagtgttctaccaacaacccatcattggtggtgccctcttttagattgcttatgagttatagttcaataatgaagttttttggatgatgtttgtggcgtcccagaaataagaaagtacatttctagattcaaaagaaaaaaaaaaagggcggc

SEQ ID NO: 2428 - DNA, 453 bp, Zea mays
  unsure (1)..(453): unsure at all n locations; Clone ID: LIB3061-018-Q1-K1-G1
gcgactatcaccatangaaggactcaatacatgtaccttacaagtcggcagccaaatacatatcggcgctcctgtatgctcacatggtgatctctgtatgcgctgctacatgtgaccattttcgcgcagtgctcacaatgctcctagtagctttcgattctgtgctacgtgacctgtcaccatggacagtgcttcggtatgtgaaaacgcatttcttcaaccgatacgggatccaacatgcaatcgcacttggcatgttacctttatcacgcttgttcctccaacagtcatcaggcctattacagctattacgtttgatgcattgattgggacaaaacattacggcacatcgactacaacaacttgtgctagcataccttgctggctactgttatcaacatcagtttattccatgcaaccaactagctgcattgaactctgcttcttatttgc

SEQ ID NO: 2429 - DNA, 478 bp, Zea mays
  Clone ID: LIB3061-018-Q1-K1-E3
ccgtccgacatgaaaacagccactaatgagtagtcactcatacgaatagtgcgagctcataatgtatgtattgcactgcctctatggcgtcctatggtactattctagcatagtgcatgctacctgcgaccattttgaccgcaatgctcgcaagctcctatagctacccttcttcccgcgtacctctcaccagcggtgtcttcaggatgagaaaacccaaatcttcaaccctacaggatccaacatgcaatcgcagctggcatcttacctttatcacccttgctcctacaacaatcatcacccctattacaacagttacctttggtgcatttataggcacagaacatcagggcacaacatctacaacaacttgtgctagcaaacctcgctgcctactctcagcaacagcagtttcttccattcaaccaactaggttcattgaactctgctacttattcgcaacaacaacaactaccat

SEQ ID NO: 2430 - DNA, 195 bp, Zea mays
  Clone ID: LIB3061-018-Q1-K1-E4
cggctgcttttagtggcggttcagattcatgctatgatgaattagtcaaacatacggatccccgtgacgttagatcaggaatggctaatgatgcataccttggtccagtgatcaacccacaggcataggatcgtatctgtaaattacttcaaagtggtgttaacagtgatgctcgtatattgcttgatggaagaa

SEQ ID NO: 2431 - DNA, 384 bp, Zea mays
  Clone ID: LIB3061-018-Q1-K1-E5
cccgtacctctcaccagcggtgtcttctgtatgtgcaaacccaattcttggaccctggaggatccaacaggcaagcgcagctggcatcttacctttatcacccatgttcctccaacaattatcatccttattacaacagtcacctttggtgcatctattggcacaaaacatcatggcacatcaactaccacaacttgtactagcataccttgctgcctactatcagcatcagcagcatatttcattcaaccaactaggttcattgaactctggttcttatttgcaacaactgcaactaccattcaatcagctacctgcttgcctacgcttagcaatctactccattcaaccaactagcatcattcaactcttttgcttatttac

SEQ ID NO: 2432 - DNA, 201 bp, Zea mays
  Clone ID: LIB3061-018-Q1-K1-E6
ctggtgctgcagtggcggttcagaatcatgcgatgatgaattagtcaaacatagaagtgaccgggcctttatactcaggaattgataatgatacaaaccttggtacaatgatcaacccacaagcataggattctatctcgacagctagccaaagttggcttaagagagatgctctgatactgctagatggcagaaagatct

SEQ ID NO: 2433 - DNA, 424 bp, Zea mays
  Clone ID: LIB3061-018-Q1-K1-E7
gtgaggttctccggggttcggtttcgtgggtgagcggatcgagatggcggcgtcggaggttgagtaccgctgcttcgtcggcggcctcgcctgggccacggacgaccactccctccacaacgccttcagcacctacggcgaggtcctcgagtccaagatcatcctcgatcgggagacgcagaggtcccgcggcttcggcttcgtcaccttctccacggaggaggcgatgcggaacgccatcgagggcatgaacggcaaggagctggacggccgcaacatcaccgtcaacgaggcccagtcccgcggcggccgtggaggcggcggcggcggcgggtacggtggtggccgtggaggcggcggctacggcggtggcgggcgccgtgatggcggcggcggctacggcggtggcggcggctacggtggt

SEQ ID NO: 2434 - DNA, 293 bp, Zea mays
  Clone ID: LIB3061-018-Q1-K1-E8
aataagtaccaacaatgtcaagcgaaatattttgcttcttatgcttcttggtctatcttcaagtgttgctaccgaaaccattttaccacaatgctcacaagctcctatagcttaccgtttttccccatacctgtcaccaacagtgactatcaatgtgtgaaaccccaattgttcaaccctacatgatccaacacgcaatctcaacatgcatttaaccattatcactcttgtgtctttaacaaccatcaaacctattacagtagttacccttttattcatttttttggacaaaa

SEQ ID NO: 2435 - DNA, 434 bp, Zea mays
  Clone ID: LIB3061-018-Q1-K1-F1
ggcttgctagcaacttcaagaaagatgaaggtattgatcttctgaaggataaacaaggccttcagaggcttactgaggcatcagagaaagctaagatggaactgtcaacgctgacacaggcaaatattagcctgccattcattactgctactgctgatgggccaaaacacattgaggcaaccctctcgagagccaaatttgaggaactatgttcagaccttatagacaggcttaaaactcctgttaataatgccttaagagatgccaagttgtctgtcagtgatctagatgaagttattcttgtgggtggatccacccgaatccctgcagttcaagaacttgtgaggaagcttactgacaaagatcccaatgttacggtcaaccctgatgaggttgtttctcttggggcagctgtgcagggtggggttttggca

SEQ ID NO: 2436 - DNA, 416 bp, Zea mays
  Clone ID: LIB3061-018-Q1-K1-F10
gcggatgcgacgccgacgatggtgttcgtctacggcaccctaaagcgcgggttccctggccactcgctcctcgtggcctccgccacccccttcgtgggagccgcatccacggccgagccagcctccctcatcatcggcccctactcggtacccttcctcctccccactcccgcctccgcctcctccggtcgcgtcgtctcgggcgagctctacgccccatcccccgccgcgctcgccgagctcgacgccctcgagggcacccacatcggcgtctacgagcggcgcccgatcaccgtcgtggtcgacgggtcgggcgaggtggtgcaggcggaggcgtacttcgcgcacccgagctacgcggaggcgctctggcggcgctgcggcggtgaggaggccgagattggagagtacaccgt

SEQ ID NO: 2437 - DNA, 423 bp, Zea mays
  Clone ID: LIB3061-018-Q1-K1-F11
cagctagcaacatagaaagcacaatagtttaccaacaatggcagccaaaatattttgccggcttatgctccttggtctgtctgcaagtgctgctacggcgaccattttcccacaatgctcacaagctcctatagcttcccttcttcccccgtacctctcaccagcggtgtcttcggtatgtgaaaacccaattcttcaaccctataggatccaacaggcaatcgcagctggcatcttacctttatcacccttgttcctccaacaatcatcagccctattacagcagttacctttggtgcatttattggcacaaaacatcagggcacaacaactacaacaacttgtgctagcaaaccttgctgcctactctcagcaacaacagtttcttccattcaaccaactagctgcattgaactctgcttc

SEQ ID NO: 2438 - DNA, 426 bp, Zea mays
  Clone ID: LIB3061-018-Q1-K1-F12
tccgccaggataaaccattctgtagttggactccgatcttgcatatctgaaggtgctatcagagaggacagtttactaatgggtgcggactactatgagacagaagctgataaaaaactccttgccgaaaaaggtggcattcctattggtattgggaaaaattcatgcatcaggagagcaatcattgacaagaatgctcgaattggagacaatgttaagatactcaatgctgacaatgttcaagaagctgcaatggagacagacgggtacttcatcaaaggtggaattgtcacagtgatcaaggatgctttactccctagtggaacagttatatgaagtgaacgtgcgacatgcagctgtgtgtctcgacattcgacaatgatcagcacctggttacatgcgtgatctgcagatcagtctgttgga

SEQ ID NO: 2439 - DNA, 274 bp, Zea mays
  Clone ID: LIB3061-018-Q1-K1-F3
atttccggctggacccactcatccaaacattctatccacttcaaccacaattttactcttaatactctcaaccataaacaaggcctccgaatacttacagaggccttacataattctactattgcactatcaacacactcacaacctaatattaatattccactcattactactactcataattcaccaattcacaataaagtaaccttaattatattcaaatactttgaactataatcaaaccttatacaaaaatttaaaactcctatcaata

SEQ ID NO: 2440 - DNA, 226 bp, Zea mays
  Clone ID: LIB3061-018-Q1-K1-F4
cagcattcaaaaacacaccaagcgaatcgcactatcaacgacctaacaccaatggctgccaagatattagccctccttgcgcttcttgcccttttagtgagcgcaacaaatgcgttcattattccacagtgctcacttgctcctagtgccagtatttcacagttccttccaccagttacttcaatgggcttcgaacattcagccgtgcaagcctacaggctacaac

SEQ ID NO: 2441 - DNA, 421 bp, Zea mays
  Clone ID: LIB3061-018-Q1-K1-F5
attcagaaacacaccaagcgaagcgcactagcaacgacctaacaacaatggctaccgggatattagccctccttgcgcttcttgccctttttgtgagcgcaacaaatgcgttcattattccacaatgctcacttgctcctagtgccattattccacagttcctcccaccagttacttcaatgggcttcgaacacctagctgtgcaagccaacatgcaacaacaagcgcttgcggcgagcgtcttacaacaaccaattgcccaattgcaacaacaatccttgccacatctaacaatacaagccatcacaacgcaacagcaacaacagttcctaccagcactgagccacctagccatggtgaaccctgccgcctacttgcaagagcaactgcttgcatccaacccacttgctctggcgaacgt

SEQ ID NO: 2442 - DNA, 177 bp, Zea mays
  Clone ID: LIB3061-018-Q1-K1-F6
ccggtccggattgccggacacccgctcgttcaagatcgcctacgtgccgaacggcaaggtctacgccgagatcgtgtgcccagaccgtcagtcgcagggcggcgagagcgagcgcgagcccgacaaggccatgaggagcgaacaagaagaagaagaatcgtctgaggagcagaagga

SEQ ID NO: 2443 - DNA, 438 bp, Zea mays
  unsure (1)..(438): unsure at all n locations; Clone ID: LIB3061-018-Q1-K1-F7
attttgagcattcagaaacacaccaagcgaagcacattagcaacaacctggcaacaggggctaccaagatattatccctccttgcgcttcttgcgctttttgcgagcgcaacaaatgcgttcattattccacaatgctcacttgctccaagttccattattacacagttcctcccaccagttacttcaatgggcttcgaacacccagctgtgcaagcctataggctacaacaagcaattgcggcgagcgtcttacaacaaccaatttcccagttgcaacaacaatccttggcacatctaacaatacaaaccatcgcaacgcaacagcaacaacaattcctaccagcactgagccacctagccatggtgaaccctgccggctacttgcaacagcagttgcttgcatcaaacccacttgctctggcanacgtagttgcaa

SEQ ID NO: 2444 - DNA, 428 bp, Zea mays
  unsure (1)..(428): unsure at all n locations; Clone ID: LIB3061-018-Q1-K1-F8
gcagcagccaccgccgcctcatcctcgcagccgccgtcctgctctccgtgctcgcggctgccagcgccagcgccgggacctcctgcgtgccggggtgggccatcccgcacaacccgctcccgagctgccgctggtacgtgaccagccggacctgcggcatcgggccgcgcctcccgtggccggagctgaagaggagatgctgccgggagctggcggacatcccggcgtactgccggtgcacggcgctgagcatcctcatggacggcgcgatcccgccgggcccggacgcgcagctggagggccgcctagaggacctgccgggctgcccgcgggaggtgcagaggggattcgccgncaccctcgtcacggaggccgagtgcaacctggccaccatcagcggcgtcgccgaatgcccctggattctcggc

SEQ ID NO: 2445 - DNA, 429 bp, Zea mays
  Clone ID: LIB3061-018-Q1-K1-F9
tcgcgggccccttggtccaaaccaacttggctctatcaaaacgtagttgcaaaaccaacaacaacggcaactgcaacagtttctgccagcgcttagtcaactagccatggtgaaccctgccgcctacctacaacagcaacaactgctttcatctagcccgctcgctgtggccaatgcacctacatacctgcaacaagaattgttgcaacagattgtaccagctctaactcagctagctgtggcaaaccctgttgcctacttgcaacagctgcttccattcaaccaactaactatgtcgaactctgttgcgtacctacaacagcgacaacagttacttaatccattggcagtggctaacccattggtcgctgccttcctacagcagcaacaattgctgccatacaaccggttctctttgatgaatcctgt

SEQ ID NO: 2446 - DNA, 337 bp, Zea mays
  Clone ID: LIB3061-018-Q1-K1-E2
catgtcctgacaacagttcgttggatacttctggtaaagctcatgatgaacagagagtggatcgggccttaataaccaagcatgacagtgtgatgatgccttctactagtaaccagacatcattagatgctactgtatgcactgagagcagtgctgaatatatgaagcaggatgtaagccattgcgatgacttcaatatcagagtcaatgaccaaagcttgaaccaagcgttaagaaatcagcatggtgattctgtcccattacctgacatgggatcactagatgctaaagttgacaaggaaagtaattggtgtttggaaacattgattgcaaactt

SEQ ID NO: 2447 - DNA, 453 bp, Zea mays
  Clone ID: LIB3061-037-Q1-K1-A2
atggtgggtcacttccaagtactgcatctctatcagctgctggtaattacaacactgatgagtggcttcccaggtcgtgtgttggttggactgattgggctgtcaatagtgagcaaaatgttactcctagcattgctccaagatttgaactcatgcagtctgttgaggagcctgtttccagctggacaagcagtggggcacagcatgttggtcctcatcacaagcacacaggtttaactttcccagatgttgactctgaaccatgtgtatctgcatcaatggatcaatgttttaataacttcgattattcgaaatttctcagagaacaagaaatattcttaatgaatggactgaagactgtcaacataactggaaatggctatctagagcagagattgcagcctggattgagtggtttacagtctatgggttattcatctcagatacctattc

SEQ ID NO: 2448 - DNA, 382 bp, Zea mays
  unsure (1)..(382): unsure at all n locations; Clone ID: LIB3061-037-Q1-K1-A3
gcgagaaagcacaatagtgtaccaacaatggcagccaaaatattttgcttccttatgctccttggtggttgtgcaagtgttgctaccgcaaccattttcccacaatgctcacaagctcctatagcttcccttcttcccccatacctctcaccagcggtgtcttcaatgtgtgaaaacccaattgttcaaccctacaggatccaacaggcaatcgcaacaggcatcttaccattatcacccttgntcctncaacaaccgtcagccctattacagcagttacctttggtccaattggtggcacaaaacatcaaggcacaacaactacaacaacttgggctagcaaaccttgctgcatactcttagcaacatcagtttcttccat

SEQ ID NO: 2449 - DNA, 180 bp, Zea mays
  unsure (1)..(180): unsure at all n locations; Clone ID: LIB3061-037-Q1-K1-A4
ccaacaagcaacatanaaagtggaatcgagtagcatcaatagagcaacaatggcgaccaatagattggccctccttatgcggcttgctctttctacatgttttgctaacgcgacaattttccctcaatgctcacaagctcctataacatcccttcttcctccatactttccatcatttat

SEQ ID NO: 2450 - DNA, 292 bp, Zea mays
  Clone ID: LIB3061-037-Q1-K1-A5
aattcctaccagcactgagccacctagccatggtgaaccctgccgcctacttgcaacagcgagggcttgcatcaaacgcacttgctctggcaaacgtagttgcaaaccagccacaacaacagctgcaacagtttctgccagcgctcagtcaactagccatggtgaaccctgccgcctacctacaacaagcacaactgctttcatctagcccgctcgctgtggccaatgcacctacatacctgcaacaacaattgttgcaacagattgtaccagctctgactcagctagttgt

SEQ ID NO: 2451 - DNA, 167 bp, Zea mays
  Clone ID: LIB3061-037-Q1-K1-A7
cagagaaacccctggtcatttttcagaatggctgttgagaaagaaaaaccttgaaaattgttcgtcagtgtatcctattggtatttgatttctgaagccgatgtataataaataatcagagtcatagaatgctcgatgtaataaagtgtccatgggcttgttgattc

SEQ ID NO: 2452 - DNA, 415 bp, Zea mays
  unsure (1)..(415): unsure at all n locations; Clone ID: LIB3061-037-Q1-K1-A9
gaccattgcaacgcaccaccaacacgaccaacagtttctgccatcactgagccacctagccntggtgaaccctgtgacctacttgcaacagcagctgcttgcatccaacccacttgctctggcgaacgtagctgcataccagcaacaacaacagctgcaacagtttatgccagtgctcagtcaactagccatggtgaaccctgccgtctacctacaactactttcatctagcccgctcgcggtgggcaatgcacctacgtacctacaacaacagttgctgcaacaaattgtaccagctctgactcagctagctgtggcaaaccctgctgcctacttacaacagttgcttccattcaaccaactggctgtgtcaaactctgctgcgtacctacaacagcgacaacagttacttaat

SEQ ID NO: 2453 - DNA, 249 bp, Zea mays
  unsure (1)..(249): unsure at all n locations; Clone ID: LIB3061-037-Q1-K1-B1
gctcgctctccttgcaactccagtgctgctcactgccactgccagcagatcgagctgctccgtgtgacagaccctcttgctttgctgctgcacctgcaagtctgcaaccgcgcacacagagatgtcgacgacggtgagccgtgcgtccntcgaccagaagctcgccctcgccaagcgtggctcccgagaggcgaccttggccggacccaaggcggcagctgtgcgactatcgcttccgcaatcccaacc

SEQ ID NO: 2454 - DNA, 419 bp, Zea mays
  unsure (1)..(419): unsure at all n locations; Clone ID: LIB3061-037-Q1-K1-B10
caactagcaacatacatagtgaagtacactagcaacatcttagcaccaatgggagcggagatttttgccctccttgccctccttgctctttcagcaagcgctgctacctcgacttttattccacaatgctcacaacaatacctctctccggtgacagccgcgggatttcaatacccaactatacaatcctacatggtacaagaggccatccaagcaagcatcttacggtcattagcattaaccctccaacaaccatatgctctattgcaacagccatccttagtgcatctgtatctccaaagaatcgcggcacaacaactacaacaacagttgctaccaacaatcaatcaagtagttgcagcgaaccttgctgcttacctncagcacccacagtttctttcattcaatcaactagctgg

SEQ ID NO: 2455 - DNA, 398 bp, Zea mays
  Clone ID: LIB3061-037-Q1-K1-B11
tgcacctacgtacctacaacaccggttgctgcaacaaattgtaccacctctgactgagctagctgtggcagaccctgctgcctacttacaacagttgcttccattcaaccaactggctgtgtcaaactctgctgcgtacctacaacagcgacaacagttacttaatccattggcagtggctaacccattggtcgctaccttcctgcagcagcaacaacaattgctgccatacaaccagttctctttgatgaaccctgccttgcagcaacccatcgttggaagtgccatcttttagattacatatgagatgtactcgacaatggtgccctcataccgacatgtgtttcctagaaataatcaatatattgattgagatttatctcgatatatctctgaat

SEQ ID NO: 2456 - DNA, 427 bp, Zea mays
  Clone ID: LIB3061-037-Q1-K1-B12
cgcactagcaacatagaaagcacaatagtgtaccaacaatggcagccaaaatattttggctgcttatgctccttggtctttctgcaagtgctgctacggcgaccattttcccgcaatgctcgcaagctcctatagcttcccttcttcccccgtacctctcaccagcggtgtcttcggtatgtgaaaacccaattcttcaaccctacaggatccaacaggcaatcacagctggcatcttacctttatcacccttgttcctccaacaatcatcagccctattacatcagttacctttggtgcatttattggcacaaaacatcagggcacaacaactacaacaacttgtgctagcaaaccttgctgcctactctcagcaacagcagtttcttccattcaaccaactagctgcattgaactctgcttctta

SEQ ID NO: 2457 - DNA, 362 bp, Zea mays
  Clone ID: LIB3061-037-Q1-K1-B2
gaccaacaagcaacatagaaagtggaatccagtagcaacaatagagcaacaatggcgaccaagagattgtccctccttatgctccttgctctttctacatgtgttgctaacgcgacaattttccctcaatgctcacaagctcctatagcttcccttcttcccccataccttccatcaattatagcttcaatatgtgaaaacccagctcttcaaccatataggcttcaacaagcaatcgcagcaagcaacatacctttatcgcccttgttgtttcaacaatcgccagccctatctttggtgcaatcattggtacaaaccattagggcacaacagctgcagcaactcgtgctacctctgatcaa

SEQ ID NO: 2458 - DNA, 342 bp, Zea mays
  Clone ID: LIB3061-037-Q1-K1-B3
gaccaactagcaacatagaaagcacaagagtgtatcaacaatggcagccaaaatattttgccggctgaggctccttggtctttctgcaagtgctgctacggcgaccattttcccgcaatgctcgcaagctcctatagcttcccttcttcccccgtacctctcaccagcggtgtcttcggtatgtgaaaacccaattcttcaaccctacaggatccaacaggcaatcgcagctggcatcttacctttatcacccttgttcctccaacaatcatcagccctattacaacagttacctttggtgcatttattggcacaaaacatcaaggcaccacaacttccacc

SEQ ID NO: 2459 - DNA, 350 bp, Zea mays
  Clone ID: LIB3061-037-Q1-K1-B4
gcgtccagatcagcaaagcggcagtgcgtagagaggatcgtcgaacagaacagcatgaagatggtcgtcgtgctcgtcgtgtgcctggctctgtcagctgccagcgcctctgcaatgcagatgccctgcccctgcgcggagctgcagggcttgtacggcgctggcgccggcctgacgacgatgatgggcgccggcgggctgtacccctacgcggagtacctgaagcagccgcagtgcaacccggtggcggcggcgccctactacgcccggtgtgggcagcccaacgccatgttccaaccggttcggcaacagtgcttccagcaacagatgaagatgatggacctgcaatc

SEQ ID NO: 2460 - DNA, 268 bp, Zea mays
  Clone ID: LIB3061-037-Q1-K1-B5
tgcagatggccaagttcgacttgaaaagcttttggggactgaatctgagaactctgtctcgagctctaaaggcccagcacgactgaagggccattctgctccaggaaagtgtgtaaaacactgggaatccagtggaaataaatctaccaagaaacaggtctccttcgcagagcgtccagtatcttttgtcaagtgtggaaccattgtggactcccttactgaggcaatagctggcccaagtggtggtgatacctcgtgtgttaaacct

SEQ ID NO: 2461 - DNA, 414 bp, Zea mays
  Clone ID: LIB3061-037-Q1-K1-B6
aacagttgctgcaacaaattgtaccagctcttactcagctagctgtggcaaaccctgctgcctgcttgcaacaactacttccattcaaccaactgactgtgtcgaactctgctgcgtacctacaacagcgacaacagttacttaatccactagcggtggctaacccattggtcgctgccttcctacagcagcaacaattgctgccatacaaccagttctctttgatgaaccctgccttgtcgtggcagcaacccatcgttggtggtgccatcttttagattacatatgagatgtactcgataatggtgccctcatagcggcatgtgtttcctaaaaataatcaatatattgattgagatttatctcgattaaaaaaaaatagtcaaaaattaaacagaaaaaaaaattcctatt

SEQ ID NO: 2462 - DNA, 480 bp, Zea mays
  Clone ID: LIB3061-037-Q1-K1-B7
accggaattgaagtgtcgacccgagcgaggcataccaactggcgtcatacatagcacattattgtcccaacaacggcagccgacatattacgtgtgcggatgctctaaggctggtatgctagtgctgctgcagcaaccattgtcatgcaatgattcgagctacaaaccctacagtgttttaccagcacctcataatagcgggtgctctgttttagaaagcccaagagttatactcctacagtgaccatctgcgatggcagttgcattctaaccttaataaccttggttcttccaacattaataagccttattacaacagttacctttggtgcattaattggcacaaaacatcagggcacaacaactacaacaacttgtgctagcaaaccttgctgctactctcagcaacagcagtttcttccattcaaccaactaggttcattgaactctgcttcttatttgcaacaacaacaactacca

SEQ ID NO: 2463 - DNA, 418 bp, Zea mays
  Clone ID: LIB3061-037-Q1-K1-B8
atgcagcccaaatcgggcggtaaactccgtccaaggctaaatacaggcgagagaccgagagcgagcaagtaccgcgtgcgtatcttcgctgacaccgtcgccatgactccgacagttgtgtgatacataccacatgcaatatacataccctacttgttattttatgtttccagttaataataaaccaggccttagcttcttggttggccttccttgggtggtgttagcttctaagctactagtacaccattaaaaaaaggaggacctcatgtatggctaccgtgaaaaatgtgatcttgatggaataatatatcataaattagcaattaatgaaaaaaaaacataaaacaaaaaatgcaaaaaaaaaaatcaacttgagccttcccctttcgacagcaacaaactgtaccaaccaaat

SEQ ID NO: 2464 - DNA, 352 bp, Zea mays
  Clone ID: LIB3061-037-Q1-K1-A12
gtccctatcgtgtgtcgtccaaaggcatcaccccccacgtctctcccataccatccgggtgtagatttcaaatccgcgtcatacctcatgtctgggtctcctgcttcgccgacagttgcctccttcagtcgagatccgacgctggtgagaccactgaccatggaggccatggaggatctatcacagctcgacgagtcgatgcgccaggcgttgtcacttactagctacgacgacccctccgacgacgccgcgccgcgtcatcacaccagctttctcaacgccgtcgacctctacaacgtctgcactgacaagtccgccgtgctgaacagcctcatctgccacccgttcttgt

SEQ ID NO: 2465 - DNA, 463 bp, Zea mays
  Clone ID: LIB3061-036-Q1-K1-G9
caacaagcaacatagaaagtggaatacagtagcaacaatagagcaacaatggcggccaagatattttccatcctgatgctccttgctctttctgcatgtgttgctaacgcgaccatttttcctcaatactcacaagctcctatagctgcccttcttcccccataccttccatcaatgaccgcttcagtttgtgaaaacccagcccttcaaccctacaggctccaacaagcaatcgcaacaagcaacttacctttatcacccctgttctttcaacaatcgccagccctatctttggtgcagtcattggtacaaaccatcagggcacaacagctgcaacaactcgtgctaccagtgatcagccaagtagctctggcaaacctttctccctactctcagcaacaacaatttcttccattcaaccaactgtctacactgaaccctgctgcttatttacaacaacaac

SEQ ID NO: 2466 - DNA, 439 bp, Zea mays
  Clone ID: LIB3061-036-Q1-K1-H1
gcttgcgacatcctggagaagaagaaattcgcgacacccgacaaggtggcagagatgtacatagaggtatcctcactgtttgagacggtgaatgagttggaaaaggcaatatctttgctgaagaagagcctgggaatgcttgagaggatgcctcaggcacagcacctggagggcaatgtcgcagcgaggattgggtggctgttgcttttgactggtaaggtctctgaagctgtcccgtacttggaggatgcagtggagaggatgaaggacagcttcggtccgaagcattatggagtagggtatgtgtataacaacttgggtgctgcttacatggagatggaccgtccgcagtctgctgcacagatgtttgcgctcgctaaagaagtcatggatgtctccttagggcctcaccattcggataccatcgaggcttgtcaga

SEQ ID NO: 2467 - DNA, 439 bp, Zea mays
  unsure (1)..(439): unsure at all n locations; Clone ID: LIB3061-036-Q1-K1-H11
cagaccattagctttatctactccagagcgcagaagaacccgatcgacaccatgagggtgttgctcgttgccctcgctctcctggctctcgctgcgagcgccacctccacgcatacaagcggcggctgcggctgccagccaccgccgccggttcatctaccgccgccggtgcatctgccacctccggttcacctgccacctccggtgcatctcccaccgccggtccacctgccgccgccggtccacctgccaccgccggtccatgtgccgccgccggttcatctgccgccgccaccatgccactaccctnactcaaccgcccggcctcagcctcatccccagccacacccatgcccgtgccaacagccgcatccaagcccgtgccagctgcagggaacctgcggcgttggcagcaccccgatcctgggccagtgcgtcg

SEQ ID NO: 2468 - DNA, 434 bp, Zea mays
  Clone ID: LIB3061-036-Q1-K1-H12
attgaaccaactagctgcattgaactctgcttcttatttgcaacaacaacaactaccagtcaggcagctatctgctgcctacccccagcaatttcttccattcaaccaactgacagcattgaactctcctgcttatttacagcagcaacaactactaccattcagccagctagctggtgtgagccctgctaccttcttgacacaaccacagttgttgccgttctaccagcacgctgcgcctaacgctggcaccctcttacaactgcaacaattgctgccattcaaccaacttgctttgacaaacccagcagcattctaccaacaacccatcattggtggtgccctcttttagatttcttatgagttatagttcaataataaagttttttgtctgatgtttgtggcttcccagaaataagaaagtacatttctag

SEQ ID NO: 2469 - DNA, 447 bp, Zea mays
  Clone ID: LIB3061-036-Q1-K1-H2
cccacgcgtccgcaactagcaacatagaaagcacaatagtgtaccaacaatggcagcgtaagatattttgcctccttatgctccttggtctttctgcaagtgctgctacggcgaccattttcccacaatgctcacaagctcctatagcttcccttcttcccccgtacctctcaccaacggtgtcttcggtatgtgaaaacccaattcttcaaccctacaggatccaacaggcaatcgcagctggcatcttacctttatcacccttgttcctccaacaatcatcagccctattacagcagttacctttggtgcatttattggcacaaaacatcagggcacaacaactacaacaacttgtgctagcaaaccttgctgcctactctcagcaacagcagtttcttccattcaaccaactagctgcattgaactctgcttcttatttgcaac

SEQ ID NO: 2470 - DNA, 307 bp, Zea mays
  Clone ID: LIB3061-036-Q1-K1-H3
cggacgcgtggggcaaatactactaccatttagccagctagctgcagcaaaccgtgcgtccttcttgacacagcaacagttgctgcctttctaccagcagtttgcggctaaccccgcaaccctcttacaactacaacaattgttgccctttgtccaacttgctttgacagaccgagcggcctcctaccaacaacacatcattggtggtgccctcttttagattgcttattagttgtaattcaataataaagttttttggatgatgtatgtggccaaccagaaataagaagttacatttccagatttt

SEQ ID NO: 2471 - DNA, 451 bp, Zea mays
  Clone ID: LIB3061-036-Q1-K1-H4
gcgattgagaccaactagcaacatagaaagcacaatagtgtaccaacaatggcagccaagataggttgcctccttatgctccttggtctttctgcaagtgctgctacggcgaccattttcccacaatgctcacaagctcctatagcttcccttcttcccccgtacctctcaccagcggtgtcttcggtatgtgaaaacccaattcttcaaccctataggatccaacaggcaatcgcagctggcatcttacctttatcacccttgttcctccaacaatcatcagccctattacagcagttacctttggtgcatttattggcacaaaacatcagggcacaacaactacaacaacttgtgctagcaaaccttgctgcctactctcagcaacaacagtttcttccattcaaccaactagctgcattgaactctgcttcttatttgcacaaacaca

SEQ ID NO: 2472 - DNA, 427 bp, Zea mays
  Clone ID: LIB3061-036-Q1-K1-H5
ccaaaatcatacatacaattagtattgtgtgattttaatcaaatatacattacagaaagtatgatttatgcgatcaacaatttttttaccctttgaaattttgaatactcggtctcaaattggtagattcagcatatagttgccttttcagggaatgcatcacaaggtggtaccacattacccatgatctacgtgctcggagactccctggcgcctgtctgagaacaacaataacctggtgacactgctcaaggccaacttactacgaaacaacatcgactacctatggcacaaggccaccggctgtttcagcaatggcaagaactccatcgacttcctcggaagaaggtatgggaaaagcatggaagtacgtcgtaccacggtgcctcgtgctatcgtcaacgatggagctcgctcaacaaccaca

SEQ ID NO: 2473 - DNA, 410 bp, Zea mays
  Clone ID: LIB3061-036-Q1-K1-H6
acctaactaccaacatattgctcacaataatgtaccaacaatctcacgtagatattttgcctacttatgctcctctatctttctgcaattgctcctacagcaaccattttcccacaatactcacaagcttctatagctttccttcttcctacctacctctaaccaactgtgtcttctgtatgttaaaacccaattcttcaaccctacaccatccaacaatcaatcacagcttgcatcctacctttatcacccttgttcctccaacaatcatcatacctattacaacagttaccttttgtgcatttattggcacaaaacatcaaggcacaacaactacaacaacttttgctaaccaaccttgctacctactcttagcaacatcaatttctttcattcaaccaactaacttc

SEQ ID NO: 2474 - DNA, 438 bp, Zea mays
  Clone ID: LIB3061-036-Q1-K1-H7
gaccaactagcaacatagaaagcacaatagtgtaccaacaatggcagccaaaatattgtgcttccttatgctccttggtctttctgcaagtgttgctaccgcaaccattttcccacaatgctcacaagctcctatagcttcccttcttcccccatacctctcaccagcggtgtcttcaatgtgtgaaaccccaattgttcaaccctacaggatccaacaggcaatcgcaacaggcatcttaccattatcacccttgttcctccaacaaccgtcagccctattacagcagttacctttggtccatttggtggcacaaaacatcagggcacaacaactacaacaacttgtgctagcaaaccttgctgcatactctcagcaacatcagtttcttccattcaaccaactggctgcattgaactctgctgcttatttgcaaca

SEQ ID NO: 2475 - DNA, 316 bp, Zea mays
  Clone ID: LIB3061-036-Q1-K1-H8
gtggctcgcgtacagggagtcgttacccagatgggcgacgtgcgccagttgtggaccgtcgtgttccaggataggccgctcaaggtctccacgctcgtcaccgaacgctcgatgacagaaggttcagacgagtggtcgatctacttgtgaactggactgttcgcgatggcgagaggcgtcatatggagaacgtatcttgccgacactatgcggtggaactccgactagcttgccgcgtaggctctctgcacggtgtttcgtccgacagcttttggctcattgtcagcacatccatttgcagcggacattagctcca

SEQ ID NO: 2476 - DNA, 415 bp, Zea mays
  Clone ID: LIB3061-036-Q1-K1-H9
tgacaagtacgtgaacggcgagataattccctgcacgtacccgacgtaccagccgaaggagcggaggacgtccaagtacgagagcaggcggtacgagaggcggagagatgggccaccggcggccagcaggaaaccgaggcagcaggcaccagctcatactcagaccgagtcggcgtcttcgtgacgagctctgcaggcattttgtccacgtacctacctacctagaagtagaacaagagaggaggaacgcctaaattctgtcgccttgggcaccgcgtactgggactggacaggcgggtcgggatccatcatccatcgtcagccagaaaaattgtcgctgtacaagcagcctgggcagcttgtgtgcgtgtgtgctgataagcctgatatcttgagctagctgtggcataaactg

SEQ ID NO: 2477 - DNA, 436 bp, Zea mays
  Clone ID: LIB3061-037-Q1-K1-A1
gccccctccccctatggcagccatcctcgattgcttcctcccccaagatctccccctacgcagggaggatcgagaaaaggaggggcacgttgaattgaagaggaagagaggatcaaggagatgttcttccccatctcctcttgaagatttcttggggaaaccctaggtggctacactccagatcatgtctagtacatttcttcttcttcgatgaaggtgcttgttgctcatcaaggggagtgggaagtagcagcacatccaccttcattctcataataatgctgcccaaacgcaaccatgatttaattagaaacttcttgtcaaaagaatgttggttttaactaatcgtgcccacttgataaatcaagtcaatgtggtaatggtggctttccaatggctaccagataattaatggcttatatgtttacttatcatg

SEQ ID NO: 2478 - DNA, 431 bp, Zea mays
  unsure (1)..(431): unsure at all n locations; Clone ID: LIB3061-037-Q1-K1-A10
agaaagcacaatagtgtaccaacaatggcagccaaaatattttgcctccttatgctgggtggtctttctgcaagtgctgctacggcgaccattttcccgcaatgctcgcaagctcctatagcttcccttcttcccccgtacctctcaccagcggtgtcttcggtatgtgaaaacccaattcttcaaccctacaggatccaacaggcaatcgcagctggcatcttacctttatcacccttgttcctccaacaatcatcagccctattacaacagttacctttggtgcatttattggcacaaaacatcagggcacaacaactacaacaacttgtgctagcaaaccttgctgcctactctcagcaacagcagtttcttccattcaaccaactangttcattgaactcttgcttctatttgcaacaaacaacact

SEQ ID NO: 2479 - DNA, 432 bp, Zea mays
  Clone ID: LIB3061-037-Q1-K1-A11
agaacagcaatgggctaggatttgttgatgtgcctggccttaactttgatgcaagcgttgtactgcatggtcaacaatacatagagatctataggccaatcccttcgtatgccagtgttgtaaacagggttaaagtagctggtttgcacgacaaggggaaagcaactattcttgagctcgaaactaccacaagcctcaaagagtcaggggaaattttatgcatgaacagtgtgtaatgcaggagtactatctacttgcgtggtgctggagggttttcagactcttcacggccatactcatatgctacctatcctgctaatcaagtttctcgcatttctattccaaattcggcaccttctgcagtatgcgacgaccagacaaagcaatcccaggcattgttatacaggctatctggggattacaatcctttgc

SEQ ID NO: 2480 - DNA, 440 bp, Zea mays
  Clone ID: LIB3061-036-Q1-K1-G8
atcccggtaaaattcccccgacgcgaggcctcaaatcgctctctgcccccggtgcaccggtcgcctcccttccgctcccctgcctgcctaatccctccggccaccccgaaaccgctcgctcgctcgctcgctccccgcgcccagagacaagcccggagaccatggcggaccagctcactgacgaccaaatcgccgagttcaaggaggccttcagcctcttcgataaggacggcgactgttgcatcacaaccaaggagcttggaactgtcatgcgttcactgggtcagaacccaacggaggctgaactccaggacatgatcaatgaggtggatgccgacggcaatggcacgatcgacttccccgagttccttaacctcatggcccgcaagatgaaggacaccgactccgaggaggagctcaaggaggcgttcaaggtgttc

SEQ ID NO: 2481 - DNA, 359 bp, Zea mays
  Clone ID: LIB3061-036-Q1-K1-F4
agtgagaccaactagcaacatagaatgcacaatagtgtaccaacaatggcagccaggatattttgcctccttatgctccttggtctttctgcaagtgctgctacggcgaccattttcccgcatgctcgcaggctccaatagcttccctttttcccccgtacttttaacaagcgggtcttcggtatgtgaaaacccaattcttcaacccttccagattccaccaggcattaccagttggaatttaactttaataaccttggtccttcaacaattattaagcctattacattagttacctttggtgcatttattggcacaaaacattagggcacaacaactacaacaacttgtgctagcaa

SEQ ID NO: 2482 - DNA, 436 bp, Zea mays
  Clone ID: LIB3061-036-Q1-K1-F5
cccacgcgtccggtgatcaacctggcgcaactgcagaagcggacggcgatgggcctggggctcgacttcgacgagggctcggagcacgtgtcgtgcacgtccccggcctcggcctcatgtctcctctctaaagagctcgccgcgcagcgcgatcagcacaggaacgagatggaccggctgatccaggaacatgcggacaggctccggcgcgcgctggccgacactcggcggcggcactaccgttcgctggtcggcgcggcggaggcggcggctgctcaacgggtaagggagaaggaggcggaagcctcggatgccgcgcggcgccgcgcggacctggaagaccgggtggcgcagcatgaggcggaagcagcggcgtggcaggccaaggacgccgcggatcagtccacggccgcggcgctccacgcgcagctgcagc

SEQ ID NO: 2483 - DNA, 437 bp, Zea mays
  Clone ID: LIB3061-036-Q1-K1-F6
caactagcaacatagaaagcacaatagtgtaccaacaatggcagccaaaatatgcggcctccttatgctccttggtctttctgcatgtgctgctacagcgaccattttcccgcaatgctcgcaagctcctatagcttcccttcttgctgcgtacctctcaccagcggtgtcttcgcgtatgtgaaaacccaattcttcaaccctacaggatccaacaggctatcgcaactgacatcttacctttatcacccttgctcattcaacaatcatcagacctattacaacagttacctttggcgcattgattggctcacaacatcatggcacatcaactactacaacttgcgctagcataccttgctgcctactctcagcaacagcagtttcttgcattcaaccaactaggctcattgaactctgctccttatatgcaacaa

SEQ ID NO: 2484 - DNA, 420 bp, Zea mays
  Clone ID: LIB3061-036-Q1-K1-F7
gtcagttcaattctacttcgcttaaccgccatattcatcgtacataccttgaaggcgggatcaactttgctgatggatctgtacaggtattagcggctacacaaatgcctgaagagccagctggatggttccagggtacagcagactctatcagaaaatttatctgggtactcgaggattattacagtcacaaatccattgacaacattgtaatcttgagtggcgatcagctttatcggatgaattacatggaacttgtgcagaaacatgtcgaggacgatgctgatatcactatatcatgtgctcctgttgatgagagccgagcttctaaaaatgggctagtgaagattgatcatactggacgtgtacttcaattctttgaaaaaccaaagggtgctgatttgaattctatgagagttg

SEQ ID NO: 2485 - DNA, 438 bp, Zea mays
  Clone ID: LIB3061-036-Q1-K1-F8
cggacgcgtgggcggacgcgtgggctgacgcgtgggatttataccaactaccgcagtcatagtgaagtccactagcaccatcttaccaccaatggcagccaagatttttgcgctccttgccctccttgctctttcagcaagtgttgctaccgcgactattattccacaatgctcacaacaatacctctctccagtgatagccgcgagatttgaatacccatctatacaatcctacaggctacaagaggccatcacagcaagcatcttacggtcgttagcattgaccgtccaacaaccatatgccctattgcaacaaccatccttagtgaatctgtatctccaaagaatcacagcacaacaactacaacaacggttgcttccaacaattaatcaagtagttgcagcgaaccttgctgcttaccttcagcaacaacaatt

SEQ ID NO: 2486 - DNA, 469 bp, Zea mays
  Clone ID: LIB3061-036-Q1-K1-F9
tcggattgaaggctcgacccaagcgacccgtgaaacgcactgcacacgacctaacaccaatggctaccaagatattaggcctccttgggctgcttgccctttcagcgagcgctgcaaatgcgaccattattccacagtgctcacttgctcctatagccattattctacagttgctcctatcaccaacttcaatgggcttatgacataacgccgtgcaagaactactagatgaaactacgggcttgcgcagagcggcattacacaaccataacgctcaattgctacaacaaatactaggcacattacaacatacacactcattggcactcatcagacacaaacaacaacaggcacatgccactactagaaccacgtactacgcggacgaacgctgtctactattagcaacagcagctgcttgcattcaaacaactagctcaggcgaacgtagctgcataccagcaacaac

SEQ ID NO: 2487 - DNA, 439 bp, Zea mays
  Clone ID: LIB3061-036-Q1-K1-G10
ccggcccgacgcaagccacgcgtgggcgcgcctctctctcaccgctcatttcatgccaagcccggctgtagagagatccggcgggatactcggcctcttgctcccctcaacccccttaaagaagcgcatacaagcttcggaaggtgcccctccgcggctcgaacgaggggaggggacgccgcggacaattacggccatggaagccgccctcgacgctatgctcgccgccgcgagccatgccttcacgagcacctttgccatcgccatccagatccaggggtgcatgatctgtttagtccttgctctcggatgggccgctgcttcaattgtcaaaaaaggggttataaagaacatgatgcgcaacattgtacatggaaatagctttgcatttctttgtgacaacatacatgagcttgagcactctgttcaggagaattta

SEQ ID NO: 2488 - DNA, 399 bp, Zea mays
  Clone ID: LIB3061-036-Q1-K1-G12
attttcagcattcaaaaacacaccaagctaagcgcactatcaacgacctaacaccaatggctgccaagatattagccctccttgcgcttcttgcccttttagtgagcgcaacaaatgcgttcattattccacagtgctcacttgctcctagtgccattattccacagttcctcccaccagttacttcaatgggcttcgaacattcagccgtgcaagcctacaagctacaactagcgcttgcggcgagcgccttacaacaaccaattgcccaattgcaacaacaatccttggcacatctaaccctacaaaccattgcaacgcaacaacaacaacaacaacagtttctgccatcactgagccacctagccgtggtgaaccctgtcacctacttgcaacagc

SEQ ID NO: 2489 - DNA, 392 bp, Zea mays
  unsure (1)..(392): unsure at all n locations; Clone ID: LIB3061-036-Q1-K1-G2
agccacgcgtccgggtcccgcagcccgcccaggccggaatacgcgttccaccagatcctcaaacggcctcgcgcgcaagctcccgcacggngaccgccgtcttcctcaaagcccgggacgagagggtcctcaactggaccgcangaccgnctggcgacctcaagccttggtagcatcgtacgttcgtgcgcccttatagttaccatggctgcatgcatatacactgctgacaacaagccaattaagtgtacatttttttggtatcttctttcttcctttcttccttatatatagctgcaataccgtatacgttcatctctctctctatctccttatatatagatgatgagaaccatgtggataccgtaatcgaaatctacaacagtttactt

SEQ ID NO: 2490 - DNA, 436 bp, Zea mays
  Clone ID: LIB3061-036-Q1-K1-G3
caactcgtgctaccagtgatcagccaagtagctctggcaaacctttctccctactgtgagcaacaacaatttcttccattcaaccaactgtctacactgaaccctgctgcttatttacaacaacaacaactactaccattcagccagctagctactgcctactctcagcagcaacaatttcttccatttaaccaattggccgcactgaacccctctgcttatttccagcagcaaatactactaccatttggccagctagctacaacaagccccacttcctttttgaaacaacaacaattgcttccgttctaccagcagtttgtggctaaccccgcaaccctcttacaactgcaacagttgctgccctttgtccaacttgctttgacaaacccagcagccttctaccaacaacacatcattggcggtgccatctttt

SEQ ID NO: 2491 - DNA, 397 bp, Zea mays
  unsure (1)..(397): unsure at all n locations; Clone ID: LIB3061-036-Q1-K1-G4
cgagaaccccaagcacaaggtcaccgctgtnctcgccgacgatgaagagatctgcggtgccactttcaaggtggtggaagggtctactgtcctgacggcgctgcactgatctatcatcatcaggcggaggcgatgcgatgatgatgcagaactttgtacatgcgttggtggatggtggtgtaacatagtggctgccaacaagtcatgctcatgcaaaccgatgaatctatctctgtatcatcgatctcggttgcttgctagtccagactccagacatggctatatatatatagctggtgctaataaataggagtataatcgtcatatcgatcggttgcgtgtggaatgccaatcatgtgtgtaatctgttggcaaataacaaacctctgttccttcc

SEQ ID NO: 2492 - DNA, 436 bp, Zea mays
  Clone ID: LIB3061-036-Q1-K1-G5
cctcgctagctcgctcgctctccttgcaactccagtgctgctcactgccactggcagcagatcgagctgctccgtctcacaaaccctcttgctttgctgctgcacctgcaagtctgcaaccgcgcacacagagatgtcgacgacggtgagccgtgcgtccctcgaccagaagctcgccctcgccaagcgttgctcccgagaggcgaccctcgccggagccaaggcggcagcggtggcgactatcgcctccgcgatccccaccctggccagcgtgcggatgctgccatgggccaaggccaacatcaaccccaccggccaggcgctcatcgtctccacggtggctgggatggcctacttcatcgccgccgacaagaagatcctgtcgctggcgaggcgccactcgttcgagcaagcccctgagcacctcaagaacacc

SEQ ID NO: 2493 - DNA, 320 bp, Zea mays
  Clone ID: LIB3061-036-Q1-K1-G6
gcgagtttgagcattcagaaacacttcattcgaagcacattagcaacaacctaacaacagtggctaccaagatattatccctccttgctcttcttgcgcttctagcgagcgcatcaaatgcgttcattattccacaatgctcacttgctccaagttccattattacacagtgcctcctatcagttactataattggctgcatatacctagctgaccaagcctatatgctactacatgtctttgctgtgtgcgttctacatcaactaattatatatatgctgcatcactgctacgcacatctatctatctatactattata

SEQ ID NO: 2494 - DNA, 431 bp, Zea mays
  Clone ID: LIB3061-036-Q1-K1-G7
cccacgcgtccgtgaaaacccagctcttcaaccatataggcttcaacaagcaatcgcgagcaagcaacatacctttatcgcccttgttgtttcaacaatcgccagccctatctttggtgcagtcattggtacaaaccatcagggcacaacagctgcagcaactcgtgctacctctgatcaaccaagtagctctggcaaacctttctccctactctcagcaacaacaatttcttccattcaaccaactgtctacactgaaccctgctgcttatttgcagcaacaactattaccatttagccagctagctactgcctactctcagcaacaacaacttcttccatttaaccaattggccgcactgaaccccgctgcttatttgcagcagcaaatactactaccatttagccagctagctgcagcaaaccgtgct

SEQ ID NO: 2495 - DNA, 214 bp, Zea mays
  Clone ID: LIB3061-036-Q1-K1-F3
cgttctaccagcacgctgcgcctaacgctggcaccctcttacaactgcaacaattggtgccattcaaccaacttgctttgacaaacccagcagcgttctaccaacaacccatcattggtggtgccctcttttagatttcttatgagttatagttcaataataaagttttttgtctgatgtttgtggcttcccagaaataagaaagtacatttct

SEQ ID NO: 2496 - DNA, 371 bp, Zea mays
  Clone ID: LIB3061-018-Q1-K1-C9
cgttcggtgagaacccaattgttcaaccctacatgatccaacaggcgatcgcaacatgcatattgccattatcacccgtgtgcgtgggacaaccgtcagccctattacagcagttacctttggtccatttggtggcacaaaacatcagggcacaacaactactacatcttgtgctagcaaaccttgctgcatactctcagcaacatcagtttcttccattcaaccaactggctgcattgaactctgctgcttatttgcaacaacaattaccattcagccaactagttgctgcctacccccagcgattggggtgctttcaaccaacttgcaacatttgactctgctggttatttacagggagcaacaacttc

SEQ ID NO: 2497 - DNA, 437 bp, Zea mays
  Clone ID: LIB3061-018-Q1-K1-D1
cgacgcggaaggcctggaaaaaatcgagaacctacagagccatgataataatgaaatgctatgagaaggctgtgaagcttcttgagacttactggatggaggaggaagatgatgcaatggctactgctggggaagctgctcctgctgtttttgactttagccaaggtggcaaccctcctggtggtggtttgaacctcaactgaatacagtatttgaccaaaagggtgttaattccctcatgacaacctagtctggtcgattccatgtgggataatggtttgtggttggtccagtaaattcgagatttcaagggagatgggttagcattattcccaagctgtcatggatatcagtatcgcagggtctgtaacaggaccataatcgtcgaacatgagtctgggtttttgagcaggctactctctagggtttgcgtcatt

SEQ ID NO: 2498 - DNA, 424 bp, Zea mays
  Clone ID: LIB3061-018-Q1-K1-D10
gtggaatccagtagcaacaacagagcatcaatggcgaccaagatattttccctccttagtctccttgctctttctgcatgtgttgctaacgcgacaattttccctcaatgctcacaagctcctatagcttcccttcttcccccataccttccatcaatgatagcttcagtatgtgaaaacccagctcttcagccctataggctccaacaagcaatcgcagcaagcaacatacctttatcacccttgttgtttcaacaatcgccagccctatctttggtgcagtcattggtacaaaccatcagggcacagcagctgcagcaactcgtgctacctgtgatcaaccaagtagctctggcaaacctttctccctactctcagcaacaacaatttcttccattcaaccaactgtctacactgaaccctg

SEQ ID NO: 2499 - DNA, 414 bp, Zea mays
  Clone ID: LIB3061-018-Q1-K1-D11
cagcaacaatccttggcacatctaacttctcaaaccatcgcaacgcaacagcttcatagatttctaccagcgctgaggcgactagctgtggtgaaccctgtcgcctacttgcaacagcagttgcttgcatccaacccacttgctctggcaaacatagttgcataccaacaacaacaacaattgcaacagtttctaccatcgctcagtcaactagccatggtgaaccctgccggctacctacaacagcatcaactgatttcatctagccctctcgctgtggttaatgcacctacatacctgcagcaacaattgctgcaacagattgtaccagctctgactcacctagctgtggcaaaccctgctggctacttgcaacaactgcttccattcaaccaactgactgtgtcgaactct

SEQ ID NO: 2500 - DNA, 423 bp, Zea mays
  Clone ID: LIB3061-018-Q1-K1-D12
aacacaccaagcgaagcgcactagcaactacctaacaccaatggctaccaagatattaggcctccttgcgcttcttgcccttttagtgagcgcaacaaatgcgttcattattccacagtgctcacttgctcctagtgccattattccacagttcctcccaccagttacttcaatgggcttcgaacatccagccgtgcaagcctacaggctacaactagcgcttgcggcgagcgccttacaacaaccaattgcccaattgcaacaacaatccttggcacatctaaccctacaaaccattgcaacgcatcatcaacaacaacaacagtttctgccatcactgagccacctagccgtggtgaaccctgtcacctacttgcaacagcagctgcttgcatccaacccacttgctctggcgaacgtagc

SEQ ID NO: 2501 - DNA, 441 bp, Zea mays
  Clone ID: LIB3061-018-Q1-K1-D2
gcccgaaccagcgctcgggatcaacttcgccagggacggcatgaggcgtcgcgactggctctcgctcgtcgccgtacactctgacgcttggctcgtctccgtcgcattcttcttcgccgccaaactcaacggcaacgacaggaagcgattattcaacatgattaatgatcatccatctgtgtatgaaataatggctgaccggaagggaagggagaataatcctggtgttgataacagcagcaaatccaggcactcaacgaagcgatcaaatgatggaaagataaagaactcaagagtggcagttggtgaatgtaggtatgagaatgatgaagaccacagcgaaaccctttgtggttcttgcagtggtctctacaactcaagtgagttctggattggatgcgacatttgtgagcggtggttccacggcaaatgtgtgaggat

SEQ ID NO: 2502 - DNA, 439 bp, Zea mays
  Clone ID: LIB3061-018-Q1-K1-D3
aattactgataagaaagaaattgagggtttacctgctacagcccttggtttagcagggcagactgctgtgtcaaagggccatgaaaatgctacagctgaaaatggaccttgggttatcacgttggatgcaccaagctatattcctgttatgcaacatgctcgaaacagagagctccgcgaagaagtttatcatgcttatctgacccgcgcctcaagcagtgaacttgataacaccaacatcatctgccaaattctaaagttaaggctagagaaggctaaacttcttggctacaagaactatgctgaggtaagcatggctcagaaaatggcaactgttgagcgagtagaagagcttctcgagaagctgcgtgctgcttcctgggatcatgctgtcaaagatatggaagatctaaaagtctttgcgaaagattctggttct

SEQ ID NO: 2503 - DNA, 250 bp, Zea mays
  Clone ID: LIB3061-018-Q1-K1-D4
cgcggcttcagcttagtcaccttctttacggaggaggcgatgcggaacgccatcgagggcatgaacggcaaggagctggacggccgcaacatcaccgtcaacgaggcccagtcccgcggcggccgtggaggccgcggcggcggctacggtggtggccgtgtaggcagcggctactgcggtggcgggcgccgtgatggctgcgacggctacagcggtggctgcagcagctactgtgacatcagtatctaca

SEQ ID NO: 2504 - DNA, 431 bp, Zea mays
  Clone ID: LIB3061-018-Q1-K1-D5
gctcacaagctcctatagcttcccttcttcccccgtacctctcaccagcggtgtctgcggtatgtgaaaacccaattgttcaaccctacaggatccaacaggcaatcgcagctggcatcttacctttatcacccttgttcctccaacaatcatcagccctattacagcagttacctttggtgcatatattggcacaaaacatcagggcacaacaactacaacaacttgtgctagcaaaccttgctgcctactctcagcaacagcagtttcttccattcaaccaactagctgcattgaactctgcttcttatttgccacaacaacaactaccaattcaccagctacctgttgcctacccccaacaatttcttccattcaaccaactggcagcattgaactcttctgcttatttacagcagcaacaactacta

SEQ ID NO: 2505 - DNA, 411 bp, Zea mays
  Clone ID: LIB3061-018-Q1-K1-D6
gcgaaatcgccgaaggaaaggagaccccgagacgagcaaggcggcgagggagggcggggaccacgtaccagcgcgcacgcacaatgtcgggagcacagggcgcgcacccggtcggccagacgacgccgacgacgtacgagtcggtgggcggcggtgagaaccgcacgcgcacggacctgcggtcgcgggaggaccagggcgccatccagatcgagaaggtgcaggacaaggtcgacgatgccgcggcgcgtggggtagaccacagcaccttcggcgccaacaaggagggccgcgacgacaaggccgatgccggagcaaccggcaccggcacaggcccgtgattttgtgccctttcgcagtgtacctgatcgtgtgtgtacgatagctttgggtccggtgcttggctgctct

SEQ ID NO: 2506 - DNA, 434 bp, Zea mays
  unsure (1)..(434): unsure at all n locations; Clone ID: LIB3061-018-Q1-K1-D7
tgctcagattccagtctcatccttccctgaggttccagctggtcgagtaattgaaagtcctggtgatacttctgttattgatgctgtaaggactctctctgaacagaacataagggcagcaccagtactgaatccagaacctggggctcctactgattggcaggggaggtaccttggtgtcatcgattactcggcaatcatcctttgggtactagaaaatgctgagcttgctgctgttgcactctcggctgcatcggcaactgctgctggagttggcatgggtgctgttggtgctgttggggtggcagctttgggaacaactggcccagctgctgtagcttgcttaactgcagctgcaattggngcttctgttgctggtggattaactgctgaaaagggtgtggcgaaagatgggctaactgctgcagatcatt

SEQ ID NO: 2507 - DNA, 270 bp, Zea mays
  Clone ID: LIB3061-018-Q1-K1-D8
aaagactcacgaatcccagagagcctccatggcgacgcaccgacactgcgggccacgggtcctcgtggccgccgacctcgccctcgccgccgtccctgctcgcgcggcagctgggcggcgggcgcggcccgctgctgggcgggtggaacccgatccctgacgcgagcgactcgcacatgcaagaactaggcgggtggacgctgtggcaggcgaatcaacaaaagctggccgacgacggactgcgattccgtcgcatgacgcgcggcgagc

SEQ ID NO: 2508 - DNA, 358 bp, Zea mays
  unsure (1)..(358): unsure at all n locations; Clone ID: LIB3061-018-Q1-K1-D9
atgtaaggcaaatttttactccgtatgtganaaatttcctatgtgaagaatcctgtatgcaaacattgaagatttgttgagtttaccagcaggtcatgtgcagatgaagccatccgaatgctgaatgggagtcaagttggtgggcagaaagttcggctttcatggggccgtagtcctcaaaacagacaggcttctcagcatgatgccaacaaccagtataatgggaacagctattatggataccaacagccgggttatgaaggttatggctatggtgcttccagtgcacaagacccaatcatgcaaaactactacggatactctggttgtggtaactatgagcagcagcatccaacac

SEQ ID NO: 2509 - DNA, 413 bp, Zea mays
  Clone ID: LIB3061-018-Q1-K1-E10
agccttccgaaggtttaaaaacctctccgagcgaactttccttccaacgacgtaacaccaatggctcggactatatgagccatcattgggcttctcgacctttgagtcagcgcttcatacgcaccaattattccacacagctgacttgcttctagcgccactattatcacagctactgctaccacatactctaatgggctactatcataccgccgtgcaagcctactggctacaactagcactctcaaccatcgcgttacttcacccaatcgcccatttgcatctacactgcttgctacatcttactctacaaaccatcgcctcgctacatctaccacatcagcctctgtcatcactgatccatatatccatggtgaaccacgtctactacttgaaacagctagctgcttgca

SEQ ID NO: 2510 - DNA, 376 bp, Zea mays
  Clone ID: LIB3061-018-Q1-K1-E11
aacatacctttatcaacctttttacaacaatcgccagccctatctcttagtcaattcttaatgcaaaccagcataccacagcagctgcatcaactcgttctacctctgatcaaccaaataactatcccaaacctttctccctactatcatcaacaacaatttcttccattcaacctactatctacactaaaccctactccttattttcatcatcaactattaccattcatcctactatctactgcctactcttatcaacaacatcttcttccatttaaccaattatccatactaaacctcgctacttattttcaacatcatatattactaccatttatccttctatcttcatcaaatccttccttcttcttgactc

SEQ ID NO: 2511 - DNA, 433 bp, Zea mays
  Clone ID: LIB3061-018-Q1-K1-C8
gaccaactagcaacatagatagcacaatagtgtaccaacaatggcagccaaaatatgttgcttccttatgctccttggtctttctgcaagtgttgctaccgcaaccattttcccacaatgctcacaagctcctatagcttcccttcttcccccatacctctcaccagcggtgtcttcaatgtgtgaaaccccaattgttcaaccctacaggatccaacaggcaatcgcaacaggcatcttaccattatcacccttgttcctccaacaaccgtcagccctattacagcagttacctttggtccatttgttggcacaaaacatcagggcacaacaactacaacaacttgtgctagccaaccctgctgcatactttcagcaacatcagtttcttccattcaaccaactggctgcattgaactctgctgcttatttg

SEQ ID NO: 2512 - DNA, 441 bp, Zea mays
  Clone ID: LIB3061-018-Q1-K1-B2
ggacgaacctaactacgatgatgaacctgttgatcgcagcaaacactggggagatttggaggaagaggaggaggaagaagaggaagaggaggaagaggaagaaccaatggaagacgaggaaatggaagacggaattcagtctgtcgataccatctcaagtactccaactggtgttgaaacacctgatgttatcgaccttcggaagctgcagaggaaggagactgacaagcaggcagaacggccgctgtaccaggttcttgaacaaaaggaagaaaggatcgcccctgggactctatatgggtcaagccatacgtatgtgttgggaacacaagataaatcatcagctccgaaaagggtggatctgcttaagaatcaaaagtcagacaaggtggacgtcaccatccaacccgaggaactggaagccatggatgatgttctggc

SEQ ID NO: 2513 - DNA, 367 bp, Zea mays
  Clone ID: LIB3061-018-Q1-K1-B3
agctagcaacatcacaagcagagtagtgtactaacaatgacataccaaatatggcggttacggatgctccttggtttgtgtgtatgggctgttaacggagcgattttcatacaatgattataagatagtattgatttgtttctagtgccataattctaaacagcgttgtattaagtatgtgaaaacgctattattatacagtacaggatgcatcagggattcacataacgcatgttaccagtatcatacttgatcctataacacaagtgagacatattacagcagttaatttaagcgcatatactatcacaaagcatcaacgcccaccacctccgacaacgtgagctatgaaacctttatgcgtagt

SEQ ID NO: 2514 - DNA, 439 bp, Zea mays
  Clone ID: LIB3061-018-Q1-K1-B4
gtggaatccagtagcaacaatagagcaacaatggcgaccaagatattttccctcctggtgctccttgctctttctacatgtgttgctaacgcgacaattttccctcaatgctcacaagctcctatagcttcccttcttcccccataccttccatcaattatagcttcaatatgtgaaaacccagctcttcaaccatataggcttcaacaagcaatcgcagcaagcaacatacctttatcgcccttgttgtttcaacaatcgccagccctatctttggtgcagtcattggtacaaaccatcagggcacaacagctgcagcaactcgtgctacctctgatcaaccaagtagctctggcaaacctttctccctactctcagcaacaacaatttcttccattcaaccaactgtctacactgaaccctgctgcttatttgcagc

SEQ ID NO: 2515 - DNA, 438 bp, Zea mays
  Clone ID: LIB3061-018-Q1-K1-B5
gtgaaaccccaattgttcaaccctacaggatccaacaggcaatcgcaacaggcatcgtaccattatcacccttgttcctccaacaaccgtcagccctattacagcagttacctttggtccatttggtggcacaaaacatcagggcacaacaactacaacaacttgtgctagcaaaccttgctgcatactctcagcaacatcagtttcttccattcaaccaactggctgcattgaactctgctgcttatttgcaacaacaattaccattcagccagctagttgctgcctacccccagcaatttcttccattcaaccaactagcagcattgaactctgctgcttatttacagcagcaacaactactaccattcagccagctagctgatgtgagccctgctgccttcttgacacaacaacagttgttgccgttctacctgc

SEQ ID NO: 2516 - DNA, 144 bp, Zea mays
  Clone ID: LIB3061-018-Q1-K1-B6
acccgatcgacaccatgagggtgttgctcgatgccctagctctcctggctgtagctgggagcgccacctccacgcatacaagcggcggctgcggctgccagccaccgacgccggatcatctaccgccgtcggtgcatctgccac

SEQ ID NO: 2517 - DNA, 334 bp, Zea mays
  Clone ID: LIB3061-018-Q1-K1-B7
cagctagcaacataaaagttcatttttcaaccaacaatgacagctaagaggtttggattacttatgatccttggtcgaattgcaagtactgttacctgaaccattttcccacaatgctcacatgctcctataccttcctatcttaccctatatcaatcaacagcagagtattcagaatgtgaaaacccaattacttaaaccctaccagatccaacacgcaataacaatacgcatcttacctatatcacgcttgttaatgcaacaaccgataaacctattacaactattacctttggtgcattaattgacacaaaacattaaggcacaacaacta

SEQ ID NO: 2518 - DNA, 429 bp, Zea mays
  unsure (1)..(429): unsure at all n locations; Clone ID: LIB3061-018-Q1-K1-B8
attctttcaagcaaaagagaagaggagttccattgcaactacagttgcaagtgtagcgtctccttcagttacatgttattcaggacagtctaatgattctgatactggggagaattgtaacatggatgctgaaaaggcaagtcgagttgtccaatctctttttggagcattgtcttcacgatatgaaaatagcaaaggtggcaagctgatgagtaacgcagcaccagaaaaaatgcctactgagaatgagcaaatagtcaatgagatactacatgatatacatggttcttttgctgacatctctgatggtgctggtaccgttgaaggtgacttcaaagtaaaagtcaaggaaacaatggagaaggctttctgggatgtggttgctgattcaatgagaggagacctgccagactactgntatctggtcag

SEQ ID NO: 2519 - DNA, 452 bp, Zea mays
  Clone ID: LIB3061-018-Q1-K1-C1
ctttgcagctgcggcggcggcggcggacgcattgtcgagggatggctggagcacacgggacgatggctgggtggcgtcgacgacgctggatttcctcttgaatcggttgcatctgctgctgccggagttgccggtggccaccgcttctttggagccaccgcagcccatggtggctcaaaggagaggagaggagagagagagagagcggcggagatggaaaaaaatgcaacgagaggacgaggaaccgatacgggcttcttggatctgagggaatgaaaagtcggaggagattaagcggggtctatgtgccacgtggatgcatgaatggacaaagtctcgtgggggaaagggaaacgcatgcatgcatgcatgacgtgacaaatttagggagaccgtaaccaaacaaaagttgtcgtttttttgatgttgaagggaaggggttgcgagacaag

SEQ ID NO: 2520 - DNA, 334 bp, Zea mays
  unsure (1)..(334): unsure at all n locations; Clone ID: LIB3061-018-Q1-K1-C10
cgcccttgttgtttcaacaaagaccatccctaactttggtgcagtcattggtacaaaccatcanggcacaacagctgcagcaactcgtgctacctgtgatcaaccaagtagctctggcaaacctttctccctactctcagcaacaacaatttcttccattcaaccaactgtctacactgaaccctgctgcttatttgcagcaacaactattaccatttagccagctagctactgcctactctcatcaacaacaacttcttccatttaaccaattggccgcactgaaccccgctgcttatttgcagcaacaaatactactgccatttatcgaact

SEQ ID NO: 2521 - DNA, 258 bp, Zea mays
  Clone ID: LIB3061-018-Q1-K1-C11
ctctttctacatgtgttgctaacgctacaattttccctcaatgctcacaagctcctatatcttcccttcttcccccataccttccatcaattatagcttcaatatgtgaaaaccctactcttcaaccatatatgcttcaacaatcaatcgcaacaagcaacatacctttatcaccctttttttttcaacaatcaccatccctatctttttttcattcattaggtcaatccatcattgcatctcatcttcatcatcttt

SEQ ID NO: 2522 - DNA, 199 bp, Zea mays
  Clone ID: LIB3061-018-Q1-K1-C12
ccggttctcggaattcccggctgcgacgccacgtcgtctcggcgaagatgcaagcatagaagatggactgacatagttgcggcgccacgagatgcctgtgcggactcgcgtcggctgtcgcggcgtaggctggaccctgataatagctgcttcccgagccggcatcggtgattcctggttccatgttcctagatgcccg

SEQ ID NO: 2523 - DNA, 445 bp, Zea mays
  Clone ID: LIB3061-018-Q1-K1-C2
gcaacatagaaagcacaatagtgtaccaacaatggcagccaaaatattttgcttcctgatgctccttggtctttctgcaagtgctgctaccgcaaccattttcccacaatgctcacaagctcctatagcttcctttcttcccccatacctctcaccagcggtgtcttcagtatgtgaaaacccaattcttcaaccctacaggatccaacaggcaatcgcagcaggcatcttacctttatcacccttgttcctccaacaaccgtcagccctattacagcagttacctttggtgcatttgttggcacaaaacatcaaggcacaacaactacaacaacttgtgctaggaaaccttgctgcctactctcagcaacagcagtttcttccattcaaccaactggctgcattgaactctgctgcttatttgcaacaacaactaccattcagt

SEQ ID NO: 2524 - DNA, 438 bp, Zea mays
  Clone ID: LIB3061-018-Q1-K1-C3
gcaacatagaaagcacaatactatactttacaatgtccagccaaaatatattgcttccgtatgctgcttactctttatgcaagtgctgctaccgcaaccattttcccacaatgctcacaagctcctatagcttcctttcttaccccatacctctcaccagctcagtcttcagtatgtgaaaacccaattcttcaaccctacaggatccaacaggcaatcgcagcaggcatattacctttatcacccttgatcctacaacaaccgtcagccctattacagcaactacctttagtgcatttgttggcacataacattaaggcacaacaactacaacaacttgtgctaggaaaccttgctgtctactctcaacaacagcagattttttcattcaaccaactggctgcattgaactctgctacttatgttgaacaacaacta

SEQ ID NO: 2525 - DNA, 442 bp, Zea mays
  Clone ID: LIB3061-018-Q1-K1-C4
attgagaccaactagcaacatagaaagcacaatagtgtaccaacaatggcagctaaagtatttggcctccttatgctccttggtctttctgcaagtgctgctacggcgaccattttcccacaatgctcacaagctcctatagcttcccttcttcccccgtacctctcaccaacggtgtcttcggtatgtgaaaacccaattcttcaaccctacaggatccaacaggcaatcgcagctggcatcttacctttatcacccttgttcctccaacaatcatcagccctattacagcagttacctttggtgcatttattggcacaaaacatcagggcacaacaactacaacaacttgtgctagcaaaccttgctgcctactctcagcaacagcagtttcttccattcaaccaactagctgcattgaactctgcttcttatttgcaac

SEQ ID NO: 2526 - DNA, 299 bp, Zea mays
  Clone ID: LIB3061-018-Q1-K1-C5
caaacaatgaacgtgcagcagcccgctgatgttgccggacccagcgagggggtgggggcgatctccaaaggggggaaggtagggccgaaccggtgcagcgcctgcaggaagagggttggacttacgggattcaactgccggtgtgggaacttgtactgcgcactccaccgctactccgacaagcacgactgcaagttcgactaccggactgctgccagggacgccattgccaaagctaatccgctggtgaatgcagacaagctcgacaagatctagggggggtttcctacggttgggta

SEQ ID NO: 2527 - DNA, 360 bp, Zea mays
  Clone ID: LIB3061-018-Q1-K1-C6
aacagtcccactcgaacctttcagtttttccctgtctgtcttcacttcatgtgtctgggtttagagaccttgccttgttggggcaggggacttgggacgacagagaggggagggcggagttggtgagcgagcacgggatcagctggtgacctcagaggctgtttgcctcggggggcgggggaattctttagcaccccatcttccacatgtgtttcgactggctgctgctctttaggttggtaatatccttggatctctgactctagaccgttccacgaaatctccagtcctttcttgctcttggaggaggaaggctgctgcttgagcaggagactggagacatgggtagctacgctaagc

SEQ ID NO: 2528 - DNA, 350 bp, Zea mays
  unsure (1)..(350): unsure at all n locations; Clone ID: LIB3061-018-Q1-K1-C7
cgcgctgagaagagatggctaagatcgccgcggcggcggcggcggcgctgtgcttggcggccctggtggccgtggccgtctgccaaggcgaggtcgagcggcagaggctcagggacctgcagtgctggcaggaggtccaggagagcccgctcgacgcgtgccgccaggtcctcgaccggcagctaaccggcggcggcggcggcggcggcgttggcccgttccggtggggcaccgggctccggatgcggtgctgccagcagctccaggacgtgagccgcgagtgccgctgcgccgncatccggagcatggtcaggggatacgaggaggccatgccgncgctggagaaaggc

SEQ ID NO: 2529 - DNA, 425 bp, Zea mays
  Clone ID: LIB3061-018-Q1-K1-B12
cccacgcgtccggccctattacatcagttacctttggtgcatttattggcacaaaacagcagggcacaacaactacaacaacttgtgctagcaaaccttgctgcctactctcagcaacagcagtttcttccattcaaccaactagctgcattgaactctgcttcttatttgcaacaacaacaactaccattcagccagctacctgctgcctacccccagcaatttcttccattcaaccaactggcagcattgaactctcctgcttatttacagcagcaacaactactaccattcagccagctagctggtgtgagccctgctaccttcttgatacaaccacagttgttgccgttctaccagcacgctgcgcctaacgctggcaccctcttacaactgcaacaattgctgccattcaaccaacttgg

SEQ ID NO: 2530 - DNA, 237 bp, Zea mays
  unsure (1)..(237): unsure at all n locations; Clone ID: LIB3061-017-Q1-K1-H6
cacctgtatactgtaatggtcttgggtcttggcaactgattaatgatnngggtattttgttaattttaantgganattggaatatattaattatttttataatttttaaattaatatttatatttttattttaattttaanaagaatttaatgttttaaacacaacagacaacaccgctcaccgcttatatatatatatagatggtttccgaggggccttctcccctcaccgtccac

SEQ ID NO: 2531 - DNA, 238 bp, Zea mays
  Clone ID: LIB3061-017-Q1-K1-H7
gtattgggaaaaattcatgcatcaggagagcaatcattgacaagaatgctcgaattggagacaatgttaagatactcaatgctgacaatgttcaagaagctgcaatggagacagacgggtacttcatcaaaggtggaattgtcacagtgatcaaggatgctttactccctagtggaacagttatatgaagtgaacgtgcgacatgcagctgtgtgtctcgacattcgacaatgatcag

SEQ ID NO: 2532 - DNA, 254 bp, Zea mays
  Clone ID: LIB3061-017-Q1-K1-H8
cgacgccacgcgtccggtggtgggaaaaattcatgcttcaggttttcaatcattgacaagaatgctggaattggggacaatgttaagggactcagtgctgacaatgttcaagaagctgcaatggagacagactggtacttcatcaaaggtggaattgtcacagttatcaaggatgctttactccctagtggaacagttatatgaagtgaacgtgcgacatgcagctgtgtgtctcgacattcgacaatgatcag

SEQ ID NO: 2533 - DNA, 419 bp, Zea mays
  Clone ID: LIB3061-017-Q1-K1-H9
ccagcactggagccggccttgatctctatggggttatcccagccccttggtgtgccgaattcagggcctactagtggcagcttggcgttgcagtcaagttcatcagctcccccagaaacaatcgtttctgctttgcaagtcaatcaaactgagccagtgaagaagtttgagcccagatctaaactgtggtctgatactttgagccgaggtctagtcaatctggacatttctggaccaaaagcgaatcctcatgctgatattggagttgactttgattcaatcaatcgcaaggagaaaaggcaggaaaagaaaatcaaccaagcacctgtggtgtctacagtcaccatgggcaaggccatgggagctggttccggcattggtcgggctggtgtaagtgcaatggcaccttctcctaacca

SEQ ID NO: 2534 - DNA, 224 bp, Zea mays
  Clone ID: LIB3061-018-Q1-K1-A1
aagatatcgccttctaccaacaaggagatatcttgagcagctgaaagtgcagcctggccttatgccagcgccgccccagatacgccaggcccaccaaagcagcattgttggcaactataggccaaatacttgctctccctggggtttctgtaaaaggagagaaactgcttctttcaccacgctttacgcgggcctgacccagacccggacccagacccagcagc

SEQ ID NO: 2535 - DNA, 429 bp, Zea mays
  Clone ID: LIB3061-018-Q1-K1-A10
tcgcaggcctttggtaatgccctttcttcaattacggttggatccacccaattacttccaggggtttcaacaaccattgtggtcatgaacctaagccaatttgacccacattacattcaccaagcaatctacaacatggttcaatccataatccaggaggagcaacaacaacaaccatgtgagttatgtggatctcaacaagctactcaaagtgcggtggcaatcttgacagcagcacaatacctaccatcaatgtgcggcttgtaccactcatactaccaaaataatccatgcagcagcaatgacattagtggtgtttgcaattgaagaattgtgtctacctagccgttatactcctataacggtgttaagcaataaagtaccatacattatgatgtttgtactatgatatttgaataagaatactaa

SEQ ID NO: 2536 - DNA, 423 bp, Zea mays
  Clone ID: LIB3061-018-Q1-K1-A11
ctcagagaacctttgtctacatcaaggatgccatcgaagctgtagtgctgatgataggaaatcctgctcgagccaatggccacatcttcaatgttgggaatccgaacaatgaagttaccgttagggagttggcccaaatgatgacagaggtctacgcaaatgtctcaagagaggcaccgctggatgagcccatgattgacgtgagctcgagtcagttctacggcgaaagatacgatgatagcgacaagaggatccccgacatgactataatcaacaagcagctaggttggaacccatagacgcctgtcaaggatctgctggagacaacgctgacgtatcagcacaagacatacaaagaagctgtgaaaaggcaaatgtcgcatgcttcagcgtcgacttagatagcgtgcccctggctctcgt

SEQ ID NO: 2537 - DNA, 443 bp, Zea mays
  unsure (1)..(443): unsure at all n locations; Clone ID: LIB3061-018-Q1-K1-A2
attttgagcattcagaaacacaccaagtgaagcgcactagcaacgacctaacaacagtggctaccaagatattagccctccttgcgcttcttgccctttttgtgagcgcaacaaatgcgttcattattccacaatgctcacttgctcctagtgccattattccacagttcctcccaccagttacttcaatgggcttcgaacacctagctgtgcaagccaacatgcaacaacaagcgcttgcggcgagcgtcttacaacaaccaattgcccaattgcaacaacaatccttgccacatctaacaatacaagccatcacaacgcaacagcaacaacagttcctaccagcactgagccacctagccatggtgaaccctgccgnctacttgcaagagcagctgcttgcatccaacccacttgctctggcgaacgtagttgcaaaccag

SEQ ID NO: 2538 - DNA, 428 bp, Zea mays
  Clone ID: LIB3061-018-Q1-K1-A3
cgcggtctgctcgttcgatctgtgcagcagatctgaggtcccgggcgaccgtgaagcagcttcaatcgtcggcatggcgctcgtattgcatagtggggctggaaacaagaatgccttcaaagcacttattgctgcagaatacagtgggatcaaggttgagttgaccaaggattttgagatgggtgtctccaacaagacccctgagtttcttaagatgaacccccttgggaaggttcctgttctggagactcctgatggccctgtttttgagagtaatgctatcgcacgctatgttgctcgcttgaaagatgacaaccctctttttgggtcttcccgtattgaacaagcccacgttgagcaatggatggattttgccgcaacagaagttgatcctggtgttgcatggtacttgtatccaaggcttgggt

SEQ ID NO: 2539 - DNA, 444 bp, Zea mays
  Clone ID: LIB3061-018-Q1-K1-A4
gagcattcagaaacacaccaagcgaagcgcactagcaacgacctaaccaccattggctgaccaaggttttacccctccttgcgcttcttgccttttttgtgagcgcaccaaatgcgttaattattcaacattgctaacttgttcttagggccataattcaacagttcttccaaccagttacttaaatgggcttgaaacactatattgtgcaggccaacatgcaacaacaagcgtttgcggagagcgttttacaacaaccaattgcccaattgcaacaacaatccttgccacatctaacaatacaagccatcacaacgcaacagcaacaacagttcctaccagcactgagccacctagccatggtgaaccctgccgtctacttgcaagagcagctgcttgcatccaacccacttgctctggcgaacgtaattgcaaaccaacaac

SEQ ID NO: 2540 - DNA, 336 bp, Zea mays
  Clone ID: LIB3061-018-Q1-K1-A5
tcgattttgagcattcagaaacacaccaagcgaagcgcactagcaacgacctaacaacgggggctaccaagatattagccctacttgcgcttcttgccctttttgtgagcgcaacaaatgcgttcattattccacaatgctcacttgctcctagtgccattattccacagttcctcccaccagttacttcaatgggcttcgaacacctagctgtgcaagccaacatgcaacaacaagcgcttgcggcgagcgtcttacaacaaccaattgcccaattgcaacaacaatccttgccacatctaacaatacaagccatcacaacgcaacagcaacaac

SEQ ID NO: 2541 - DNA, 426 bp, Zea mays
  Clone ID: LIB3061-018-Q1-K1-A6
gagaccaactagcaacatataacgcacagtagtgtaccaacaatggcagggaaaaggtgttgcctacttatgctccttggtctttgtgcaagtgctgctacggcaaccattttcctgcaatgctcgcaagctcctatagcttcccttcttccgccgtacctctcaccagcggcgtcttcggtatgtgaaaacccaattcttcaaccctacaggatccaacaggcaatcacagctggcatcttacctttatcacacttgttcctccaacagtcatcagccctattacatcagttacctttggtgcatttattggcacacaacatcagggcacaacaactacaacaacttgtgctagcaaaccttgctgcctactgtcagcaacagcagttgcttccattcaaccaactagctgcattgaactctgat

SEQ ID NO: 2542 - DNA, 425 bp, Zea mays
  Clone ID: LIB3061-018-Q1-K1-A7
ctcatgcatcacaaaacattcttatatcagtaccatcaatcatcattcatcttagtggtataggcaccaaatcaaatctgcaacatcaattatctaactccaaaaaccatgaagctggtgcttgtggttcttgctttcattgctctagtatcaagtgtctcttgtacacagacaggcggctgcagctgtggtcaacaacaaagccatgagcagcaacatcatccacaacaacatcatccacaaaaacaacaacatcaaccaccaccacaacatcaccagcagcagcaacaccaacaacaacaagttcacatgcaaccacaaaaacatcagcaacaacaagaagttcatgttcaacaacaacaacaacaaccgcagcaccaccaccaacaacaacaacaacagcaccaacaacaacatcaatgtga

SEQ ID NO: 2543 - DNA, 182 bp, Zea mays
  Clone ID: LIB3061-018-Q1-K1-A8
atgttcagcattcaaaaacacaccaagcgaaacggactaaccaccaccttgccaccaagggttccaagaaattaacccttctttggcctcttggccttttaaggaaccccaccaaaggcgtcaataattcaaaagggttaattggttctaagggccataattcaaaagttcttccaacaagt

SEQ ID NO: 2544 - DNA, 440 bp, Zea mays
  Clone ID: LIB3061-018-Q1-K1-B1
gtggggaccgaggccgtcgcgatactcgtcagcggggtgctgcttgacgctgacacgaaggccgcgctcatgcagccggcgaaggtgtcgctcgtggtcgacatgctcaacgagggcgccgcggacaccaagatcaactgtgtccgcctcatccgcatcctcatggtcgagaggggtttccggccggagacggtggcgagcctcagcctcttggtcggcgtcatgcgcctcatccgggacaagcggcatccggacggtgtggccgcggggctcgagctgctgaattcgatctgcgcggtgcacaggccagcgaggtgtatgattgttagcatcggtgcggtgccgcagctggcggaattgctgccggagctagcgacagagtgtgtcgagccggctttggacatcttggatgccctggctgcgggtccagaggggaggat

SEQ ID NO: 2545 - DNA, 423 bp, Zea mays
  unsure (1)..(423): unsure at all n locations; Clone ID: LIB3061-018-Q1-K1-B10
tcgcccacgcctcccgtcttatttcccttcatgtcgagaggtatttctggaccatggttaacgagcctaacttcaagaaggtgattggtgaggtcaatcaggcagagtctgcacctcctattccgaaaaaggctgctcctcctaaggagccaaaggcaaaggatgtcaagaaggaggctccaaaggaggcccccaagccaaaggtggttgaggcaccagcagaagaggaagcaccaaatccaaagccaaagaatcctcttgacttgctgccaccaagcaagatggtccttgatgactggaagaggctatactcaaacacaaagactaacttccgggaggttgccatcaaaggtttctgggacatgtacgacccantaggctactctttgtggttctgtgactactagtacaatgatgagaaca

SEQ ID NO: 2546 - DNA, 280 bp, Zea mays
  Clone ID: LIB3061-018-Q1-K1-B11
gcttgcctctcaatcgatgccctcttcagtgctctgtctcgccgacttcttagttgcctctcaacagttcggtggggagtctccttctgctccagctctaggtcactatccatcaagattgcacagtgcttcctgctgaatgggcttatcttccttggtagcttacttacactcacatcagtggtcattccaactctactgtggatactacctgatctattctatcaaacagcatgacatctttatgaacacatgtcatccatatctatctattcattct

SEQ ID NO: 2547 - DNA, 241 bp, Zea mays
  Clone ID: LIB3061-017-Q1-K1-H5
cccacgcgtccgcttctagagcaaaaagacctagacaaaacgttcctccacgttcactggaatcatctgttctcacaaaagaaggtgcaaccaaggtcgaaatcgattcagctcaaacacaacaccaaaattcggtcttgcaaggtcaggagcagatgaccttgaggaacaacctgactgaaagcgctgattctgattccactgttcagaagccgatgatgtggtccccatcactcaatgg

SEQ ID NO: 2548 - DNA, 446 bp, Zea mays
  Clone ID: LIB3061-036-Q1-K1-D9
gcaacatagaaagcacaatagtgtaccaacaatggcagccaaaatattttgcctccttgtgcgggcttggtctttctgcaagtgctgctacggcgaccattttcccacaatgctcacaagctcctatagcttcccttcttcccccgtacctctcaccagcggtgtcttcggtatgtgaaaacccaattcttcaaccctataggatccaacaggcaatcgcagctggcatcttacctttatcacccttgttccttcaacaatcatcagccctattacagcagttacctttggtgcatttattggcacaaaacatcagggcacaacaactacaacaacttgtgctagcaaaccttgctgcctactctcagcaacaacagtttctttcattcaaccaactagctgcattgaactctgcttcttatttgcaacaacaactactaccattc

SEQ ID NO: 2549 - DNA, 444 bp, Zea mays
  Clone ID: LIB3061-036-Q1-K1-E10
ctcgctcagatctcccatggcgcttggcgtccaagcccctggttgagctcgccctgccgtttgtgctcgcccaatctcccttttcttcaatccgggattgaggtccttctctggtcatgctgcgtccattctctctacgattgtctctgtgtctcggttgagtccgtgctcctctgctcggcgtcttccctgctcgccagtggagcttcctccctgttgcggctcagcctctaggttgcttcctcgccgtgcccaaggttcctccatggctacgtttccccgctgtctgcgcgcagccgcgtcctcgagtttagcccagcttggcaacaccaatagactccctggaaccagcgccctgctccctgttgccgcgagctccagctcggattcagcccagctcacccctacccatgtcgcgcgggtttctctaatccccgcgttgtc

SEQ ID NO: 2550 - DNA, 427 bp, Zea mays
  Clone ID: LIB3061-036-Q1-K1-E11
gcgcgctatgcctaacgctggcacccttttacaactgcaacaattgctgccattcaacgaacgtgctttgacaaacccaacagtgttctaccaacaacccatcattggtggtgccctcttttagattgcttatgagttatagttcaataatgaagttttttggatgatgtttgtggcgtcccaaaactaagaaagtacatttctagaacaaaaaggcctagcgacatggcatcttacctttatcaaacttgttcatccaacaatgatcaatcctattacagaagttacctttggtgcatttcttggcccacaacatcatgtcacatcacctaccacaacttgcgctaacaaaccttgctgcctactctaagaaacagcagttgcttccattcaaccagctatctgcattgaactctgcttcttattt

SEQ ID NO: 2551 - DNA, 326 bp, Zea mays
  unsure (1)..(326): unsure at all n locations; Clone ID: LIB3061-036-Q1-K1-E2
cttccagagccccccgccgccgctgcgccctcctctcggtcctgccgtccgtcgaggtaaaaggacagcatggtgagggtcagcgtgctcaatgatgctctcaagtccatgtacaatgctgaaaagatagggaaacgtcaagtcatgatcaagccgtcattcaaagtgatcatcaagttcctgacggtcatgcaacgccatggttacattggccagttccagtacgtggattaccacagagctgggaagatcgtggtggagctgaatggaagactgaataaatgtggtgttattagcccacgttttgatgtangtgttaaagagat

SEQ ID NO: 2552 - DNA, 213 bp, Zea mays
  Clone ID: LIB3061-036-Q1-K1-E3
tgcattagtaaggctgaattgatagataagttgaaacagtccgaggatgagaaaatgtcagggcaagaagaaaatagagagctacgagaagaaaatacagctacaaacagtcgtatgagccgtatggaacaggagtgggaagaactaaagaacagattaagttgtagttagacatacagttctagtataccatcatcgagttcagggcagcat

SEQ ID NO: 2553 - DNA, 434 bp, Zea mays
  Clone ID: LIB3061-036-Q1-K1-E5
agaaagcacaatagtgtaccaacaatggcagccaaaatattttgcttccttatgctgcgttggtctttctgcaagtgttgctaccgcaaccattttcccacaatgctcacaagctcctatagcttcccttcttcccccatacctctcaccagcggtgtcttcaatgtgtgaaaccccaattgttcaaccctacaggatccaacaggcaatcgcaacaggcatcttaccattatcacccttgttcctccaacaaccgtcagccctattacagcagttacctttggtccatttggtggcacaaaacatcagggcacaacaactacaacaacttgtgctagcaaaccttgctgcatactctcaacaacatcagtttcttccattcaaccaactggctgcattgaactctgctgcttatttgcaacaacaattaccat

SEQ ID NO: 2554 - DNA, 377 bp, Zea mays
  Clone ID: LIB3061-036-Q1-K1-E6
ctgatcctcttctctggtctcacttccttgcaagcaacaatcgttcaccgatcggtggagtgcgtcctgcatggaaactgccgccgtcgccgcctgcagtgccgggcgccgcatcatggtggccgtggacgagggcgaggagagcctgcacgcgctcaactggtgcctcgccaacgtcgtctccccggcaggaggcgacacgctggtgctagtacacgctcgccgcccgcgcccggtctacgccgccatggacagtgcaaggtacatgatgaccttggacgtgctggcgagcgttgagaggcacgccaacgcggtctcggcggcagcagttgacaaggccaagcgcgtctgcgcttactacctgcacgtaaaggcgg

SEQ ID NO: 2555 - DNA, 176 bp, Zea mays
  Clone ID: LIB3061-036-Q1-K1-E7
gagaccagcacgcacatagaacgttttaatctactatcacaacagcagcacagtggggccaacatatgtttactccgtacgctgcttgctatttgtacatgcgtcgataacgctacaatcagctctcaacggtcatatgctactatcgctaaccttcttcatccatacatttgatc

SEQ ID NO: 2556 - DNA, 440 bp, Zea mays
  Clone ID: LIB3061-036-Q1-K1-E8
gataccaactagcaacatacatagtgtaagtacactagcaacatcttagcaccaatgggagccaagatttttgccctccttgccctccttgctctttcagcaagcgctgctacctcgacttttattccacaatgctcacaacaatacctctctccggtgacagccgcgggatttcaatacccaactatacaatcctacatggtacaagaggccatccaagcaagcatcttacggtcattagcattaaccctccaacaaccatatgctctattgcaacagccatccttagtgcatctgtatctccaaagaatcgcggcacaacaactacaacaacagttgctaccaacaatcaatcaagtagttgcagcgaaccttgctgcttacctccagcaacaacagtttcttccattcaatcaactagctggggtgaaccctgctat

SEQ ID NO: 2557 - DNA, 444 bp, Zea mays
  Clone ID: LIB3061-036-Q1-K1-E9
ccaactagcaacatagaaagcacaatagtgtaccaacaatggcagccaaaatattttgggtgcttatgctccttggtctttctgcaagtgctgctacggcgaccattttcccacaatgctcacaagctcctatagcttcccttcttcccccgtacctctcaccagcggtgtcttcggtatgtgaaaacccaattcttcaaccctataggatccaacaggcaatcgcagctggcatcttacctttatcacccttgttcctccaacaatcatcagccctattacagcagttacctttggtgcatttattggcacaaaacatcagggcacaacaactacaacaacttgtgctagcaaaccttgctgcctactctcagcaacaacagtttcttccattcaaccaactagctgcattgaactctgcttcttatttgcaacaacaacaac

SEQ ID NO: 2558 - DNA, 435 bp, Zea mays
  Clone ID: LIB3061-036-Q1-K1-F1
gcacaatagtgtaccaacaatggcagccaaaatattttgcctccttatgctccttgggctttctgcaagtgctgctacggcgaccattttcccgcaatgctcgcaagctcctatagcttcccttcttcccccgtacctctcaccagcggtgtcttcggtatgtgaaaacccaattcttcaaccctacaggatccaacaggcaatcgcagctggcatcttacctttatcacccttgttcctccaacaatcatcagccctattacaacagttacctttggtgcatttattggcacaaaacatcaaggcacaacaactacaacaacttgtgctagcaaaccttgctgcctactctcagcaacagcagtttcttccattcaaccaactaggttcattgaactctgcttcttatttgcaacaacaacaactaccattcag

SEQ ID NO: 2559 - DNA, 437 bp, Zea mays
  Clone ID: LIB3061-036-Q1-K1-F10
gtcgcacatatctactatactatactctatgaagcaaggacaccaccgccatggcaggcaagatgcttgcattgttcgctctcctagctctttgtgcaagcgccactagtgcgacccatattccagggcacttgccaccagtcatgccattgggtaccatgaacccatgcatgcagtactgcatgatgcaacaggggcttgccagcttgatggcgtgtccgtccctgatgctgcagcaactgttggccttaccgcttcagacgatgccagtgatgatgccacagatgatgacgcctaacatgatgtcaccattgatgatgccgagcatgatgtcaccaatggtcttgccgagcatgatgtcgcaaatgatgatgccacaatgtcactgcgacgccgtctcgcagattatgctgcaacagcagttaccattcatgttc

SEQ ID NO: 2560 - DNA, 438 bp, Zea mays
  Clone ID: LIB3061-036-Q1-K1-F11
gaaggatacttcaacgagatgtggagatagaggttgaagcagttgataggacaggaacgttcgtaggttctttgtgggagtccaagaccaacatgggctctgtgcttctggaagctggacttgccaagctgagttcatttggcttggataggacctcagatgcttatatcctaacaagagctgaacagtctgcgaagcaacagaagattaagatatgggagaactatgtcgagggtgaaaatgcttccaatggatccacacctgaatctaaacaaaagcaaattctcaaggttgttgtcacggaagttcttggtggtgggaagttttatgttcagacaatgggtgaccagagggtggcttcaattcaacagcagcttgcatctttgaaacttaaagatgcgccggtcattggtgcttttaatcctgtgaagggagaga

SEQ ID NO: 2561 - DNA, 431 bp, Zea mays
  Clone ID: LIB3061-036-Q1-K1-F12
ctccctgctcggttgttgcagctaaatccgccgggaatctcggatttggcttcgccaggagggcaacttgatgcttgcccagccatatatagatggagcccataaaccggccttgccattgcgatccacgccgtggacaccaagcgtgcaagcgttgccatgggggtgagtgcataggggttcgaccgattgggggaattcgtggcggctgaatctctgctggcgctacaagcttattgggtgtgcgcctgatcttatccacactctttgcattcatcgtacgctagcgtacgcatagtacagcatctagcctggatgctactctgcgccatctttcgcctcggagcttgacattggctatacgccgacccttgagcggcttgttcgcaacgtgtgggtgacgttcatgacttcatacggcggtatttgtg

SEQ ID NO: 2562 - DNA, 428 bp, Zea mays
  Clone ID: LIB3061-036-Q1-K1-F2
ggtttgagctgcgtacgtacgtacgttcaggttcttgaacaaggcgtgcttgctccgtgcgaccaaggacgacgcgccctgcaacggctcggacgcggcggcggcggcctccgagcggcacggccacgacgggacgaggctgtgcacggtggaccaggtggagcagctcaagtcggcgatccgcgtcctgccgatctggtcctccaccatcttcctcgcccttgccatgaaccagagcttcgccgttaagcaggccgatgctatggaccggcgcgtcggcgcgggcgggttccgcgttcccagcggctccttggccgtcttcaacatggccaccatgtcgctgtggtcggcctgctacgacaggtgggtcgcgccggcactgcagcggtacacgggcaacccgcacgggctcaccatgaagcagcgca

SEQ ID NO: 2563 - DNA, 428 bp, Zea mays
  unsure (1)..(428): unsure at all n locations; Clone ID: LIB3061-036-Q1-K1-D8
cttagaggtgggttggcttctcctcctcctccggttcgggttcgggttcgtgaggtgctccggggttcggtttcgtgggtgagcggatcgagatggcggcgtcggatgttgagtaccgctgcttcgtcggcggcctcgcctgggccacggacgaccactccctccacaacgccttcagcacctacggcgaggtcctcgagtccaagatcatcctcgatcgggagacgcagaggtcccgcggcttcggcttcgtcaccttctccacggaggaggcgatgcggaacgccatcgagggcatgaacggcaaggagctggacggccgcaacatcaccgtcaacgaggcccagtcccgcggcggccgtggaggcggcggcggcggcgggtacggtggtggccgtggaggcggcggctacngcggtggcgggcgc

SEQ ID NO: 2564 - DNA, 440 bp, Zea mays
  Clone ID: LIB3061-036-Q1-K1-C3
agcaacatagaaagcacaatagtgtaccaacaatggcagccaaaatattttgcttcgttatgctccttggtctttctgcaagtgctgctaccgcaaccattttcccacaatgctcacaagctcctatagcttcctttcttcccccatacctctcaccagcggtgtcttcagtatgtgaaaacccaattcttcaaccctacaggatccaacaggcaatcgcagcaggcatcttacctttatcacccttgttcctccaacaaccgtcagccctattacagcagttacctttggtgcatttgttggcacaaaacatcaaggcacaacaactacaacaacttgtgctaagaaaccttgctgcctactctcagcaacagcagtttcttccattcaaccaactggctgcattgaactctgctgcttatttgcaacaacaactacca

SEQ ID NO: 2565 - DNA, 441 bp, Zea mays
  Clone ID: LIB3061-036-Q1-K1-C4
gagaccaacaagcaacatagaaagtgtaatacagtagcaaaaatagagcaacaatggcggccaagatattttccatccttatgctccttgctctttctgcatgtgttgctaacgcgaccatttttcctcaatactcacaagctcctatagctgcccttcttcccccataccttccatcaatgaccgctttagtatgtgaaaacccagcccttcaaccctacaggatccagcaagcaatcgcaacaagcaacttacctttatcacacctgttctttcaacaatcgccagccctatctttggtgcagtcattggtacaaaccatcagggcagaacagttgcagcaactcgtgctaccagtgatcagccaagtagctctggcaaacctttccccctactctcagcaacaacaatttcttccattcaaccaactgtctatactga

SEQ ID NO: 2566 - DNA, 437 bp, Zea mays
  Clone ID: LIB3061-036-Q1-K1-C6
ccgcaatgctcgcaagctcctatagcttcccttcttcccccgtacctctcaccagcggtgtcttcggtatgtgaaaacccaattcttcaaccctacaggatccaacaggcaatcgcagctggcatcttacctttatcacccttgttcctccaacaatcatcagccctattacaacagttacctttggtgcatttattggcacaaaacatcagggcacaacaactacaacaacttgtgctagcaaaccttgctgcctactctcagcaacagcagtttcttccattcaaccaactaggttcattgaactctgcttcttatttgcaacaacaacaactaccattcagccagctacctgctgcctacccccagcaatttcttccattcaaccaactagcagcattgaactctcctgcttatttacagcagcaacaactact

SEQ ID NO: 2567 - DNA, 436 bp, Zea mays
  Clone ID: LIB3061-036-Q1-K1-C7
attgagaccaactagcaacatataaagcacaatagtgtaccaacaatggcaggcaagatattttgcttccttatgctccttggtctttctgcaagtgctgctaccgcaaccattttcccacaatgctcacaagctcctatagcttcctttcttcccccatacctctcaccagcggtgtcttcagtatgtgaaaacccaattcttcaaccctacaggatccaacaggcaatcgcagcaggcatcttacctttatcacccttgttcctccaacaaccgtcagccctattacagcagttacctttggtgcatttgttggcacaaaacatcaaggcacaacaactacaacaacttgtgctaggaaaccttgctgcctactctcagcaacagcagtttcttccattcaaccaactggctgcattgaactctgctgcttatt

SEQ ID NO: 2568 - DNA, 438 bp, Zea mays
  Clone ID: LIB3061-036-Q1-K1-C8
agcacacctagcgaagcgcactagcatcgacctaacaacaatggcttccaagacatgatccctccttgcgcttcttgccctttttgtgagtgcaacaaatgcgttcattattccacaatgctcacttgctccgagtgccattattccacagttcctccctccagttacttcaatgggcttcgaacacccagctgtgcaagcctataggctacaacaagcgcttgcggcgagcgtcttagaacaaccaattgcccaattacaacaacaatccttggcacatctaaccatacaaaccatcgcaacgcagcagcaacaagcactgagccacctagccgtggtgaaccctatcgcctacttgcaacaacagctgcttgcatccaacccacttgctttggcaaacgtagctgcataccaacaacaacaacagttgcaacagtt

SEQ ID NO: 2569 - DNA, 440 bp, Zea mays
  Clone ID: LIB3061-036-Q1-K1-C9
caacatagaaagcacaatattgtaccaataatggcagccaaaatattttgcctcattatgctgcttggtctttctgcaagtgctgctacggcgagcattttcccgcaatgctcacaagctcctatagcttcccttcttcccccatacctctcaccagcgatgtcttcagtatgtgaaaatccaattcttctaccctacaggatccaacaggcaatcgcagcaggcatcttacctttatcacccttgttcctccaacaatcatcagccctattacagcagttacctttggtgcatttattggcacaaaacatcagggcacaacaactacaacaactcgtgctagcaaaccttgctgcctactctcagcaacagcagttacctttggtgcatttgttggcacaaaacatcagggcacaacaactacaacaactcgtgctagc

SEQ ID NO: 2570 - DNA, 249 bp, Zea mays
  Clone ID: LIB3061-036-Q1-K1-D1
accaactaacaacatataaatcacaatcgtctaccaaccatcacatggaagatatataacttccttatgcacacccctctatctgcaaacacttctaccaaaaccatacacccacaatactcacaaacttctatacctacctttcttcccccatacctctcactacctcaaaaccccactatattaaaacccaattcttcaaccctacattatccaacactcaataccattaaacatcttaactttatc

SEQ ID NO: 2571 - DNA, 446 bp, Zea mays
  Clone ID: LIB3061-036-Q1-K1-D10
gcagcatagaaagcacaatagtgtacctacaatggcagccaaaatattttgcctccttgtgctccttggtctttctgcaagtgctgctacggcgaccattttcccgcaatgctcgcaagctcctatagcttcccttcttcccccgtacctctcaccagcggtgtcttcggtatgtgaaaacccaattcttcaaccctacaggatccaacaggcaatcgcagctggcatcttacctttatcacccttgttcctccaacaatcatcagccctattacaacagttacctttggtgcatttattggcacaaaacatcagggcacaacaactacaacaacttgtgctagcaaaccttgctgcctactctcagcaacagcagtttcttccattcaaccaactaggttcattgaactctgcttcttatttgcaacaacaacaactaccattca

SEQ ID NO: 2572 - DNA, 379 bp, Zea mays
  Clone ID: LIB3061-036-Q1-K1-D11
tgggtatttacaacaacaacaactactatcattcatccagctagctactgcctactctgagcggcaacaatctcttccatttaaccaattggccgcactgaacccctctgcttatttccagcaacacatactactaccatttggccagctagctacaacaagccccacttcctttttgaaacaacaacaattgcttccgttctaccagcagttagcggctaaccccgcatccctcttacaacttctacaccttctgccctttgtccaactcgctcttacaaacccattaaccttctaccaacaacacatcattggccatgccatctcttagaatgcctattacttgtaattcaattatgaaaccctactgcttacgtat

SEQ ID NO: 2573 - DNA, 426 bp, Zea mays
  Clone ID: LIB3061-036-Q1-K1-D12
attggtctaacacgtgcaaatgaatttggtattgttcttgggaaactcagcggaaggcgtgctgtgagatctaagctagtagagcttggatatgaaatcggtgacaaggaatttgaggacttctttaaacgctacaaagaggttgcagagaagaaaaagcgcgtaactgatgaagacttagaagcgttattgtcggatgagatattccagcctaaggttatttggtcccttgctgatgtacaggcaacatgtggtacacttgctttatctacggcaacagtgaaattgatagcaccagatggagaggagaaaatagcatgttcagtcggaacaggtccagtcgatgcagcttacaaggctgttgacaaaataatccagaattcaaccgttcttcgagaatacagcatgacatcagtcacagaaggc

SEQ ID NO: 2574 - DNA, 376 bp, Zea mays
  Clone ID: LIB3061-036-Q1-K1-D2
caagcgaagcgcactagcaacgacctatcaccaatggctaccaagatattagccctgcttgcgcttcttgcccttttagtgagcgcaacaaatgcgttcattattccacagtgctcacttgctcctagtgccagtattccacagttcctcccaccagttacttcaatgggcttcgaacatccagccgtgcaagcctacaggctacaactagcgcttgcggcgagcgccttacaacaaccaattgcccaattgcaacaacaatccttggcacatctaaccctacaaaccattgcaacgcaacaacaacaacaacagtttctgccatcactgagccacctagccgtggtgaaccctgtcacctacttgcaacagcagc

SEQ ID NO: 2575 - DNA, 432 bp, Zea mays
  unsure (1)..(432): unsure at all n locations; Clone ID: LIB3061-036-Q1-K1-D3
cggacgcgtgggcgcagctaagcccgtgccagcagttcggatcctgcggcgtcggcggcgtcngcagcccgttcctgggccagtgcgtcgagttcctgaggcaccagtgcagcccggcggcgacgccctacggctcgccacagtgccaggcgctgcagcagcagtgctgccaccagatcaggcaggtggagccgctgcaccggtaccaggcgacatacggtgtggtcctgcagtccttcctgcagcagcagccgcagggcgagctcgcggcgctgatggcggcccaggtagcgcagcagctgacggcgatgtgcggtctgcagctgcagcagccaagtccctgcccttgcaacgcagctgccggcggtgtctactactgaggaaactatgtactgtagtaataatgtaatggagccgctgactagctaccta

SEQ ID NO: 2576 - DNA, 416 bp, Zea mays
  Clone ID: LIB3061-036-Q1-K1-D4
agcacccataatattttgagcattcataaacacacctagcgaagcgcactagcaacgacgtaacaacaatggctaccaagatattatccctctttgcgcttcttgccctttttgtgagcgcaacaaatgcgttcattattccacaatgctcacttgctcctagtgccattattccacagttcctccctccagttacttcaatgggcttcgaacacccagctgtgcaagcctacaggctacaacaagcgcttgcggcgagcgtcttacaacaaccaattgcccaattacaacaacaatccttggcacatctaaccatacaaaccatcgcaacgcaacagcaacaacaatttctaccagcactgagccaactagctgtggtgaaccctgtcgcctacttgcaacagcagttgcttgca

SEQ ID NO: 2577 - DNA, 435 bp, Zea mays
  Clone ID: LIB3061-036-Q1-K1-D5
ccaactagcaacatagaaagcacaatagtgtaccaacaatggcagccaaaataggtggcctccttatgctccttggtctttctgcaagtgctgctacggcgaccattttcccgcaatgctcgcaagctcctatagcttcccttcttcccccgtacctctcaccagcggtgtcttcggtatgtgaaaacccaattcttcaaccctacaggatccaacaggcaatcacagctggcatcttacctttatcacccttgttcctccaacaatcatcagccctattacatcagttacctttggtgcatttattggcacaaaacatcaaggcacaacaactacaacaacttgtgctagcaaaccttgctgcctactctcagcaacagcagtttcttccattcaaccaactagctgcattgaactctgcttcttatttgcaac

SEQ ID NO: 2578 - DNA, 420 bp, Zea mays
  Clone ID: LIB3061-036-Q1-K1-D7
agaagttcatgttcaacaacaacaacttcaaccgcagcaccaccaccaacaacagcagcaacagcaccaacaacaacatcaatgtgaaggccaacaacaacatcaccaacaatcacaaggccatgtgcaacaacacgaacagagccatgagcaacaccaaggacagagccatgagcaacaacatcaacaacaattccagggtcatgacaagcagcaacaaccacaacagcctcagcaatatcagcagggccaggaaaaatcacaacagcaacaatgtcattgccaggagcagcaacagactacaaggtgcagctataactactatagcagtagctcaaatctaaaaaattgtcatgaattcctaaggcagcaatgcagccctttggtaatgccttttctccaatcacgtttgatacaacc

SEQ ID NO: 2579 - DNA, 436 bp, Zea mays
  Clone ID: LIB3061-036-Q1-K1-C2
ccaacaagcaacatagaaagtggaatacagtagcaaaaatagagcaacaatggcggccaagatattttccatccttatgctccttgctctttctgcatgtgttgctaacgcgaccatttttcctcaatactcacaagctcctatagctgcccttcttcccccataccttccatcaatgaccgctttagtatgtgaaaacccagcccttcaaccctacaggatccagcaagcaatcgcaacaagcaacttacctttatcacacctgttctttcaacaatcgccagccctatctttggtgcagtcattggtacaaaccatcaaggcagaacagttgcagcaactcgtgctaccagtgatcagccaagtagctctggcaaacctttccccctactctcagcaacaacaatttcttccattcaaccaactgtctatactg

SEQ ID NO: 2580 - DNA, 435 bp, Zea mays
  Clone ID: LIB3061-036-Q1-K1-A8
agaccaactagcaacatagaaagcacattagtgtaccaacaatggcagccaaaatatggtgcctccttatgctccttggtctttctgcaagtgctgctacggcgaccattttcccgcaatgctcgcaagctcctatagcttcccttcttcccccgtacctctcaccagcggtgtcttcggtatgtgaaaacccaattcttcaaccctacaggatccaacaggcaatcgcagctggcatcttacctttatcacccttgttcctccaacaatcatcagccctattacaacagttacctttggtgcatttattggcacaaaacatcagggcacaacaactacaacaacttgtgctagcaaaccttgctgcctactctcagcaacagcagtttcttccattcaaccaactaggttcattgaactctgcttcttaattgc

SEQ ID NO: 2581 - DNA, 400 bp, Zea mays
  unsure (1)..(400): unsure at all n locations; Clone ID: LIB3061-036-Q1-K1-B1
ggcgccacggttccgctgggcaaatcgatgcggcgcgcgctgcggaccgccatcggcgtacccaagaagaataagccgccgacgccgccgctgttgccaaacggcagcggcagggacccgggcgtgtccatggagctgagcagctcgtcgtcggtggcggcgaggaaggaggcggtggtgcgggtggtgatgcgcggcggngtggtggaagtgtacccgggcgtggtgctggcgtgcaccgtcatccggaaccacccgccggggctgtgcctggcgcacccggacgtgttccgcaacccgcacggcgccgtcgtccgcccgctcgagccgctcttccccggccagaagttcctgctgctccccgagaccaccgtggtccggctcaagcagaggatcccgg

SEQ ID NO: 2582 - DNA, 171 bp, Zea mays
  Clone ID: LIB3061-036-Q1-K1-B10
aacaattgctgccatacaaccagttctctttgatgaaccctgccttgcagcaacccatcgttggaggtgccatcttttagattacatatgagatgtactcgacaatggtgccctcataccgacatgtgtttcctagaaataatcaatatattgattgagatttatctcgat

SEQ ID NO: 2583 - DNA, 427 bp, Zea mays
  Clone ID: LIB3061-036-Q1-K1-B11
gcctggtagagctgtattctcttgatgttcagaaatcatatgagagggcaataatctgggtggagcaactgaatgctattcttagacaggcttctaaaaccaaggaaaaggaagatctcaggaagatagataactggcaatatattagttgtgtcaacctatgggttcggtttctgtgttgtcactataaggattacaatctccatcccttattttctcaagttcttcaagtaataagaggagtggctcacttattcccaggcacaaggtacttaccgttgagactgaagcttgtgcagatgctgaacgagctttccacttgcagtcagatgttctatccaattccatcgttgctctttgactgcctagaattaagagaagtttctcagaaagaacaaacacaaagaacaaagatcaacttttcgtc

SEQ ID NO: 2584 - DNA, 444 bp, Zea mays
  Clone ID: LIB3061-036-Q1-K1-B12
acccatcgggcaccataaaaaggctaacccgtttgcatctcactcatccccaattgcatacagcggatgcccgatgagtccaaggagaaaagtcaaactcaaaagccaccagcacagctctcttccatcaaaagagatgaagaacagtcaaatggtgagagtgcaaagcctcgaaaagttggaagcacgccatcatatggtttcaccttcaagtgtgatgagagatctgaaaaaagacgagagttctattcgaagcttgatgagaagattcatgcatgagagttagaaataagcaatttgcaagccaagtcaaaggaaactgaagaagcagaactcagaatgctgagaaagagtctgaatttcaaggcaacaccaatgccaagcttttataatgaaccaacccctgccaaggttgaattgaaaaagatccccccaaccagagct

SEQ ID NO: 2585 - DNA, 439 bp, Zea mays
  Clone ID: LIB3061-036-Q1-K1-B2
gagagcacaatagtgtaccaacaatggcagctaaaatattttgcctccttatgctccggggtctttctgcaagtgctgctacggcgaccattttcccacaatgctcacaagctcctatagcttcccttcttcccccgtacctctcaccaacggtgtcttcggtatgtgaaaacccaattcttcaaccctacaggatccaacaggcaatcgcagctggcatcttacctttatcacccttgttcctccaacaatcatcagccctattacagcagttacctttggtgcatttattggcacaaaacatcagggcacaacaactacaacaacttgtgctagcaaaccttgctgcctactctcagcaacagcagtttcttccattcaaccaactagctgcattgaactctgcttcttatttgcaacaacaacaactaccattcag

SEQ ID NO: 2586 - DNA, 444 bp, Zea mays
  Clone ID: LIB3061-036-Q1-K1-B3
caactagcaacatagaaagcacaatagtgtaccaacaatggcagccaaaatattttggttgcttatgctccttggtctttctgcaagtgctgctaccgcaaccattttcccacaatgctcacaagctcctatagcttcctttcttcccccatacctctcaccagcggtgtcttcagtatgtgaaaacccaattcttcaaccctacaggatccaacaggcaatcgcagcaggcatcttacctttatcacccttgttcctccaacaaccgtcagccctattacagcagttacctttggtgcatttgttggcacaaaacatcaaggcacaacaactacaacaacttgtgctaggaaaccttgctgcctactctcagcaacagcagtttcttccattcaaccaactggctgcattgaactctgctgcttatttgcaacaacaactacc

SEQ ID NO: 2587 - DNA, 439 bp, Zea mays
  Clone ID: LIB3061-036-Q1-K1-B4
cgacctaacaccaatggctaccaagatattagccctccttgcgcttcttgccctttgagtgagcgcaacaaatgcgttcattattccacagtgctcacttgctcctagtgccagtattccacagttcctcccaccagttacttcaatgggcttcgaacatccagccgtgcaagcctacaggctacaactagcgcttgcggcgagcgccttacaacaaccaattgcccaattgcaacaacaatccttggcacatctaaccctacaaaccattgcaacgcaacaacaacaacaacagtttctgccatcactgagccacctagccgtggtgaaccctgtcacctacttgcaacagcagctgcttgcatccaacccacttgctctggcgaacgtagctgcataccagcaacaacaacagctgcaacagtttatgccagtgctc

SEQ ID NO: 2588 - DNA, 457 bp, Zea mays
  Clone ID: LIB3061-036-Q1-K1-B5
ttcagcattcaaaaacacaccaagcgaagcgcactagcaactacctaacaccaatggctccaagatatgagccctccttgcgcttcttgcccttttagtgagcgcaacaaatgcgttcattattccacagtgctcacttgctcctagtgccattattccacagttcctcccaccagttacttcaatgggcttcgaacatccagccgtgcaagcctacaggctacaactagcgcttgcggcgagcgccttacaacaaccaattgcccaattgcaacaacaatccttggcacatctaaccctacaaaccattgcaacgcaacaacaacaacaacaacagtttctgccatcactgagccacctagccgtggtgaaccctgtcacctacttgcaacagcagctgcttgcatccaacccacttgctctggcgaacgtagctgcataccagcaacaacaacag

SEQ ID NO: 2589 - DNA, 436 bp, Zea mays
  Clone ID: LIB3061-036-Q1-K1-B8
gtagctgggaggatcatcttgcactggcagagtttgcttataacaatagctaccaggctagcatcaagatggcaccatttgaggctctgtatggcaggcggtgtatctctcctctatgctgggagactttgggagagagatccctggttggtcctgattgggttcagcaaacttttgaaaaggttcgggaaattcgtcagaatattttggcagctcagagtcgtcagaagagttatgctgatgtgaggaggcgggatctggaatttgttgttggtgaccaagtccttctcagggtatcacccactaagggagtggttcgtttcggtgtctctgggaagctcagcccgaggtacattggaccgttcactatcttggcccgagtgggcagcctagcttatcgcttgctactgccggattccatggcaggggtacaccc

SEQ ID NO: 2590 - DNA, 387 bp, Zea mays
  Clone ID: LIB3061-036-Q1-K1-B9
tgggtcttcagaccattagctttatcttttccatatcgcacaacaacccgatccacacgatggggctgctgatcgttgctgttgctcatctgtctctcgctgacagcgccaccttcactcatacattccgcgcttgtatctgtcagcctacttccccatctctatcaccgtcatcgcttcatctatccacaaaacccacatcttccaccctataggcttcaacaagcactcgcacctcgcaacatacctttatcaactttgattcaacaatcaccagccctatcttttgagcagtcattggtacacatccctctatgcacatcatctgcaacaacttgtgctacctgtgatcaaccacatatctctggctaaactttcttactacta

SEQ ID NO: 2591 - DNA, 441 bp, Zea mays
  Clone ID: LIB3061-036-Q1-K1-C1
cgcacgcgtccgattgagaccaactagcatcatagaaagcacaatagtgtaccaacggtggcagccaaaatattttgcttccttatgctccttggtctttctgcaagtgctgctaccgcaaccattttcccacaatgctcacaagctcctatagcttcctttcttcccccatacctctcaccagcggtgtcttcagtatgtgaaaacccaattcttcaaccctacaggatccaacaggcaatcgcagcaggcatcttacctttatcacccttgttcctccaacaaccgtcagccctattacagcagttacctttggtgcatttgttggcacaaaacatcaaggcacaacaactacaacaacttgtgctaagaaaccttgctgcctactctcagcaacagcagtttcttccatcaaccaactggctgcattgaactctgctg

SEQ ID NO: 2592 - DNA, 438 bp, Zea mays
  Clone ID: LIB3061-036-Q1-K1-C10
gcttcccttcttcccccataccttccatcaatgatagcttcagtatgtgaaaacccaggtctggagccctataggctccaacaagcaatcgcagcaagcaacatacctttatcacccttgttgtttcaacaatcgccagccctatctttggtgcagtcattggtacaaaccatcagggcacagcagctgcagcaactcgtgctacctgtgatcaaccaagtagctctggcaaacctttctccctactctcagcaacaacaatttcttccattcaaccaactgtctacactgaaccctgctgcttatttgcagcaacaactattaccattcagccagctagctactgcctactctcagcaacaacaacttcttccatttaaccaattggccgcactgaaccccgctgcttatttgcagcagcaaatactactaccattt

SEQ ID NO: 2593 - DNA, 446 bp, Zea mays
  Clone ID: LIB3061-036-Q1-K1-C11
gagaccaacaagcaacatagaaagtggaatccagtagcaacaatagagcaacaatggcgaccgagatactttccctccttatgctccttgctctttctgcatgtgttgctaacgcgacaattttccctcaatgctcacaagctcctatagcttcccttcttcccccataccttccatcaatgatagcttcagtatgtgaaaacccagctcttcaaccctataggctccaacaagcaatcgcagcaagcaacatacctttatcacccttgtttcaacaatcgccagccctatctttggtgcagtcattggtacaaaccatcaaggcacagcagctgcagcaactcgtgctacctgtgatcaaccaagtagctctggcaaacctttctccctactatcagcaacaacaatttcttccattcaaccaactatctacactgaaccctgct

SEQ ID NO: 2594 - DNA, 438 bp, Zea mays
  Clone ID: LIB3061-036-Q1-K1-C12
ggcggcgtggcgggcggatgcgctatcggttacggtgaccgacaccgagtgcatccacgagttcgtgccctatgagggcgacaccgtgtccgggaacttcgtcgtcgtcgaccacgacatcttctggagctccgaccacccaggaatcgacctcacggtaacgtcaccaggtggcaacactgtgtacacattgaagggaaaatctggtgagaaatttgagtttaaagctccaagaggtggcatgtataagttctgcttccataacccatatggagcacctgaaactgtttctttctacatccatgttgggcacatacccaatgagcacaatctggcgaaagatgagcacttggaccctatcaatgttaaaatcgcggagctgaaggaagcattagaatccgtcaccgccgagcagaagtacctaatagcacgcgaagc

SEQ ID NO: 2595 - DNA, 102 bp, Zea mays
  Clone ID: LIB3061-036-Q1-K1-A6
caacaacccatcattgtggtagaactttgttgggtttgccaaagcaagttgggggagggtcatcaattgttacacttgtaagacgttgccagcgttatgcat

SEQ ID NO: 2596 - DNA, 245 bp, Zea mays
  Clone ID: LIB3061-017-Q1-K1-F3
caagcaagcatcttacggtcattagcattaaccctccaacaaccatatgctctattgcagcagccatccttagtgcatctgtatctccaaagaatcgcggcacaacaactacaacaacagttgctaccaacaatcaatcaagtagttgcagcgaaccttgctgcttacctccagcaacaacagtttcttccattcaatcaactagctggggtgaaccctgctatctacttgcaggcacaacagct

SEQ ID NO: 2597 - DNA, 243 bp, Zea mays
  Clone ID: LIB3061-017-Q1-K1-F4
atcagtaccatcaatcatcattcatcttattagtataggcaccaaatcaaatctgcaagatcaatgatctaactccaaaaaccatgaagctggtgcttgtggttcttgctttcattgctttagtatcaagtgtttcttgtacacagacaggcggctgcagctgtggtcaacaacaaagccatgagcagcaacatcatccacaacaacatcatccacaaaaacaacaacatcaaccaccaccac

SEQ ID NO: 2598 - DNA, 237 bp, Zea mays
  Clone ID: LIB3061-017-Q1-K1-F5
gaaaaggcagagaaaaaaaaagaagagaagctaagagcttgggagttcagctgcaagccgttcgacgagagagacgaccgaacccggccggaaggggaggagcgggaggaccgcctgcgccgtcggtgagctgcaagttaggctttcaaagaatgtggaggagtgtgtggactttgcgccagagggaggtaaggtggtggtgagtgctactccaaaaggccactccgatggaagtca

SEQ ID NO: 2599 - DNA, 237 bp, Zea mays
  Clone ID: LIB3061-017-Q1-K1-F6
atgtacttcaagcaggcggtggccgcctagccggcggacggcgaagcgatgcggaggtgcggcatgttcctgtggcacgcccgcggcgacacgggcggcgcggaggacatgttcaccggcgccattgacgcggagcccgagagcagccaccaccggagcagctacgcgtggttcctatggatgaccggcggcgtcgagacctgcctcatggacaccggcaggcagagcgacggcaac

SEQ ID NO: 2600 - DNA, 237 bp, Zea mays
  Clone ID: LIB3061-017-Q1-K1-F7
cggacgcgtggggcggtgtcttcagtatgtgaaaacccaattcttcaacccgacaggagccaacaggcaatcgcagcaggcatcttacctttatcacccttgttcctccaacaaccgtcagccctattacagcagttacctttggtgcatttgttggcacaaaacatcaaggcacaacaactacaacaacttgtgctaggaaaccttgctgcctactctcagcaacagcagtttctt

SEQ ID NO: 2601 - DNA, 150 bp, Zea mays
  Clone ID: LIB3061-017-Q1-K1-F8
gcatcttacctttatcacactaactcctccaacaacccacacacctattacccaattacctaacatcaattactttcacaaaacatcaaaccacaacaactacaacaacttattctacaacaaccttacttactactataacaacaccac

SEQ ID NO: 2602 - DNA, 245 bp, Zea mays
  Clone ID: LIB3061-017-Q1-K1-G1
cggacgcgtgggtttgcctacttatgcttcttggtctttctgcaagtgctgctacggcgaccattgtccccgcatgctcgcaagctcctatagctttccttcttccaccgtacctctcaccagcggtgtcttcggtatgtgaaaacccaattcttcaaccctacaagatccaacaggcaatcacagctggcatcttacctttatcacccttgttcctccaacaatcatcagccctattacatcag

SEQ ID NO: 2603 - DNA, 299 bp, Zea mays
  Clone ID: LIB3061-017-Q1-K1-G11
gcagcactcgagccggtcttgatctctacgggttcatcccagacccttggtgtgccgagttcagtgcctactagcggcagcttgccgttgcagtcaagttcatcagctaccccataaacaatcgtttgtgctttgcaagtcaatcaaactgagccagtgaagaagtttgagcccagatctaaactgtggtctgatactttgagccgaggtctagtcaatctggacatttctggacctaacgcgaattctcatgctgatattggagttgactctgattcaatcaatcgcacggagaaaag

SEQ ID NO: 2604 - DNA, 260 bp, Zea mays
  Clone ID: LIB3061-017-Q1-K1-G2
cctacgatcaatcatcattcatcttagtagtataggcaccaaatcaaatctgcaacatcaattatctaactccaaggaccatgaaactggtgcttggggttcttgctttcaatgctttaatatcaaatggttcttgtacacagacaggcggctgcagctgtggtcaacaacaaagccatgagcagcaacatcatccacaacaacatcatccacaaaaacaacaacatcaaccaccaccacaacatcaccagcagcagcaa

SEQ ID NO: 2605 - DNA, 245 bp, Zea mays
  Clone ID: LIB3061-017-Q1-K1-G3
ctcgatcttccaagtcaccaacgcaaattgcaccaagaaatccatcgagaggccgtcggcaggtgaattaatggcgtcgtcgtctagcagcagccaccgccgcctcatcctcgcagccgccgtcctgctctccgtgctcgcggctgccagcgccagcgccgggacctcctgcgtgccggggtgggccatcccgcacaacccgctcccgagctgccgctggtacgtgaccagccggacctgcggca

SEQ ID NO: 2606 - DNA, 243 bp, Zea mays
  unsure (1)..(243): unsure at all n locations; Clone ID: LIB3061-017-Q1-K1-G4
gcaacatagaaagtggaatccagtagcaacaatagagcaacaatggcgaccaagatatgttccctgcttatgctccttgctctntctacatgtgttgctaacgcgacaatttttcctcaatgctcacaagctcctatagcttcccttctttccccataccttccatcaattatagcttcaatatgtgaaaacccagctcttcaaccatataggcttcaacaagcaatcgcagcaagcaacata

SEQ ID NO: 2607 - DNA, 239 bp, Zea mays
  Clone ID: LIB3061-017-Q1-K1-G5
tctgcttccagtccttgatcgcaacccttacctttctgaaggcacaagacaggctgcagcaacaaccgcttctctcgcaaagaagtatggagcagatattactgtagttgttattgatgataaaccaaaggagtctgtcccagagcatgatactcaaatgtcaagcattagatggcatctctcagaaggcggattttcggagtttagattgatggagcgtcttggggaagggcagaaac

SEQ ID NO: 2608 - DNA, 253 bp, Zea mays
  Clone ID: LIB3061-017-Q1-K1-G6
gaccaactagcaacatagaaagcacaatagtgtaccaacaatggcagccaaaatattttgcctccttatgctccttggtctttctgcaagtgctgctacggcgaccattttcccgcaatgctcgcaagctcctatagcttcccttcttcccccgtacctctcaccagcggtgtcttcggtatgtgaaaacccaattcttcaaccctacaggatccaacaggcaatcacagctggcatcttacctttatcaccc

SEQ ID NO: 2609 - DNA, 240 bp, Zea mays
  Clone ID: LIB3061-017-Q1-K1-G7
gccagtcccgcgagcaccattcaccacaccagcgcagccgccatggccgacgtcgagaaggccacccccgtggccgcaccggccgagggcgcgggcggcgacgtggccgccgggagaaccggcgcggtggccgccctgctgcggcggtggcggacccaggacctgctggaccggtcggggtccgcgctgcgcgccgcggcgtgggcgttctccctgctggcgttcctcgtcatggcctgc

SEQ ID NO: 2610 - DNA, 231 bp, Zea mays
  Clone ID: LIB3061-017-Q1-K1-G8
cccacgcgtccgagccactgtacttgctaacgccccaccagatcagcagagacttatgcttggtgagaacctgtatcctcttgttgaacagctggaacgtgagcaggctgccaaggtcactggcatgcttttggagatggatcagactgaggttcttcacctgctgtagtcgccagatgctctgaaagccaaggttgctgaagccatggatgtcctccgctctgcccagca

SEQ ID NO: 2611 - DNA, 251 bp, Zea mays
  Clone ID: LIB3061-017-Q1-K1-G9
tatactcctgttcaacttattctcccacgtagccctctcgtgataccgtctacacgcactagacctctgcaacaattcctgcaacagaccgtaccagcttttactcagaatgtaacactcaaaccctactaactacttgcaacagctgatatcattcatccaatagactgtgacgaactatactgcgtacctacatcaactatactactcatacatgtgactacctctgtctatctctcttttcactttct

SEQ ID NO: 2612 - DNA, 246 bp, Zea mays
  Clone ID: LIB3061-017-Q1-K1-H1
acgcaacagcaacaacaatttctaccagcactgagccaactagctgtggtgaaccctgtggcctacttgcaacagcagttgcttgcatccaacccacttgctctggcaaacatagttgcataccaacaacaacaacaattgcaacagtttctaccagcgctcagtcaactagccatggtgaaccctgccgcctacctacaacagcaacaactgatttcatctagccctctcgctgtggttaatgca

SEQ ID NO: 2613 - DNA, 289 bp, Zea mays
  Clone ID: LIB3061-017-Q1-K1-H10
cactcatccggggcaacttacatggacaatctcgctttacatccttcaccacactaattggctccagcatctctaaccacctatcaggatctaccaagttgccacatatcctttgacccaccttcactctatccatgctacaatactcccaacatatctactatccccagactatctgactgaccttcatagatatggtaactctcaagactatgaactttaacaagacacttgcaaagaatctttccaatacataccatcctatcttgccatcagacgccatcatcac

SEQ ID NO: 2614 - DNA, 411 bp, Zea mays
  Clone ID: LIB3061-017-Q1-K1-H11
ctgcgaatgacacacaagaaaagaagaggtctgatgaaccaccaaaatatccaggattggttcttcagacgaaaaggaataaacaatctaaactccgttcaacatccctttcgttggatggcctcctagattatactgccaaggatatagaggagtctgtatttgacgtctgtgccttgcaattactttatgttagtatatatcaaaagggactactacttgtgcacctttatatgttctgctgctacctagttggcaaacttgagcataccacaccacgtaactgaagtatcttttcattgccatctgtgtttgagagctcatgcccatggacactgatctgatgttctattcctttgtcaacttctctttgcttgctgagtcattcagtgaaatgcttcaacacagaat

SEQ ID NO: 2615 - DNA, 256 bp, Zea mays
  Clone ID: LIB3061-017-Q1-K1-H2
cctgtctccctccctcccccaccccgcgagaccgccggcgaatttgttgcagtgcactgaagccaacagctgcaggacaggaggaggaggaggagctgtttcaacaattatcccccgcgcgcccaggccagccccgcccccgcccgcccactctcccgaggattccaggttctcaacacaacagacaacaccgctcaccgcatatatatatatatagatgggttccgaggggccttctcccgtcaccgtccacgtc

SEQ ID NO: 2616 - DNA, 245 bp, Zea mays
  Clone ID: LIB3061-017-Q1-K1-H3
gcagccctttggtaatgccttttctccaatcacgtttgatacaaccaagtagctgccaggtattgcagcaacaatgttgtcatgatcttaggcagattgagccacaatacattcaccaagcaatctacaacatggttcaatccataatccaggaggagcaacaacaacaaccatgtgagttatgtggatctcaacaagctactcaaagtgcggtggcaatcttgacagcagcacaatacctacca

SEQ ID NO: 2617 - DNA, 379 bp, Zea mays
  unsure (1)..(379): unsure at all n locations; Clone ID: LIB3061-017-Q1-K1-D12
cactcccacaccaaccaaccaacctcctctgcctgccgcttctcctgctgcgggcggtcacggctgcaagtactagaggaggacatccgcttccattactgcgcctgcggaggatcggaggaaccagtagcggaggcttcgattttcggcgggcgcaataaatttcccgcatggctcggagggccgcgtcctcgctcgtctcccgctgcctcctggcgagggcccctgccggcgcgccgnccgctgccccctctgcgctgcgcangacagtgcctgcagatgggatgcacaggcttgtggccagtgtccttcagaggttcagcactgcagcagcagtagaggagcccatcacgccgtcagtccatgtgaactacacaaa

SEQ ID NO: 2618 - DNA, 246 bp, Zea mays
  Clone ID: LIB3061-017-Q1-K1-D2
aaagaagatggtacttatgcacctaaggtgaaaaggaagaagcaagaggagaaagctgctgagaaaaaacgacgagcagaagaggcacagcaagctggccccaatgctgctgctgctcaaagcaatggaactggctatcaagcgtctcgtctgggcaaggcttcgcaggagccacctgctcctccgaacaacatcctcttcatccagaacttgccagaccagaccacgagcatgatgctccagatc

SEQ ID NO: 2619 - DNA, 243 bp, Zea mays
  unsure (1)..(243): unsure at all n locations; Clone ID: LIB3061-017-Q1-K1-D3
attgagaccagcaagcaacatagaaagtttaatcttttagcaacaatagagcaacaatgtcnaccgagatattttccctgcttatgctccttgctctttctacatgtgttgctaacgcgacaattttccctcaatgctcacaagctcctatagctttccttcttcccccataccttccatcaattatagcttcagtatgtgaaaacccagctcttcaaccatataagcttcaacaagcaatct

SEQ ID NO: 2620 - DNA, 246 bp, Zea mays
  Clone ID: LIB3061-017-Q1-K1-D4
attgagaccaactagcaacatagaaagcacaatagtgtaccaacaatggcagccaaaatattttgcttccttatgctccttggtctttctgcaagtgctgctaccgcaaccattttcccacaatgctcacaagctcctatagcttcctttcttcccccatacctctcaccagcggtgtcttcagtatgtgaaaacccaattcttcaaccctacaggatccaacaggcaatcgcagcaggcatctta

SEQ ID NO: 2621 - DNA, 238 bp, Zea mays
  Clone ID: LIB3061-017-Q1-K1-D5
attgagaccaactagcaacatagaaagtacaatagtgtaccaacaatggcggccaaaatattttgcctccttatgctccttggtctttctgcaagtgctgctacggcgaccattttcccgcaatgctcgcaagctcctatagcttcccttcttcccccgtacctctcaccagcggtgtcttcggtatgtgaaaacccaattcttcaaccctacaggatccaacaggcaatcacagctg

SEQ ID NO: 2622 - DNA, 237 bp, Zea mays
  Clone ID: LIB3061-017-Q1-K1-D6
gtggggagggaaagggaacgggagcgggaggggaatccaattgcgatggcctccgactcgggcgatttcggtggggagaacaagtcgttggaaacggcgaggcggctgctggaggagaccttcacgagtgaggcagaggcggaggcgctaccgagcttgccctcggggttctacgacgccttcgtcctgaggggaatccgcgtcgtccaggccctccagcccggcacactcctctgc

SEQ ID NO: 2623 - DNA, 236 bp, Zea mays
  Clone ID: LIB3061-017-Q1-K1-D7
gcgtaacctgctcggctccgacgccagcctcgccgtccacgcgggggagaggctgggaagaaggatagccacggatgctatcaccacgccggtagtgaacacgtcggcctactggttcaacaactcgcaagagctaatcgactttaaggaggggaggcatgctagcttcgagtatgggaggtatgggaacccgaccacggaggcattagagaagaagatgagcgcactggagaaag

SEQ ID NO: 2624 - DNA, 239 bp, Zea mays
  Clone ID: LIB3061-017-Q1-K1-D8
gcacaatagtgtaccaacaatggcagccaaaatattttgcttccttatgctccttggtctttctgcaagtgttgctaccgcaaccattttcccacaatgctcacaagctcctatagcttcccttcttcccccatacctctcaccagcggtgtcttcaatgtgtgaaaacccaattgttcaaccctacaggatccaacaggcaatcgcaacaggcatcttaccattatcacccttgttcc

SEQ ID NO: 2625 - DNA, 379 bp, Zea mays
  unsure (1)..(379): unsure at all n locations; Clone ID: LIB3061-017-Q1-K1-D9
gcgcggacgcgtgggcagcgcgctcccaccggccccggcgtccgacgacagggcggggagccccgcggcggcgcgggcgagcaagctggcgcgcgccgcgccgcggcggagcaggtcggagaagatggcggcgggcccgcggctgctgcaggttcggcgcgcggcgtccccgccggcggcccccgagctgcggcggacggagtcggagaacgggcggcggcggcggtcgtccgtgtcggcgcgcgcgtgccgctggggcgcggacgacgccgacgagttccggcgcacggtggaggcgttcatcgacaagcacaagcggttccaccgncaggagtccatgacgctggccgtcgtcgcggggtccgggaccgggtccggc

SEQ ID NO: 2626 - DNA, 421 bp, Zea mays
  unsure (1)..(421): unsure at all n locations; Clone ID: LIB3061-017-Q1-K1-E10
cgtcaagttccactggcgccccaccttcggcgtgcgctcgctgatggacgacgaggccgtcgccgttggcggcgccaaccacagccacgccaccaaggacctcacggacgccatcgcggcggggaacttccccgagtggacgctctacatccagaccatggaccccgagatggaagaccgcctcgacgacctggacccgctggacgtgaccaagacgtggcccgaggacgcgttcccgctgcagcccgtgggccgcctggtgctcaaccgcaacatcgacaacttcttcgcggagaacgagcagctggccttctgcccgggcctcatcgtccccgggatctactactccgacgacaagctgctgcagaccaggatcttctnctacttcgacacgcagcgccaccgnctcggccccaattac

SEQ ID NO: 2627 - DNA, 413 bp, Zea mays
  Clone ID: LIB3061-017-Q1-K1-E12
ccagacgtctccaatcggagctcccatcgtctcggagaagaggagcagcacggcacggcggctgtggcgaggaaggctcctgtcctgtcccatcccaacccagcagccgtccaaggaggaggagatccaatcggcgtgcaggcgtccaccgtccatccatcgatccaattccaatctgcaggcctctgcgtcgcggcttgttcgtggaggagaggttgctgtggaacccgccgccagttagccatgtcgtcctccgtgctgagggctgcggccgacagggctattcgcaggcaggccctcacgctgacggacgccgcggcgtccaggatccggcagctcctcagcctcaggcagcggccattcctgcggctcggcgtcaaagcgcgtggttgcaacggcctctcgtacacgct

SEQ ID NO: 2628 - DNA, 246 bp, Zea mays
  Clone ID: LIB3061-017-Q1-K1-E2
cccacgcgtccgcaactagcaacatagaaagcacaatagtgtaccaacaatggcagccaaaatattttgcttccttatgctccttggtctttctgcaagtgttgctaccgcaaccattttcccacaatgctcacaagctcctatagcttcccttcttcccccatacctctcaccagcggtgtcttcaatgtgtgaaaccccaattgttcaaccctacaggatccaacaggcaatcgcaacaggcat

SEQ ID NO: 2629 - DNA, 242 bp, Zea mays
  Clone ID: LIB3061-017-Q1-K1-E3
gagaccaacaagcaacatagaaagtggaatccagtagcaacaatagagcaacaatggcgaccaagatattttccctccttatgctccttgctctttctacatgtgttgctaacgcgacaattttccctcaatgctcacaagctcctatagcttcccttcttcccccataccttccatcaattatagcttcaatatgtgaaaacccagctcttcaaccatataggcttcaacaagcaatcgca

SEQ ID NO: 2630 - DNA, 245 bp, Zea mays
  Clone ID: LIB3061-017-Q1-K1-E4
gaccaactagcaacatataaagcacaatattgtaccaacaatggcagccaaaatattgggcttccttatgctccttggtctttctgcaagtgctgctaccgcaaccattttcccacaatgctcacaagctcctatagcttcctttcttcccccatacctctcaccagcggtgtctacagtatgtgaaaacccaattcttcaaccctacaggatccaacaggcaatcgcagcaggcatcttacctt

SEQ ID NO: 2631 - DNA, 242 bp, Zea mays
  Clone ID: LIB3061-017-Q1-K1-E5
ctatgaatgaacacaagaaacttgtaactggtactcctatcatggatcaacgtatcctgattgatcagctgatggggggtgtccaaaaaaaaaaaaaaaaaaaaaaaaaaaaaaaaaaaaaaaaaaaaaaaaaaaaaaaaaaaaaaaaaaaaaaaaaaaaaaaaaaaaaaaaaaaaaaaaaaaaaaaaaaaaaaaaaaaaaaaaaaaaggggcgcccccttaaaagaacccaacttaaccac

SEQ ID NO: 2632 - DNA, 238 bp, Zea mays
  Clone ID: LIB3061-017-Q1-K1-E6
aacaaatgcgttcattattccacaatgctcacttgctcctagtgccattaggccacagggcctccctccagttacttcaatgggcttcgaacacccagctgtgcaagcctacaggctacaacaagcgcttgcggcgagcgtcttacaacaaccaattgcccaattacaacaacaatccttggcacatctaaccatacaaaccatcgcaacgcaacagcaacaacaatttctaccagca

SEQ ID NO: 2633 - DNA, 252 bp, Zea mays
  Clone ID: LIB3061-017-Q1-K1-E7
attgagaccagcaagcaacatagaaagtagaatccattagcaacaatagagcaacaatggcgaccaagatattttccctccttatgctccttgctctttctacatgtgttgctaacgcgacaattttccctcaatgctcacaagctcctatagcttcccttcttcccccataccttccatcaattatagcttcagtatgtgaaaacccagctcttcaaccatataggcttcaacaagcaatcgcagcaagca

SEQ ID NO: 2634 - DNA, 250 bp, Zea mays
  Clone ID: LIB3061-017-Q1-K1-E8
gaacacgtaccacgatcagcagtaaaaaccttttgcattactacagcaacaatgacgaacaggatatatgcaatcattaagcggcttgctatttctacatctgtcgctaacgcgacactcttacctcaatgctcacaagctcctatagctaccctacttcacccataccttccatcaattatagcttcagtatgtgaaaacccagctcttcaaccatataggcttcaacaagcaatcgcagcaagcaaca

SEQ ID NO: 2635 - DNA, 127 bp, Zea mays
  Clone ID: LIB3061-017-Q1-K1-E9
gaggaatcccactacagtgcctccctcgtgggctcgtggactagcatggtgccggggccgtgggggacggcaaggacggtacgcaaccgtacgcaggcactcaccggtgagcggcgaggcgactgac

SEQ ID NO: 2636 - DNA, 381 bp, Zea mays
  Clone ID: LIB3061-017-Q1-K1-F10
gccacttggatccggtgctcagcggaacagctagctatagcctgtagctagcagctagcttcagtcacaggccggacggtcggctcacacacagctagccgccgccgctgctagcttagccaccagtagtccgatctgatctacaggcagggggccagcaggggcagctagctagctagccgcgcgccggcgccatgatgaacctgaacctgaagcagccgctcgtgctgcccgcgcaccacagcaatgtcgtcggctcgcgcctgtcgtcgtcgtcgccctcggcagccgccgccagcaggaggaccggcggcggcgtgtcctcccggtccggctcccggcggcacgtgcggctgccgaggatcagctgcagcgccaccg

SEQ ID NO: 2637 - DNA, 258 bp, Zea mays
  Clone ID: LIB3061-017-Q1-K1-F11
attgagaccaactagcaacatagaatgtacaattttgtaccaacaatggcagccaaagtatggtgcctccttatgctccttggtctttctgcaagtgctgctaccgcgaccatttttccacaatgcttacaagctcctatagcttcccttcttcccctgtacctcttaccagctgtgtcttccttatgtgaaaacccaattcttcaactctataggatcctacaggcaatcgcagctggcatcttacctttatcaccc

SEQ ID NO: 2638 - DNA, 325 bp, Zea mays
  Clone ID: LIB3061-017-Q1-K1-D11
caaggtgtggcgcgtgtccgactcccggtgcctcgagtccgtggtgcgcgcccacggggacgccgtcaacgccgtcgccgccgcgggcttcgacgcgctcgtgctcacgggctccgccgacggcacggtcaaggcgtggcggcggcgcgcggccgagggcaagggccgggccacgcggcacgccatggagcgcgtgctgcgggagggcgaccgagccgataccgccatcatagtgtgagctcaagtcaatgtagtgtacgccggcttacaacacggtgactgggacactgctgtcgttcgccaagtgaatcgcctagcagcacat

SEQ ID NO: 2639 - DNA, 423 bp, Zea mays
  Clone ID: LIB3061-017-Q1-K1-F12
gcggcgcggagtggataggcttgcactcaagccgcgtcctcgtggtggcggtcctcgactgtggtggcgtccttcatccccttctttgggtccttcatctcgttcgtcgggagcaccatgtgcgcgcttctctcctttgtgctgccggctctcttccatctcagcattgtaggctcgtcaatacccttgtggaggcgggtgctggactacggcatccttctctttggtctggctttcgctggatatggtcttgtcactgctctctcctcgcattgaacaatggcccaaacagtcaaaaaagtgcagagatcaggatatcttgtgatgacaggagtcaaatggatgctaggagcaccatatatcagatagcacggctcggattagtgcgtgattgaactgatccgcttcaacccatatagccgc

SEQ ID NO: 2640 - DNA, 286 bp, Zea mays
  Clone ID: LIB3061-017-Q1-K1-B10
attccctgcatcaatttaaatcagaaagagaaaaaaaaaaaaaaaaaaaaaaattaaaaaaaaaaaaaaaaaaaaaagggcaacggttaaaaagaaaccggcactacgatcccaatcatgcaacgtcatatactactgctttcacctcccttaaatctgtttccttggccgcattttacaccgcccgtactcggtaaaccctgggactacccgtcctaatccgtcctgcgtgccatccccctttcatcaggcggcatcaccatgccacaagcccgctcaaacgccc

SEQ ID NO: 2641 - DNA, 401 bp, Zea mays
  Clone ID: LIB3061-017-Q1-K1-B11
gggccagcttgcgcccgcaatggcacttttctccgcctcctcgtcctccaggaccggggtcactgctctccgcagcagtgggcagcgggcgtcgtcctccttcctcggcggcaagacgctgctgagacaggccgaggcggcccggccgtcgttcgccgtgcgcgccgcggcggaccccaacaggccgatctggttccccggcagcacccctccgccgtggctcgacggcagccttcccggcgacttcggctttgatccctggggcctcggatctgacccggagagcctgcggtggaacgtgcaggcggagctggtgcactgccggtgggcgatgctcggcgcggcgggcatcttcataccggagttcctgaccaagatcggcgtcctcaacacgctcttct

SEQ ID NO: 2642 - DNA, 245 bp, Zea mays
  Clone ID: LIB3061-017-Q1-K1-B2
gttctgcacgatttcaccacagagtgcacgagagtgaaggactgcctgcttcgagaaatggcgaaggcgctagatgagctcggcgacgacgacgactacttcatcgaccagttcggcgacagggccgacacccatgccaggttcagctactaccctccgtgcgcgcggccggacctcgtcttcggcctgaggcctcactccgacggcacgttcctctcgcttctcatgctagacgacagcgtcgg

SEQ ID NO: 2643 - DNA, 242 bp, Zea mays
  Clone ID: LIB3061-017-Q1-K1-B3
gcaacatcttagcaccaatggcagccaagatttttgcgctccttgccctccttgctctttcagcaagtgttgctaccgcgactattattccacaatgctcacaacaatacctctctccagtgatagccgcgagatttgaatacccatctatacaatcctacaggctacaagaggccatcacagcaagcatcttacggtcgctagcattgaccgtgcaacaaccatatgccctattgcaacaa

SEQ ID NO: 2644 - DNA, 244 bp, Zea mays
  Clone ID: LIB3061-017-Q1-K1-B4
attttcagcattcaaaaacacaccaagctaagcgcactagcaacgacctaacaccaatggctaccaagatattagccctccttgcgcttcttgcccttttagtgagcgcaacaaatgcgttcattattccacagtgctcacttgctcctagtgccattattccacagttcctcccaccagttacttcaatgggcttcgaacatccagccgtgcaagcctacaggctacaactagcgcttgcggc

SEQ ID NO: 2645 - DNA, 237 bp, Zea mays
  Clone ID: LIB3061-017-Q1-K1-B5
caagatcagaagccagatgctagacgacgaactggatggcgcaaaggtcaaggcaagaggcaacataatgcagactaacattgtagttgacgatccaagtgattatacaagcctatttatggaccgaggattccagatagaacactagactgcacactgggactgacactatcacttgcactacctaagtcattaaaggatcaagagtagagctaccagtaaaggtatgataagaac

SEQ ID NO: 2646 - DNA, 237 bp, Zea mays
  Clone ID: LIB3061-017-Q1-K1-B7
ctactatagcagtagctcatttctaaataaattgtcatgaattcctaagggggcagtgcagccctttggtagtgccttttctccaatcacgtttgatacaaccaagtagctgccaggtattgcagcaacaatgttgtcatgatcttaggcagattgagccacaatacattcaccaagcaatctacaacatggttcaatccataatccaggaggagcaacaacaacaaccatgtgagt

SEQ ID NO: 2647 - DNA, 239 bp, Zea mays
  Clone ID: LIB3061-017-Q1-K1-B8
attgtctccagtttctcccattaggagtaaggcaatggcaaagcagcaactggctctagctgggccctctgccatggtgacgcaaaggataacacaagtacgcaacgccgcatgagttggtgtctggctttgtcaagtgtccctctcgcggtgcctgtctcctttcacttgtggagcacggtgagctcgcaaattcgttcactgcaaaagagcctgctgtgacccccctgaaaccaacc

SEQ ID NO: 2648 - DNA, 332 bp, Zea mays
  Clone ID: LIB3061-017-Q1-K1-B9
cacaaataccggaatcaaggaagctgttatagtttcactgcttggtgatgtcggttgtgcaagccaagaagttatggaatcctatgaggttgaaatcaatggcaaagttttccaagctaaaactgttctgaacctcaatggacacagcatccggccatatcaaatccatgctgggaaatcagctccaatactgaaaggtggacagcaaacaaaaatggatgaaggggagttttatgccattgatacttttggatctacggcaaatggatttgtcaggcaggacttgcaatgcattcattacatgaacaactttgatgacagacatgtgcctt

SEQ ID NO: 2649 - DNA, 242 bp, Zea mays
  Clone ID: LIB3061-017-Q1-K1-C1
gaccaactagcaacatagaaagcacaatagtgtaccaacaatggcagccaaaatatttggcctccttatgctccttggtatttctgcaagtgctgctacggcgaccattttcccgcaatgctcacaagctcctatagcttcccttcttcccccgtacctctcaccagcggtgtcttcggtatgtgaaaacccaattcttcaaccctacaggatccaacaggcaatcgcagctggcatcttac

SEQ ID NO: 2650 - DNA, 313 bp, Zea mays
  unsure (1)..(313): unsure at all n locations; Clone ID: LIB3061-017-Q1-K1-C10
ttcttctcctccacctcgtcaggcaccctcaaaccctcgccgcaagaaagaagaggtgaatcaaatcgaaccaaaacctcccgaccccacaaggccaagctcatttccatggtggtgtacacgcaggaacatgtgtaccggcacccgtgggaccgggtgacagcggcggcgtggcgcaagttcacggatccggcctcctgtacggcgctctcccacgtcgcagacgttcacaccctacaccgccgcctcgactccgacacgggccgncttcaggccgcgcgctccatcaccgtgcggtccccgccggttcctt

SEQ ID NO: 2651 - DNA, 276 bp, Zea mays
  Clone ID: LIB3061-017-Q1-K1-C11
gaactctgctacttatctgcaacaacttcaacttccattcaggcatctaactgctagctaccgtgatcatgtaattgcattcaaccatatgacagcattgaactctgctgcatatgtacagacacaacatctactaacattcactccgatagcttgtgctagcaaagctaccttcttaatacaaccacaatcattgccgttctaccaacacactgctcctaacgcattgcaccttttaacaactgcaacaactgctgtcattcaaccaacttgctt

SEQ ID NO: 2652 - DNA, 295 bp, Zea mays
  Clone ID: LIB3061-017-Q1-K1-C12
tgcaacaacgtcctagtcctattacaacaaataccattaatacatctgttcgcaaacaacatctacgcacatcaactacaacaactcctacatcgaaaccttgatgcatactctcagcaacatcagccactcaccaataaacaacctccttcatctgaacttaactatttattaccaacaacaactaccatacaatcagctagcatattcctacccccatcaattgcatacattcaaccaactatcatcatagaactttacttcttaattacaacatcaacatctaccaccattc

SEQ ID NO: 2653 - DNA, 256 bp, Zea mays
  Clone ID: LIB3061-017-Q1-K1-C2
gttctagatcgcgagggccgcccttttttttttttttttttaacatcacaaaatacaatatcgaatgctaggtgaaaatgcatttgaaccttacaccattatacaagacagtccgaccaaacaattacactctagcgctatacaataccaaaacgatgaatgctagtttctagttattcactatacaagttatttattttatttgactactcgcaacattattcatcgtctgatgtctttggatgaatatgggttc

SEQ ID NO: 2654 - DNA, 241 bp, Zea mays
  Clone ID: LIB3061-017-Q1-K1-C3
atcaattatagcttcaatatgtgaaaacccagctcttcaaccatataggcttcaacaagcaatcgcagcaagcaacatacctttatcgcccttgttgtttcaacaatcgccagccctatctttggtgcagtcattggtacaaaccatcagggcacaacagctgcagcaactcgtgctacctctgatcaaccaagtagctctggcaaacctttctccctactctcagcaacaacaatttctt

SEQ ID NO: 2655 - DNA, 246 bp, Zea mays
  Clone ID: LIB3061-017-Q1-K1-C4
caggattcaaaaacacaccaagcgaagttcactagcaacgacctaacaccaatggctagcgaagatattagccctccttgcgcttcttgcccttttagtgagcgcaacaaatgcgttcattattccacagtgctcacttgctcctagtgccagtattccacagttcctcccaccagttacttcaatgggcttcgaacatccagccgtgcaagcctacaggctacaactagcgcttgcggcgagcgc

SEQ ID NO: 2656 - DNA, 237 bp, Zea mays
  Clone ID: LIB3061-017-Q1-K1-C5
cggacgcgtgggtgctcgacgtaggtatcgtcatctgatgcaggacgtgttgtcgatgctcccgcacgcgaagaaggacagcaaggtcgagtcgaagcagagcaaggggaacgctctcaacgagatgctcgagctcaggagctgctccagttgtctcttcttcgagtgccgaaaacagaaggatctttacctttggatggtgaagtctcctggaggaccatcagtgaaatttctagt

SEQ ID NO: 2657 - DNA, 254 bp, Zea mays
  Clone ID: LIB3061-017-Q1-K1-C6
tcacttgcatggtaatgggattgggaatgagggaatacgtgagttgatgtctgcattatctgctcacaaagggaagatcacagttgtggatattggcaacaacaacattagcccggaaggtttacatcctgtagccgagttcctcaaaaggacaaagtccttacagtggttcagtctctacatgaacgatattagtgatgagggagctggaaaggttgctgaggctctaaaagattacataacaatttctacca

SEQ ID NO: 2658 - DNA, 238 bp, Zea mays
  Clone ID: LIB3061-017-Q1-K1-C8
cacagcgaaccgagaaaccaacacaactagcaaagcagcgatccgacatccgagagatggacgcggtgatgttcgggctggagactcccctgatggccgcgctgcagcacctgctggacgtgcccgacggcgacgccggcgcgggcggcgacaacaagacgggcagcggcggcagcgccacgcgcacctacgtccgcgacgcgcgcgccatggcggccaccccggccgacgtgaagga

SEQ ID NO: 2659 - DNA, 418 bp, Zea mays
  Clone ID: LIB3061-017-Q1-K1-A9
gcccagttcaacctttagccaatggagttaaaaaagaaccaccggttactctggtcgataaaaatttccagggcatattgaccaatgaaacaagatgcctaagatgtgaaacagtaactgcaagggatgaaacgtttcttgatcttagcgttgacattgaacaaaatagttctatcacaagctgcctgaaaaatttctgttctacagagactttaaacgcagaggataaattcttctgtgacaaatgctgcagtttgcaagaagcacagaagagaatgaagatcaagaaagctccccacatactggtgatccatctaaagcgtttcaagtacattgaacagcttggccggtataagaagctttcataccgggttgtattccccatggaactgaagctcaggtatacatctgacgatgt

SEQ ID NO: 2660 - DNA, 286 bp, Zea mays
  Clone ID: LIB3061-017-Q1-K1-D10
acagcacagagtgaggtaagcatccgtaaaaagctgtgatctgatcgacatggccggcgccaccatggctctcacctcccgcgcgctcgtcggcaagccggcgaccagcaccagggacgtcttcggcgaggggcgcatcaccatgcgcaagactgctggcaagcccaagccagcggcgtccggcagcccctggtacggggccgaccgcgtcctgtacctgggcccgctgtccggccagcccccaagctacctgaccggcgagttccccggcgactacggctgggac

SEQ ID NO: 2661 - DNA, 433 bp, Zea mays
  Clone ID: LIB3061-035-Q1-K1-H11
agcattcagaaacacacctagcgaagcgcactagcaacgacctaacaacaatggctaccaagagattatccctctttgcgcttcttgccctttttgtgagcgcaacaaatgcgttcattattccacaatgctcacttgctcctagtgccattattccacagttcctccctccagttacttcaatgggcttcgaacacccagctgtgcaagcctacaggctacaacaagcgcttgcggcgagcgtcttacaacaaccaattgcccaattacaacaacaatccttggcacatctaaccatacaaaccatcgcaacgcaacagcaacaacaatttctaccagcactgagccaactagctgtggtgaaccctgtcgcctacttgcaacagcagttgcttgcatccaacccacttgctctggcaaacatagttgcata

SEQ ID NO: 2662 - DNA, 331 bp, Zea mays
  Clone ID: LIB3061-035-Q1-K1-H12
cacaaatcaagaaccagattgaggctactgaacaagaatatgagagagaaaaactaagcgagaggatagctaaactctctggtggtgttgctgtcattcaggtaggagcacagacagaaactgagctcaaggaaaagaaattgagggttgaggatgccctgaatgctacaaaggcagcagtcgaggaaggtatcgttgtaggtggtggctgtacccttttgaggcttgcatcaaaagttgatgcaattatagagacccttgagaacgatgaacagaaggttggggctgaaattgtaaggaaatccttgagctatccacttaaattgattgc

SEQ ID NO: 2663 - DNA, 439 bp, Zea mays
  unsure (1)..(439): unsure at all n locations; Clone ID: LIB3061-035-Q1-K1-H2
aacaaaacgacctcctccgcccgcccgtccgcccgcctgcccgtcggcgttgtttcggctccaccgccgctctcctctccagtctcccaccaccgctcgtctccccgtaccgnccgcaacccccctcccctgcgagatccggggcgcgatgtggcgcagctgcgtctcgcgaggcctctccagggccaaggcctccgcctccaggctcctctccacggcgtcgtcgtcctacacggtggtcgaccacacctacgacgcggtggtggtgggggccggcggcgcggggctccgggcggcgatcggcctctccgagcacggcttcaacaccgcgtgcatcaccaagctcttccccacgcgctcgcacaccgtcgcggctcagggaggcataaatgctgcacttggaaacatgagtgaagatgactggaggtggcatatgtat

SEQ ID NO: 2664 - DNA, 374 bp, Zea mays
  Clone ID: LIB3061-035-Q1-K1-H3
cttcctaatcctcctgggtctttctgcaagtgttgctaccgcaaccattttcccacaatgctcacaagctcctatagcttcccttcttcccccatacctctcaccagcggtgtcttcaatgtgtgaaaccccaattgttcaaccctacaggatccaacaggcaatcgcaacaggcatcttaccattatcacccttgttcctccaacaaccgtcagccctattacagcagttacctttggtccatttggtggcacaaaacatcagggcacaacaactacaacaacttgtgctagcaaaccttgctgcatactctcagcaacatcagtttcttccattcaaccaactggctgcattgaactctgctgcttatttgc

SEQ ID NO: 2665 - DNA, 450 bp, Zea mays
  unsure (1)..(450): unsure at all n locations; Clone ID: LIB3061-035-Q1-K1-H4
ncgcttagcaacatagnaaagccccattatggtaccaaccattgggcagcaaaaaaattntgctttgccttaggcttcctgggtctttctgcaagtgctgctaccgcaaccattttcccacaatgctcacaagctcctatagcttcctttcttcccccatacctctcaccagcggtgtcttcagtatgtgaaaacccaattcttcaaccctacaggatccaacaggcaatcgcagcaggcatcttacctttatcacccttgttcctccaacaaccgtcagccctattacagcagttacctttggtgcatttgttggcacaaaacatcaaggcacaacaactacaacaacttgtgctaggaaaccttgctgcctactctcagcaacagcagtttcttccattcaaccaactggctgcattgaactctgctgcttatttgcaacaacaacta

SEQ ID NO: 2666 - DNA, 369 bp, Zea mays
  Clone ID: LIB3061-035-Q1-K1-H5
caccaacgcaaattgcaccaagaaatccatcgagaggccgtcgacaggggaattaatggcgtcgtcgtctagcagcagccaccgccgcctcatcctcgcagccgccgtcctgctctccgtgctcgcggctgccagcgccagcgccgggacctcctgcgtgccggggtgggccatcccgcacaacccgctcccgagctgccgctggtacgtgaccagccggacctgcggcatcgggccgcgcctcccgtggccggagctgaagaggagatgctgccgggagctggcggacatcccggcgtactgccggtgcacggcgctgagcatcctcatggacggcgcgatcccgccgggcccggacgcgcagctgga

SEQ ID NO: 2667 - DNA, 416 bp, Zea mays
  Clone ID: LIB3061-035-Q1-K1-H7
ccgacccactcgacccacacaagtgatcgtactttatgtgcccttttattttgtgccaccaaatggaccaaacgtgacgactctatataatctgacagatgctgaaggaacaattaccattcagccatctagctcctgactacccccattaattacttccattcaaccaactagcaacattgaactctgctgattatttacagcagcaacatctactaccattcactcaactatctgatgtgagccctgctgccttcttgacacaacaacactatttgccgttctacctgcacactatgcctaacgctgacaccctcttacaactgcaacaatttcttccattcaacccactttctattacaaacccaacagtcatctactcaacaacccatcattgctggagcactctcttacat

SEQ ID NO: 2668 - DNA, 436 bp, Zea mays
  Clone ID: LIB3061-035-Q1-K1-H8
ggagaaagtggacgtggcaagcatggagaaaaatctctagctgaatcagtgggatcacttaacattggcattgttgactctgagttcatggattcaagtcctctaattcatgataaagaatcatgttctcctctagaacctgagggctccgttaatgaagataattttacagctgtgctttcacagtttaacgatgcccccaacaaagaaagtgaaggctatggagaaagtggatgtggtaagcatggagaaaaatctctagttgaatcagtgggatcacttaacattggcattgttgattctgagttcatggattcaagtcctctaattcatgataaagaatcatgttctcctctagaacctgaggactcagttaatgaagataattttgcagctgtgctttcacaatttaatgatgcccccaacaaagaaagcg

SEQ ID NO: 2669 - DNA, 429 bp, Zea mays
  unsure (1)..(429): unsure at all n locations; Clone ID: LIB3061-035-Q1-K1-H9
gtctacatgcaacaggatgcagaagaatgctggacacagttggtgtatacgctttctgaaactcttacctcagattcaagtgaatctgcagctcttccgatgaagcaactatttgggatagatctcgtgagcagggtccactgtgcagaaagtggtgaggagagcatggagacagaatcagtatattcccttaagtgtcatatatctcaagatgtgaaccatcttcatgagggaattaagcatggcttgaagacagaacttgagaaagcttcacctacactgggtcgaactgcagtttatactagagaatcaagaataaatgagctgcctaggtacttgactgtgcagttcgttcgcttcttttggaaaagggaatcaaaccaaaaggcaaagattntacgaaaagttgattacccactggaaatggat

SEQ ID NO: 2670 - DNA, 428 bp, Zea mays
  Clone ID: LIB3061-036-Q1-K1-A1
ccgacgcgtccgctcaccagcggtgtcttcggtatgtgaaaacccaattcttcaaccgtataggatccaacaggcaatcgcagctggcatcttacctttatcacccttgttcctccaacaatcatcagccctattacagcagttacctttggtgcatttattggcacaaaacatcagggcacaacaactacaacaacttgtgctagcaaaccttgctgcctactctcagcaacaacagtttcttccattcaaccaactagctgcattgaactctgcttcttatttgcaacaacaacaactaccattcagccagctatctgctgcctacccccagcaatttcttccattcaaccaactgacagcttttgaactctcctgcttatttacagcagcaacaactactaccattcagccagctagctggtgtg

SEQ ID NO: 2671 - DNA, 427 bp, Zea mays
  unsure (1)..(427): unsure at all n locations; Clone ID: LIB3061-036-Q1-K1-A10
cgacggcgacgccctactgctcgcctcattgccagtcgttgcggcagcagtgttgccagcagcgcatgcaggtggagccgcagcaccggtaccaggcgatcttcggcttggtcctccagtccatcctgcagcagcagccgcaaagcggccaggtcgcggggctgttggcggcgcagatagcgcagcaactgacggcgatgtgcggcctgcagcagccgactccatgcccctacgctgctgccggcggtgtcccccactgaagaaactatgtgctgtagtatagccgctggctagctagctagttgagtcatttagcggcgatgattgagtaataatgtgtcacgcatcaccatgggtggcagtgtcagtgtgagcaatgacctgaatgaacaattgaaatgaanagaaaaaagtattgttccaaaaa

SEQ ID NO: 2672 - DNA, 286 bp, Zea mays
  Clone ID: LIB3061-036-Q1-K1-A11
gatagtttactctaaggatcaatccgcttgactattgcctgacatacaccagacagcaggggtactgctctttcagtagcgccagttactcacgactgaccataagtgatactgacgtaccatcacttgctgacttagtcaacaagcagaagatcacagtattgcataatactggctctgatgatccaaactccaaaggtgcaccaaaggctgatcttgagagaatatgttgagtatgatcaagcacgagctctcataaccgatggttctggtgacgtacattgct

SEQ ID NO: 2673 - DNA, 133 bp, Zea mays
  Clone ID: LIB3061-036-Q1-K1-A12
cagcaacccatcgttggtggtgccatcttttagattacatatgagatgtactcgataatggtgccctcatagcggcatgtgtttcctaaaaataatcaatatattgattgagatttatctcgatatatctctg

SEQ ID NO: 2674 - DNA, 243 bp, Zea mays
  Clone ID: LIB3061-036-Q1-K1-A2
tgaaagttttatgggctaaaaaacagtgtctacatctggtgcccctgcctgtctttgggagtttttatgacttttatgttcttgtatcgtgaaccgcagtgaacaacggttgttgcaagttccagggatatctttggaagtggtaaacaaatgcgtcttatttctatgtaaaaaaaatcaatgaaaaaaaacccacatagtttaacacttccatgttccaaaatgagtagtaactaggctttt

SEQ ID NO: 2675 - DNA, 443 bp, Zea mays
  unsure (1)..(443): unsure at all n locations; Clone ID: LIB3061-036-Q1-K1-A3
attttgagcattcagaaacacaccaagcgaagcgcactagcaacgacctaacaacagtggctaccaagatattagccctccttgcgcttcttgccctttttgtgagcgcaacaaatgcgttcattattccacaatgctcacttgctcctagtgccattattccacagttcctcccaccagttacttcaatgggcttcgaacacctagctgtgcaagccaacatgcaacaacaagcgcttgcggcgagcgtcttacaacaaccaattgcccaattgcaacaacaatccttgccacatctaacaatacaagccatcacaacgcaacagcaacaacagttcctaccagcactgagccacctagccatggtgaaccctgccgnctacttgcaagagcagctgcttgcatccaacccacttgctctggcgaacgtagttgcaaaccag

SEQ ID NO: 2676 - DNA, 308 bp, Zea mays
  Clone ID: LIB3061-036-Q1-K1-A4
ttcataatcacaccatttatttcacactatcaacgacctaacaacaagaagttttaatatattatcccttcttgcactactagccctttttgtgagctcaacaaatgcgttcattattccacaatgctcacttgctcctaattccattattccacaattcctaccaccaattactttaatgatcttaaaacacctaactgtacaagccaacattcatcatcaatcacttgcttatagcatattacaacaactatattaccaattgcaacaactattctttatcaatctaacaatacaatccatcacaa

SEQ ID NO: 2677 - DNA, 218 bp, Zea mays
  unsure (1)..(218): unsure at all n locations; Clone ID: LIB3061-036-Q1-K1-A5
ccgtccgagttgagaaaccaactanngcaacatagtaaagtcacccaatagtcgtacccaacccaatggcagcgcgaaagatattttgacttcctttatnngctccttgcgtctttcgtgcaagtgcctgnnntaccgcaaccannttttcccaccaatggctcnaacaagctcnnctatagcnnttcactttctatttcccccaataccctttctca

SEQ ID NO: 2678 - DNA, 447 bp, Zea mays
  unsure (1)..(447): unsure at all n locations; Clone ID: LIB3061-035-Q1-K1-H1
cgcagcaacgaacacgaaccttggcagaacgaagctgaagtagttcgttgtgaacccagtatggcaaacgcgccgaggatcctggccctcggcctgctgctagcgctcctgtgcgctgccgccggcccggccgccgcgcagaactgcggctgccagcctaacttctgctgcagcaagttcggctactgcggcacgaccgacgactactgcggcgacgggtgccagtcgggcccgtgccgctcgggcggcggcggcggcggcggcggaggcggaggcagtggcggtgcgaacgtggctaacgtggtcagcgacgcgttcttcaacggcatcaagaaccaggccgggagcgggtgcgagggcaagaacttctacacccggagcgcgttcctgagcgccgtcaacaagtacccgggcttcgcccatggcgggacggangtggagggcaag

SEQ ID NO: 2679 - DNA, 435 bp, Zea mays
  Clone ID: LIB3061-035-Q1-K1-F6
cttggacccggtgcccccctactacccgtaccccaacgctggcgcggggatgccgatgcttcctatggcagcaggtataggtggtggcgccggtgggctccacctcaacggcgccgccctgttcggcaatccgatggccgcgccccagcccatgagcttctaccaccagatgggcacggggactgcttgcgctggcggcttcgatgtttctgcgccggagagtaggccgtcctcgatggtgtcgcagaaggacgaccaggctaatggcgctgagatctcgtcgatgatgtccgtggccggcccagggcctgcgaccaccaccaccatagagatggatggcgtgtggaagtactgaaaacgtggagggtggaaggcaaagacatgaattcgcataaattaaatatgcatgtaatatctatatctgcattgcatttt

SEQ ID NO: 2680 - DNA, 437 bp, Zea mays
  Clone ID: LIB3061-035-Q1-K1-F7
gcttctgcttgctctggggggaaggagagagagagagcgagagagagagagagatctagtagagaggctagtaggtggtcctcgaacgaagatgttggcggtgttcagcgggcaggtggtggaggtgccggcggagctggtggcggcgggcagccggacgccgtcgcccaagacgaaggcgtcgcagctcgtggggcgcttcctggccgcgtccgagccggccgtgtccgtgcagctcggcgaccacggccacctcgcctactcccacaccaaccaggcgctcctccgccccaggtcgttcgcggccaaggacgaggtgttctgcctgttcgaaggggtgctggacaacctgggtcggctgagccagcagcacgggctgtcaagcaagggcgccaacgaggtgcttctcgtcatcgaggcctacaagacgctgcgcg

SEQ ID NO: 2681 - DNA, 431 bp, Zea mays
  unsure (1)..(431): unsure at all n locations; Clone ID: LIB3061-035-Q1-K1-F8
gttacctttggtgcatttattggcacaaaacatcagggcacaacaactacaacgactggtgctagcaaaccttgctgcctactctcagcaacagcagtttcttccattcaaccaactagctgcattgaactctgcttcttatttgcaacaacaacaactaccattcagccagctacctgctgcctacccccagcaatttcttccattcaaccaactggcagcattgaactctcctgcttatttacagcagcaacaactactaccattcagccagctagctggtgtgagccctgctaccttcttgatacaaccacagttgttgccgttctaccagcacgctgcgcctaacgctggcaccctcttacaactgcaacaattgctgccattcaaccaacttgctntgacaaacccagcagcgttctaccaacaac

SEQ ID NO: 2682 - DNA, 422 bp, Zea mays
  Clone ID: LIB3061-035-Q1-K1-F9
tgagaccaacaagcaacatagaaagtggaatccagtagcaacaacagagcaacaatggcgaccaagatattttccctccttatgctccttgctctttctgcatgtgttgctaacgcgacaattttccctcaatgctcacaagctcctatagcttcccttcttcccccataccttccatcaatgatagcttcagtatgtgaaaacccagctcttcagccctataggctccaacaagcaatcgcacaagcaacatacctttatcacccttgttgtttcaacaatcgccagccctatctttggtgcagtcattggtacaaaccatcagggcacagcagctgcagcaactcgtgctacctgtgatcaaccaagtagctctggcaaacctttctccctactctcagcaacaacaatttcttccattc

SEQ ID NO: 2683 - DNA, 403 bp, Zea mays
  unsure (1)..(403): unsure at all n locations; Clone ID: LIB3061-035-Q1-K1-G1
ggatcgtcgaaccgaacaacatggagaaggtcaatggtcttggccggggccctggtttgggaagttgcaacggcttttgcaaggcaaatgccttgcccttgcccggggctgaagggttggaacggggctggccccggcctgacaacaataatggcccccggcggctgtaccctaacccgagtacctgaggagccggagtgcacccgctggcggggcccctactacgccggtgtggcagccgagcgccatgtccagccgctccgggcacagtgctgccagcagcagatgaagatgatggacgtgcagtccgtcgcgcagcagctgcagatgatgatgcagcttgagcgtgccgctgccgncagcagcagcctgtacgagccagctctgatgcagcagcagcagc

SEQ ID NO: 2684 - DNA, 421 bp, Zea mays
  Clone ID: LIB3061-035-Q1-K1-G10
ggcgaacgtagctgcataccagcaacaacaacaacaacaacaacaacaacaacagctacaacagtttctgccaacgctcagtcaactagccatggtgaaccctgccgcctacgtacaacaacaacaactgctttcatctagcccgctcgctgtgggcaatgcacctacatacctgcaacaacaattgttgcaacagattgtaccagctctgactcaactagctgtggcaaaccctgttgcctacttgcaacagctgcttccattcaaccaactgactctgtcgaactctgctgcgtacctacaacagcgacaacagttacttaatccattggtagtggctaacccattggtcgccgccttcctacagcagcaacaattgctgccatacaaccagttctctttgatgaatcctgtcttgtcg

SEQ ID NO: 2685 - DNA, 360 bp, Zea mays
  Clone ID: LIB3061-035-Q1-K1-G12
gctgcctacccccagcaatttcttccattcaaccaactagcagcattgaactctcctgcgttatgtacagcagcaacaactactaccattcagccagctagctggtgtgagccctgctaccttcttgatacaaccacagttgttgccgttctaccagcacgctgcgcctaacgctggcaccctcttacaactgcaacaattgctgccattcaaccaacttgctttgacaaacccagcagcgttctaccaacaacccatcattggtggtgccctcttttagatttcttatgagttatagttcaataataaagttttttgtctgatgtttgtggcttcccagaaataagaaagtacatttct

SEQ ID NO: 2686 - DNA, 208 bp, Zea mays
  Clone ID: LIB3061-035-Q1-K1-G3
ttggaacccggaagcggcctaacaaccttgaccagccagatcttgccaattgcttttgggggagtttccccaactggtaacattccaaaacaggaagggtaaaatggtgaacttttttttcccaagaaagtgttgggccacaaccaggatcttaattgccaaggacaatccttttgccaaaatcaacattggcaatttgaatccaaat

SEQ ID NO: 2687 - DNA, 430 bp, Zea mays
  unsure (1)..(430): unsure at all n locations; Clone ID: LIB3061-035-Q1-K1-G4
ggcgccaaccaccagcagcagagaggaccccgaaccggaagttgcaccgggcggggccgaaccacgcaaggttcaagattatccggtttaaagacatcagaaaaggctgcggcatggatagataccaaagggtagagaagcctcggaatgacacgccaatcagccagaatgagatcagaatcactactcaggggaggatgaggaactatatcagctatgggatgtcgctgcttgaggaaaatggacatgatgagattagtatcaaggccatgggacgggccataaataagacagttatggttgttgaattgatcaagagaagggttggaggtcttcatcagaacactgctactgaatctgntgatatcacagacacatgggaacctttggaagaaggccttctcccactagagacaactcggcatgtgtc

SEQ ID NO: 2688 - DNA, 438 bp, Zea mays
  unsure (1)..(438): unsure at all n locations; Clone ID: LIB3061-035-Q1-K1-G5
cagaaacacaccaagcgaagcgcactagcaacgacctaacaacaatggctaccaagatattagccctccttgcgcttcttgccctttttgtgagcgcaacaaatgcgttcattattccacaatgctcacttgctcctagtgccattattccacagttcctcccaccagttacttcaatgggcttcgaacacctagctgtgcaagccaacatgcaacaacaagcgcttgcggcgagcgtcttacaacaaccaattgcccaattgcaacaacaatccttgccacatctaacaatacaagccatcacaacgcaacagcaacaacagttcctaccagcactgagccacctagccatggtgaaccctgccgnctacttgcaagagcagctgcttgcatccaacccacttgctctggcgaacgtagttgcaaaccagcaacaac

SEQ ID NO: 2689 - DNA, 439 bp, Zea mays
  Clone ID: LIB3061-035-Q1-K1-G6
cagaaacacaccaagcgaagcgcactagcaacaacctaacaacaatggctaccaagagtgttatccctccttgcgcttcttgcgctttttgcgagcgcaacaaatgcgtccattattccacaatgctcacttgctcctagttccattattccacagttcctcccaccagttacttcaatggccttcgaacacccagctgtgcaagcctataggctacaacaagcgattgcggcgagcgtcttacaacaaccaattgcccaattgcaacaacaatccttggcacatctaacaatacaaaccatcgcaacgcaacagcaacaacagttcctaccagcactgagccacctagccatggtgaaccctgtcgcctacttgcaacagcagctgcttgcatccaacccacttgctctagcaaacgtagttgcaaaccagcaacaac

SEQ ID NO: 2690 - DNA, 403 bp, Zea mays
  Clone ID: LIB3061-035-Q1-K1-G7
cttctttcacagccaaggatgtaatggagagcaacctacatggcttgagggagcttcatttgctcatgttcgggatggccaactccaaccttgctgacatctatagcttcctcaagacctgcccgtgtcctcagttagagcgcctctttgtgcagctcccgacaaacaccggtgatgcattcacggagaacttcttgaaggtggaggaggaggacccgccaaaaggtggattagaaaaccttcgcttagccaagctgacaaatttcaaggggcaccgtaatgagatgcagctagtagcatttctgcttagacagtctagtagtctgaagaaactatttctgattgctcccaaagaggatcaccctcaaggactgcgcaagggtcagtcagatatgctgcctga

SEQ ID NO: 2691 - DNA, 460 bp, Zea mays
  unsure (1)..(460): unsure at all n locations; Clone ID: LIB3061-035-Q1-K1-G8
cccggcgtgcaagttcgaagagatccaggacgtcaggcacttgagagccctgatggacatcaacttctggggccacgtgtacccaacccggctcgccatccctcacctcaggagaagccgtggccggatcgtgggcgtcacctccaactcgtcctacatattcatcgggaggaacaccttctacaatgccagcaaggcggcggcgctcagcttctacgacaccctgaggatggagctgggcagcgacatccgcatcaccgaggtggtgcccggcgtggtggagtctgagatcaccaaggggaagatgctcaccaagggaggcgagatgaaggtggaccaggacgaaagagacgccatcctggggccgacgccggccgagcccgtgggcgacttcgccaggaccgtggtgcgcgacgtgtgccggngtgcgaggtacgtgttcgagcccaggtggtacatg

SEQ ID NO: 2692 - DNA, 458 bp, Zea mays
  Clone ID: LIB3061-035-Q1-K1-G9
tcccggccgacccacgcgtacgccgacgcgtccgcaaaaacacaccaagctaagctcactagcaacgacctaacaccaatggctagcaagatattagccctccttgcgcttcttgcccttttagtgagcgcaacaaatgcgttcattattccacagtgctcacttgctcctagtgccattattccacagttccttccaccagctacttcaatgggcttcgaacatccagccgtgcaagcctacaggctacaactagcgcttgcggcgagcgccttacaacaaccaattgcccaattgcaacaacaatccttggcacatctaaccctacaaaccattgcaacgcaacaacaacaacaacaacagtttctgccatcactgagccacctagccgtggtgaaccctgtcacctacttgcaacagcagctgcttgcatccaacccacttgctctggcgaacgt

SEQ ID NO: 2693 - DNA, 435 bp, Zea mays
  Clone ID: LIB3061-035-Q1-K1-F4
catgttctgatgactcttatggtagtcagggatatggtgctaaaagatcaactgataggttgaagaacagcagcttcggcaaccaggccgggggtggttcaagctttcactcgagcttccataacagctctagtggcaatcagttcggtgatactacaagctttcatgccagctatggtaacagcagccagaacaatcagacgggtgacaatccgagcttcccacccagctccagcaacaatcagtccggggatggtctcagttttcatgaaaggttctatggatcacgcggaagggacgagagcagatcaaacaatgatggattccgtgctaggagcagaagtcctggcaagcctgtggaagtttccaactggtgattgcatccactaggtgcaatccaatttttgcgatggtgacgaaaccaagtaaaagatg

SEQ ID NO: 2694 - DNA, 432 bp, Zea mays
  unsure (1)..(432): unsure at all n locations; Clone ID: LIB3061-035-Q1-K1-E12
cccacgcgtccgctacccctcctgctaaggcgaagaagggagagaagctggcgcctgatgcgactcctgcaggaaaggcaaagaagggcaagaccgagctagagacactggcacctgatgccactccagcaggaaaggcgaagaaaggtaaggtcgagaagacagctcctgaggccactccctcaggcaaggggaagaagggtggggacaaactggagaagccagcagcgctcgatcgctcaccttcagacagcaagtctgaaaagcttgcacatttttcccgcacatgggagaaagatgatgagatgaagatcttggaggctctcgcggcccatgtcaagagtgagggcgtgctgccgaagactgattntcttcttgctagtgttcgtgaccgccttgtcaggaagaactgcaactacacggatatatatg

SEQ ID NO: 2695 - DNA, 415 bp, Zea mays
  unsure (1)..(415): unsure at all n locations; Clone ID: LIB3061-035-Q1-K1-E2
caaagataacctacaaactatgaacccaattgaatgggggccgtcctatggtggcggggctattgagttacaaaaattggctaaacgttggggaagtctttgtgcgtcttcatcaggttgtgaacgcaattggagtacctttgaatttatccatacaaagaaaagaaaccgattgttgcataagaggttgaattctattgtcttcatttcctacaacagaaagatgaaagctaggttccaaaaactacgccagaagaaggggaaaaactttgatccattggttcatgaggacttcaactgggacaatgagtgggctgattctttgcatgtagtccctgaaggtgggncgtggtgtgagtgtgaccttacatgggaccttgtggataatgccattggagcatcgcaagcacttcgt

SEQ ID NO: 2696 - DNA, 428 bp, Zea mays
  Clone ID: LIB3061-035-Q1-K1-E3
ggcatattaactttaataaccttggtccttcaacaaccggcaagcctaataccagagtggccgtttggggcattggtgggccaaaaacatcaagggccaacactacaacacttgtgctaagaaaccttgctgcctactctcagcaacagcagtttcttccattcaaccaactggctgcattgaactctgctgcttatttgcaacaacaactaccattcagtcagctagctgctgcctacccccagcaatttcttccattcaaccaactggcagcattgaactctgctgcttatttacaacagcaacagctaccaccattcagccagctagctgatgtgagccctgttgccttcttgacacaacaacagttgttgccgttctacctgcacgctgcgcctaacgctggcaccctcttacaactgcaacaa

SEQ ID NO: 2697 - DNA, 434 bp, Zea mays
  unsure (1)..(434): unsure at all n locations; Clone ID: LIB3061-035-Q1-K1-E4
gttgctncgaccagttacctcaatgggcttcgaaaaactaacttggccaggcttccgggttccaccaggcccttgcggcaaccgtttaacaccacccaataacccaatggaaccaccattcctggccccatttaccattccaaacatcggaaccccaccacaacaacaggtcctacagcactggaccaactagatgtggtgaaccctgtcggctacttgcaacagcaggtgcttgcatccaacccacttgctctggcaaacgtagctgcataccaacaacaacaacaattgcaacagtttctgccagcgctcagtcaactagccatggtgaaccctgccgcctacctacaacagcaacaactgctttcatctagccctctcgatgtgggtaatgcacctacatacctgcaacaacaactgctgcaacagattgt

SEQ ID NO: 2698 - DNA, 433 bp, Zea mays
  Clone ID: LIB3061-035-Q1-K1-E5
agagaggttgcaagctgaagttggattgcctgtggactcgagcatccctgttatagtttttgtcgggcgtcttgaagaacagaaagggtctgacatactcattgcagccattccagagttcgtgggcgagaatgttcagataatcgttcttggcacgggaaagaagaaaatggaggaggaattaatgcagctggaagtgaaatatccaaacattgctagaggcatagcgaaattcaatgttccattggcacatatgatgtttgctgggtctgacttcattattgtcccaagtaggtttgagccatgtggtctcattcagttgcaagggatgagatatggagtgattcccatctgttcatcacctggaggacttgttgacacggttgaggaggggtgtcaccggattccacatgggttctttcaatgtcgagtg

SEQ ID NO: 2699 - DNA, 430 bp, Zea mays
  Clone ID: LIB3061-035-Q1-K1-E6
cgagtgtagcaggctgcacacacaaggatggggacaaccacaagcgcctaagatgccgtcctccgcgtcgagatctttgccgaggcggtgaccgtcgagggatcgccatggcgttgagggcgtcccccgtgtcgcatggcaccgcggcagcgccgctgccgcctttcgcgcggaggaggatggcccgtggggtggtggtggccatggcgtccacgatcgacagggtccaaactgccaaagaaccctataccccttcacgagaggtacatcgccaaattacccatgtcactaccacctcaaaagcgggagattctcaattcacttcaaccttgggccaaggataacctactgaacctactgaagccagttgaaaagttatggctgtcacaggacttgctaccagagccttcatatgatgggtcttatgatg

SEQ ID NO: 2700 - DNA, 394 bp, Zea mays
  Clone ID: LIB3061-035-Q1-K1-E8
ggtgacgatagcgctggacccgtctctgtacccagagaatccactcatcatctgggagaatgcacgggcagctgcccagcaggaagggtttgaggtaaagaggaaaggggataaggagtttgttgcaaacattcggctggagatgaactacagccctgataagttcaagttatcacagtcgattatggaggtgcttgcggtggaggtggacactcgtgcacgggtgattgctgccctatggcagtatattaaagcaaagaagcttcagaacccaaatgatccttccttcttcatgtgtgacccttaattgacgaatgtgcatgctgaggacaagctcaagcttgcaatgttgtcacacatgatatctcagcatctgtctgcctcaccacccatc

SEQ ID NO: 2701 - DNA, 397 bp, Zea mays
  Clone ID: LIB3061-035-Q1-K1-E9
cccacgcgtccgcgacaagggccgtctctccaaggaggagatcgagaagatggttcaggacgctgagaagtacaagtctgaggatgaggagcacaagaagaaggtggaggccaagaactcgctggagaactactcctacaacatgcgcaacacgatcaaggacgagaagattgcgtccaagctgccggccgatgacaagaagaagatcgaggacgccatcgacgcggccatcagctggctggacgccaaccagctcgccgaggcggacgagttcgaggacaagatgaaggagctggagagcctctgcaaccccatcatcgccaagatgtaccagggcgcgggtgaagacatgggcggcgctggcggcatggacgaggacgcccctgccggcagcggc

SEQ ID NO: 2702 - DNA, 441 bp, Zea mays
  Clone ID: LIB3061-035-Q1-K1-F1
gaagagagtgtgagtacgaccagaagatatccattgatttctacaaggaaggagatccgttgaaaccagctgtgacaggcgtcttagtgttcgtttccactccagatccaattggcaacaagtactatcttggccctgctcctttgcaggatatggcaaggcaaattgctacagccaatggccctactggctataatagggattacctgttctcaatggagaaggcattagccagcattagccacgaagatgattcgatcatagagcttgcaaacgaggtgaggaaggtgctcaacagaacaaaggagaccaagatcactggtgccaatgcttccctgaaatcacatgcccctcttgtgcacctgtccgcgcttccagaaggcaccgttgtggactcgagatagcgagagccttggacgttggacctctactcggaatcta

SEQ ID NO: 2703 - DNA, 364 bp, Zea mays
  Clone ID: LIB3061-035-Q1-K1-F10
tctcccccttctcccttcccttctcttttcccgaaaccctatctccacctatgtatctttatacacccattcgacataatacatttccttcaatacacctttcttacttcatttaacatcaacacttaatacctttctaccatcaccttttctcctaacacctcatccctcttacaactacaacaattgataacctttgtccaacttacttttacataccaaaccccctcctaccaacaacacatcactttataaaccctcttttacattccttattacttataattcaataataaagtttttctgaccatctatctcaccaaccacaaataataaattacatttccatattttaatgttaata

SEQ ID NO: 2704 - DNA, 485 bp, Zea mays
  unsure (1)..(485): unsure at all n locations; Clone ID: LIB3061-035-Q1-K1-F11
cggaattacccgggtgcgatcccacgtccgtccggtgtggctttctttcctccccctttccggttcggtgttcgtggttcgtggagggttcnttccggggttcggggtttgcgtgggtgtggcccggatcgagaatggcngtngcgtcggatggttgagtacccgcnntgcttcgtcggcggccctcgccttgggtccacggacgaccacttccctcctacaacgccttcagcacctacggcgaggtcctcgagtccaagatcatcctcgatcgggagacgcagaggtcccgcggcttcggcttcgtcaccttctccacggaggaggcgatgcggaacgccatcgagggcatgaacggcaaggagctggacggccgcaacatcaccgtcaacgaggcccagtcccgcggcggccgtggaggcggcggcggcggctacggtggtggccgtggaggcggcggctacggcggtggcgggcgccgtgat

SEQ ID NO: 2705 - DNA, 426 bp, Zea mays
  Clone ID: LIB3061-035-Q1-K1-F12
attgagaccaactagcaacatagaaagcacaatagtgtaccaacaatggcagccaaaggattgtgcctccttatgctccttggtctttctgcaagtgctgctacggcgaccattttcccgcaatgctcgcaagctcctatagcttcccttcttcccccgtacctctcaccagcggtgtcttcggtatgtgaaaacccaattcttcaaccctacaggatccaacaggcaatcacagctggcatcttacctttatcacccttgttcctccaacaatcatcagccctattacatcagttacctttggtgcatttattggcacaaaacatcagggcacaacaactacaacaacttgtgctagcaaaccttgctgcctactctcagcaacagcagtttcttccattcaaccaactagctgcattgaactct

SEQ ID NO: 2706 - DNA, 426 bp, Zea mays
  Clone ID: LIB3061-035-Q1-K1-F2
gaggagagtgtgagtacgaccagaagatatccattgatttctacaaggaacgagatcccttggaaccaactgtgacaggcgtcttagtgttcgtttccactccagatccaattggcaacaagtactatcttggccctgctcctttgcaggatatggcaaggcaaattgctacagccaatggccctactggctataatagggattacctgttctcaatggagaaggcattagccagcattagccacgaagatgattcgatcatagagcttgcaaacgaagtgaggaaggtgctcaacagaacaaaggagaccaagatcactggtgccaatgcttccctgaaatcacatgcccctcttgtgcacctgtccgcgcttccagaaggcaccgttgtggactcgagatagcgagagccttggacgttggacc

SEQ ID NO: 2707 - DNA, 443 bp, Zea mays
  Clone ID: LIB3061-035-Q1-K1-F3
caaggattgttgttgcaattgggcacatctaaccctacaaaccattgcaacgcaacagcgacaacaacaacagtttctgccatcactgagccacctagccgtggtgaaccctgtcacctacttgcaacagcagctgcttgcatccaacccacttgctctggcgaacgtagctgcataccagcaacaacaacagctgcaacagtttatgccagtgctcagtcaactagccatggtgaaccctgccgtctacctacaactactttcatctagcccgctcgcggtgggcaatgcacctacgtacctacaacaacagttgctgcaacaaattgtaccagctctgactcagctagctgtggcaaaccctgctgcctacttacaacagttgcttccattcaaccaactggctgtgtcaaactctgctgcgtacctacaacagcgacaac

SEQ ID NO: 2708 - DNA, 431 bp, Zea mays
  Clone ID: LIB3061-035-Q1-K1-E10
cttcaccttgttattcgttctgatgctgcaagaccagaactgggattttgggctggtgcttcaagatcctacaaacagttaaggtgatgatcaggccaaaatatgacgggaagtacctgcacaaagtgaccagtgatctgctgggtggtaccagagtggaagagacgctgacaaatgtcgtcattcctactttcgatgtcaagtgcgtaaagccaacaatattcagcacattcaaggcaagatctagtgccttgatgaatgctcgtcttgctgatgtgtgcattggcacgtccgcagcaccgacggtcctccctgcgcactactttgaaaccgtggatcaccgcactggcgcatcgcgtagcttcaacgttatcgacgggggcctcgccgcaaacaatccgactctggtggcgatgggtgagataacagaa

SEQ ID NO: 2709 - DNA, 410 bp, Zea mays
  Clone ID: LIB3061-016-Q1-K1-H10
ctccgctcggccaccagctttgaccgtctcccctcccctccgctcctgttcctccatacccggcccccccgcaggagcggcgcggcggcggcggcggcaaagccaaaggcaagatgttcgggcgcgcgccgaagaagagcgacaacaccaagtactacgagatcctcggggtgcccaagtcggcgtcccaggacgacctcaagaaggcctaccgcaaggcagctatcaagaaccaccccgacaagggcggtgaccccgagaagttcaaggagctcgcacaagcctatgaggttttgagtgatccagagaaacgtgagatttatgatcagtatggtgaagatgcccttaaggaaggaatgggtggtggtgggtcccatgctgatccatttgacattttctcatcattcttt

SEQ ID NO: 2710 - DNA, 419 bp, Zea mays
  unsure (1)..(419): unsure at all n locations; Clone ID: LIB3061-016-Q1-K1-H11
cacctaccaccttccatagtgaagtacactagcaacatcttagcaccaatggcagccaagatttttgcgctccttgccctccttgctctttcagcaagtgttgctaccgcgactattattccacaatgctcacaacaatacctctctccagtgatagccgcgagatttgaatacccatctatacaatcctacaggctacaagaggccatcacagcaagcatcttacggtcgttagcattgaccgtccaacaaccatatgccctattgcaacaaccatccttagtgaatctgtatcttcaaagaatcacagcacaacaactacaacaacggttgcttncaacaattaatcaagtagttgcagcgaaacctgctgcttaccttcagcatcaacaatttcttncattcaatcaactaactgg

SEQ ID NO: 2711 - DNA, 337 bp, Zea mays
  Clone ID: LIB3061-016-Q1-K1-H12
ttttagttttataggcaccaaatcaaatctgggacatgaattatctaactgcaaataccatgaagctggtgcttgtggttcttgctttcattgctttagtatcacgtgtttcttgtacacagacaggcggctgcagctgtgttcaacaacaaatccatgagcagcaacatcattcacaacagcatcatacacagcatcatcaacatgttccaccaccacagcataaccagctgcagctgtcaccaactactccaagttcacatgcaaccacttaaacatcaataacaacgcgaagtctatgttcaacatcgacaacaacaaccgaatcaccacctgc

SEQ ID NO: 2712 - DNA, 379 bp, Zea mays
  unsure (1)..(379): unsure at all n locations; Clone ID: LIB3061-016-Q1-K1-H2
caaaagttgttctttgacctgacgaatgcggaacgctgcatctgactctaatggaatgcgtatgtgatgcaggtggagtcggaggacgaggcggaggcggcgtgcgcggtcgtgctgacgccgncgctgtcgctggagggcggccttgcggcggagctccgcccggccaatctcgcccagcgggtgctcagcctcttcctcaacgtccgcccgggctctgacctctcccacttccagctgccggcgacgttcaacctgcccaagtcgcagctgcagctgtacggcgagggcgtgtactgcgccggcgaggacctgctggggcggtgcgcgcgggggcgcgacagcctggagcgcctggcgtgcgtggtggcgtggagca

SEQ ID NO: 2713 - DNA, 377 bp, Zea mays
  Clone ID: LIB3061-016-Q1-K1-H3
attttcagcattcaaaaacacaccaagcgaagcgcactagcaacgacctaacaccaatggctaccaagatattagccctccttgcgcttcttgcccttttagtgagcgcaacaaatgcgttcattattccacagtgctcacttgctcctagtgccagtattccacagttcctcccaccagttacttcaatgggcttcgaacatccagccgtgcaagcctacaggctacaactagcgcttgcggcgagcgccttacaacaaccaattgcccaattgcaacaacaatccttggcacatctaaccctacaaaccattgcaacgcaacaacaacaacaacagtttctgccatcactgagccacctaaccgtggtgaaccct

SEQ ID NO: 2714 - DNA, 382 bp, Zea mays
  unsure (1)..(382): unsure at all n locations; Clone ID: LIB3061-016-Q1-K1-H4
gcttctcacccctctcacgttgcaggcgcgtcatcgtcgcctcccgaaccgtcctcactgccctcctgccaccagcgctgcccctactgcgggcgctgttgcctgggctcttgccatcngcctgcgcccactcctgcccctgtcgtcggcgtggctgcccagcctggcccagccaccagtggcctaggcaccgctggccacgaccacggcttggcccacaccagcttgggcgtggctggtctggggttgtctggtccgggcctcgctgctgtcagcccctatgctgtcggcgtgccctaggcgtcctggacgctgctacggaccttggcacttcctttcatnctgagtgcctacttcgcgcctcttttggccgaactacccc

SEQ ID NO: 2715 - DNA, 353 bp, Zea mays
  Clone ID: LIB3061-016-Q1-K1-H5
gctactagtgcgtcaattattgcttcagactgttaaactgcgacgctttaaccatgtgagcttccacgtgtaatagcatacaggatcctacctgtattggccttgtggatttaacatttatcagccttatttttggagcaatcattggtactaatactgcaggtacatcaggtgcattaactggcgctaaatgtgatggaacaactacttctggaacacgtgcttgcatactttgatgaataatattagcttccattgatacaactggcgacactgaaggctgatgataatttggcgcaacaactattaccatttaggctagtagatactgccgactactatcagcaacaact

SEQ ID NO: 2716 - DNA, 243 bp, Zea mays
  Clone ID: LIB3061-016-Q1-K1-H6
cgcgtcgagctacgatagcgtgaattatagcttcagacttcgaacttgcaacgtctgaagcatatgggcttccacgggcaataccatacaggatcctacatgcattggcagcggggatctaacatttaccagccctgtctctggagcagtcatcagtcctatcactgcaggtacatcaggtgcatctactggcacaaaatatcatggctcaactactactacaactcgtgcttgcaaactttg

SEQ ID NO: 2717 - DNA, 376 bp, Zea mays
  Clone ID: LIB3061-016-Q1-K1-H7
agcgccgcgcttgcgtttccttctcttcgcttccaagatgtcgaagcgagggcgtggaggttcggctggtaacaagttccggatgtcactgggtctaccagtggcagctactgtgaactgtgccgataacactggagccaagaacctgtacatcatttctgtgaagggaatcaagggtcgccttaacaggcttccttctgcctgtgttggtgacatggttatggctaccgtgaagaagggaaagcctgaccttagaaagaaagtgatgccagctgttattgtgaggcagcgcaagccatggcgccgaaaggatggtgtctacatgtactttgaagacaatgctggagtgaatgtgaacccaaaagggagagatgaa

SEQ ID NO: 2718 - DNA, 310 bp, Zea mays
  Clone ID: LIB3061-016-Q1-K1-H9
taacatcaatggctaccaagatattatccctctttgcgcttcttgccctttttgtgagcgcaacaaatgcgttcattattccacaatgctcacttgctcctagtgccattattccacagttcctccctccagttacttcaatgggcttcgaacacccagctgtgcaagcctacaagctacaacaagcgcttgcggcgagcgtcttacaacaaccaattgcccaattacaacaacaatccttggcacatctaaccatacaaaccatcgcaacgcaacagcaacaacaatttctaccagcacttaaccaact

SEQ ID NO: 2719 - DNA, 244 bp, Zea mays
  Clone ID: LIB3061-017-Q1-K1-A1
tgcatttattggcacaaaacatcagggctcaacaactacaacaactcgtgctagcaaaccttgctgcctactctcagcaacagcagttacctttggtgcatttgttggcacaaaacatcagggcacaacaactacaacaactcgtgctagcaaaccttgctgcctactctcagcaacaacagtttctgccattcaaccaactagctgcattgaactctgctgcttatttgcagcaacaacaacc

SEQ ID NO: 2720 - DNA, 444 bp, Zea mays
  Clone ID: LIB3061-017-Q1-K1-A11
accgttcgattcccggtcgagtacgtggcaacgtagaaagcacaatagtgttccaactatggcagccaaaatattttgctgccttatgctccttggtctttctgcaagtgctgctaccgcaaccattttcccacaatgctcacaagctcctatagcttcctttcttccgccatacctatcaccagcggtgtcttcagtatgtgaaaacccaattcttcaaccctacaggatccaacaggcaatcgcagcaggcatcttacctttatcacccttgttcctccaacaaccgtcagccctattacagcagttacctttggtgcatttgttggcacaaaacatcaaggcacaacaactacaacaacttgtgctaggaaaccttgctgcctactctcagcaacagcagtttcttccattcaaccaactggctgcattgaactctgctgc

SEQ ID NO: 2721 - DNA, 399 bp, Zea mays
  Clone ID: LIB3061-017-Q1-K1-A12
ctgaccaggagcactgccttcaggtctgcagtaagctttgtgaaaagtttggaaagcgtggtctggtgaaaccgaaacaagctatgcgcagccttgtcacaccattacgaatgaatgcggggatggacgatgatgtcgctcccaaaaagccgcagcctgaagtattcgatggaccactgctgtcttcgcgcgataaagccaagattgaacggagaaaaagaaaagaggagaggcaaagagaggttcaatatcaaatgcatgttgcggagatggagacacttagggctggaatgcctcctgtttatgtaaaccacagtaatgatggtgggccagctgttagggatatacatatggagaacttcagtgtcactgttggtggtcgtgatctaattcaagaag

SEQ ID NO: 2722 - DNA, 244 bp, Zea mays
  Clone ID: LIB3061-017-Q1-K1-A2
ctagcagctagcacatcaaacaagtggcgacagacaaagatttgtgagggtgatccgcgctgagaagagatggctaagatcgccgcggcggcggcggcggcgctgtgcttcgcggccctggtggccgtggccgtctgccaaggcgaggtcgagcggcagaggctcagggacctgcagtgctggcaggaggtccaggagagcccgctcgacgcgtgccgccaggtcctcgaccggcagctaaccg

SEQ ID NO: 2723 - DNA, 244 bp, Zea mays
  Clone ID: LIB3061-017-Q1-K1-A4
cccgcaccgccaaaccctagtccacagctgcgaggcgaccttgcgacctccgttcctgtgcgctccgactgagttgctgatttgggataatcatgttctctctaagtgaatgaacatgtctgggaatgatgataagccacatgctgctgcagacagaataaaggcagccacgttatcagtgactaagggattgagcagggctcaagctgaatgggctacgactgttgctgcccgcaatgtgaat

SEQ ID NO: 2724 - DNA, 246 bp, Zea mays
  Clone ID: LIB3061-017-Q1-K1-A5
cacgcgtccgccgctccgagcctcagttcgtatccacgcgcgccgccgccgcctcgccggtcgacgctcaccgcgcagccatggcggaacagactgagaaggctttcctcaagcagccaaaggttttcctcagctcaaagaaatctggcaagggtaagaagcctggcaagggcggcaaccgattctggaagagcattggccttggcttcaagactcccagggaagcaatcgaagggacctacattg

SEQ ID NO: 2725 - DNA, 239 bp, Zea mays
  Clone ID: LIB3061-017-Q1-K1-A6
cagcaagatataaagcacaggagtgtaccaacaatggtatccaatttatattgcctccttatgctcctgggaatgtgagaaagttcagagaccgagaccattgacaaggattctgtgcatgatgctactgctgtccttagctcatatgaaatgtcaagatcaacaacacaggctcaggcacctgcagtgcttgcaagagcttcaggatagcctgctagactcgtaccgacagaatctaa

SEQ ID NO: 2726 - DNA, 237 bp, Zea mays
  Clone ID: LIB3061-017-Q1-K1-A7
acaggcgccagctccagagccagagccgttccctgtaaaattgcctgcaaaacaagtgaaggaagtgcctgctcctcaggcagataatgcttccaagattgaagctccttcaaaaggacctgtccagttgcacaaggcaaaagctgctctcgatgctgatgatgattatgaggccgagcccccgaaggagaaggcaaagcctacgggggctgatgtggcgaagttgaaagagatgaa

SEQ ID NO: 2727 - DNA, 407 bp, Zea mays
  Clone ID: LIB3061-016-Q1-K1-H1
ggaattcccggcattgagaccaactagcaacatagaaagcacaatagtgtaccaacaatggcagccaaaatattttgcttccttatgctccttggtctttctgcaagtgttgctaccgcaaccattttcccacaatgctcacaagctcctatagcttcccttcttcccccatacctctcaccagcggtgtcttcaatgtgtgaaaccccaattgttcaaccctacaggatccaacaggcaatcgcaacaggcatcttaccattatcacccttgttcctccaacaaccgtcagccctattacagcagttacctttggtccatttggtggcacaaaacatcaaggcacaacaactacaacaacttgtgctagcaaaccttgctgcatactctcagcaacatcagtttct

SEQ ID NO: 2728 - DNA, 410 bp, Zea mays
  Clone ID: LIB3061-016-Q1-K1-F2
cgagtggagtggtctcatagatagcgctagcagcagtagaaaccgccgccactaggctaggagtggaagcctcgggcccgcggcagcagccatggcggcgttcctggcgcctccctgcacttccttctatcgctcgtccgcattccttaccccctgttcctcgaatcgccggagtacagcgctaagggcggcggccgttcgtgggtcggcggtgacgcgggcccagcggacggtctccgctaggtgggtcccatccaggttagcggtggcgaggccggcggccaggaaggcgtgcctagaggagcttgatacaaccaacatgctccttcgccagcgcatcgtcttcctgggttccccggtggatgatacaagtgctgatctcattatcagccaactcctactattggatg

SEQ ID NO: 2729 - DNA, 433 bp, Zea mays
  Clone ID: LIB3061-016-Q1-K1-F3
caacaagcaacatagaaagtggaatacagtagcaacaatagagcaacaatggcggccaagatattttccatccttatgctccttgctctttctgcatgtgttgctaacgcgaccatttttcctcaatactcacaagctcctatagctgcccttcttcccccataccttccatcaatgaccgcttcagtttgtgaaaacccagcccttcaaccctacaggctccaacaagcaatcgcaacaagcaacttacctttatcacccctgttctttcaacaatcgccagccctatctttggtgcagtcattggtacaaaccatcagggcacaacagctgcaacaactcgtgctaccagtgatcagccaagtagctctggcaaacctttctccctactctcagcaacaacaatttcttccattcaaccaactgtctacac

SEQ ID NO: 2730 - DNA, 396 bp, Zea mays
  Clone ID: LIB3061-016-Q1-K1-F4
gacaaccgtagccctattacagcagtacctttgggcatttgttggcacagagcatcaaggcacatcaactacaacaacttgtgctaggaaaccttgctgcctactctcagcaacagcagtttcttccattcaaccaactggctgcattgaactctgctgcttatttgcaacaacaactaccattcagtcagctagctgctgcctacccccagcaattgcttccattcaaccaactggcagcattgaactctgctgcttatttacaacagcaacagctaccaccattcagccagctagctgatgtgagcccttgtgccttcttgacacaacaacagctgttgccgctctacctgcacgctgcgcctaacgctggcaccctgttacaactgcaacaat

SEQ ID NO: 2731 - DNA, 354 bp, Zea mays
  Clone ID: LIB3061-016-Q1-K1-F5
gcaggctgctttaaccgcacacggtactcatgcgctgagacatgcaaaactccgtgacacgtggtcttactcgattctatagcggagaccagcgttcacccggtgtctgcgggacgattcacacaagtacagtaccaatgcttctgatagtcgcctacgactaagagcacacagataaggaggagcgtgatgcacttattactgatcgggacattctgatcacgcttcactctatataacatggcctgaacatgatgctggaaaacacccgcgttgtcgaccaggacaagtatccccacatgctgtcagtgcggaactgcttcatccggggctcggtggtgcagtacgtgctgc

SEQ ID NO: 2732 - DNA, 364 bp, Zea mays
  Clone ID: LIB3061-016-Q1-K1-F6
gcaggctgcgttaaccgcttacggttttcatggactgagcatcaaaactgtgtgacactggtcttatgcgatcctatagtggagaccagcgtgctttctgtgtctgagtatcgatatcacacaagaagtgggccaatgcttctgatagacttgaacgaatatgagcagacagatctggtggagagtgatacagttgttgctgacctgcacaatctgatcacgtttcactgtctagaagattgcatctacatggcttatgtacacaaactacaagtagaacagtataagcatatacacataactgagacctggtacctgcttgacacaacaaccgatggtgccgttgtacctgcacgctgaggat

SEQ ID NO: 2733 - DNA, 387 bp, Zea mays
  Clone ID: LIB3061-016-Q1-K1-F7
caactagcaacatagaaagcacaatagtgtaccaacaatggcagccaaaatattttgcctccttatgctccttggtctttctgcaagtgctgctacggcgaccattttcccgcaatgctcgcaagctcctatagcttcccttcttcccccgtacctctcaccagcggtgtcttcggtatgtgaaaacccaattcttcaaccctacaggatccaacaggcaatcacagctggcatcttacctttatcacccttgttcctgcaacaatcatcagccctattacatcagttacctttggtgcatttattggcacaaaacatcagggcacaacaactacaacaacttgtgctagcaaaccttgctgcctactctcagcaacagcagtttct

SEQ ID NO: 2734 - DNA, 426 bp, Zea mays
  Clone ID: LIB3061-016-Q1-K1-F8
agattgcccaattgcaacatcaatccttggcacatctaaccctacaaacgattgcaacgcaacaacaacaacaacaacagtttctgccatcactgagccatctagtcgtggtgaaccctgtcacctacttgcaacagtagctgcttgcatccaacccacttgctctggcgaacgtatctgcataccagcaacaacatcagctgtaacagcttatgccagtgcttagtcaactagccatggtgaaccctgctcgtgacctacaactactttcatatagcccgctatgtggtgcgcaatgcacatacgtacctacaacaacagttgatgcaacaaattgtaccagctctgaatcagctagctgtggctaacgctgctgcctacttacaacagttgcattcattgaaccaactggctgtggcaaactct

SEQ ID NO: 2735 - DNA, 407 bp, Zea mays
  Clone ID: LIB3061-016-Q1-K1-F9
tccgtcggaccttttttcctttcctaatcctttaggaaccagggccaccaccgccatggcagccaggatgcttgcattgttcgctctcctagctctttgtgcaagcgccactagtgcgacccatattccagggcacttgccaccagtcatgccattgggtaccatgaacccatgcatgcagtactgcatgatgcaacaggggcttgccagcttgatggcgtgtccgtccctgatgctgcagcaactgttggccttaccgcttcagacgatgccagtgatgatgccacagatgatgacgcctaacatgatgtcaccattgatgatgccgagcatgatgtcaccaatggtcttgccgagcatgatgtcgcaaatgatgatgccacaatgtcactgcgacgccgtctcgc

SEQ ID NO: 2736 - DNA, 344 bp, Zea mays
  Clone ID: LIB3061-016-Q1-K1-G1
gcaatgcagcttttgagtcattggatataatgagggatgaaagcaagaaaaatacattaaagctagttgacatggaatgcagctacttgacagtagatttcttcaggaagcttcctcaggatgttgagaagggtggaaatccaagccactctatttttgatagatataatgactcttatcttagacgaattggacaaactgttctgtcatatgttaatatggtgtgttcgaccttgaggaactccatcccaaaatctattgtttattgtcaagtgcgagaggccaagcgctcgctgctcgatcacttcttcactgaactgggagcaagagagatgaagcagctt

SEQ ID NO: 2737 - DNA, 364 bp, Zea mays
  Clone ID: LIB3061-016-Q1-K1-G10
aactagcaccatagaaagcacattactttaccaacaatggcagccaaaatatggtgggtgcttatgctccttggtatttctgcaagtgctgctactgcgaccattttcccgcaatgctcacaagctcctatagcttcccttcttcccccgtacctctcaccagcggtgtcttcggtatgtgaaaacccaattcttcaaccctacaggatccaacaggcaatcgcagctggcatcttacctttatcacccttgttcctccaacaatcatcagccctattacagcagttacctttggtgcatttattggcacataacatcagggcacaacaactacaacaacttgtgctagcaaaccttgctgcct

SEQ ID NO: 2738 - DNA, 426 bp, Zea mays
  Clone ID: LIB3061-016-Q1-K1-G12
agccttccgatcgaaagctgtggttgataaactggattctttagaggaggataatgggcgtgtaatgagagcagtggcactcgatgtccagtctctgatcaatgagcgggaaaatatcaagattcaggaatcattatgcagctcatattttggtaacagtatcaaggaaatggaaaatgaggttcaaattctaaaagatgggtcaagaaagatgaattctgatatatcatcagtagcaaaggacacgacagaaaaggtcgaagttttgcattcagctatcgagaaggttcaagttatagctgatgaatgggtcaagatgaactatactattaacagaatatggtcattcactaaggagacagagaaaagggtggaggtctatattcaagattaatgaagggctttaagcagacgaagagaaaagtg

SEQ ID NO: 2739 - DNA, 358 bp, Zea mays
  Clone ID: LIB3061-016-Q1-K1-G3
ctggtcagcaactacagtaggtccctgcttcatgaggcggagtggccagggatggtcgacaaggaaactgagcattcgaagacaccgttcatcgcgagagttttcatgagcatttcaggttcctcacagaacacgttccctgacatcgatttcaccgaagaaggaacttctgcagctggaccaagcagtcctaagtcgctccgatgtctggcagagccaagagtggtcaggaggattagggttgtcgccgagaagactccgatccagcacgttcttcaacccccgacgaacggctttttggttggccttaccatcggcatggttcctgtccttgaagaattttgtttcggggctgatg

SEQ ID NO: 2740 - DNA, 243 bp, Zea mays
  Clone ID: LIB3061-016-Q1-K1-G4
ctcgcggcgatggccgacttcgacaacctgatcgagctaccagccacagaccttgaccctgcccccgctgctccagagacggcctcattcgagacccagcttcgttacaagagtcagttacaaatttatgctcagaagcgaggcaaactgctgccttcatatcgtagcattcatggaggtgtctcttcatgcacctatctttaagtcacaagtagccatcgatggtcaaacatttgacagccc

SEQ ID NO: 2741 - DNA, 388 bp, Zea mays
  Clone ID: LIB3061-016-Q1-K1-G8
gcaacatagaaagcacaatagtgtaccaacaatggcagccaaaatattttgcttccttatgctccttggtctttctgcaagtgctgctaccgcaaccattttcccacaatgctcacaagctcctatagcttcctttcttcccccatacctctcaccagcggtgtcttcagtatgtgaaaacccaattcttcaaccctacaggatccaacaggcaatcgcagcaggcatcttacctttatcacccttgttcctccaacaaccgtcagccctattacagcagttacctttggtgcatttgttggcacaaaacatcaaggcacaacaactacaacaacttgtgctaggaaaccttgctggctactctcagcaacagcagtttcttccattc

SEQ ID NO: 2742 - DNA, 429 bp, Zea mays
  Clone ID: LIB3061-016-Q1-K1-G9
agcccagcaggcaccttagaaggtagattccattaccaccattagagcaccattggcgaccgagatattttccctccttatgctccttgctctttctacatgtgttgctaacgcgacaattttccctcaatgctcacaagctcctatagcttcccttcttcccccataccttccatcaattatagcttcagtatgtgaaaacccagctcttcaaccatataggcttcaacaagcaatcgcagcaagcaacatacctttatcgcccttgttgtttcaacaatcaccagccctatctttggtgcagtcattggtacaaaccatcagggcacaacagctgcagcaactcgtgctacctgtgatcaaccaagtagctctggcaaacctttctccctactctcagcaacaacaatttcttccattcaaccaact

SEQ ID NO: 2743 - DNA, 335 bp, Zea mays
  Clone ID: LIB3061-016-Q1-K1-F12
gcaacatagaaagcacaattttgtaccaacaatggcagccaaaatattttgcttccgtatgctccttggtctttctgcaagtgttgctaccgcaaccattttcccacaatgctcacaagctcctatagcttcccttcttcccccatacctctcaccagcggtgtcttcaatgtgtgaaaacccaattgttcaaccctacaggatccaacaggcaatcgcaacaggcatcttaccattatcacccttgttgctccaacaaccgtcagccctattacagcagttacctttggtccatttggtggcacaaaacatcaaggcacaacaactacaacaac

SEQ ID NO: 2744 - DNA, 395 bp, Zea mays
  Clone ID: LIB3061-016-Q1-K1-D4
cgctcactgactgactactgtaataccagagatcgaacaacttggtcctgcagctcaagaagagagttttgtgcatttgggggccgggggcaagagagagagagagagccatggcggcggaccagcagccgcagctgcaggaggagatgaacgacgctgccggcggcggcctcaggctgcctccagggttccgcttccacccgagcgacttcgagattgtcagcttctacctcaccaacaaggtgctcaacacgcgcttcacctgcaccgacatcacggaggccgacctaaacaagattgagccatgggaccttccgagccaggcgaaaatgggcgagaaagagtggtacttcttctaccagaaggaccgcaagtacccgacggggcttgaggcg

SEQ ID NO: 2745 - DNA, 261 bp, Zea mays
  Clone ID: LIB3061-016-Q1-K1-D5
agtctgagcatcgaaactcgctcccagcgacgcgcactagtgacgaactagctgcaatggctaagaagactttagctgttgaagcgcgtcttgtacttacagcgagtgcaatataggcggttattagtgcacaatgctcacacgctcctagtgccattattgcagaggtacttcgaaccggtacttcaatgggctgctgacacctagctgggcgagtcaatatgccacaacctgcgcttgcagcgagcgtcttacaacaac

SEQ ID NO: 2746 - DNA, 293 bp, Zea mays
  Clone ID: LIB3061-016-Q1-K1-D6
agtctgaccaatgtaacactttacattcgacacgcactactgtcgcagtagctacgagggctaagacgattttacatgtcgtagcgcttcttgtacttatagcgagcgcaatatatgcggttatcagtgcacaatgctcacacgctcctagtgcaacaattgcagaactacatcgtacaagctcttgaataggcagctaacgcctagctgggtgagtgcttatgccagatgatgcgcttgatgcaagtgtcttagaccaactattttgcgaattgagaaaagaatcttcggta

SEQ ID NO: 2747 - DNA, 433 bp, Zea mays
  Clone ID: LIB3061-016-Q1-K1-D8
gcattcagaaacacacctagcgaagcgcactagcaacgacctaacaacaatggcttccaagacattatccctccttgcgcttcttgccctttttgtgagtgcaacaaatgcgttcattattccacaatgctcacttgctccgagtgccattattccacagttcctccctccagttacttcaatgggcttcgaacacccagctgtgcaagcctataggctacaacaagcgcttgcggcgagcgtcttagaacaaccaattgcccaattacaacaacaatccttagcacatctaaccatacaaaccatcgcaacgcagcagcaacaagcactgagccacctagccgtggtgaaccctatcgcctacttgcaacaacagctgcttgcatccaacccacttgctttggcaaacgtagctgcataccaaccaccaaca

SEQ ID NO: 2748 - DNA, 428 bp, Zea mays
  Clone ID: LIB3061-016-Q1-K1-D9
tcgcaggccacttaaaaggtagaatccattttcaccaatatagcaccaatggcgaccaaggtatgttccctccttatgctccttgctctttctacatgtgttgctaacgcgacaattttccctcaatgctcacaagctcctatagctttccttcttcccccataccttccatcaattatagcttcagtatgtgaaaacccagctcttcaaccatataggcttcaacaagcaatcgcagcaagcaacatacctttatcgcccttgctgtttcaacaatcaccagccctatctttggtgcagtcattggtacaaaccatcagggcacaacatctgcagcaactcgtgcttcctgtgatcaaccaaattgctctagcaataccttttccctactcttagcaacaacaatttctttcattcaaccaactgtc

SEQ ID NO: 2749 - DNA, 342 bp, Zea mays
  Clone ID: LIB3061-016-Q1-K1-E1
gtgcagcccgacggcgacgccctactgctcgcctcagtgccagtcgttgcggcagcagtgttgccagcagctcaggcaggtggagccgcagcaccggtaccaggcgatcttcggcttggtcctccagtccatcctgcagcagcagccgcaaagcggccaggtcgcggggctgttggcggcgcagatagcgcagcaactgacggcgatgtgcggcctgcagcagccgactccatgcccctacgctgctgccggcggtgtcccccactgaagaaactatgtgctgtagtatagccgctggctagctagctagttgagtcatttagcggcgatgattgagtaata

SEQ ID NO: 2750 - DNA, 207 bp, Zea mays
  Clone ID: LIB3061-016-Q1-K1-E10
tgcacgctgcgcctaacgctggcaccctcttacaactgcaacaattgctgccattcaaccaacttggtttgacaaacccaacagcgttctaccaacaacccatcattggtggtgccctcttttagattgcttatgagttatacttcaataatgaagttttttggatgatgtttgtggcttcccagaaataagaaagtacatttctag

SEQ ID NO: 2751 - DNA, 370 bp, Zea mays
  Clone ID: LIB3061-016-Q1-K1-E11
tcggaacaattaaggcattgcaaaaggccgtgaagccttccttccccaactccaagaagggctggcccccttgcttcaacgccgccaagacatggatggcgattcctgctccaaagcgaggagagatcgttaggcaaatcggtgatgcactgagagcaaagctccatcaccttggcaggcttgtgtcacttgagatggggaaaattcttcctgaagggatcggtgaggttcaggaaatcatcgacatgtgtgattatgctgtggggctaagtcgccaactaaatggatccattataccatctgaacgaccaaaccatatgatgatggaagtgtggaatccccttggagttgtgggtggtataacggcatt

SEQ ID NO: 2752 - DNA, 322 bp, Zea mays
  Clone ID: LIB3061-016-Q1-K1-E12
cttgcgaccgtccctcgaccgtgtcgcgttgcattgtacgatccaaagctctgtatgctagcaggtcgcagccatggcgaagaactacccgaccgtgagcgcctagtacagcgaggctgtggacaaggccaggcgcatgctccgagccctcatagccgagaagagctgcgccccgctcatgctccgactcgcgtggcactccgcggggacgttcgacgtgtaagcgaggaccggcggtgcattcggtacgatgaatgatcagacggaattggctcacggcgctaacgcggagctggacatcgaggtgcgtgtgctcgagccc

SEQ ID NO: 2753 - DNA, 362 bp, Zea mays
  Clone ID: LIB3061-016-Q1-K1-E2
ccattgcacctgcctgctcgagtcgctttcaactcatggccatggagtccgcctcagcctctgtcttccactcggttgctcctctgctggctacgcagagccttcactagccatggccgcgccctctctggtaccgagctcgcccataccgagctccctcagcgtcccgtccatggtcctcctccactcgccctggccatgcttgcctgccgcgccacactgagtttctggagtctggcacggtgaactggggagagaagcagccaagcagctccctcacgccgcggcttcctccttcagctcggcgctcatctccctctctgctcggaccgtgcccagctccgcgcgtcgcagttcgcccc

SEQ ID NO: 2754 - DNA, 377 bp, Zea mays
  Clone ID: LIB3061-016-Q1-K1-E3
gagacacagaaagtgaagagcactatctgcgaactgacaccaatgactaccaagatgttaatgctgcttgcactgattgcactatgtgtgagcgcaacaaatgcgctcattattgcacaatgctcacttgctactagtgtcattatatcacagattgctgcaccagttacttcgatgggctacgaacacctagatgtgcaggccaacatgcagcaacgagcgattgcggcgagcgtgttacaacaactgatagtgcaattgcaacaagaattcttgccgcatctaacaatacaagccatgacaacgcaacagatcagcagttgctaccagcactgatccagctagccatggtgaaccctgtctgctacttgcaagag

SEQ ID NO: 2755 - DNA, 392 bp, Zea mays
  Clone ID: LIB3061-016-Q1-K1-E4
gaagaccgaagaccgagccgtgcggtggctcgtgacgggaacgggacaggacctcagaatctcagatccttcctgcccgcccgcccgtgcccgtcgacgcgtcgttcttgccggccgcgccccacctacgccctctcctactacagggggatcggatacgccacaggctgcgcgatggtgctgtgggtcttcggctaccgctccctcatctggaaccccggcttcgacttcgacgacacaatgctcggcttcatcaagggctacaagcgcacctttaatctcgcttgcattgaccacagatgcacaccggagcatgcggcgaggacctgcacgcttgaaaccgacgacgaggccatatgctggggaattgcatattgtgtcaagggtggtcc

SEQ ID NO: 2756 - DNA, 253 bp, Zea mays
  Clone ID: LIB3061-016-Q1-K1-E5
atcggtgacgactgcacagagcaacactcacacccgtgcccaaatgcattgactccaatcacgtccgaacatatcgacgaccatggatgtataccggcccgaacgcggcgacgactttaccaagactgacaccaactgcaaggaccaatccatcgaccgcaaggtcgacgtcatcgaggaggacgcgctagaacaactactatgtaagttatgcgaatgtgaacgggacactgacaaggctgtggtaatgctg

SEQ ID NO: 2757 - DNA, 323 bp, Zea mays
  Clone ID: LIB3061-016-Q1-K1-E6
aatgccacgaatgcacaatgcagcttcacagccgtgtggtaatgcatagactccagatcacgtctgatacaactaaggagctggcaagtcttgcagtaacattgccatgatgatcctatgtatattgccccgcactacaatgaccaagctatcttaagcatggttcaattgatattctaggtcgagcatgaactacttcgatgtgagtcacagactagctatctggagtctgacacggcgaactcaatagagacacaagcacacaacttactaacaatgtgggtctcgtattaagcatactactaatctaactcattgatcag

SEQ ID NO: 2758 - DNA, 315 bp, Zea mays
  Clone ID: LIB3061-016-Q1-K1-E7
gaagaccgaagaccgagccttgcggtgttctcgcacgggaacgggacaggacctcgggatctgagatccttgctgtccgcccgaccgtgcccgtcgacgcgtcgttcttgccagccgagcctgatctacgccctcttctcctacagggggatcggatacgcgacaggctgcgcgatggagctgggggtcttcggataccgctgcctgatctggaaccccggcttcgacttcgacgacgaaatgctcggcttgatcaagggctactacgtgcacctttaatctcgcttgcattgaccacagacgcacaccggagca

SEQ ID NO: 2759 - DNA, 401 bp, Zea mays
  Clone ID: LIB3061-016-Q1-K1-E8
gatcaaggagagatgaaatggagtttgatggtgctgatttgaacacccatggtacaaaagataagaaaagagataaagaaaaagaaaagaaacataagagacgtcaccatgacacagatgatgtaagctctgagagggatgataaagacgatgctaagaagtctcggaggcatagcagcagtgatcgcaagaaatctaggaagcatgcacatggctcagattcagatagtgaaaaccggcacaaaagacataaaaaggaccgagatagtagtagaagaaatggagcacatgagctggaagatggtgaacttggagaggatggggagatctattagtctttctgtttgctaccgagattcattcatctccagtcttgttacacatggatttattgccatctc

SEQ ID NO: 2760 - DNA, 405 bp, Zea mays
  Clone ID: LIB3061-016-Q1-K1-E9
cgggttttggaaaccccaatccttaacccttccaggatccaccaggcaatcacagctggcatggaaccttaatcacccttgttcctccaacaatcatcagccctattacatcagttacctttggtgcatttattggcacaaaacatcagggcacaacaactacaacaacttgtgctagcaaaccttgctgcctactctcagcaacagcagtttcttccattcaaccaactagctgcattgaactctgcttcttatttgcaacaacaacaactaccattcaaccagctacctgctgcctacccccagcaatttcttccattcaaccaactggcagcattgaactctcctgcttatttacagcagcaacaactactaccattcagccagctagcttgtgtgagccct

SEQ ID NO: 2761 - DNA, 340 bp, Zea mays
  Clone ID: LIB3061-016-Q1-K1-F1
cccacgcgtccgaaagcacaatagtgtaccaacaatggcagccaaaatattttgcctgcttatgctccttggtctttctgcaagtgctgctacggcgaccattttcccgcaatgctcgcaagctcctatagcttcccttcttcccccgtacctctcaccagcggtgtcttcggtatgtgaaaacccaattcttcaaccctacaggatccaacaggcaatcacagctggcatcttacctttatcacccttgttcctccaacaatcatcagccctattacatcagttacctttggtgcatttattggcacaaaacatcaaggcacaacaactacaacaactt

SEQ ID NO: 2762 - DNA, 382 bp, Zea mays
  Clone ID: LIB3061-016-Q1-K1-D3
agctgcagagccggcgtgaccagcgaggcgagatcgtccgcgtggagccggagcacggctttcaccagctgaatccgtcgccgtcgtcgtcgtcgttttcgttcccatcgtcacaaggccagtaccaaacgtgccagcgcgacgtcgacaggcacaacgtctgcgccatggaggtgaggcacagcgtcgaacggctggaccaggccgacgcctacagccctggggctgggaggatcacacgcctcaccagccacaagttccccgtcctcaacctcgtacagatgagcgcggtgcgggtagacctgtaccaggacgccatcatgtcgccgttctggaacttcaacgcccacagcgccatgtacggcatcaggggcagtgcaag

SEQ ID NO: 2763 - DNA, 336 bp, Zea mays
  Clone ID: LIB3061-035-Q1-K1-C7
acggaccagcatttgaacttgtaacacaatgtttttcagctgtctgctgtactatctgagctgcctatacccatcttagcacataacattactaaagctttaatgaatatgttgcacaaacggactcatctttacaagatctgtatcatgaactattatgagatgctgaattgattgactaagaatttatattagctgacttcacagttcttaaagacaacactgcaagaatgcgtgccaacctgcattgctactctctatgcaactggcatataaatttgggtgttaacatgtagataatatagaaactgcgattaacattgcatatgcatgcat

SEQ ID NO: 2764 - DNA, 438 bp, Zea mays
  Clone ID: LIB3061-035-Q1-K1-C8
gacagcacaatagtgttccaacaatggccgccaaaatatttcgcttacttatgcggctggacctatctgcaagtgctgctaccgcaaccatttatccacaatgctcacaagctcctatagctacctttattaccacatacctctcaccagcagcgtattcagcatgcgaaaacccagtgcttcaaccctacaggatccaacaggcacacgcagcaagcatcttacctttatcacccttgttcctccagacaacacgaacgcctattacagcagtacacctcaggtgcatgctgaggcacaaaacatcatggcacaacaactacagcagcttgtgctacgaaaccttgcagcctactatcagcaacagtagcatctcacattcaaccaactggctgcattgaacactgctgactatttgcaacaacaactaccattcag

SEQ ID NO: 2765 - DNA, 421 bp, Zea mays
  Clone ID: LIB3061-035-Q1-K1-D1
aaaaagacaagcatagaacatctagagcaatttggttctgctggctagcgtactctatgggtggcctatcgggatcttagcaggagcaatacgaaagcttgaatgaaaagtttgtacaagcatagtcatctttacgagatcgtgataagaagctcgtgaggtgctgattgattgaaaaagaccttatattaattgggtgcacagctatagaggacaaactgcaagaaggcgtgccaacctgcattgaaactctctctgcagctggcataaaaatttgggtgttaacgggagataagatggaaacagcaattaacattgcatatgcatgcagcttggtaaacaatgacaccaaacagttcatcattagttcagagacagacactattagggaggctgaagaaccggttacaagtttagttag

SEQ ID NO: 2766 - DNA, 428 bp, Zea mays
  unsure (1)..(428): unsure at all n locations; Clone ID: LIB3061-035-Q1-K1-D10
cggacgcgtgggcggctgccagccaccgccgccggttcatctaccgccgccggtgcatgtgccacctccggttcacctgccacctccggtgcatctcccaccgccggtccacctgccgccgccggtccacctgccaccgccggtccatgtgccgccgccggttcatctgccgccgccaccatgccactaccctactcaaccgccccggcctcagcctcatccccagccacacccatgcccgtgccaacagccgcatccaagcccgtgccagctgcagggaacctgcggcgttggcagcaccccgatcctgggccagtgcgtcgagtttctgaggcatcagtgcagcccgacggcgacgccctactgctcgcctcagtgccagtcgttgcggcagcagtggtgccagcagctcangcangtggagccgc

SEQ ID NO: 2767 - DNA, 427 bp, Zea mays
  Clone ID: LIB3061-035-Q1-K1-D11
cccacgcgtccggcgatttcgatctcgcagccacctttttttttgttctgttgtgtatctagtagttggaggagatatgcagtttgcacttgcattggacacgaactcaggtcctcaccagataagatcttgtgagggtgatgggattgacaggttggaaaaattaagtattgggggcagaaagcaggagaaagctttgagaaataggtgctttggtggtagagttgctgcaactacacaatgtattcttacctcagatgcttgtcctgaaactcttcattctcaaacacagtcctctaggaaaaattatgctgatgcaaaccgtgtatctgctatcattttggggcggaggacctggatctaagttttttcctttgacaagcccaaaagctacgcctgctgtacctgttggaggatgttccaggct

SEQ ID NO: 2768 - DNA, 430 bp, Zea mays
  unsure (1)..(430): unsure at all n locations; Clone ID: LIB3061-035-Q1-K1-D12
cccacgcgtccggcaacgagccatggcctccggtgggccgaaacccaaactggcctacgatcatcttgtacgtgagggacgtggagaaggccgcctccttctacgacgccgccttcggctacaccgtccgccgcctcgaccagtcccgcaagtgggcggagctggagagcggggcgacgaccatcgcgttcacgccgctgcaccagcgggagacggacgagctgtcgggggcggtgcagctgccggactcgtcggccgccgggaggggctccgtggaggtctgcttcgcctacgcggacgtcgacgcggcgtacaagcgcgccgtggacagcggggcggtggccgtgagcgcgccggaggacaagccctggggccagaagtncggcttcgtgcgggacatggacggcaacatcgtgcgcatcgcgagcta

SEQ ID NO: 2769 - DNA, 437 bp, Zea mays
  unsure (1)..(437): unsure at all n locations; Clone ID: LIB3061-035-Q1-K1-D2
tccacatgttctgtgcgcgtaggccaggcttcctgctgtcaacattgacggccctcggcagcctaggcctcgacatcaaccaggcggtcatcagctgcttcaatggctttgcaatggacgtgttccgagctgatcagtgcgcggatggtcctggaatggtgcctgaagaaattaaggccgtgctgatgcacaccgtcggcctccacaacgcaatgtagccggtccgaaaaggggccaccgccaggatgacgacgatcctnctnctttctactaagggcttcggttcggaagcggcataagattaagctgtggtggccattggttatctggggcaagtgatgaatcntaagatgatgaggctcgccatctcgggcatgacgcatgagtgatgatgtaactatgggattctttcatntcttctcattagcctaatgtcg

SEQ ID NO: 2770 - DNA, 432 bp, Zea mays
  unsure (1)..(432): unsure at all n locations; Clone ID: LIB3061-035-Q1-K1-D3
agaaccttaggcctgatccgtcgggaggaatttcttttggaatggtcccgttcgaaacgttggttgcccaagaaaccgaggatccaggatgagtttcctgttcgggaagcggaaaacgcccgccgagctgttaacagaaaacaggagaatgctggatcgatccatcaaggaaattgagcgagagaggcaaggatcgcaggcccaggagaaaagctcatcactgagatcaagagaacagctacagaaggccagatgggagctgtcatagtaatggccaaagaccttattcgtacccggcatcagataacaaagttctaccaactcanatctcagcttccaggagtttctcttagagttcagacactaaaatcaactcaagctatgggtgatgccatgaacggcgttacaaaggcaatggctcanatgaacagg

SEQ ID NO: 2771 - DNA, 316 bp, Zea mays
  Clone ID: LIB3061-035-Q1-K1-D4
tctagatcgccgtggtcccccaattgagtaacctttgtccggaatattacccgttgcctggctggttagttaagccattaaccgccaataatggattattaaggggtaacgcttaaccatgggtggcatggtaagtgtaagcaatgacctgatggaccaatggaattgaaaagttaaacaaaaaaagcaaagattagaaggacccacaaaaaaaagctgatcactgagatcaacagaacaactacagttagacaaacgggacctgtccaaggtactggacactgaccttattcatacgcggtaataagataacaaa

SEQ ID NO: 2772 - DNA, 431 bp, Zea mays
  Clone ID: LIB3061-035-Q1-K1-D5
cccggcgttaggctcggcacaacaacatccaaacaagcaggactccgtctctgtcaggagagattggggtatggggtggaggtggagggtcggcgcaggacatcacgacgacggagccaccacagcgtctgcacagcctctccgttcgaactgggtttgccgtcgactccatcgagttcacgtatactgatagaggtggccagaggcgcactgctgggcgatggggtggacttggcggcaaccttcgaacgatcgatcttggcgacgccgaggttgtcagggaggtctcaggaacatacggcatgtttgaaggcgccaccacgctgacctagatcagaattctcaccagcagcagaacctgtgggccatgggggatcgaggacgggacacgtgtctgcatcaccgcgccgatcggcagcagcatcgtgggg

SEQ ID NO: 2773 - DNA, 437 bp, Zea mays
  unsure (1)..(437): unsure at all n locations; Clone ID: LIB3061-035-Q1-K1-D6
attgatacgaactagcaacatacatagtgaagtacactagcaacatcttagcaccaatggcagccaagatttttgccatccttgccctccttgctctttcagcaagcgttgctaccgcgactattattccacaatgctcacaacaatacctctctccggtgacagccgcgagatttgaatacccaactatacaatcctacaggctacaagaggccatcgcagcaagcatcttacggtcgttagcattgaccgtccaacaaccatatgccctatcgcaacaaccatccttaatgaatctatatctgcaaagaatcgcagcacaacaactacaacaacagttgcttccaacaatcaatcaagtagttgcagcgaaccttgctgctgacctncagcaacaacaattctttcattcaatcaactagctggggtgaaccctg

SEQ ID NO: 2774 - DNA, 435 bp, Zea mays
  Clone ID: LIB3061-035-Q1-K1-D7
gaggatcctggtcgcgggaacgggtggtggactacgctgtcaaagtgcgcgtgaggccggacgggaggggcgtggagacggccaacgtgaagatgtccatgaatccattctgcgagatcgccgttgaggaggcgctgcggctccgggaggccggcgtcgccgctgaggtcgtcgacgccaccgtatgccctgcccagtccgtcgacacgctccgcaccgcactcgtcatgggcgccgatcgcgccgtccacgtgctccacgacccggaccctgcgcggcccctactacctatcgccgttgccaagatccttcgcgccgtcgcgctccaggagaagcccggcctcgtcatcctcggcaagcaggcaatagatgatgattgcaaccaaactggacacatgttagctggattgctcaagtggctcacaagaacctttg

SEQ ID NO: 2775 - DNA, 382 bp, Zea mays
  unsure (1)..(382): unsure at all n locations; Clone ID: LIB3061-035-Q1-K1-D8
gtaaagggtcaaaaaaggcatatgtgcatgaatacaacatgtagtgcgaacatataggccatgtgcttactccactctctcgtcacggcctcacactgcagaggcttggacggacgggatggacatggcgcggtacgagtcatgctaccggcactggatcgccgggcaggaggcaggcctcgccgagctcgaggcggcgtcggccaatgccgccgcgggccgggcaacggacgccgagctgcggaccgtggtggagcggtgcatgctcggctaccaggactacgccacccgcaggcgcgcgctgtcgcgggaggacggcgtcgccttcttcgccccgccctggtgcaccgncttcgagaactccgtgctctggctcggggct

SEQ ID NO: 2776 - DNA, 435 bp, Zea mays
  Clone ID: LIB3061-035-Q1-K1-D9
caacaagcaacatagaaagtggaatacagtagcaacaatagagcaacaatggcggccaggatgttttccatccttatgctccttgctctttctgcatgtgttgctaacgcgaccatttttcctcaatactcacaagctcctatagctgcccttcttcccccataccttccatcaatgaccgcttcagtttgtgaaaacccagcccttcaaccctacaggctccaacaagcaatcgcaacaagcaacttacctttatcacccctgttctttcaacaatcgccagccctatctttggtgcagtcattggtacaaaccatcagggcacaacagctgcaacaactcgtgctaccagtgatcagccaagtagctctggcaaacctttctccctactctcagcaacaacaatttcttccattcaaccaactgtctacactg

SEQ ID NO: 2777 - DNA, 442 bp, Zea mays
  Clone ID: LIB3061-035-Q1-K1-E1
catcaatcatcattcatcttagtagtataggcaccaaatcaaatctgcaacatcaattgtctaactccaaaaaccatgaagctggtgcttgtggttcttgctttcattgctttagtatcaagtgtttcttgtacacagacaggcggctgcagctgtggtcaacaacaaagccatgagcagcaacatcatccacaacaacatcatccacaaaaacaacaacatcaaccaccaccacaacatcaccagcagcagcaacaccaacaacaacaagttcacatgcaaccacaaaaacatcagcaacaacaagaagttcatgttcaacaacaacaacaacaaccgcagcaccaacaacaacaacaacaacaacagcaccaacaacaacatcaatgtgaaggccaacaacaacatcaccaacaatcacaaggccatgtgcaacaacacg

SEQ ID NO: 2778 - DNA, 339 bp, Zea mays
  Clone ID: LIB3061-035-Q1-K1-C6
ttccattcaaccaactggcagcattgaactctcctgcttatttacagcagcaacgacggctaccattcagccagctagctggtgtgagccctgctaccttcttgacacaaccacagttgttgccgttctaccagcacgctgcgcctaacgctggcaccctcttacaactgcaacaattgctgccattcaaccaacttgctttgacaaacctagcagtgttctaccaacaacccatcattggtggtgccctcttttagatttcttatgagttatagttcaataataaagttttttgtctgatgtttgtggcttcccagaaataagaaagtacatttctag

SEQ ID NO: 2779 - DNA, 95 bp, Zea mays
  Clone ID: LIB3061-035-Q1-K1-A9
cttttagatttcttatgagttatagttcaataataaagttttttgtctgatgtttgtggcttcccagaaataagagagtacatttctagattctt

SEQ ID NO: 2780 - DNA, 440 bp, Zea mays
  Clone ID: LIB3061-035-Q1-K1-B1
gacgaactagcaacatagaaagcacaattttgtaccaacaatggcagccaaaatatttgggtgccttatgctccttgggctttctgcaagtggtgctaccggaaccatttttccacaatggttacaagcttctatagctttccttctttccccataccttttaacaacgggggcttcaatgggggaaaacccaattggtcaacccttacaggtcccaccaggcatcggaaccaggcattctaccattataacccttgttcctccaacaaccgtcagccctattacagcagttacctttggtccatttggtggcacaaaacatcagggcacaacaactacaacaacttgtgctagcaaaccttgctgcatactctcagcaacatcagtttcttccattcaaccaactggctgcattgaactctgctgcttatttgcaacaa

SEQ ID NO: 2781 - DNA, 380 bp, Zea mays
  Clone ID: LIB3061-035-Q1-K1-B11
cagctagcagcatacaaagcacactagtgtaccagcactggctgccgggccatattgcctgcatatgctcctcggtctaatctgcaagtgctgctacagcgaccatgttcccgcagtgcatcgcaagctcctatagctgcccttcgtgccccgtacctctcaccagcggagtcgttatctatgtgaaaacccagttgttgaaccctacaggatccatcacgcggtcacagctgtgcatattacctttatcacccttgttgctccgacaatcatcagtcctattacatcagttgcctttggtgcattgattggctcatatcatcaaggcacagcaactacgacatcttgtgctagcaaaccttgctgcctactgtcaagaa

SEQ ID NO: 2782 - DNA, 321 bp, Zea mays
  Clone ID: LIB3061-035-Q1-K1-B2
caggatataaaggcccattatggaccaatcatggccagctaaataatttggcctcttagggttccttgtccttcttgcagttcctgtaacggcaaccattttcccccattgctaacaagctccaaaagctcccatagttcccctgtccttttaataactgtgaccttcggtttgtgaaaccccagttttcaacccttccggatcctacaagctatcgcaagttgcatcttaacgtttataaccattgtcatcctacaatcatcaaccctattacagcctattactttggtgcacttattggcacaaaacatcacggcacat

SEQ ID NO: 2783 - DNA, 301 bp, Zea mays
  Clone ID: LIB3061-035-Q1-K1-B3
gtccgcgaattccatatgcaggacaaggttgcagggcggccttccaggaagttctgggggggggtgtccagggttgaaggaaacgtgaacccttcaaccgggcttgcaaggagggaagtttcatttcatttggggccggattggtttaatctgaatctgatggagcaatttggaatgctgaactattgtgcctgatccaaatgaataaggtgtaatgactcgtcttttcaattactgaaactgaacatgtttgaatttatctggtcacttgtatggtaaaatagcagcgttgtcaattgtc

SEQ ID NO: 2784 - DNA, 380 bp, Zea mays
  Clone ID: LIB3061-035-Q1-K1-B4
agaaagcacaatagtgtaccaacaatggctgccaaaatattttgccttcttatgcttcgtgggatttctgcaagtgctggtaccgggaacatttttccgcaatggttacaagcttctattgctttccttttttccccggaccttttaacaacggggtcttcgggatgtgaaaacccaattcttcaaacctacagggtcccacaggcaatcgcagctggcatcttaactttatcacccttggtccttccacaatcatcagccctattacagcagttacctttggtgcatttattggcacaaaacatcagggcacaacaactacaacaacttgtgctagcaaaccttgctgcctactctcagcaacagcagtttcttccatt

SEQ ID NO: 2785 - DNA, 434 bp, Zea mays
  Clone ID: LIB3061-035-Q1-K1-B5
ggggcattgaactctgctacttatttgtaacaacaactgctaccattcaaccaggtagctgtagtctaccagcagcaattgcttccattaaagcaactagcaatattgaactatcctgcttatctacaggagctacaactactaccattcaaccagctagctcgatgtgagccctgcttcctatctgacacaaccacagtagttggcgttctaccagcacgttgcgcctatacgctgcaccctcttacaagtggaacaattgctgccattcaaccaactcgctctgtcacacccattcaacgttttaccatcatcccatcattggtcggcgcactactattacattcagctatgatgtatagagcaatgctacagtcttgaatctgatgcatgtggcttcccagtaatagcacggtgcatttatagatggtaaa

SEQ ID NO: 2786 - DNA, 437 bp, Zea mays
  unsure (1)..(437): unsure at all n locations; Clone ID: LIB3061-035-Q1-K1-B6
ctgggaagaaggatagccacggatgctatcaccacgccggtagtgaacacgtcggcctactggttcaacaactcgcaagagctaatcgactttaaggaggggaggcatgctagcttcgagtatgggaggtatgggaacccgaccacggaggcattagagaagaagatgagcgcactggagaaagcagagtccaccgtgtttgtggcgtcagggatgtatgcagctgtggctatgctcagcgcacttgtccctgctggtgggcacattgtgaccaccacggattgctaccgcaagacaaggatttacatggaaaatgagctccctaagaggggaatttcgatgactgtcattaggcctgctgacatggatgctctccaaaatgcgttggacaacaataatgtatctctnttcttcacggagactcctacaaatccatt

SEQ ID NO: 2787 - DNA, 437 bp, Zea mays
  Clone ID: LIB3061-035-Q1-K1-B7
attttgagcattcagaaacacaccaagcgaagcgcactagcaacgacctaacaacaatggctaccaagatattagccctccttgcgcttcttgccctttttgtgagcgcaacaaatgcgttcattattccacaatgctcacttgctcctagtgccattattccacagttcctcccaccagttacttcaatgggcttcgaacacctagctgtgcaagccaacatgcaacaacaagcgcttgcggcgagcgtcttacaacaaccaattgcccaattgcaacaacaatccttgccacatctaacaatacaagccatcacaacgcaacagcaacaacagttcctaccagcactgagccacctagccatggtgaaccctgccgcctacttgcaagagcagctgcttgcatccaacccacttgctctggcgaacgtagttgca

SEQ ID NO: 2788 - DNA, 375 bp, Zea mays
  Clone ID: LIB3061-035-Q1-K1-C1
gcgttcggagaactgaaaagtgaaggtcttgctttgtttaggcccaccagcctcatctttttgggtgcggttacccttcctgaagaggccaatccttccttctataagcaagtatggcgcatgcacaccatactgatcttcagagactatatgattaatgtcccacagaaccttgaagcttgccagaagatagtctatttcagcaatccattgtttatgaacataccaacgtcaacccaggttgacaagatgatgacttccagtgtcacgactccttaatactatgatgaggtgttttacactacggaccatctctataaagagaatgcagctggcatctcaatattatactatctaaaacatatttacccagat

SEQ ID NO: 2789 - DNA, 359 bp, Zea mays
  Clone ID: LIB3061-035-Q1-K1-C12
ctgcaacagattgtaccagctctgactcagctagctgtggcaaaccctgctgcctacgtgcggcagctgcttccattcaaccaactgactgtgtcgaactctgctgcgtacctacaacagcgacaacagttacttaatccactagcagtgcctaacccattggtcactgccttcctacagcagcaacaattgctaccatacagccagttctctttgatgaaccctgccttgtcgtggcagcaacccatcgttggaggtgccatcttttagattacatatgagatgtaatcgataatggtgccctcataccggcatgtgtttcctagaaataatcaatatattgattgacatttatctcg

SEQ ID NO: 2790 - DNA, 425 bp, Zea mays
  unsure (1)..(425): unsure at all n locations; Clone ID: LIB3061-035-Q1-K1-C2
ccaactagcaacataaaaaggcccaatattgtcccaccattgccggttaaaaaatttggcctgctaatcctcctgggcctttctgcaagtcctgttacggcaaccattttccaacaatgctaacaagctcctatagcttcccttcttcccccgtacctttcaccaacggtgtcttcggatgtgaaacccattcttaacctcagaccacaggcatccactgcatctaccttatcacccttgttcctccaacaatcatcagccctattacagcagttacctttgtgcatttattggcacaaaacatcanggcacaacaactacaacaacttgtgctagcaaaccttgctgcctactctcagcaacagcaagttcttccattcaaccaactagctgcatngaactctgctttctatttgcaacaacaa

SEQ ID NO: 2791 - DNA, 404 bp, Zea mays
  unsure (1)..(404): unsure at all n locations; Clone ID: LIB3061-035-Q1-K1-C4
ctcggaaaaccaagccgccgccgaatctgcctcccaggtaagcagtaccgtccacccgggccgccgccatgaagcgcaacccccgcgtcacgagctcccgccggaagtgccgcaaggcgcacttcacggccccgtcctccgtccgccgcgtgctcatgtccgcggcgctatcgacggagctccgccacaagtacaatgtgcgttccatcccgatccgcaaggacgacgaggtgcaggtcgtgcgcggcacctacaagggccgtgagggcaaagtggtgcaggtgtaccgncgtcgctgggtcatccacgttgagcggatcacccgcgagaaggtgaacggctccaccgtgaacgtgggcattcacccttccaaggtcatggttacaaagctgaagcttgacaag

SEQ ID NO: 2792 - DNA, 425 bp, Zea mays
  Clone ID: LIB3061-035-Q1-K1-C5
cagagttgttgtgttgtccttccgcaatttgctggcaaagggtgcatttgctggccagatgatcgatcttggattgccacaaatggtacaaaacttgaaagctcaagcatggactgatgaggatctgttagatgctctgaatcaactagaggtgggactcaaagaaaaccttaagaagttgagttcctttgataagtacaaacagcaagttcttcttggtcatctggactggtctccaatgcacaaagatccaagtttctggcgtgagaacattaacaattttgaagaaaatgatttccagattctgcgagttctcatgacaatcattgacacatcaagtgacaccaccgctcttgccgtggcctgctacgacctctcacaattccttcagtaccatccatctggccgaatcgtggtggcagacc

SEQ ID NO: 2793 - DNA, 372 bp, Zea mays
  Clone ID: LIB3061-035-Q1-K1-A8
tgagaagttctctgttcactctttgggactgccgtctcttctctctgatccaagtgcgaagacacctgaagaagctcttgtgcatatctttggggaagccaagagaacaaccccgtccattctatacatacctcagttccatctttggtgggatacggcacacgaacaactaagggctgtgttgttgactctgttgaacgatttgccctccaaccttccagttttattgcttggaacatcatcagtggtttttactgaccttgaagaagagtgtgcttccatattctcttctcgcaatgtgtatcaagcggatcaaccaagttttgacgatagattgaggtacttcagtatattgcttgagtcattgctctc

SEQ ID NO: 2794 - DNA, 394 bp, Zea mays
  Clone ID: LIB3061-034-Q1-K1-H10
cgaccattttcccgcaatgctcacaagctcctatagcttcccttcttccccggtaccgctcaccagcggtgtcttcggtatgtgaaaacccaattcttcaaccctacaggatccaacaggcaatcgcagctggcatcttacctttatcacccttgttcctccaacaatcatcagccctattacagcagttacctttggtgcatttattggcacaaaacatcagggcacaacaactacaacaacttgtgctagcaaaccttgctgcctactctcagcaacagcagtttcttccattcaaccaactagctgcattgaactctgcttcttatttgcaacaacaacaactaccattcagccagctacctgttgcctacccccaacaatttcttgcatt

SEQ ID NO: 2795 - DNA, 420 bp, Zea mays
  unsure (1)..(420): unsure at all n locations; Clone ID: LIB3061-034-Q1-K1-H11
agaacccgatcgacaccatgagggtgttgctcgttgccctcgctctcctggctctggctgcgagcgccacctgcacgcatacaagcggcggctgcggctgccagccaccgccgccggttcatctaccgccgccggtgcatctgccacctccggttcacctgccacctccggtgcatctcccaccgccggtccacctgccgccgccggtccacctgccaccgccggtccatgtgccgccgccggttcatctgccgccgncaccatgccactaccctactcaaccgccccggcctcagcctcatccccagccacacccatgcccgtgccaacagccgcatccaagcccgtgccagctgcagggaacctgcggcgttggcagcaccccgatcctgggccagtgcgtcgagttcctgaagcatc

SEQ ID NO: 2796 - DNA, 388 bp, Zea mays
  Clone ID: LIB3061-034-Q1-K1-H12
acacgcatcacatgtagatgtagctagcttagctatgctcgcgtaaaaaccctagcggcagtcacacagcaagttgcatgtgtctcgggggcaacaagcaggcggccgaggcagcaggccgcatggagaaccaccggcgccattcgggctctccggcgagcagcaggcggcggcggctgcactacctcctcgccctggctgccgactacctcaggtacctcttcatgaagcggcgccggctcctgcacaaggtggcgcggagaacgctcgcgctcgtccaccgccacggcctgccgcagcgcggcggcaggaaccacgaccagtggcagtggcctcatcgcgcgctggcggagcacgagttctcgtgcgccgacagccccagccccgc

SEQ ID NO: 2797 - DNA, 405 bp, Zea mays
  Clone ID: LIB3061-034-Q1-K1-H2
caaaaagggcaagaagcgcaacaaatgcgttcattattccacaatgctcacttgctcgtagtgccattataccacagttcctccgaccagttacttcaatgggcttcgaacacctagctgtgcaagcctacaggctacaacaagcgcttgcggcgagcgtcttacaacaaccaattaaccaattgcaacaacaatccttggcacatctaaccatacaaaccatcgcaacacaacagcaacaacagttcctaccagcactgagccaactagatgtggtgaaccctgtcgcctacttgcaacagcaggtgcttgcatccaacccacttgctctggcaaacgtagctgcataccaacaacaacaacaattgcaacagtttctgccagcgctcagtcaactagccatgg

SEQ ID NO: 2798 - DNA, 409 bp, Zea mays
  Clone ID: LIB3061-034-Q1-K1-H3
gcgtcctcgagcgggagcacggtgtcctgcgatcagggattctgcgcggccacctatggggggaagctgccagggtgcactgccaatgtgccctgcgagtacagcgtcatgtacggtgatggtagctcaacgactgggttcttcatcaccgatgcgctgcagtttgatcaggtgactggggatggacagacacagcctggcaatgctaccatcacattctggtgtggtgctcagcaaggtggggatttgggcaactcataccaagcgcttgatggaattcttggttgtggtcacgcagatacgtcaatgttatcacagctagctgctgctggtaaagcgaagaagatatttgctcattgcttggataccataaagggtggtggaatctttgctattggaaatgttgttc

SEQ ID NO: 2799 - DNA, 410 bp, Zea mays
  Clone ID: LIB3061-034-Q1-K1-H5
gcgagcagtttcttccattcaaccaactagctgcattgaactctgcttcttattgggaacgacaacaactaccattcagccagctacctgctgcctacccccagcaatttcttccattcaaccaactggcagcattgaactctcctgcttatttacagcagcaacaactactaccattcagccagctagctggtgtgagccctgctaccttcttgatacaaccacagttgttgccgttctaccagcacgctgcgcctaacgctggcaccctcttacaactgcaacaattgctgccattcaaccaacttgctttgacaaacccagcagcgttctaccaacaacccatcattggtggtgccctcttttagatttcttatgagttatagttcaataataaagttttttgtctg

SEQ ID NO: 2800 - DNA, 384 bp, Zea mays
  Clone ID: LIB3061-034-Q1-K1-H7
atggaacgcacagtggtgtactatcaattgctgccaagatattttgcttaatggtgcgggataggtccttgtgcaagtgttgctactgagtgccagtttcagcaccaatgctcatatgctctctatagcatacgcattcttatgcgcatacctcgataccaatgcgcgtacttcaatgataagagcacgttagtgtgcaaaccctacaggattgcactggtaatatcaccaagcatcgtaccattaagacccgtgttcctccaactaaattaaaccctatgacagcaggtaccgatggatcattatacgccactaaacatttgtgcacacaatttacgacggcttgtgctagcaaaccttgctgcatactttgatcaacatcaa

SEQ ID NO: 2801 - DNA, 153 bp, Zea mays
  Clone ID: LIB3061-034-Q1-K1-H9
cctatagcttcccgttcttccccgcatacctgtacatcacattatagacttcagtatgtcgaaaacccctagctcttcgaaccatatagtgcttcaacaaagcaaatcgctagcaagcaaacataccctttatcagccctttgttgtttcaac

SEQ ID NO: 2802 - DNA, 386 bp, Zea mays
  Clone ID: LIB3061-035-Q1-K1-A10
cctacatacctgcaacaacaattgttgcaacagattgtaccagctctgactcaactagctgtggcaaaccctgttgcctacttgcaacagctgcttccattcaaccaactgactctgtcgaactctgctgcgtacctacaacagcgacaacagttacttaatccattggtagtggctaacccattggtcgccgccttcctacagcagcaacaattgctgccatacaaccagttctctttgatgaatcctgtcttgtcgaggcagcaacccatcgttggaggtgccatcttttagattacatatgagatgtactcgataatggtgccctcataccgacgtgtgtttcctagaaataatcaatatattgattgagatttatctcgatt

SEQ ID NO: 2803 - DNA, 398 bp, Zea mays
  Clone ID: LIB3061-035-Q1-K1-A11
gccggtgttggtttcagcttgtattcccactctgtcgcacagcgtcgcccgtcgccggtgagatcctaggaagaaatggagctctctcgcaagctcttcacggccgtcctcctcgtcatgctgctgctgctgtccgcagaggtcgggccggtggcggtggcggaggcgcggacgtgccagtcgcagagccacaggttccggggcccctgcctccgccggtccaactgcgccaacgtctgcaggaccgaggggttccccggcggcaggtgccgcggcttccgccgccgctgcttctgcaccacgcactgccactgattcgctcgcccagcggccggctggcgtcgccgtcgatcgcgtcgcgaccagtccatggctccatgcatgaataacaagggtgt

SEQ ID NO: 2804 - DNA, 441 bp, Zea mays
  Clone ID: LIB3061-035-Q1-K1-A2
gcacaagttgttgtagttgttgtgccctgatgttttgtgccaccaaatggaccaaaggtaactgctgtaatagggctgacggttgttggaggaacaattaccattcagccagctagttgctgcctacccccagcaatttcttccattcaaccaactagcagcattgaactctgctgcttatttacagcagcaacaactactaccattcagccagctagctgatgtgagccctgctgccttcttgacacaacaacagttgttgccgttctacctgcacgctatgcctaacgctggcaccctcttacaactgcaacaattgctgccattcaaccaacttgctttgacaaacccaacagtgttctaccaacaacccatcattggtggtgccctcttttagattgcttatgagttatagttcaataatgaagttttttggatgat

SEQ ID NO: 2805 - DNA, 449 bp, Zea mays
  unsure (1)..(449): unsure at all n locations; Clone ID: LIB3061-035-Q1-K1-A3
cacatatctactatactatactctaggaagcaaggacaccaccgccatggcagccaagatgcttgcattggtcgctctcctagctctttgtgcaagcgccactagtgcgacccatattccagggcacttgccaccagtcatgccattgggtaccatgaacccatgcatgcagtactgcatgatgcaacaggggcttgccagcttgatggcgtgtccgtccctgatgctgcagcaactgttggccttaccgcttcagacgatgccagtgatgatgccacagatgatgacgcctaacatgatgtcaccattgatgatgccgagcatgatgtcaccaatggtcttgccgagcatgatgtcgcanatgatgatgccacaatgtcactgcgacgccgtctcgcagattatgctgcaacagcagttaccattcatgttcaacccaatggccatga

SEQ ID NO: 2806 - DNA, 387 bp, Zea mays
  Clone ID: LIB3061-035-Q1-K1-A4
cttgttgctggctctggggggaaggatatagagagagcgagagagagagagagatctggtggagaggctagtaggtggtcctcgaacgaagatgttggcggtgttcagcgggcaggtggtggaggtgccggcggagctggtggcggcgggcagccggacgccgtcgcccaagacgaaggcgtcgcagctcgtggggcgcttcctggccgcgtccgagccggacgtgtccgtgcagctcggcgaccacggccacctcgcctactcccacaccaaccaggcgctcctccgccccaggaccccgagggcagggtgccgctcttctgggggatcaccgccgacggctgcgtcgccttctccgacgacatcgacatgctcaaaggctcatgc

SEQ ID NO: 2807 - DNA, 438 bp, Zea mays
  Clone ID: LIB3061-035-Q1-K1-A5
acgaacatacatagtgaagtacactagcaacatcttagcaccaatgggagccaagatttttgccctccttgccctccttgctctttcagcaagcgctgctacctcgacttttattccacaatgctcacaacaatacctctctccggtgacagccgcgggatttcaatacccaactatacaatcctacatggtacaagaggccatccaagcaagcatcttacggtcattagcattaaccctccaacaaccatatgctctattgcaacagccatccttagtgcatctgtatctccaaagaatcgcggcacaacaactacaacaacagttgctaccaacaatcaatcaagtagttgcagcgaaccttgctgcttacctccagcaacaacagtttcttccattcaatcaactagctggggtgaaccctgctatctacttgca

SEQ ID NO: 2808 - DNA, 348 bp, Zea mays
  Clone ID: LIB3061-035-Q1-K1-A6
cccacgcgtccgcccacgcgtccgcgatttcttctcggacctcccaagacctggcatcgccagcgaatgcgatgccgggaaccaccggtcgtgcgtcctctctcctcgtgcgcttcgcccgtctccacagttggtgcagcttgcgacgcaacttggattctctcctctggttgcaacaaggcagtccagtgaatgagacggatggccccagctgtgcctgtaactgatgcatgatggagctgagcctgtgggtgggaatctcttctctgctggtggccactcgcctagctccaaatacacacacacactctctgtctctctctctctctctctctctgtctatctctc

SEQ ID NO: 2809 - DNA, 436 bp, Zea mays
  unsure (1)..(436): unsure at all n locations; Clone ID: LIB3061-035-Q1-K1-A7
gaaacacaccaagcgaagcacattagcaacaacctaacaacaatggctaccaagatattatccctccttgcgcttcttgcgctttttgcgagcgcaacaaatgcgttcattattccacaatgctcacttgctccaagttccattattacacagttcctcccaccagttacttcaatgggcttcgaacacccagctgtgcaagcctataggctacaacaagcaattgcggcgagcgtcttacaacaaccaatttcccagttgcaacaacaatccttggcacatctaacaatacaaaccatcgcaacgcaacagcaacaacaattcctaccagcactgagccacctagccatggtgaaccctgccgcctacttgcaacagcagttgcttgcatcaaacccacttgctctggcanacgtagttgcaaaccagccacaac

SEQ ID NO: 2810 - DNA, 446 bp, Zea mays
  Clone ID: LIB3061-034-Q1-K1-H1
ggaattcccggcgtcccatgtgaaagtcattggtttgaacttggatgagagcaaagtacgtcgtgctggacctgctgagaatgtgcgtggtaaattgtctggagttgaagaggaggatgtaatggctggttttgtactttcaagtgttgctaatcctgttggtgccgttagtgaattcattgctcagttgcagattttagagttgcttgacaatgctattttcactgccggctacaaagctgtgttgcatattcactctgttgtcgaagagtgtgagattgttgagctcatagaggaaattggcatgaagaaaaagaaagaagaagatccaaagaagaaaaagccaaagaggaagcctctttttgtgaagaacggtgcaattgttgtttgccgcattcaggtgaataacttgatatgcatagagaagttctctgatttccctcagc

SEQ ID NO: 2811 - DNA, 119 bp, Zea mays
  Clone ID: LIB3061-016-Q1-K1-C1
aaaaaaaaaaaaaaaaaaaaaaaaaatttaaaattaaaaaaaaaaaaaaaaaaaaaaggaaaaaggtaaaaaataaaaaaataccagaaaaaaggagaaagaaattcggggtcctattt

SEQ ID NO: 2812 - DNA, 414 bp, Zea mays
  Clone ID: LIB3061-016-Q1-K1-C10
ctgcaaccctacaggatccaacaggctttcgcagctggcatcttacctttatcacccgtgtgcctccaacaatcatcagccctattacagcagttacctttggtgcatttattggcacaaaacatcagggcacaacatctacaacaacttgtgctagcaaaccttgctgcctactctcagcaacagcagtttcttccattcaaccaactagctgcattgaactctgcttcttatttgcaacatcatcaactaccattcagccagctacctgttgcctacccccaacaatttcttccattcaaccaactggcagcattgaactctcctgcttatttacagcagcaacaactactaccattcatccagctagctggtgtgagccctgctaccttcttgacacaaccacagttgttg

SEQ ID NO: 2813 - DNA, 391 bp, Zea mays
  unsure (1)..(391): unsure at all n locations; Clone ID: LIB3061-016-Q1-K1-C12
ctcccgaatcaccaaaccggcattccgtttaagagggatcgtcgaccagaccagcttgaagatggtcatcgttctcgtcgtgtgcctggctctgtcagctgccagcgcctctgcaatgcagatgccctgcccctgcgcggtgctgcagggcttgtacggcgctggcgccggcctgacgacgatgatgggcgccggcgggctgtacccctacgcggagtacctgaggcagccgcagtgcagcccgctggcggcggcgccctactacgcncggtgtgggcagtcgagcgccatgttccagccgctccggcaacagtgctgccagcagcagatgaggatgatggacgtgcattccgtcgcgcatcaactgcagatgatgatgcagcttgagcgt

SEQ ID NO: 2814 - DNA, 443 bp, Zea mays
  Clone ID: LIB3061-016-Q1-K1-C2
caatcatcattcatcttagtagtataggcaccaaatcaaatctgcaacatcaattatctaactccaaaaaccatgaagctggtgcttgtggttcttgctttcattgctttagtatcaagtgtttcttgtacacagacaggcggctgcagctgtggtcaacaacaaagccatgagcagcaacatcatccacaacaacatcatccacaaaaacaacaacatcaaccaccaccacaacatcaccagcagcagcaacaccaacctcaacaaggtcacatgcaaccacaaaaacatcagcaacaacaagaagttcatgttcaacaacaactacaacaaccgcagcaccaccaccaacaacaactactacagcaccaacaacaacatcaatgtgaaggccaacaacaacatcatcaacaatcacaaggccatgttcaacaactcgaaca

SEQ ID NO: 2815 - DNA, 413 bp, Zea mays
  Clone ID: LIB3061-016-Q1-K1-C3
agaccagcaagcaacatagaaagtagaatccattagcaacaatagagcaacaatggcgaccaagatattttccctccttatgctccttgctctttctacatgtgttgctaacgcgacaattttccctcaatgctcacaagctcctatagcttcccttcttcccccataccttccatcaattatagcttcagtatgtgaaaacccagctcttcaaccatataggcttcaacaagcaatcgcagcaagcaacatacctttatcgcccttgttgtttcaacaatcaccagccctatctttggtgcagtcattggtacaaaccatcagggcacaacagctgcagcaactcgtgctacctgtgatcaaccaagtagctctggcaaacctttctccctactctcagcaacaacaatttc

SEQ ID NO: 2816 - DNA, 424 bp, Zea mays
  unsure (1)..(424): unsure at all n locations; Clone ID: LIB3061-016-Q1-K1-C4
gagaccaactagcaacatagaaagcacaatagtgtaccaacaatggcagccaaaatattttgcctccttatgctccttggtctttctgcaagtgctgctacggcgaccattttcccgcaatgctcgcaagctcctatagcttcccttcttcccccgtacctctcaccagcggtgtcttcggtatgtgaaaacccaattcttcaaccctacaggatccaacaggcaatcgcagctggcatcttacctttatcacccttgttccttcaacaatcatcagccctattacaacagttacctttggtgcatntattggcacaaaacatcagggcacaacaactacaacaacttgtgctagcaaaccttgctgcctactctcagcaacagcagtttcttccattcaaccaactaggttcattgaactctg

SEQ ID NO: 2817 - DNA, 339 bp, Zea mays
  Clone ID: LIB3061-016-Q1-K1-C5
caggacgtgggccgtgccgctgcggacgcgctgaaccgtggcggtcgacaggctcgaggacgactccaaggtggtagtccaactaagtgcgacgctcaagggtgcgccgtcctgtatgtggttggagtgaacatgacgtatggttgccataggtgagcggattacatactttagcacttactgcttggttataagatgcgtcatcatctaattcgtcagctggctcggttacccaatcgtgatcctgacatcgtcgtatcatatcaggaacgctgtcacatcgtcttgcgactaaggtcatgttggtcagttgctccagcgtcgagactgtggaaatga

SEQ ID NO: 2818 - DNA, 216 bp, Zea mays
  Clone ID: LIB3061-016-Q1-K1-C6
aatgacatgagtcatgacgtatcggattcgctgaagcgcgaaatgagataggctcgatggatgatgctaagttgagagtccaactaagcgcgatggcagtgtgtgttggtctgtaaaggtgtaggaactagagatggctgcacacatgctggattacataactaatcactaattgcttggttctaggaagcgaaatgatttaaaacaacatcatgt

SEQ ID NO: 2819 - DNA, 296 bp, Zea mays
  Clone ID: LIB3061-016-Q1-K1-C7
ataagcagttgaacgaggaagctgcttccatggactggaccaagtctacaggtcatatgttgagtggtcgtaaaatcttcgattcatatgaagaggaatttgttctagaaccagagataactgttgctggtcacaggctcgggggagagtcaagttcgcttgctagcgctcgtgcgttgtctggagctgctgcttaccagcgttttctgaatgcatctgcaaatgtggatcatgcttcaggcactaaaatcgaatatagttctgatgatgttcctcgaggttttgttcatgaaact

SEQ ID NO: 2820 - DNA, 432 bp, Zea mays
  Clone ID: LIB3061-016-Q1-K1-C8
gcaacatagaaagcacaatagtgtaccaacaatggcagccaaaatattttgcttccttatgctccttggtctttctgcaagtgttgctaccgcaaccattttaccacaatgctcacaagctcctatagcttcccttcttcccccatacctctcaccagcggtgtcttcaatgtgtgaaaacccaattgttcaaccctacaggatccaacaggcaatcgcaacaggcatcttaccattatcacccttgttcctgcaacaaccgtcagccctattacagcaattacctttggtccatttggtggcacaaaacatcaaggcacaacaactacaacaacttgtgctagcaaaccttgctgcatactctcagcaacatcaagttcttccattcaaccaactggctgcattgaactctgctgcttatttgcaacaacc

SEQ ID NO: 2821 - DNA, 321 bp, Zea mays
  Clone ID: LIB3061-016-Q1-K1-C9
ccaactagcaccatagaaagcacatttttgtaccaacaatggcagccaaaatatttggcctgcttatgctccttggtctttctgcaagtgctgctacggcgaccattttcccacaatgctcacaagctcctatagcttcccttcttcccccgtacctctcaccagcggtgtcttcggtatgtgaaaacccaattcttcaaccctataggatccaacaggcaatcgcaactggcatcttacctttatcaaccttggtccttcaacaatcatcaaccctattacagcaggtacctttggtgcatttattggcacaaaacatta

SEQ ID NO: 2822 - DNA, 386 bp, Zea mays
  Clone ID: LIB3061-016-Q1-K1-D1
gagaccaactagcaacatagaaagcacaatagtgtaccaacaatggcagccaaaatattttgcttccttatgctccttggtctttctgcaagtgctgctaccgcaaccattttcccacaatgctcacaagctcctatagcttcctttcttcccccatacctctcaccagcggtgtcttcagtatgtgaaaacccaattcttcaaccctacaggatccaacaggcaatcgcagcaggcatcttacctttatcacccttgttcctccaacaaccgtcagccctattacagcagttacctttggtgcatttgttggcacaaaacatcaaggcacaacaactacaacaacttgtgctaagaaaccttgctgcctactctcagcaacagca

SEQ ID NO: 2823 - DNA, 408 bp, Zea mays
  Clone ID: LIB3061-016-Q1-K1-D10
ctgaggcatcagtgcagcccgacggcaacgccctaactgctcgtctcagtgccagtcgttgcggcagcagtgtggccagcagctcaggcaggtggagccgcagcaccggtaccaggcgatcttcggcttggtcctccagtccatcctgcagcagcagccgcaaagcggccaggtcgcggggctgttggcggcgcagatagcgcagcaactgacggcgatgtgcggcctgcagcagccgactccatgcccctacgctgctgccggcggtgtcccccactgaagaaactatgtgctgtagtatagccgctggctagctagctagttgagtcatttagcggcgatgattgagtaataatgtgtcacgcatcaccatgggtggcagtgtcagtgtgagcaaatgacctgatg

SEQ ID NO: 2824 - DNA, 419 bp, Zea mays
  Clone ID: LIB3061-016-Q1-K1-D11
tcgcaggaagccacataaaaaggtgaatccattatccaccattgaaccaccatggccacccagagtttttccttcctaagcctcctggttctttctacatgggtgctaacgcgccatttttccctcaatgctcacaagctcctatagcttcccttcttcccccataccttccatcaattatagcttcagtatgtgaaaacccagctcttcaaccatataggcttcaacaagcaatcgcagcaagcaacatacctttatcgcccttgttgtttcaacaatcaccagccctatctttggtgcagtcattggtacaaaccatcagggcacaacagctgcagcaactcgtgctacctgtgatcaaccaagtagctctggcaaacctttctccctactctcagcaacaacaatttcttccattc

SEQ ID NO: 2825 - DNA, 406 bp, Zea mays
  Clone ID: LIB3061-016-Q1-K1-D12
gctcctgggtctttctgcaagtgctggctacggcgaccattttcccgcaatgctcgcaagcgcctatagcttcccttgttcccccgtacctctcaccagcggtgtcttcggtatgtgaaaacccaattcttcaaccctacaggatccaacaggcaatcacagctggcatcttacctttatcacccttgttcctgcaacaatcatcagccctattacatcagttacctttggtgcatttattggcacaaaacatcagggcacatcatctactacaacttgtgctagcataccttgctgcctactctcagcaacagcagtttcgtccattcaaccaactagctgcatggaactctgcttcttacttgcaacaacggcaactaccattcagtcagctacctgctgccta

SEQ ID NO: 2826 - DNA, 417 bp, Zea mays
  Clone ID: LIB3061-016-Q1-K1-D2
cccacgcgtccggggaaatccttcagtggaggtgactgaggaaaaccgtgatgcttcccaagaagcaaaaggcaaggctatggaagcaatttctgaaggaaaacttgaagatgctattgaacaccttaccaacgcaatagtgctgaatccactctcagcaatcatgtatggtactagagcatctgtgtttataaaaatgaagaaaccagctgctgccattcgtgatgccaatgctgctctagagatcaacccagactctgcaaaaggctataaaactcgtggaatggcatatgccatgcttggcaaatgggaggaagctgctcatgatctgcacacagcatctaacatggattacgacgaggagatcaatgctgtgctcaagaaggtggagcctaatgctcacaagatagtggaaca

SEQ ID NO: 2827 - DNA, 388 bp, Zea mays
  Clone ID: LIB3061-016-Q1-K1-B9
tcgcccacgcgtccgagaaagcacaatagtgtaccaacaatggcagccaaaatattttgcttccttatgctccttggtctttctgcaagtgttgctaccgcaaccattttcccacaatgctcacaagctcctatagcttcccttcttcccccatacctctcaccagcggtgtcttcaatgtgtgaaaccccaattgttcaaccctacaggatccaacaggcaatcgcaacaggcatcttaccattatcacccttgttcctccaacaaccgtcagccctattacagcagttacctttggtccatttggtggcacaaaacatcagggcacaacaactacaacaacttgtgctagcaaaccttgctgcatactctcagcaacatcagtttc

SEQ ID NO: 2828 - DNA, 399 bp, Zea mays
  Clone ID: LIB3061-016-Q1-K1-A4
gagcattcagaaacacacctagcgaagcgcactagcaacgacctaacaacaatggctaccaagatattatccctctttgcgcttcttgccctttttgtgagcgcaacaaatgcgttcattattccacaatgctcacttgctcctagtgccattattccacagttcctccctccagttacttcaatgggcttcgaacacccagctgtgcaagcctacaggctacaacaagcgcttgcggcgagcgtcttacaacaaccaattgcccaattacaacaacaatccttggcacatctaaccatacaaaccatcgcaacgcaacagcaacaacaatttctaccagcactgagccaactagctgtggtgaaccctgtcgcctacttgcaacagcagttgcttgca

SEQ ID NO: 2829 - DNA, 360 bp, Zea mays
  Clone ID: LIB3061-016-Q1-K1-A5
aacaggcaacatagaaagttgaatccagcagcaactgcagagcaacagtggcgaccaagatatgcttcctccttatgctcgttgctcttgctgcatgtgctgctgacaccacaattgcgcatcgatgctaacatgctattatagctctccttcttcccgcatacctaccatcaatgatagcttcaggatgtgaaaacccagttcttcagtactatatgctccaacaagccatcgctgccagcatcataccattatcaccgttggtgcttcaacaatcggcagtactatattaggtgccgtcattgctacaaacgatccaggcacagcagctgcagcaactacagctacctgtgatcaacc

SEQ ID NO: 2830 - DNA, 155 bp, Zea mays
  Clone ID: LIB3061-016-Q1-K1-A6
aacaggcaacatagcaagtttaattgtcgcagcatcgtccgagcaacaccggccaaggtgatatgcctccttatgctgctcgttgctcctgcaagcgctgctgctgacaccacaattgcgcattgctgcttagatgctattgcagttcttctact

SEQ ID NO: 2831 - DNA, 332 bp, Zea mays
  Clone ID: LIB3061-016-Q1-K1-A7
cggtcgcgtgggcaacaactacaattgctgacattctacccacaggctgcgggaaacattaacgccttcttgcaacagcaacagttgctaccattctacccacaggatgtggcaaacaatgttgccttcttacaacaacaacaattgctgccatttaaccaacttgctttgacgaatactaccaccttattgcagcagcccaccattggtggcgccatcttctagattgtgctatgctgtatactgtaatcataaagatctgatactgatatgtgcaacttctcagtaattaaagatttgagatctaatatatcagttcaaaaacaacaaat

SEQ ID NO: 2832 - DNA, 412 bp, Zea mays
  Clone ID: LIB3061-016-Q1-K1-A8
gaatttctaattcttgctggcgatcacctgtaccggatggactatgaaaagttcattcaggcacacagagaaacaaatgctgatattaccgttgctgccctaccgatggatgagaaacgtgcaactgcatttggcctcatgaaaattgatgaagaagggaggatcattgagtttgctgagaaaccgaaaggagagcagttgaaagcaatgatggttgacaccaccatacttggccttgatgacgtgagggcaaaggaaatgccttatattgctagcatgggtatctatgttttcagcaaagatgtaatgcttcagctcctccgtgaacaatttcctgaagccaatgactttggaagtgaagttattccaggtgcaaccagcattggaaagagggttcaggcttatctgtatg

SEQ ID NO: 2833 - DNA, 304 bp, Zea mays
  Clone ID: LIB3061-016-Q1-K1-A9
gctactcaaagtgcggtggctttcttgacagcagcacaatacctaccatcaatgtgcggcttgtaccactcatactaccaaaataatccatgcagcagcaatgacattagtggtgtttgcaattgaagaattgtgtctacctagccgttatactcatataacggtgttaagcaataaagtaccatacattaaaaaaaaaaaaaaaaaaaaaaaaaaaaaaaaggaaaaaaaaaaaaaaaattaaaaaaaaattaaaaaaaaaaaaaaaaaaaaaaaaaaaaaaaaaaaaaaaaaggggcggccg

SEQ ID NO: 2834 - DNA, 362 bp, Zea mays
  Clone ID: LIB3061-016-Q1-K1-B1
acgcatgcacccacgggaccggggtgttacaaccacatctacaacttcagacagccaacctacacaccggggaaggtgttaatacattctggcgatatcctctctctctacgatactacagacagcatgtggcaaacaatctcgcatgcttacaacaccatcatttgatgtaactacaacaaactatttgctacgaatcgtaccatcttactgcagaaccccaccattcatgatgccattatctaaatcaacctatgcattatactgcaatcataaagttctcatactgatatgcgcaaattgtcagcagttatagactatacatctatatagaaagtccagagacaaaaaataacgccagc

SEQ ID NO: 2835 - DNA, 392 bp, Zea mays
  Clone ID: LIB3061-016-Q1-K1-B10
ccaatccagatcagcaaagcggcagtgcgtagagaggatcgtcgaacagaacagcatgaagatggtcatcgttctcgtcgtgtgcctggctctgtcagctgccagcgcctctgcaatgcagatgccctgcccctgcgcggggctgcagggcttgtacggcgctggcgccggcctgacgacgatgatgggcgccggcgggctgtacccctacgcggagtacctgaggcagccgcagtgcagcccgctggcggcggcgccctactacgccgggtgtgggcagccgagcgccatgttccagccgctccggcaacagtgctgccagcagcagatgaggatgatggacgtgcagtccgtcgcgcagcagctgcagatgatgatgcagcttgagcgtg

SEQ ID NO: 2836 - DNA, 355 bp, Zea mays
  unsure (1)..(355): unsure at all n locations; Clone ID: LIB3061-016-Q1-K1-B11
ctnccgggttcaatccttattccaggaggagctacaccaccaaccatgtgagttatgtggatctcagcaagctactcaaagtgcggtggcaatcttgacagcagcacaatacctaccatcaatgtgcggcttgtaccactcatactaccaaaataatccatgcagcagcaatgacattagtggtgttagcaattgaagaattgtgtctacctagccgttatactcatataacggtgttaagcaataaagtaccatacattatgatgtttgtactaaaaaaaagtcaaacaaacaccattaaccaatcgatagcaaaacaatagctgacagaaaaaaacgacgacgacggacgtgc

SEQ ID NO: 2837 - DNA, 423 bp, Zea mays
  unsure (1)..(423): unsure at all n locations; Clone ID: LIB3061-016-Q1-K1-B12
cagaaacacaccaagcgaagcacattatcaacaacctaacaacaatggctaccaagagatgatccctacttgcgcttcttgcgctttttgcgagcgcaacaaatgcgttcattattccacaatgctcacttgctccaagttccattattacacagttcctcccaccagttacttcaatgggcttcgaacacccagctgtgcaagcctataggctacaacaagcaattgcggcgagcgtcttacaacaaccaatttcccagttgcaacaacaatccttggcacatctaacaatacaaaccatcgcaacgcaacagcaacaacaattcctaccagcactgagccacctagccatggtgaaccctgccgnctacttgcaacagcagttgcttgcatcanacccacttgctctggcaaacgtagttg

SEQ ID NO: 2838 - DNA, 378 bp, Zea mays
  Clone ID: LIB3061-016-Q1-K1-B2
cccacgcgtccggaccattagctttatctactccagagcgcagaagaacccgatcgacaccatgagggtgttgctcgttgccctcgctctcctggctctcgctgcgagcgccacctccacgcatacaagcggcggctgcggctgccagccaccgccgccggttcatctaccgccgccggtgcatctgccacctccggttcacctgccacctccggtgcatctcccaccgccggtccacctgccgccgccggtccacctgccaccgccggtccatgtgccgccgccggttcatctgccgccgccaccatgccactaccctactcaaccgccccggcctcagcctcatccccagccacacccatgcccgtgccaacagcc

SEQ ID NO: 2839 - DNA, 397 bp, Zea mays
  Clone ID: LIB3061-016-Q1-K1-B3
gaccaactagcaacatagaaagcacaatagtgtaccaacaatggcagccaaaatattgtgcctccttatgctccttggtctttctgcaagtgctgctacggcgaccattttcccgcaatgctcgcaagctcctatagcttcccttcttcccccgtacctctcaccagcggtgtcttcggtatgtgaaaacccaattcttcaaccctacaggatccaacaggcaatcgcagctggcatcttacctttatcacccttgttcctccaacaatcatcagccctattacaacagttacctttggtgcatttattggcacaaaacatcagggcacaacaactacaacaacttgtgctagcaaaccttgctgcctactctcagcaacagcagtttcttccattc

SEQ ID NO: 2840 - DNA, 405 bp, Zea mays
  Clone ID: LIB3061-016-Q1-K1-B4
cgtcagcctagcaattagctcatcgactccagattggagaactcgacaccatgaaggtgctgatcgttgcccttgctctcctggcgctcgctgcgagcgccgtctccagtacaagcggcggctgtggctgccagacaccaccgtttcatctaccgcctccgttctatatgccgcctccgttctatctgccgccgcagcagcagccgcagccatggcaataccccactcaaccaccgaagctaagcccgtgccagcagttcggatcctgccgcgttagcagcgtcggcagcccgttcctgggccagggcgtcgagtttctgaggcaccagtgcaacccggcggcgacgccctacggctcgtcacagtgccaagcgctgcagcagcagtgctgccaccagatcaggc

SEQ ID NO: 2841 - DNA, 307 bp, Zea mays
  Clone ID: LIB3061-016-Q1-K1-B5
aactaactacatacatagcacgctcattaaccaaccatcgctggcaaactatatagcctgcctacgcatgctgctcggtctgcatgcgcttgctccgacagcaaccatccgcaatgctcgcacgctcgtatctatagctttctttcttcgtacgtatcactaaccatctgtgtcgtatgtgaaagcaaacttatttaaccatacatgctcgaaccagcaagcaatcgtagcatgcaacctatatcaatcacgcttgttccacaaacaatcatcatatcacaaccgacacctacggtgcatgcattga

SEQ ID NO: 2842 - DNA, 366 bp, Zea mays
  unsure (1)..(366): unsure at all n locations; Clone ID: LIB3061-016-Q1-K1-B6
ccgacgcgtgcggaccattagctctatctactctagagcgcagaagaacccgatcgagaccgtgagggtgttgctcgttgccctcgctctcctggctctcgctgcgagcgccacctncacgcatacaagcggcggctgcggctgccagccaccggcgccggttcatctaccgccgccggtgcatctgccacctacggttcacctgccacctccggtgcatctcccaccgccggtccacctgccgccgccggtccacctgccaccgccggtccatgtgccgccgccggttcatctgccgncgncaccatgccactaccctactcaaaccgcccggcctcagcctcattcccagccacacccatgccc

SEQ ID NO: 2843 - DNA, 393 bp, Zea mays
  Clone ID: LIB3061-016-Q1-K1-B7
atcaatcatcattcatcttagtaggattggcaccagatcaaatctgcaacatcaatgatctaactccaaaaaccatgaagctggtgcttgtggttctcgctttcattgctttagtatcaagggtttcttgtacacagacaggcggctgtagatgtggtcaacaacatatccatgatcagcaacatcatccacaacaacatcatccacaaaaacggcaatatcaaccaccaccacaacattatcagcaccagcaacaccaacaacaacaagttcacatgcaaccacaacaacatgagcatcaacaagaacttcatgttcaacgacaacaactacaaccgcagcagcatcaccaacaacgtcgacaacagtgccaacaacaacatcaatgtgaat

SEQ ID NO: 2844 - DNA, 411 bp, Zea mays
  Clone ID: LIB3061-016-Q1-K1-B8
attttgagcattcagaaacacaccaagcgaagcgcactagcaacgacctagcaacaatggctaccaagatattagccctccttgcgcttcttgccctttttgtgagcgcaacaaatgcgttcattattccacaatgctcacttgctcctagtgccattattccacagttcctcccaccagttacttcaatgggcttcgaacacctagctgtgcaagccaacatgcaacaacaagcgcttgcggcgagcgtcttacaacaaccaattgcccaattgcaacaacaatccttgccacatctaacaatacaagccatcacaacgcaacagcaacaacagttcctaccagcactgagccacctagccatggtgaaccctgccgcctacttgcaagagcaagcaacatagaaagcac

SEQ ID NO: 2845 - DNA, 425 bp, Zea mays
  Clone ID: LIB3061-016-Q1-K1-A3
caactagctgcattgaactctgcttcttatttgcaacaacaacaactaccattcagccagctacctgctgcctacccccagcaatttcttccattcaaccaactggcagcattgaactctcctgcttatttacagcagcaacaactactaccattcagccagctagctggtgtgagccctgctaccttcttgatacaaccacagttgttgccgttctaccagcacgctgcgcctaacgctggcaccctcttacaactgcaacaattgctgccattcaaccaacttgctttgacaaacccagcagcgttctaccaacaacccatcattggtggtgccctcttttagatttcttatgagttatagttcaataataaagttttttgtctgatgtttggggcttcccagaaataagaaagtacatttct

SEQ ID NO: 2846 - DNA, 438 bp, Zea mays
  Clone ID: LIB3061-015-Q1-K1-G9
gtgcgatttcgatctcgcagccaccttttttttgttctgttgtgtatctagtagtgggaggagatatgcagtttgcacttgcattggacacgaactcaggtcctcaccagataagatcttgtgagggtgatgggattgacaggttggaaaaattaagtattgggggcagaaagcaggagaaagctttgagaaataggtgctttggtggtagagttgctgcaactacacaatgtattcttacctcagatgcttgtcctgaaactcttcattctcaaacacagtcctctaggaaaaattatgctgatgcaaaccgtgtatctgctatcattttgggcggaggcactggatctcagctctttcctctgacaagcacaagagctacgcctgctgtacctgttggaggatgttacaggcttattgatatccctatgagtaact

SEQ ID NO: 2847 - DNA, 410 bp, Zea mays
  Clone ID: LIB3061-015-Q1-K1-H1
gcaagtcgtgcttccttcttgacacagcaacagttgctgcctttctacaagcagtttgcggctaaccccgcaaccctcttacaactacaacaattgttgccctttgtccaacttgctttgacaaacccagcagccttctaccaacaacacatcattggtggtgccctcttttagattgattattagttgtaattcaataataaagtttttcggatgatgtatgtggccaaccagaaataagaagttacatttccagattctaaaagaatcaacaatcaccagacctatctttggtgcagacattggtacaaaacaataagggaacatcagctgcagcaactcgtgctacctgtgatcaaccaagtagctctggcaaacctttctgcctactcttagcaacaacaatttct

SEQ ID NO: 2848 - DNA, 473 bp, Zea mays
  Clone ID: LIB3061-015-Q1-K1-H10
agtcgacctgcaggcatgcaagctcatcgcggagggtacaataatgtaccaacaatggcagccaaaatattttgcttccttatgctgcttggtctttctgcaagtgctgctaccgcaaccattttcccacaatgctcacaagctcctatagcttcctttcttcccccatacctctcaccagcggtgtcttcagtatgtgaaaacccaattcttcaaccctacaggatccaacaggcaatcgcagcaggcatcttacctttatcacccttgttcctccaacaaccgtcagccctattacagcagttacctttggtgcatttgttggcacaaaacatcaaggcacaacaactacaacaacttgtgctaggaaaccttgctgcctactctcagcaacagcagtttcttccattcaaccaactggctgcattgaactctgctgcttatttgcaacaacaactaccattcagtcagct

SEQ ID NO: 2849 - DNA, 450 bp, Zea mays
  unsure (1)..(450): unsure at all n locations; Clone ID: LIB3061-015-Q1-K1-H11
caaagcacaatagtgtaccaacaatggcagccaaaatattttgctctccttatgctccttggtctttctgcaagtgctgctacggcgaccattttcccgcaatgctcgcaagctcctatagcttcccttcttcccccgtacctctcaccagcggtgtcttcggtatgtgaaaacccaattcttcaaccctacaggatccaacaggcaatcacagctggcatcttacctttatcacccttgttcctccaacaatcatcagccctattacatcagttacctttggtgcatttattggcacanaacatcagggcacaacaactacaacaacttgtgctagcaaaccttgctgcctactctcagcaacagcaagttctttcattcaaccaactagctgcattgaactctgcttcttatttgcaacaacaacaactaccattcagccagctacct

SEQ ID NO: 2850 - DNA, 439 bp, Zea mays
  Clone ID: LIB3061-015-Q1-K1-H12
cccacgcgtccgccaagaaacaagacatcataatctctgaccaaataatttccatgtcattatacatgctgaaacggaagcagactgcacacaactagaaaactcaaacaaacttcgcttcatatcctgtccacgtccaaaggtgaggtggtaatggatcacgatccaaacgcttcacaaaatagtaggacactaaataaattttagtttaaaaatgaatagaaatagggcctgatcttaatcagatccttaaatcttagtgtaaaatttagagcccgatgtcacccctccaataaacaaagccaagttagagcccattgtcacccctccaataaacaaagccaagtttgattttccaaggggcgtcctttcttccaaggtccaaaagaccagtgaagagaaagggctccgatgcagtagatatgtctagttggattca

SEQ ID NO: 2851 - DNA, 441 bp, Zea mays
  Clone ID: LIB3061-015-Q1-K1-H4
aacacaccaagcgaagcgcactagcaacgacctaacaccaatggctaccaagatattagccctccttgcgcttcttgcccttttagtgagcgcaacaaatgcgttcattattccacagtgctcacttgctcctagtgccattattccacagttcctcccaccagttacttcaatgggcttcgaacatccagccgtgcaagcctacaggctacaactagcgcttgcggcgagcgccttacaacaaccaattgcccaattgcaacaacaatccttggcacatctaaccctacaaaccattgcaacgcaacaacaacaacaacaacagtttctgccatcactgagccacctagccgtggtgaaccctgtcacctacttgcaacagcagctgcttgcatccaacccacttgctctggcgaacgtagctgcttaccagcaacaaca

SEQ ID NO: 2852 - DNA, 385 bp, Zea mays
  Clone ID: LIB3061-015-Q1-K1-H5
cggacgcgtggggcaatttcttccattcaaccaactggcagcattgaactctgctgcttatttacaacagcaacagctaccaccattcagccagctagctgatgtgagccctgttgccttcttgacacaacaacagttgttgccgttctacctgcacgctgcgcctaacgctggcaccctcttacaactgcaacaattgctgccattcaaccaacttgctttgacaaacccaacagcgttctaccaacaacccatcattgggggtgcccttttttagattgcttatgagttatacttcaataatgaagtcttttggatgatgtctgtggcttcccagaaataagaaagtacatttctagattcttaaaacacaaatggccttaac

SEQ ID NO: 2853 - DNA, 431 bp, Zea mays
  Clone ID: LIB3061-015-Q1-K1-H7
cgcagcaccaccaccaacaacaacatcaacagcaccaacaacaacatcaatgtgaaggccaacaacaacatcaccaacaatcacaaggccatgtgcaacaacacgaacagagccatgagcaacaccaaggacagagccatgagcaacaacatcaacaacaattccagggtcatgacaagcagcaacaaccacaacagcctcagcaatatcagcagggccaggaaaaatcacaacagcaacaatgtcattgccaggagcagcaacagactacaaggtgcagctataactactatagcagtagctcaaatctaaaaaattgtcatgaattcctaaggcagcagtgcagccctttggtaatgccttttctccaatcacgtttgatacaaccaagtagctgccatgtattgcagcaacaatgttgtcatgatctt

SEQ ID NO: 2854 - DNA, 437 bp, Zea mays
  Clone ID: LIB3061-015-Q1-K1-H8
gtgtaccaacaatggcagccaaaatattttgcttccttatgctccttggtctttctgcaagtgttgctaccgcaaccattttcccacaatgctcacaagctcctatagcttcccttcttcccccatacctctcaccagcggtgtcttcaatgtgtgaaaccccaattgttcaaccctacaggatccaacaggcaatcgcaacaggcatcttaccattatcacccttgttcctccaacaaccgtcagccctattacagcagttacctttggtccatttggtggcacaaaacatcagggcacaacaactacaacaacttgtgctagcaaaccttgctgcatactctcagcaacatcagtttcttccattcaaccaactggctgcattgaactctgctgcttatttgcaacaacaattaccattcagccagctagttgct

SEQ ID NO: 2855 - DNA, 376 bp, Zea mays
  unsure (1)..(376): unsure at all n locations; Clone ID: LIB3061-016-Q1-K1-A1
gacaagtctcgtcccccgcccccttattccattacgagcaactccgccgccgccgtaaagccatctcccccatccgccgccgccgccaccgctgctggtgggacgggccgtgcgtccgttccagcgaagaggagcagcgggtcggaggagccgccggcgaggtcgggccgcgggggatcgagatggtgctgtgggagctcacggccatcaccgcctacttcctcgggctgaggcgcacctaccgnctcgcgctccgcatccagcgccgcctcatcccgcccaaccaccccaggatccgggacttcgtctacaggcgcacacgggatgtcttcaacgtcgcagtgtcggtccacaagaacattcagcagagagacat

SEQ ID NO: 2856 - DNA, 389 bp, Zea mays
  Clone ID: LIB3061-016-Q1-K1-A10
gaattcccagctagacgtacgagttcgagcattcagaaacacaccaagcgaaatgcactagcaacaacctatcaacaatggctgccaagatattatccctccttgcgcttcttgcgctttttgcgagcgcaacaaatgcgtccattattccacaatgctcacttgctcctagttccattattccacagttcctcccaccagttacttcaatggccttcgaacacccagctgtgcaagcctataggctacaacaagcgattgcggcgagcgtcttacaacaaccaattgcccaattgcaacaacaatccttggcacatctaacaatacaaaccatcgcaacgcaacagcaacaacagttcctaccagcactgagccacctaaccatggtg

SEQ ID NO: 2857 - DNA, 427 bp, Zea mays
  Clone ID: LIB3061-016-Q1-K1-A11
ccgatgatattttgctgaaaagtggagaatttaacagagctctattgggacaaatcgtattttctgacccatcaaaacgtcaacttctaaaccgtcttctggcaccacatatttcttatagcattgtctgggagatagcaaaactgtggatgaaaggctgcaaggttatcatccttgacatcccgctgctgtttgagacaaagatggatagatggacgaatccaatcattgttctctgggttgatccaaaagtccagattgagaggctcatttcaagagatggatgctctgaaggacaagctcagaataggatcaatgcacagcttgcactagactggaagaaatcagaagcagacatagtgattgacaattctggttccctggatgacaccaaacagcaattccaagaagtgttgatgaaagtctc

SEQ ID NO: 2858 - DNA, 388 bp, Zea mays
  Clone ID: LIB3061-016-Q1-K1-A12
accaccaccaggggaagcgcactaccaactacctaacaccaatggctaccaagatattagccctgcttgcgcttcttgcccttttagtgagcgcaacaaatgcgttcattattccacagtgctcacttgctcctagtgccattattccacagttcctcccaccagttacttcaatgggcttcgaacatccagccgtgcaagcctacaggctacaactagcgcttgcggcgagcgccttacaacaaccaattgcccaattgcaacaacaatccttggcacatctaaccctacaaaccattgcaacgcaacaacaacaacaacaacagtttctgccatcactgagccacctagccgtggtgaaccctgtcacctacttgcaacagcagct

SEQ ID NO: 2859 - DNA, 440 bp, Zea mays
  Clone ID: LIB3061-016-Q1-K1-A2
cggaattcccggctgagcattcaaaaacacacaaagggaagtgcactagcaactttctaacaacaatggctaccaagatattagccctccttgcgctcctttccctttcagtgagcgcaacaactgcattcattattccacaatgctcacttgctcctaatgccattattccacagttcctcccatcagttacatcaatgggcatcgaacaccctattgtgcaagcctataggctacaacaagcgcttgcggcgagcgtcttacaacaaccgtttgcccaattacaacaacaatccttggcacatctaaccatacaaaccatcgcaacacaactagagcaacagtttgtgcccgcattgagccaactagccgcggtgaaccctgtctcctacttgcaacagcaactgcttgcatccaacccacttgctctggcgaacaca

SEQ ID NO: 2860 - DNA, 345 bp, Zea mays
  unsure (1)..(345): unsure at all n locations; Clone ID: LIB3061-015-Q1-K1-G8
atcagcatatcccacgaaagataatggctacgtaggccagtataacactatgaatgggagtgctccagcagatgaagctcacgcacgctggcctttgagaacatatagtaatcagaattatgtcaatggccctcttgctgatgagttctttgacacagggaatgataccaatggggttgcatattccaggcagcagcaagctgatggcttcccagcacctcgccaagttgatgaaagtatggtattttatgatgccccatctgattacaacttggtggatggaaaagatgacttcgtatatctgaacgacattctggatgagccnacttggaaatgaatcgctct

SEQ ID NO: 2861 - DNA, 279 bp, Zea mays
  Clone ID: LIB3061-034-Q1-K1-F5
aaaacatcaaggcacaacaactacaacaacttgtgctaggaaaccttgctggcgactgtcagcaacagcagtttcttccattcaaccaactggctgcattgaactctgctgcttatttgcaacaacaactaccattcagtcagctagctgctgcctacccccagcaatttcttccattcaaccaactggcagcattgaactctgctgcttatttacaacagcaacagctaccaccattcagccagctagctgatgtgagccctgttgccttcttgacac

SEQ ID NO: 2862 - DNA, 418 bp, Zea mays
  Clone ID: LIB3061-034-Q1-K1-F6
ctaaccatacaaaccatcgcaacgcagcagcaacaagcactgagccacctagcgcgtggtgaaccctatcgcctacttgcaacaacagctgcttgcatccaacccacttgctttggcaaacgtagctgcataccaacaacaacaacagttgcaacagtttctaccagcgctcagtcaactagccatggtgaaccctatcgcctacctacaacagcaacaacttctttcatctagcccgctcgctatgggcaatgcacctacatacctgcaacaacagttgttgcaacaacagttgctgcaacaaattgtaccagctcttactcagctagctgtggcaaaccctgctgcctacttgcaacaactacttccattcaaccaactgactgtgtcgaactctgctgcgtacctacaacagcga

SEQ ID NO: 2863 - DNA, 412 bp, Zea mays
  Clone ID: LIB3061-034-Q1-K1-F7
ctgatcgaagctttcagccgagcaccatcgtcacagtcagtaaccaagcataggtgtgtctccgagtgatttgcgctgagcgatcagttcatccagagcgagcggagctgagctgagctgagctgagcgagcttgcgttgcttgagagaccctgctgccatggctaccaaccaggacaaggctagctaccaggccggtgagaccaaggcccgcaccgaggagaagaccgggcaggcggtgggggcgaccaaggacacggcgcatcacgccaaggaccgtgcggcggacgcggcggggcacgcggcgggcaagggccaggacgccaaggaggccaccaagcagaaggcgtccgacaccggcggctacctgggaaagaagaccgacgaggccaagcacaacgccggcgagacga

SEQ ID NO: 2864 - DNA, 395 bp, Zea mays
  Clone ID: LIB3061-034-Q1-K1-F8
gcaacatacaaagtggaaactattagcatcaacatatcatcaatattgaccgggacggttaccatccatacggtccttgctctttctagcatgtagcagctaactgcgacaatactaactaaatgcttacaagcttctatagcttccattgtttccccataccttacataaatgatcgctagatcatttgaaaacctaattcttcatcgactatacgctccaacaagcaatctctaccatgcagcatatcttaatcactctagctgtttcaacaatgcgacagccgtatctcattgagcacatcattggtacgacaccatcaagccacagcataccgacaccacatcagctacctgtcactaaccaatgatgtctagcaaacctatctcactact

SEQ ID NO: 2865 - DNA, 268 bp, Zea mays
  Clone ID: LIB3061-034-Q1-K1-F9
gggttcagcttgtattcccactctgtcgcacagcgacggccgtcgtcgctgagatcgcggggaagaaatggagctttctagcaagctcttcacggccggcctcctctgcatgctgctgatgctgtccgcagatgtcccgccggcggccgatgcggaggctccgacgtgccagtcgcagaaccacaagttgcagggcccgtgactccgcactgacatatgggccatcagctgcaggaacgaggggttatcctgcggcatgtgccgcggc

SEQ ID NO: 2866 - DNA, 416 bp, Zea mays
  Clone ID: LIB3061-034-Q1-K1-G1
gccggcgcggctcccggtgtcccttcccctctccttccttcggcgccaagtccatccggccctccgaatctccgattgccgccgtccaggtttggcaggtgccggccgacagttgagaatgggactgaggcgtctgatgagatgctgctgctgcattgcaaagcacgcggacgacggcgacaagatcgatttcggaggtggcaatgttcacgttgtcacaagcaaagaggactgggaccaaagaattgcggaggcaaacaaggatgggaaaaccgtggttgcaaacttcagcgcttcctggtgtgggccgtgccgtgtcatcgcacctgtctacgccgaaatgtcgcagacgtacccccagctcatgttcctgacgatcgatgttgatgacttgatggagttcagctcgtcgtggg

SEQ ID NO: 2867 - DNA, 347 bp, Zea mays
  Clone ID: LIB3061-034-Q1-K1-G10
ctagcaacatagaaagcacaatagtgtaccaacaatggcagccaaaatattgtgccggcttatgctccttggtctttctgcaagtgctgctacagctaccattttcccgcaatgctctcaagctcctatagcttcccttctttccccgtacctatcaccagcggtgtcttctgtatgtgaaaacccaatactttaaccctacaagatccaacaggcaattgcagctggcatcttacctttatcacccttgttactacaacaatcattatccctattacaacagttaccttaggtgcatttattggcacacatcatcaaggcacaacaactactacaacttgtgctag

SEQ ID NO: 2868 - DNA, 422 bp, Zea mays
  unsure (1)..(422): unsure at all n locations; Clone ID: LIB3061-034-Q1-K1-G11
gccgcatccaagcccgtgccagctgcagggaacctgcggcgttggcagcaccccgatcctgggccagtgcgtcgagttcctgaggcatcagtgcagcccgacggcgacgccctactgctcgcctcagtgccagtcgttgcggcagcagtgttgccagcagctcaggcaggtggagccgcagcaccggtaccaggcgatcttcggcttggtcctccagtccatcctgcagcagcagccgcaaagcggccaggtcgcggggctgttggcggcgcagatagcgcagcaactgacggcgatgtgcggcctgcagcagccgactccatgcccctacgctgntgccggcggtgtgccccactgaggaaactatgtgctgtagtatagccgctggctagctagctagttgagtcatttagcggcgatga

SEQ ID NO: 2869 - DNA, 415 bp, Zea mays
  Clone ID: LIB3061-034-Q1-K1-G12
ggacaacccggcgtccttgtcggggcctgcccgccgcgcgccacaccccgcgcgcgccgcgccctacccaccggccgctcccaaggcccgtgccgccgccgactcgccctacggggtctactccaagcacatcgccgcgatagcgccgcccccgctggccaaagcaaggtcgcttgagacgggaacgaagctgcacatctccaaccttgactccggcgtcaccatcgaggatgtccaggaactcttctcagaagttggggagctcaagcgttattctatgaattatgacaaggatgggagatctaaggggactgtggaagttgtctttgcaaggaaagtggatgctttggatgctatcaagagatacaatggtgttctacttgatgggaagccaatgaatctagagctcattgga

SEQ ID NO: 2870 - DNA, 403 bp, Zea mays
  Clone ID: LIB3061-034-Q1-K1-G2
agcattcaaaaacacaccaagcgaagctcactatcaacgacctaacaccaatggctaggcgaagatattagccctccttgcgcttcttgcccttttagtgagcgcaacaaatgcgttcattattccacagtgctcacttgctcctagtgccagtattccacagttcctcccaccagttacttcaatgggcttcgaacatccagccgtgcaagcctacaggctacaactagcgcttgcggcgagcgccttacaacaaccaattgcccaattgcaacaacaatccttggcacatctaaccctacaaaccattgcaacgcaacaacaacaacaacagtttctgccatcactgagccacctagccgtggtgaaccctgtcacctacttgcaacaacaactgcttgca

SEQ ID NO: 2871 - DNA, 421 bp, Zea mays
  Clone ID: LIB3061-034-Q1-K1-G3
agaccaactagcaacatagaaagcacaatagtgtaccaacaatggcagccaaaatatggtgcgtccttatgctccttggtctttctgcaagtgttgctaccgcaaccattttcccacaatgctcacaagctcctatagcttcccttcttcccccatacctctcaccagcggcgtcttcaatgtgtgaaaccccaattgttcaaccctacaggatccaacaggcaatcgcaacaggcatcttaccattatcacccttgttcctccaacaaccgtcagccctattacagcagttacctttggtccatatggtggcacaaaacatcagggcacaacaactacaacaacttgtgctagcaaaccttgctgcatactctcagcaacatcagtttcttccattcaaccaactggctgcattgaactc

SEQ ID NO: 2872 - DNA, 414 bp, Zea mays
  Clone ID: LIB3061-034-Q1-K1-G4
ggaaaaaataatgaagagggtaataattctgataagggtgaggaggatgaagaagaggaagcaacacgcaagaatagacttggactaactaaaaagggcatggatgatgatgaggaaggtggaaaagatctagatttcgatttggatgatgaaattgagaaaggtgatgactgggagcatgaagaaacattcactgacgatgatgaggctgtagacattgatccagaggaacgggcagatttagctcctgaaattcctgctccacctgaaatcaagcaggatgatgaagagaacgaagaagaagggggcctgagcaagtctggcaaggaactaaaaaagttgcttgggcgcgctgctggactaaatgagtcagatgcggatgaggatgaagaagacgaagatcaagaagatgat

SEQ ID NO: 2873 - DNA, 347 bp, Zea mays
  unsure (1)..(347): unsure at all n locations; Clone ID: LIB3061-034-Q1-K1-G5
gaactgtgtaataatggaacttggagcacccagctgtgcaagcctatatgctgcaaggagcaattgcggcgagcgtcttacaacaaccaatttcccagttgcaacaacaatccttggcacatctaacaatacaaaccatcgcaacgcaacagcaacaacaattcctaccagcactgagccacctagccatggtgaaccctgccgnctacttgcaacagcagtttgcttgcataaaacccacttgctctggcaaacgtagttgcaaaccagccacaacaacagctgcaacagtttctgccagcgctcagtcaactagccatggtgaaccctgccgcctacctacaaca

SEQ ID NO: 2874 - DNA, 411 bp, Zea mays
  Clone ID: LIB3061-034-Q1-K1-G6
ccgaattcccaggctggcaggtcggctaggagggcaggaagaccgaagaccgagccgggccgcggctcgggacgggaactggacaggacctcaaaatctcagatccttgctgcccgcccgaccgtgcccgtcgacgcgtcggtattgccggccgagccccacctccgccctcttctactacacggggatcggatacgccacaggctgagcgatggtgctaggggtcttcggctacggctctctcatctggaaccctggcttcgacttcgacgacgaaatgctcgagttcatcaaaggctacaagctcacctttaatctcgctggcattgaccacagatgcacaccggatcatccgtcgaggacctgcacgcttgataccgacgacgaggccatatgctggagaattgcata

SEQ ID NO: 2875 - DNA, 414 bp, Zea mays
  Clone ID: LIB3061-034-Q1-K1-G7
ccgccgccgtcccgtcaccaccaccaaccttggtagcagccgccgtccggtcggcaggaccaccttggtagccgccgccgaagcgcgccgcgggcgcgggcgctcgcgatggctaaccgcacggaccccctcgcgaagagcatccatgggacgaacccacaaaacctggtggagaagatcgtgcgctccaagatctatcagagcacctactggaaggagcaatgcttcggcctcaccgcagagacgctagtcgacaaggccatggagctcgaccacaccggcggaacctacggcggcaaccgcaagcccacccctttcctctgcctcgcgctcaagatgctgcagatccaaccagacaaggacatcgtagtcgagttcatcaagaacgaggattacaagtatgttcgtgttctc

SEQ ID NO: 2876 - DNA, 354 bp, Zea mays
  Clone ID: LIB3061-034-Q1-K1-G9
gaagaaaggacaagggtggaatcaacttcacatcaacagtgacgaacacacatgtggaccttgatacagtaaaagcaatctgtagcgagtacaggatacataatgctgatgtctccctgagatatgatgctacagcagatgatctcatagatgttattgaaggaagccggatttacactccttgcgtatatgttgccaacaagattgatcagataacactcgaggagctggaaatcttggacaaactttcccattactgcccggttagtgctcatcttgaatggaatcttgatggacttctggagaaggtatgggaatactcggatttggttaggatatacacaaaacctaaag

SEQ ID NO: 2877 - DNA, 389 bp, Zea mays
  Clone ID: LIB3061-034-Q1-K1-F4
tggacgtcagcctagcaattagctcatcgactccagattggagaactcgacaccatgagaggtgctgatcgttgcccttgctctcctggcgctcgctgcgagcgccgcctccagtacaagcggcggctgtggctgccagacaccaccgtttcatctaccgcctccgttctatatgccgcctccgttctatctgccgccgcagcagcagccgcagccatggcaataccccactcaaccaccgcagctaagcccgtgccagcagttcggatcctgcggcgtcggcagcgtcggcagcccgttcctgggccagtgcgtcgagttcctgaggcaccagtgcagcccggcggcgacgccctacggctcgccacagtgccaggcgctgcagcagc

SEQ ID NO: 2878 - DNA, 366 bp, Zea mays
  Clone ID: LIB3061-034-Q1-K1-E1
atcggctcggaccgggccgggccggggcgtgtggctgcgctgcgtcgcctcgcctcgggtcggcgattcttccggcgaaccaacggcgccagccacacctgagcgagcggcgcagagaggtggcgcgtggacgccacgctcgcctcagccttagggatcgagggccctttccgtccgcgtggctgctgctcctctcgtctctcctcccacccgtccaaggcatggagcactgctatgtgggacagccgatctcgagggccgaggcaatgcccgagaggaggtccaggttctggcagatggatgcgccttcctccgcccgggcggaggtcatctgcccccagcctcgccgcgccacccggattcccc

SEQ ID NO: 2879 - DNA, 321 bp, Zea mays
  Clone ID: LIB3061-034-Q1-K1-E10
ttcccgggatttcgagcatgcacaaacacaccaagcgaagctacctagcatctacttaacaacaatggctaccaagggtggtccctacttgcgcttgtcgccctctttgagagcgcatcatatgcgtgcattattcctcattgctgactggctcctagtgctattataccacactgtctccatctagatactctactggacttcgtccaccgttctcatcatgccagctatttgctacgagcccttgcgccttgcgttcgtcaaccccgctatggatgtttaaatctactgctcacttgtcgactatataaactctgcact

SEQ ID NO: 2880 - DNA, 365 bp, Zea mays
  Clone ID: LIB3061-034-Q1-K1-E12
caaccacagttgttgccgttctaccagcacgttgcgcctaacgctggcaccgtcttacaactgcaacaattgctgccattcaaccaacttgctttgacaaacccagcagcattctaccaacaacccatcattggtggtgccctcttttagatttcttatgagttatagttcaataataaagttttttgtctgatgtttgtggcttcccagaaataagaaagtacatttctaaaaaaaaaaaaaaaaaaaaaaaaaataaaaaataaaaaaaaaaaaaaaaaaaaaataaaaaaaaaaataaaaataaaataataaaaaaaaaaaaattaaaggaaaaaaaaaaaaaaagggccggccgttttaaa

SEQ ID NO: 2881 - DNA, 425 bp, Zea mays
  Clone ID: LIB3061-034-Q1-K1-E2
attgagaccaactagcaacatagaaagcacaatagtgtaccaacaatggcagccaaaggattttgcttccttatgctccttggtctttctgcaagtgttgctaccgcaaccattttcccacaatgctcacaagctcctatagcttcccttcttcccccatacctctcaccagcggtgtcttcaatgtgtgaaaacccaattgttcaaccctacaggatccaacaggcaatcgcaacaggcatcttaccattatcacccttgttcctccaacaaccgtcagccctattacagcagttacctttggtccatttggtggcacaaaacatcagggcacaacaactacaacaacttgtgctagcaaaccttgctgcatactctcagcaacatcagtttcttccattcaaccaactggctgcattgaactc

SEQ ID NO: 2882 - DNA, 423 bp, Zea mays
  unsure (1)..(423): unsure at all n locations; Clone ID: LIB3061-034-Q1-K1-E3
gcaaagcggcagtgcgtagagaggatcgtcgaacagaacagcatgaagatggtcatcggtctcgtcgtgtgcctggctctgtcagctgccagcgcctctgcaatgcagatgccctgcccctgcgcggggctgcagggcttgtacggcgctggcgccggcctgacgacgatgatgggcgccggcgggctgtacccctacgcggagtacctgaggcagccgcagtgcagcccgctggcggcggcgccctactacgccgggtgtgggcagccgagcgccatgttccagccgctccggcaacagtgctgccagcagcagatgaggatgatggacgtgcagtccgtcgcgcagcagctgcagatgatgatgcagcttgagcgtgccgctgccgncagcagcagcctgtacgagccagctctgatgcaa

SEQ ID NO: 2883 - DNA, 410 bp, Zea mays
  Clone ID: LIB3061-034-Q1-K1-E4
accaactagcaacatagaaagcacaatattgtaccaacaatggcagccaaaatatttggcctgcttatgctccttggtctttctgcaagtgctgctacggcgaccattttcccgcaatgctcgcaagctcctatagcttcccttcttcccccgtacctctcaccagcggtgtcttcggtatgtaaaaacccaattcttcaaccctacaggatccaacaggcaatcacagctggcatcttacctttatcacccttgttcctccaacaatcatcagccctattacatcagttacctttggtgcatttattggcacaaaacatcagggcacaacaactacaacaacttgtgctagcaaaccttgctgcctactctcagcaacagcagtttcttccattcaaccaactagctgc

SEQ ID NO: 2884 - DNA, 416 bp, Zea mays
  unsure (1)..(416): unsure at all n locations; Clone ID: LIB3061-034-Q1-K1-E5
gcgaggagggcaggaagaccgaagaccgtaccgtgcgggggctcgggacgggaacgggacaggaccccaaaatctcagatccttcctgcccgcccgcccgtgcccgtcgacgcgtcgttcttgccggccgcgcctcacctccgccctctcctcctccagggggatcggatacgccacaggctgcgcgatggtgctgtgggtcttcggctacggctccctcatctggaaccccggcttcgacttcgacgacaaaatcctcggcttcatcaagggctacaagcgcacctttaatctcgcttgcattgaccacagaggcacaccggagcatncggcgaggacctgcacgcttgaaaccgacgacgaggccatatgctggggaattgcatattgtgtcaagggtggtccagaaaaagagc

SEQ ID NO: 2885 - DNA, 230 bp, Zea mays
  Clone ID: LIB3061-034-Q1-K1-E7
cccacgcgtccggctaagaatatcttgtgattgatcagtgctaatgccaaggggtgcgactgcatttctgtagaataatccctgcaatttccataaaagctagtgcgcagtgcgctgaccttgcgctatatttgtggaattaccggaagcatgctgctgcgatctatgaatgaacacaagacacttgtaactggtactacaagatccaacaggcaatcgcagcaagcatc

SEQ ID NO: 2886 - DNA, 245 bp, Zea mays
  Clone ID: LIB3061-034-Q1-K1-E9
atcgctcacatagctcctataccttgcattcttcacctatacctctcaccagcggctgcttgcatgtgtgaaaacccaatcgatcagacgtaccggatccaacaggcaatcgcatccaggatcctaccatcattaatcttgctcctccaacatgcgtcaaccctattacagcagctaactttgggccatttggagggacaaaaccatgcgggtccacaacgtccaaaacctgggcctgccaaact

SEQ ID NO: 2887 - DNA, 419 bp, Zea mays
  Clone ID: LIB3061-034-Q1-K1-F1
ccaactagcaacatagaaagcacaatagtgtaccaacaatggcagccaaaatatttgggttccttatgctccttggtctttctgcaagtgctgctaccgcaaccattttcccacaatgctcacaagctcctatagcttcctttcttcccccatacctctcaccagcggtgtcttcagtatgtgaaaacccaattcttcaaccctacaggatccaacaggcaatcgcagcaggcatcttacctttatcacccttgttcctccaacaaccgtcagccctattacagcagttacctttggtgcatttgttggcacaaaacatcaaggcacaacaactacaacaacttgtgctaagaaaccttgctgcctactctcagcaacagcagtttcttccattcaaccaactggctgcattgaactct

SEQ ID NO: 2888 - DNA, 328 bp, Zea mays
  Clone ID: LIB3061-034-Q1-K1-F10
gggcgtcagcttcagctatccgcgaccgcgacgatgggtctgatcgtggccgtcacggtgccagctccggccggcgtgcgcgtgctcggcaggggcgccgcgcgcgtgacgccgacaccgtggacggttgtcgtgggcccgagacgcttctccgagcggatgtccgtcgagaccaccgacgccaccagcaccatcgacgtgggcggcctagatgaccacgcgctggaggctacgaactccaagacaggtgtggcggtcatgcttggaggtggcgccggtacataggctcttaccgctaaccagactgcagtccaagcccgcggtgcca

SEQ ID NO: 2889 - DNA, 266 bp, Zea mays
  Clone ID: LIB3061-034-Q1-K1-F11
gctggtgtgagccctgctaccttcttgacacaaccacagttgttgtcgttctaccagggcgctgcgcctaacgctggcaccctcttacaactgcaacacttgctgacattcaaccaacttgctttgacaaacccagcagcattctaccaacaacccattactggtggtgccctcttttagatttattatgagttatagtacaataataaagacttctgcctgatgttcgcgtattaccagaaataagaaagtacatttgtaagcac

SEQ ID NO: 2890 - DNA, 413 bp, Zea mays
  Clone ID: LIB3061-034-Q1-K1-F12
gttcttcgccaccccgccggtgcacggctcgctggcgaaccaggtggtgcacgccgggggacctgtgcttcaagctccccgacggggtgagcctggaggagggcgccatgtgcgagccgctgagcgtgggcgtgcacgcgtgccgccgtgcggaggtggggcccgagacgggcgtgctcgtggtgggcgccggtcccatcggcctggtgtcgctgctagcggcgcgagccttcggcgcgccgcgcgtggtggtcgtggacgtggacgaccaccgcctggccgtggccaggtcgctgggcgcggacgctgcggtgcgggtgtcgtcccgcgcggaggacctggcggacgaggtggagcgcatacgcgcggccatgggctcggacatcgacgtcaggctggactgagccgggttc

SEQ ID NO: 2891 - DNA, 407 bp, Zea mays
  Clone ID: LIB3061-034-Q1-K1-F2
cccagccacacccatgcccgtgccaacagccgcatccaagcccgtgccagctgcagggaacctgcggcgttggcagcaccccgatcctgggccagtgcgtcgagtttctgaggcatcagtgcagcccgacggcgacgccctactgctcgcctcagtgccagtcgttgcggcagcagtgttgccagcagctcaggcaggtggagccgcagcaccggtaccaggcgatcttcggcttggtcctccagtccatcctgcagcagcagccgcaaagcggccaggtcgcggggctgttggcggcgcagatagcgcagcaactgacggcgatgtgcggcctgcagcagccgactccatgcccctacgctgctgccggcggtgtcccccactgaagaaactatgtgctgtagtat

SEQ ID NO: 2892 - DNA, 414 bp, Zea mays
  Clone ID: LIB3061-034-Q1-K1-F3
acgatgccgcctccgttctatctgccgccgtagcagcagccgcagccatggcaataccccggtcagaccaccgcagctaagcccgtgccagcagttcggatcctgcggcgtcggcagcgtcggcagcccgttcctgggccagtgcgtcgagttcctgaggcaccagtgcagcccggcggcgacgccctacggctcgccacagtgccaggcgctgcagcagcagtgctgccaccagatcaggcaggtggagccgctgcaccggtaccaggcgacatacggtgtggtcctgcagtccttcctgcagcagcagccgcagggcgagctcgcggcgctgatggcggcccaggtagcgcagcagctgacggcgatgtgcggtctgcagctgcagcagccaggtccctgcccttgcaacgc

SEQ ID NO: 2893 - DNA, 371 bp, Zea mays
  Clone ID: LIB3061-034-Q1-K1-D9
tcgttttacccacaggttgcgctaaacattaacgccttcttgcaacagaaacaggggctaggattctacccacaggatgtggcaaacaatgtctgcttcttacaacaacaacaattgctgccatttaaccaactcgctttcacgaatcctaccaccttattgcagcagcccaccattcgtggtgccatcttgtacaatctttatgaactatactgtaataataaagttctaatgctgctaaaaccaagccgggagcgggtgcgagggcaagaacttctacacccggagcgcgttcctgatcgccgacaacaagtacccggacttaacggatggccgttctgaagaatccagctttcgtcagattgctggct

SEQ ID NO: 2894 - DNA, 409 bp, Zea mays
  Clone ID: LIB3061-034-Q1-K1-C5
gtgcgagaaggcaagccatctagaggtcccagtagctgagggcagccatgaggctctgaagggaggaaagccgcacgttgctgacttcgttcatggacctgatggcctcgggaacgtagatcttcctgatcccactatcaagaaagtggaggaaagtgctaccgacttcttggttgataaggtctcgcgatttcctggagaggtctctgtgctcgccttgggtcctctgacaaacatagcattggccatcaagaaggatccctcattcgtgaaaaacgttaagaagatcgttgtgctgggtggagcgttctttgcggctggaaatgccactccttccgctgaagcaaatatccacagtgatccggaggcagccgacatggttttcacttctggggcggacatctacgtc

SEQ ID NO: 2895 - DNA, 411 bp, Zea mays
  Clone ID: LIB3061-034-Q1-K1-C6
caggaactagagcttttgtgtaaaatgccagagcggggaagcgatatgtggggagactgggagccaccaaggcagctccggcgcctgattattgaaggcatcgacttctcacggcagcctcgatggatcaaccgctcctgcctgccacgcctctgctccttatctctgatggtgcacgctcttgaagcacaggacctagataatctagcgaggttgccagagctccagtacctcatgctagatggtctcagctggcctccaaggtatactgttggcccagacgacttcaggaatctgaagttctgcgaagtgggcacaacgttcgagtttcgtaagggcgccatgccaaggcttgaagagctgcactttggagtttatgcagggtacagtagttgggaacagtatggtgtg

SEQ ID NO: 2896 - DNA, 434 bp, Zea mays
  Clone ID: LIB3061-034-Q1-K1-C7
ccaccgagacccacccatgcatcgcaacccaacaatcgatcatcaatttcaaccaagatactttacctcctggggctgcgtgctctttatgcatgcggggctaactcgacaattttccctcaatgctcacaagctcctatagcttcccttcttcccccataccttccatcaatgatagcttcactatgtgaaaacccacctcttcaaccctatacgctccaacacgcaatctcagcaagcaacatacctttatcacccttgtttcaacaatcgccagccctatctttggtgcagtccttgctacaaaccatcaaagcacagcagctgcagcaactcctactacctgtgatcaaccaactagctctggcaaacctttcttcatactatcagcaacaacaatctcttccattcaaccaactatatacactgaaccc

SEQ ID NO: 2897 - DNA, 406 bp, Zea mays
  Clone ID: LIB3061-034-Q1-K1-C8
gtgctgccagtagagctctcagaactcgggaaaaaaaatgtcagaggccgccgtgcgtgtgatcggcctatggccgagcccgttcgtgatccgcgtcctgatcgccctgaagctgaagggcgtcgagttcgagttcgtggaggaggtggtgggcaggaagagcgagctgctgctgaggtcgaacccggtgcacaagaagatccccgtcctgctccaccacggcaagcccatctccgagtctctgatcatcgtccagtacatcgacgaggtctggtcctccggcgcgccggccttcctccccgccgacgctcacgcccgcgccgtccagcggttctgggcgcagtacgtcgacgacaagctgccttgggcgatccgcatactgaagggaacggacgacgacgggggc

SEQ ID NO: 2898 - DNA, 350 bp, Zea mays
  Clone ID: LIB3061-034-Q1-K1-C9
gtgaagccgccgccgctgcagtgtccatagccaccgcaggagactgagatggggggtgggtgtcaagacccacaggaccaatgcgtacttcaagcgtttccaggtgaagctcaagagaaggcgcgctggcaagacagactacagggccaggataaggctgattaaccaagacaaaaacaagtacaatacacccaaatacagatttgttgtgctgatttaccaacaaggacatcacaggacagatcatgtctgctagtatagcacgtgatatggatcttgcttctgcttactcgcatgatgtgccacgatatggacttgaagttggtctgaccaactatgcagctgactac

SEQ ID NO: 2899 - DNA, 420 bp, Zea mays
  Clone ID: LIB3061-034-Q1-K1-D1
gtggaatccagtagcaacaatagagcaacaatggcgaccaagatactttccctccttgggctgcttgctctttctgcatgtgttgctaacgcgacaattttccctcaatgctcacaagctcctatagcttcccttcttcccccataccttccatcaatgatagcttcagtatgtgaaaacccagctcttcaaccctataggctccaacaagcaatcgcagcaagcaacatacctttatcacccttgtttcaacaatcgccagccctatctttggtgcagtcattggtacaaaccatcaaggcacagcagctgcagcaactcgtgctacctgtgatcaaccaagtagctctggcaaacctttctccctactatcagcaacaacaatttcttccattcaaccaactatctacactgaaccct

SEQ ID NO: 2900 - DNA, 390 bp, Zea mays
  Clone ID: LIB3061-034-Q1-K1-D10
gcgactttgagattatcaacgactacctcacgaagaaggtgcacgacagggactacagctgcatcgccatcgcggacgccgacctaaacaagaccgagccatgggacctaccgaaagttgcaaagatgggcgagaaggagtggtacttcttctaccagaaggaccgcaagtacccgacggggctgagggcgaaccgggccactgaggcgggttattggaaggcgaccggcaaggacaaggaggtctacaacccctttgcagcggaagggctgctgctggtcggcatgaagaagacgctcgtgttctacaaaggcagggctcccaggggtgacaaaaccaactgggtgatgcacgagtacaggctcgaaggcagcggtagggctcctgcta

SEQ ID NO: 2901 - DNA, 419 bp, Zea mays
  Clone ID: LIB3061-034-Q1-K1-D11
cttctacgtcgtccgcaagggggacgtcatcggcatctacaaaaccctcagcgaatgccaagctcaagtcagcaattcggttcgcgacccttctgtcaccgtcttcaaaggctactcgctgcgtaaagacaccgaggaatacctcgccgcgcgcgggttaaggaacgctctctacgccattgatgcaacagatgcacgagatgaattgttcgacgatctagttccctgccctttccagcaacctgatggagctgcatcgtctactctgaacagatcacaggagattgaaatccgaccatcaaagaagcatgccaaagttgatgagcaagtaccattacctgataatcatctctcttgcattgctgaattcgatggtgcctctaaaggaaatccagggaaagcccgtgctggagcaataa

SEQ ID NO: 2902 - DNA, 420 bp, Zea mays
  Clone ID: LIB3061-034-Q1-K1-D12
gtggaatccagtagcaacaatagagcaacaatggcgaccaagatactttccctccttatgctccttgctctttctgcatgtgttgctaacgcgacaattttccctcaatgctcacaagctcctatagcttcccttcttcccccataccttccatcaatgatagcttcagtatgtgaaaacccagctcttcaaccctataggctccaacaagcaatcgcagcaagcaacatacctttatcacccttgtttcaacaatcgccagccctatctttggtgcagtcattggtacaaaccatcaaggcacagcagctgcagcaactcgtgctacctgtgatcaaccaagtagctctggcaaacctttctccctactatcagcaacaacaatttcttccattcaaccaactatctacactgaaccct

SEQ ID NO: 2903 - DNA, 424 bp, Zea mays
  Clone ID: LIB3061-034-Q1-K1-D2
gcggcatagaaagcacaatagtgtaccatacaatggcagccaaaatattttgcctccggatgcgccttggtctttctgcaagtgctgctacggcgaccattttcccgcaatgctcgcaagctcctatagcttcccttcttcccccgtacctctcaccagcggtgtcttcggtatgtgaaaacccaattcttcaaccctacaggatccaacaggcaatcacagctggcatcttacctttatcacccttgttcctccaacaatcatcagccctattacatcagttacctttggtgcatttattggcacaaaacatcagggcacaacaactacaacaacttgtgctagcaaaccttgctgcctactctcagcaacagcagtttcttccattcaaccaactagctgcattgaactctgcttcttattt

SEQ ID NO: 2904 - DNA, 412 bp, Zea mays
  Clone ID: LIB3061-034-Q1-K1-D3
atatgccgcctccgttctatctgccgtcgcagcagcagccgcagccatggcaataccgcactgaaccaccgcagctaagcccgtgccagcagttcggatcctgcggcgtcggcagcgtcggcagcccgttcctgggccagtgcgtcgagttcctgaggcaccagtgcagcccggcggcgacgccctacggctcgccacagtgccaggcgctgcagcagcagtgctgccaccagatcaggcaggtggagccgctgcaccggtaccaggcgacatacggtgtggtcctgcagtccttcctgcagcagcagccgcagggcgagctcgcggcgctgatggcggcccaggtagcgcagcagctgacggcgatgtgcggcctgcagctgcagcagccaggtccctgcccttgcaacgc

SEQ ID NO: 2905 - DNA, 415 bp, Zea mays
  Clone ID: LIB3061-034-Q1-K1-D4
gaccaactagcaacatagaaagcacaatagtgtaccaacaatggcagccaaaatattgtgcctccttatgctccttggtctttctgcaagtgctgctacggcgaccattttcccgcaatgctcgcaagctcctatagcttcccttcttcccccgtacctctcaccagcggtgtcttcggtatgtgaaaacccaattcttcaaccctacaggatccaacaggcaatcgcagctggcatcttacctttatcacccttgttcctccaacaatcatcagccctattacaacagttacctttggtgcatttattggcacaaaacatcagggcacaacaactacaacaacttgtgctagcaaaccttgctgcctactctcagcaacagcagtttcttccattcaaccaactaggttcattg

SEQ ID NO: 2906 - DNA, 362 bp, Zea mays
  Clone ID: LIB3061-034-Q1-K1-D5
gcgtaggatattagaccctccttgcgcttcttgcccttattgtgatcgcaacaaatgcgttgattattccacaatgctgacttgctcctactgccattattccacagtgcctaccaccagctacttcaatggtctttgaacacctagctgcataagccatcattcaacaacaagcgcttgcagctagcgaattacatcaaccaattccccaattgcaacaacgctccttgccacatttaacaatgcatgccatcacaacgcaacatcatcaacagctgctaccagcactgacccacctagccatggtgaaccctgccgtctacttgcctgagcatctgctagcatccaacccactagctctg

SEQ ID NO: 2907 - DNA, 417 bp, Zea mays
  Clone ID: LIB3061-034-Q1-K1-D6
gagccgcccaagatcccgatccccactccgctggttgccggagctctagccggattggcctcaaccttgtgcacctaccccatggagctgatcaagaccagggtcaccatcgagaaggacgtatacgacaacgtcgcgcacgcgttcgtgaagatcctacgcgacgagggcccgtcggagctgtaccgtgggctgacacccagcctgatcggcgtggtgccgtacgcggcctgtaacttctacgcctacgagacgctgaagcggctctaccgtcgcgcgaccgggcggcgtcccggcgcggacgtgggccccgtggcgacgctgctcatcgggtcggcggcgggcgccatcgccagctcggccacgttcccgctggaggtggcccgcaagcagatgcaagtgggcgctgtgggcggg

SEQ ID NO: 2908 - DNA, 419 bp, Zea mays
  Clone ID: LIB3061-034-Q1-K1-D7
ctgatccagcccatttcgaactctctctagacgcttcctcggtctctctgtggaccggtgccccgtaccgtactcctcttcgcgccgtagaaatggcgctgccgaatcagcagggcgtggattaccccagcttcaagctcgtcatcgttggcgacggtggaactggtaaaaccacatttgtgaaaaggcatcttactggcgagtttgagaagaaatatgagcccaccattggtgttgaagttcaccctctggattttagcactaactgtggcaaaattcgcttttattgctgggacactgctgggcaagaaaagttcggtggccttagggatggctactacattcatggtcagtgtgccatcattatgtttgatgtcacttctaggctgacatacaagaatgttccgacatggcacagg

SEQ ID NO: 2909 - DNA, 416 bp, Zea mays
  unsure (1)..(416): unsure at all n locations; Clone ID: LIB3061-034-Q1-K1-C4
gcgacaacaagaagttcatgttcaacatcaacaacaacaaccgcagcaccaccaccaagaacggcaacaacagcaccaacaacaacatcaatgtgaaggccaacaacaacatcaccaacaatcacaaggccatgtgcaacaacacgaacagagccatgagcaacaccaaggacagagccatgagcaacaacatcaacaacaattccagggtcatgacaagcagcaacaaccacaacagcctcagcaatatcagcagggccaggaaaaatcacaacagcaacaatgtcattgccaggagcagcaacagactacaaggtgcagctataactactatagcagtagctcaaatctaaaaaattgtcatgaattcctaaggcagcagtgcagccctttggtaatgccttttctncaatcac

SEQ ID NO: 2910 - DNA, 396 bp, Zea mays
  unsure (1)..(396): unsure at all n locations; Clone ID: LIB3061-015-Q1-K1-F4
cgcaaattgcaccaagaaatccatcgagaggccgtcgacaggggaattaatggcgtcgtcgtctagcagcagccaccgccgcctcatcctcgcagccgccgtcctgctctccgtgctcgcggctgccagcgccagcgccgggacctcctgcgtgccggggtgggccatcccgcacaacccgctcccgagctgccgctggtacgtgaccagccggacctgcggcatcgggccgcgcctcccgtggccggagctgaagaggagatgctgccgggagctggcggacatcccggcgtactgccggtgcacggcgctgagcatcctcatggacggcgcgatcccgccgggcccggacgcgcagctggagggccgnctagaggacctgccgggctgcccgcg

SEQ ID NO: 2911 - DNA, 430 bp, Zea mays
  unsure (1)..(430): unsure at all n locations; Clone ID: LIB3061-015-Q1-K1-F5
cttttggattcaaaatgcaatgttaagattgccgattttggcttaagtaatattatgcgtgatggtcactttcttaagacgagttgtggtagcccgaattatgcagcacctgaggtcatatctggtaaactatatgctggtcctgaagttgacgtctggagctgtggagttattctttatgctcttctttgtggcactctcccatttgatgatgagaatattccaaaccttttcaagaaaataaagggtggaatatatacccttcctagtcatttgtcaccttcagtgagggacttgattcccagaatgctggttgttgatccaatgaaaaggattacaatacgtgaaatccgtgaacatatgtggttcaagatccgacttccgcgctatttggctgtgccgncttcagacactgctcaacaagttaaaa

SEQ ID NO: 2912 - DNA, 282 bp, Zea mays
  unsure (1)..(282): unsure at all n locations; Clone ID: LIB3061-015-Q1-K1-F6
gctactaccgccgctagctggttcaagtgcggcgagcggagccggagaccggtggaggaaattaagaggcgtcgatcgggcatggggtgcgacgacaagtgcgggtgcgccgtgccgtgccccggcggcaaagactgcaggtgcacgtcggggagcggcgggcagcgggagcacacgacttgcggctgcggggagcactgcgagtgcagcccgtgcacgtgtggccgggccacgatgccgtncggccgcgagaacaggagggctaacttgctctgcggggcg

SEQ ID NO: 2913 - DNA, 379 bp, Zea mays
  Clone ID: LIB3061-015-Q1-K1-F7
gaactctcctgcttatttacagcagcaacaactactaccattcagccagctagctggtgtgagccctgctaccttcttgacacaaccacagttgttgccgttctaccagcacgctgcgcctaacgctggcaccctcttacaactgcaacaattgctgccattcaaccaacttgctttgacaaacctagcagtgttctaccaacaacccatcattggtggtgccctcttttagatttcttatgagttatagttcaataataaagttttttgtctgaaaaaaaagccataccctactaaaccgacccggactaaaactcatacacagacacacccatgcttatgccaacaaaaaaactccaacaaaaaaaaaagggggggc

SEQ ID NO: 2914 - DNA, 435 bp, Zea mays; identical to SEQ ID NO: 2043
  Clone ID: LIB3061-015-Q1-K1-F8

SEQ ID NO: 2915 - DNA, 439 bp, Zea mays
  Clone ID: LIB3061-015-Q1-K1-F9
attttgagcattcagaaacacaccaagcgaagcacattagcaacaacctaacaacagtggctaccaagatattatccctccttgcgcttcttgcgctttttgcgagcgcaacaaatgcgttcattattccacaatgctcacttgctccaagttccattattacacagttcctcccaccagttacttcaatgggcttcgaacacccagctgtgcaagcctataggctacaacaagcaattgcggcgagcgtcttacaacaaccaatttcccagttgcaacaacaatccttggcacatctaacaatacaaaccatcgcaacgcaccagcaccaccaattcctacaagcactgagccacctagccatggtgaaccctgccgcctacttgcaacagcagttgcttgcatcaaacccacttgctctggcaaacgtagttgcaaa

SEQ ID NO: 2916 - DNA, 435 bp, Zea mays
  Clone ID: LIB3061-015-Q1-K1-G1
caactagcaacatagaaagcacaatagtgtaccaacaatggcagccaaaatattttgcctgcttatgctccttggtctttctgcaagtgctgctacggcgaccattttcccgcaatgctcgcaagctcctatagcttcccttcttcccccgtacctctcaccagcggtgtcttcggtatgtgaaaacccaattcttcaaccctacaggatccaacaagcaatcgcagctggcatcttacctttatcacccttgttcctacaacaatcatcagccctattacaacagttacctttggtgcatttattggcacaaaacatcagggcacaacaactacaacaacttgtgctagcaaaccttgctgcctactctcagcaacagcagtttcttccattcaaccaactaagttcattgaactctgcttcttatttgcaaca

SEQ ID NO: 2917 - DNA, 439 bp, Zea mays
  Clone ID: LIB3061-015-Q1-K1-G10
tcagcattcaaaaacacaccaagcgaagcgcactagcaacgacctaacaccaatggctaccaagatattagccctccttgcgcttcttgcccttttagtgagcgcaacaaatgcgttcattattccacagtgctcacttgctcctagtgccagtattccacagttcctcccaccagttacttcaatgggcttcgaacatccagccgtgcaagcctacaggctacaactagcgcttgcggcgagcgccttacaacaaccaattgcccaattgcaacaacaatccttggcacatctaaccctacaaaccattgcaacgcaacaacaacaacaacagtttctgccatcactgagccacctagccgtggtgaaccctgtcacctacttgcaacagcagctgcttgcatccaacccacttgctctggcgaacgtagctgcatac

SEQ ID NO: 2918 - DNA, 443 bp, Zea mays
  Clone ID: LIB3061-015-Q1-K1-G11
cccacgcgtccgcaactaccaacatacatagtgaagtacactagcaacatcttagcaccaatggcagccaagatttttgcgctccttgccctccttgctctttcagcaagtgttgctaccgcgactattattccacaatgctcacaacaatacctctctccagtgatagccgcgagatttgaatacccatctatacaatcctacaggctacaagaggccatcacagcaagcatcttacggtcgttagcattgaccgtccaacaaccatatgccctattgcaacaaccatccttagtgaatctgtatctccaaagaatcacagcacaacaactacaacaacggttgcttccaacaattaatcaagtagttgcagcgaaccttgctgcttaccttcagcaacaacaatttcttccattcaatcaactagctggggtgaaccctgc

SEQ ID NO: 2919 - DNA, 146 bp, Zea mays
  Clone ID: LIB3061-015-Q1-K1-G12
gccctcttttagatttattattgaactataactcataagaaatctaaaagagggcaccaccaatgatgggttatagttcaataataaagttttttgtctgatgtttgtggcttcccagaaataagaaagtacatttctagattctt

SEQ ID NO: 2920 - DNA, 435 bp, Zea mays
  Clone ID: LIB3061-015-Q1-K1-G2
caactagcaacatagaaagcacaatagtgtaccaacaatggcagccaaaatatggtgcctgcttatgctccttggtctttctgcaagtgctgctacggcgaccattttcccacaatgctcacaagctcctatagcttcccttcttcccccgtacctctcaccagcggtgtcttcggtatgtgaaaacccaattcttcaaccctataggatccaacaggcaatcgcagctggcatcttacctttatcacccttgttcctccaacaatcatcagccctattacagcagttacctttggtgcatttattggcacaaaacatcagggcacaacaactacaacaacttgtgctagcaaaccttgctgcctactctcagcaacaacagtttcttccattcaaccaactagctgcattgaactctgcttcttatttgcaaca

SEQ ID NO: 2921 - DNA, 440 bp, Zea mays
  Clone ID: LIB3061-015-Q1-K1-G3
acgcgttcggcaacatagaaagcacaattcattttcaacaatggcgcaacaatggcgagcacgaggttatccctccttatgctccttgctctttctacatgtcttgctaacgcgacaattgtccctcaatgctcacaagctcctatagcttcccttatttctccataccttccatcaattatagcttcagcatgtgaaaacccagctcttcaaccatatatgcttcaacaagcaatcgcagcaagcaacatacctttatcgcccttgttgttttaacaatcaccaaccctatctttggtgcagtcattggtacaaaccatcaaggcacaacaactgctgcaactcgtgctacctgtgatcaaccaagtaactctggcaaacctttctccctactcttaacaacaacaatttctttcattcaaccaactgtctacactgaa

SEQ ID NO: 2922 - DNA, 337 bp, Zea mays
  Clone ID: LIB3061-015-Q1-K1-G4
cagaaacacaccaagcgaagcgcactagcaacaacctaacaacaatggctaccaagatatgatccctccttgcgcttcttgcgctttttgcgagcgcaacaaatgcgtccattattccacaatgctcacttgctcctagttccattattccacagttcctcccaccagttacttcaatggccttcgaacacccagctgtgcaagcctataggctacaacaagcgattgcggcgagcgtcttacaacaaccaattgcccaattgcaacaacaatccttggcacatctaacaatacaaaccatcgcaacgcaacagcaacaacagttcctaccagcact

SEQ ID NO: 2923 - DNA, 430 bp, Zea mays
  Clone ID: LIB3061-015-Q1-K1-G5
ccggatttaacttcaaacatggcggacgtcgatgtcgagccggaggtcgccgccggtgctcccaagaagaggacgttccgcaagtacagctaccgcggcgtcgacctcgatgcgctgcttgacatgtccaccgacgacctcgttcagctcttcccagcgcgcgccaggagaaggttccagaggggtttgaagaggaagcccatggcgctcatcaagaagctgcgcaaggcgaaaaaggatgctcctgtcggcgagaagccagagccagtgaagacccatctccgcaacatgatcattgtccccgagatgattggcagcattgttggtgtctacaatggcaagaccttcaaccaggttgagatcaagcctgagatgattggccactatcttgcagagttctccatttcctacaagccggtcaagcacggta

SEQ ID NO: 2924 - DNA, 106 bp, Zea mays
  Clone ID: LIB3061-015-Q1-K1-G6
aagacgacacacattatcatgtgtggtatgaccaataatatatgcatggtcatgataaagttttggttttaatgaatctatcggccgcttgatgtctatgatggac

SEQ ID NO: 2925 - DNA, 429 bp, Zea mays
  Clone ID: LIB3061-015-Q1-K1-G7
gcaacatagaaagtagaatccattatcaacaatagagcaacaatggcgaccaagatattttccctccttatgctccttgctctttctacatgtgttgctaacgcgacaattttccctcaatgctcacaagctcctatagcttcccttcttcccccataccttccatcaattatagcttcagtatgtgaaaacccagctcttcaaccatataggcttcaacaagcaatcgcagcaagcaacatacctttatcgcccttgttgtttcaacaatcaccagccctatctttggtgcagtcattggtacaaaccatcagggcacaacagctgcagcaactcgtgctacctgtgatcaaccaagtagctctggcaaacctttctccctactctcagcaacaacaatttcttccattcaaccaactgtctacactg

SEQ ID NO: 2926 - DNA, 435 bp, Zea mays
  Clone ID: LIB3061-015-Q1-K1-F3
ctttatctactccagagcgcagaagaacccgatcgacaccatgagggtgttgctcgttgccctcgctctcctggctctcgctgcgagcgccacctccacgcatacaagcggcggctgcggctgccagccaccgccgccggttcatctaccgccgccggtgcatctgccacctccggttcacctgccacctccggtgcatctcccaccgccggtccacctgccgccgccggtccacctgccaccgccggtccatgtgccgccgccggttcatctgccgccgccaccatgccactaccctactcaaccgccccggcctcagcctcatccccagccacacccatgcccgtgccaacagccgcatccaagcccgtgccagctgcagggaacctgcggcgttggcagcaccccgatcctgggccagtgcgtcgagttcct

SEQ ID NO: 2927 - DNA, 440 bp, Zea mays
  unsure (1)..(440): unsure at all n locations; Clone ID: LIB3061-015-Q1-K1-E11
gaccaactagcaacatagaaagcacaatagtgtaccaacaatggcagctaaaatgtgttgcctccttatgctccttggtctttctgcaagtgctgctacggcgaccattttcccacaatgctcacaagctcctatagcttcccttcttcccccgtacctctcaccaacggtgtcttcggtatgtgaaaacccaattcttcaaccctacaggatccaacaggcaatcgcagctggcatcttacctttatcacccttgttcctccaacaatcatcagccctattacagcagttacctttggtgcatntattggcacaaaacatcaaggcacaacaactacaacaacttgtgctagcaaaccttgctgcctactctcagcaacagcagtttcttccattcaaccaactagctgcattgaactctgcttcttatttgcaacaac

SEQ ID NO: 2928 - DNA, 365 bp, Zea mays
  Clone ID: LIB3061-015-Q1-K1-E12
cagagcgcagaagaacccgatcgacaccatgagggtgttgctcgttgccctcgctctcctggctctcgctgcgagcgccacctccacgcatacaagcggcggctgcggctgccagccaccgccgccggttcatctaccgccgccggtgcatctgccacctccggttcacctgccacctccggtgcatctcccaccgccggtccacctgccgccgccggtccacctgccaccgccggtccatgtgccgccgccggttcatctgccgccgccaccatgccactaccctactcaaccgccccggcctcagcctcatccccagccacacccatgcccgtgccaacagccgcatccaagcccgtgccagc

SEQ ID NO: 2929 - DNA, 428 bp, Zea mays
  Clone ID: LIB3061-015-Q1-K1-E2
caaccatataggcttcaacaagcaatcgcagcaagcaacatacctttatcgcccgtgttgtttcaacaatcgccagccctatctttggtgcagtcattggtacaaaccatcagggcacaacagctgcagcaactcgtgctacctctgatcaaccaagtagctctggcaaacctttctccctactctcagcaacaacaatttcttccattcaaccaactgtctacactgaaccctgctgcttatttgcagcaacaactattaccatttagccagctagctactgcctactctcagcaacaacaacttcttccatttaaccaattggccgcactgaaccccgctgcttatttgcagcagcaaatactactaccatttagccagctagctgcagcaaaccgtgcttccttcttgacacagcaacagttgct

SEQ ID NO: 2930 - DNA, 352 bp, Zea mays
  Clone ID: LIB3061-015-Q1-K1-E3
agctatcaacaagttctttactgaccccaagtgaagcaaagcagctttggttggccgctgatgacgatggttctgctactagttgcccttggggattgtgtaccctttttatggcaattcgatatgtgaatgagttcgacggtccctgtttgttcctcgtactcacctgtcatgtggatttgatgcacttcagtgataaaactgtcagccaacgttcattacaagtggatttttgcaaactggttatgtaaaggataagtaattgtaatttacaagtgttttagactttgtcttttatgctgtttaagaatatatatggtacacttgatctgatgtatctgtcctttatgcc

SEQ ID NO: 2931 - DNA, 434 bp, Zea mays
  Clone ID: LIB3061-015-Q1-K1-E4
cggacgcgtgggttttttttttttttttttttttttttttttaaacggtctgctgtatgagataactttattgacacctgccacatatttcatagatgtcttgtcggagaaaacaaaaacacaactgatccatcaaacacaaaattcttcaatagtgcacattccgcaccgatagcaaatcagagtcatccaccatcaaggcattattaaccaatcacgctaagatttattgcgactggccttctcctcgataccagactgcgaaaatctcttcctcaggacctcaaggacttgttccatctttacatccttgactctgagcagcaccataacggggtacagcagatcagccatctccgaagctgcacgagattggtcctcgttctcaagcagcgtttgaattagctcaccagcttcttcacgtattttcgagc

SEQ ID NO: 2932 - DNA, 430 bp, Zea mays
  Clone ID: LIB3061-015-Q1-K1-E5
cattcatcagggttatatttggttgtcaaaaagtactgtacttaattcacatctttcacatttttcactagcaatagcagccccaaattgctttcctgactaggaacatattctttacaggtataagcatgccaactctaaactatatgaatccttttatattctcatttttaagtacttctctgtttctgctacttttgtactgtatattttcagcttctccatcagactgatgaccccatattcagtgtgctgcaagtgatttgacatatgtggcttatccttcaggtatgtctcatgttgtgacttcattgctgattgcttttgtaatggtactgttgagttcatttctggttacaatcagcctttactgctttatattgttctactaattttggcttgcacagccaggatgattggttttctgcat

SEQ ID NO: 2933 - DNA, 432 bp, Zea mays
  Clone ID: LIB3061-015-Q1-K1-E6
aaaagaatctcctgtgatgcatataacagatttaacaactgtatctgcaaagaaggccaaagatttccttcccttcttgcagaggaacagaaggcattctgccgttgttgaatatgtttttagtggccatcggttcaaactaacaattcctaaggagacttgcagtattgccttctcattatctggtgttcggtgtcctggtaaaggcgagccatactcagatgaagctattgctttgatgaagagaaagatactacagcgtgatgtggagatagaagttgaagcagttgacagaacaagaacattcataggttcgttgtgggagtccaagaccaacatgggctctgtacttctggaagctgggctggcgaagctgagttcttttggcttggataggatgtcagatgctcatgtcctaacaagagctgaaca

SEQ ID NO: 2934 - DNA, 429 bp, Zea mays
  Clone ID: LIB3061-015-Q1-K1-E7
atcagtggctaagggattgagcagggctcaagctgaacgggctgcgactgctgctgcccgcaatgtgaatgcctatgggcagaaggaagagggaccaagccgctggcaggagaggaaggaagccaagagacagatgtatctgatgagtacagagaaggctgcgaagctgggcactgtgaagccaaaagcttcagaaacttcttctgttggcgcatatacccaatgccagaagtgtttccagcatggtcactggacatatgagtgcaaaaacgagcgggtgtacatatcacggccctcaagaacgcagcagcttaagaaccccaagcttaagaaaagcgtaccggtttcttatcaatttgagaatcctgatattataaaggagagggaagaggagcagaagatgatgaaagaaaagcagaagaaggagaa

SEQ ID NO: 2935 - DNA, 432 bp, Zea mays
  Clone ID: LIB3061-015-Q1-K1-E8
attgagaccaactagcaacatagatagcacaatagtgtaccaacaatggcagccggaatattttgcctccttatgctccttggtctttctgcaagtgctgctacggcgaccattttcccgcaatgctcgcaagctcctatagcttcccttcttcccccgtacctctcaccagcggtgtcttcggtatgtgaaaacccaattcttcaaccctacaggatccaacaggcaatcacagctggcatcttacctttatcacccttgttcctccaacaatcatcagccctattacatcagttacctttggtgcatttattggcacaaaacatcagggcacaacaactacaacaacttgtgctagcaaaccttgctgcctactctcagcaacagcagtttcttccattcaaccaactagctgcattgaactctgcttct

SEQ ID NO: 2936 - DNA, 282 bp, Zea mays
  Clone ID: LIB3061-015-Q1-K1-E9
gcagcattgaactctcctgcttatttacagcagcaacaactactaccattcagccagctagctggtgtgagccctgctaccttcttgacacaaccacagttgttgccgttctaccagcacgttgcgcctaacgctggcaccctcttacaactgcaacaattgctgccattcaaccaacttgctttgacaaacccagcagtgttctaccaacaacccatcattggtggtgccctcttttagatttcttatgagttatagttcaataataaagttttttatctg

SEQ ID NO: 2937 - DNA, 427 bp, Zea mays
  Clone ID: LIB3061-015-Q1-K1-F1
gaaagtggaatccagtagcaacaatagagcaacaatggcgaccaagatattttccctccttatgctccttgctctttctacatgtgttgctaacgcgacaattttccctcaatgctcacaagctcctatagcttcccttcttcccccataccttccatcaattatagcttcaatatgtgaaaacccagctcttcaaccatataagcttcaacaagcaatcgcagcaagcaacatacctttatcgcccttgttgtttcaacaatcgccagccctatctttggtgcagtcattggtacaaaccatcaaggcacaacagctgcagcaactcgtgctacctctgatcaaccaagtagctctggcaaacctttctccctactctcagcaacaacaatttcttccattcaaccaactgtctacactgaaccct

SEQ ID NO: 2938 - DNA, 452 bp, Zea mays
  Clone ID: LIB3061-015-Q1-K1-F10
gagaccaactagcaacatagaaagcacaatattgtaccaataatggcagccaaaatattttgcctcattatgctccttggtctttctgcaagtgctgctacggcgagcattttcccgcaatgctcacaagctcctatagcttcccttcttcccccatacctctcaccagcgatgtcttcagtatgtgaaaatccaattcttctaccctacaggatccaacaggcaatcgcagcaggcatcttacctttatcacccttgttcctccaacaatcatcagccctattacagcagttacctttggtgcatttattggcacaaaacatcagggcacaacaactacaacaactcgtgctagcaaaccttgctgcctactctcagcaacagcagttacctttggtgcatttgttggcacaaaacatcagggcacaacaactacaacaactcgtgctagc

SEQ ID NO: 2939 - DNA, 439 bp, Zea mays
  Clone ID: LIB3061-015-Q1-K1-F11
gtttcagtcgccgggaaggcaaaggtgtacgacgaagatggggaggatccagaagtgaggtggaaggatctttcagccgaggaggaggacgagctggagtcgctgtgggagcaccaagacctgatagagcagctgaagctcgagctgaaaaaggttcggtccatcgggctgcccacgatcctcgaggagtcggagacgccaaaggctccgatggaggacctcaagccatggcggatcgatgccaagttcctgcgcgaagaccccatggacgagctgaacaagttctacaagagttacagggagaggatgcggaagtttgacattttgggctaccagaagatgtatgcgatagacttcctacagttaaaaggcccccagcaatccaacaactttctaaagtccctgtcgcccacggtggcatccatcctgtcgcacaatt

SEQ ID NO: 2940 - DNA, 442 bp, Zea mays
  unsure (1)..(442): unsure at all n locations; Clone ID: LIB3061-015-Q1-K1-F12
gcctcagcaatatcagcagggccaggaaaaatcacaacagcaacaatgtcattgccaggagcagcaacagactacaaggtgcagctataactactatagcagtagctcaaatctaaaaaattgtcatgaattcctaaggcagcagtgcagccctttggtaatgccttttctccaatcacgtttgatacaaccaagtagctgccaggtattgcagcaacaatgttgtcatgatcttaggcagattgagccacaatacattcaccaagcaatctacaacatggttcaatccataatccaggaggagcaacaacaacaaccatgtgagttatgtggatctcaacaagctactcanagtgcggtggcaatcttgacagcagcacaatacctaccatcaatgtgcggcttgtaccactcatactaccaaaataatccatgcagcagc

SEQ ID NO: 2941 - DNA, 428 bp, Zea mays
  Clone ID: LIB3061-015-Q1-K1-F2
atctaaccctacaaaccattgcaacgcaacaacaacaacaacaacagtttctgccatcactgagccacctagccgtggtgaaccctgtcacctacttgcaacagcagctgcttgcatccaacccacttgctctggcgaacgtagctgcataccagcaacaacaacagctgcaacagtttatgccagtgctcagtcaactagccatggtgaaccctgccgtctacctacaactactttcatctagcccgctcgcggtgggcaatgcacctacgtacctacaacaacagttgctgcaacaaattgtaccagctctgactcagctagctgtggcaaaccctgctgtctacttacaacagttgcttccattcaaccaactggctgtgtcaaactctgctgcgtacctacaacagcgacaacagttacttaat

SEQ ID NO: 2942 - DNA, 442 bp, Zea mays
  unsure (1)..(442): unsure at all n locations; Clone ID: LIB3061-015-Q1-K1-E10
attgagaccaactagcaacatagaaagcacaatattgtaccaataatggcagccaggatattttgcctcattatgctccttggtctttctgcaagtgctgctacggcgagcattttcccgcaatgctcacaagctcctatagcttcccttcttcccccatacctctcaccagcgatgtcttcagtatgtgaaaatccaattcttctaccctacaggatccaacaggcaatcgcagcaggcatcttacctttatcacccttgttcctccaacaatcatcagccctattacagcagttacctttggtgcatttattggcacaaaacatcagggcacaacaactacaacaactcgtgctagcaaaccttgctgcctactctcagcaacagcagttacctttggtgcatttgttggcacanaacatcagggcacaacaactacaac

SEQ ID NO: 2943 - DNA, 434 bp, Zea mays
  unsure (1)..(434): unsure at all n locations; Clone ID: LIB3061-015-Q1-K1-C9
cggaatctantatctccaaagaatcgcagtcacaacaacctacaacaacagttgcttccaacgaatcaatcaagtagttgcagcgaaccttgctgcttacctccagcaacaacaatttcttccattcaatcaactagctggggtgaaccctgctgcttacttgcaggcacaacagctactaccattcaaccaacttgtcaggagccctgctgccttcttactgcagcaacagttgcttccattccatctacaagttgtggcaaacattgctgctttcttgcaacaacaacaacaattgctgccattttacccacaggttgtgggaaacattaacgccttcttgcaacagcaacagttgctaccattctacccacaggatgtggcaaagaatgtcgccttcttacaacaacaacaattgctgccatttaaccaac

SEQ ID NO: 2944 - DNA, 437 bp, Zea mays
  Clone ID: LIB3061-015-Q1-K1-D1
acggcgaccattttcccgcaatgctcacaagctcctatagcttcccttcttcccccgtacctctcaccagcggtgtcttcggtatgtgaaaacccaattcttcaaccctacaggatccaacaggcaatcgcagctggcatcttacctttatcacccttgttcctccaacaatcatcagccctattacagcagttacctttggtgcatttattggcacaaaacatcagggcacaacaactacaacaacttgtgctagcaaaccttgctgcctactctcagcaacagcagtttcttccattcaaccaactagctgcattgaactctgcttcttatttgcaacaacaacaactaccattcagccagctacctgttgcctacccccaacaatttcttccattcaaccaactggcagcattgaactctcctgcttatttaca

SEQ ID NO: 2945 - DNA, 442 bp, Zea mays
  Clone ID: LIB3061-015-Q1-K1-D10
attgagaccaactagcaacatagaaagcacaatagtgtaccaacaatggcagccaaaatattttgcttccttatgctccttggtctttctgcaagtgttgctaccgcaaccattttcccacaatgctcacaagctcctatagcttcccttcttcccccatacctctcaccagcggtgtcttcaatgtgtgaaaccccaattgttcaaccctacaggatccaacaggcaatcgcaacaggcatcttaccattatcacccttgttcctccaacaaccgtcagccctattacagcagttacctttggtccatttggtggcacaaaacatcagggcacaacaactacaacaacttgtgctagcaaaccttgctgcatactctcagcaacatcagtttcttccattcaaccaactggctgcattgaactctgctgcttatttgcaac

SEQ ID NO: 2946 - DNA, 438 bp, Zea mays
  unsure (1)..(438): unsure at all n locations; Clone ID: LIB3061-015-Q1-K1-D11
caacatagaaagcacaatagtgtaccaacaatggcagccaaaatattttgcctccgtatgctccttggtctttctgcaagtgctgctacggcgaccattttcccgcaatgctcgcaagctcctatagcttcccttcttcccccgtacctctcaccagcggtgtcttcggtatgtgaaaacccaattcttcaaccctacaggatccaacaggcaatcgcagctggcatcttacctttatcacccttgttcctccaacaatcatcagccctattacaacagttacctttggtgcatttattggcacanaacatcagggcacaacaactacaacaacttgtgctagcaaaccttgctgcctactctcagcaacagcagtttcttccattcaaccaactaggttcattgaactctgcttcttatttgcaacaacaacaacta

SEQ ID NO: 2947 - DNA, 440 bp, Zea mays
  Clone ID: LIB3061-015-Q1-K1-D12
cccacgcgtccgcaacaagcaacatataaagtggaatacagtagcaacaatagagcaacaatggcggccaagatattttccatccttatgctccttgctctttctgcatgtgttgctaacgcgaccatttttcctcaatactcacaagctcctatagctgcccttcttcccccataccttccatcaatgaccgcttcagtttgtgaaaacccagcccttcaaccctacaggctccaacaagcaatcgcaacaagcaacttacctttatcacccctgttctttcaacaatcgccagccctatctttggtgcagtcattggtacaaaccatcagggcacaacagctgcaacaactcgtgctaccagtgatcagccaagtagctctggcaaacctttctccctactctcagcaacaacaatttcttccattcaaccaactgtc

SEQ ID NO: 2948 - DNA, 401 bp, Zea mays
  Clone ID: LIB3061-015-Q1-K1-D2
gcacgcaggcttttccggcaacggttcgactttccaatagctggcgttcttcaggcgtacgtgtcaccatcggtgtcttcgctatgtgaaaacccaattcttcaaccctacacgatccaacaggcaatctcatctgtcattttacctttatcacccttgttcctccaacaatcatcagccctattacagcagcaacctttggtgcatttattgtcacataacataatagcacatcaactacaacatcttgagctagcatacctttatacctactctcagcaacatcaattttttacatttaaccaactatctgcatataactcttgttcttatttgcaacaactactactaccattcaatcagcttcctgttgcctacactcaacaattttttccattaac

SEQ ID NO: 2949 - DNA, 415 bp, Zea mays
  unsure (1)..(415): unsure at all n locations; Clone ID: LIB3061-015-Q1-K1-D3
cgatggtcatcctcttcctgccgcgaaacgcggtgatcccgctccacaaccaccctgggatgacggtgttcagcaagctgctcctggggtcgatgcacgtcaagtcgtacgactggctcaacactgctgaccccgatccttcttccgccacgagcaccaccagcaccagttcttcgtcctccgatggcccatgcctgaggctagcggaactggtggtggacgacgtcttcacggcgccctgcgacacctccgtgctgtacccgacggcgggagggaacatgcaccggttcaccgncatggcgccctgcgcgatcctcgacgtcctcgggcccccctactccatagaggaggacagggactgcacgtactacgcggaattaccgtacgcaaaccactcgctggtggctgcgggcga

SEQ ID NO: 2950 - DNA, 435 bp, Zea mays
  Clone ID: LIB3061-015-Q1-K1-D4
cagcattcaaaaacacaccaagcgaagcgcactagcaacgacctaacaccaatggctaccaagatattagccctccttgcgcttcttgcccttttagtgagcgcaacaaatgcgttcattattccacagtgctcacttgctcctagtgccattattccacagttcctcccaccagttacttcaatgggcttcgaacatccagccgtgcaagcctacaggctacaactagcgcttgcggcgagcgccttacaacaaccaattgcccaattgcaacaacaatccttggcacatctaaccctacaaaccattgcaacgcaacaacaacaacaacaacagtttctgccatcactgagccacctagccgtggtgaaccctgtcacctacttgcaacagcagctgcttgcatccaacccacttgctctggcgaacgtagct

SEQ ID NO: 2951 - DNA, 426 bp, Zea mays
  Clone ID: LIB3061-015-Q1-K1-D5
caactagcaacatagaaagcacaatagtgtaccaacaatggcagccaaaatattgtgcctccttatgctccttggtctttctgcaagtgctgctacggcgaccattttcccgcaatgctcgcaagctcctatagcttcccttcttccaccgtacctctcaccagcggtgtcttcggtatgtgaaaacccaattcttcaaccctacaggatccaacaggcaatcacagctggcatcttacctttatcacccttgttcctacaacaatcatcagccctattacatcagttacctttggtgcatttatcggcacaaaacatcagggcacaacaactacaacaacttgtgctaacaaaccttgctgcctactcttagcaacagcagtttcttccattcaaccaactagctgcattgaactctgcttctta

SEQ ID NO: 2952 - DNA, 430 bp, Zea mays
  Clone ID: LIB3061-015-Q1-K1-D6
aactagcaacatagaaagcacaatagtgtaccaacaatggcagccaaaatattttgcctccttatgctccttggtctttctgcaagtgctgctacggcgaccattttcccgcaatgctcgcaagctcctatagcttcccttcttcccccgtacctctcaccagcggtgtcttcggtatgtgaaaacccaattcttcaaccctacaggatccaacaggcaatcacagctggcatcttacctttatcacccttgttcctccaacaatcatcagccctattacatcagttacctttggtgcatttattggcacaaaacatcagggcacaacaactacaacaacttgtgctagcaaaccttgctgcctactctcagcaacagcagtttcttccattcaaccaactagctgcattgaactctgcttcttatttgc

SEQ ID NO: 2953 - DNA, 429 bp, Zea mays
  unsure (1)..(429): unsure at all n locations; Clone ID: LIB3061-015-Q1-K1-D8
gtcgtggtggtgatatttggctttgttgctgcacttgtgacctggaacatctgctggggaacaagaggtgtgattgattttatcggtcgctattctgatgtagaccttagaactgcaaaagatggagagtatgttaaggttactggggttgttacttgtggaaatttgccccttgagtcctcattccaacgggtgccacgatgtgtgtacacttcaacttgcttgtacgagtacaggggttgggactcgaaagccgcaaacgccacacaccgacggtttacttggggtctcaggtcaatggaacggcacgcggtggacttctacatctccgatttccagtccgggctgcgagcactggtcagggcaggatccggcgcgcgcgtgaccccatacgtggacgagtccgtcgctatcgacgtanacccagac

SEQ ID NO: 2954 - DNA, 434 bp, Zea mays
  Clone ID: LIB3061-015-Q1-K1-E1
gaccaactagcaacatagaaagcacaatagtgtaccaacaatggcagccaaaatgttttgcctccttatgctccttggtctttctgcaagtgctgctacggcgaccattttcccacaatgctcacaagctcctatagcttcccttcttcccccgtacctctcaccagcggtgtcttcggtatgtgaaaacccaattcttcaaccctataggatccaacaggcaatcgcagctggcatcttacctttatcacccttgttcctccaacaatcatcagccctattacagcagttacctttggtgcatttattggcacaaaacatcagggcacaacaactacaacaacttgtgctagcaaaccttgctgcctactctcagcaacaacagtttcttccattcaaccaactagctgcattgaactctgcttcttatttgc

SEQ ID NO: 2955 - DNA, 435 bp, Zea mays
  Clone ID: LIB3061-015-Q1-K1-C8
gactcacgagcacagcagggctcgctcgctcgcacttaccattcaagcaggccgcaggcgtctcacaggcgctccgtcgtaccccaacgcgctttccccggcgccatggccaggctggcgctggtgctcctcctgctgctggccgtggcggcgtccgcgtgggccggcgccggcgcgagccacctcgatctgggcttgggcttcctctactccggggaccgccggcgggagtgccgcggcacggtggccgagtgcctggacgagtcagatggcctggacctggaggcagggcccgcgtacgtggagtcccaccgacgagcgctctacggcggcgggggcgggtacatcagctactgcgcgctgcggcaggacaacgtgccctgattccgacgcggcgccagctactacaactggcgccccaggggccaagccaac

SEQ ID NO: 2956 - DNA, 412 bp, Zea mays
  Clone ID: LIB3061-034-Q1-K1-A6
caagatattagccctccttgcgcttcttgcccttttagtgagcgcaacaaatgcgttgattattccacagtgctcacttgctcctagtgccattattccacagttcctcccaccagttacttcaatgggcttcgaacatccagccgtgcaagcctacaggctacaactagcgcttgcggcgagcgccttacaacaaccaattgcccaattgcaacaacaatccttggcacatctaaccctacaaaccattgcaacgcaacaacaacaacaacaacagtttctgccatcactgagccacctagccgtggtgaaccctgtcacctacttgcaacagcagctgcttgcatccaacccacttgctctggcgaacgtagctgcataccagcaacaacaacagctgcaacagtttatg

SEQ ID NO: 2957 - DNA, 280 bp, Zea mays
  Clone ID: LIB3061-034-Q1-K1-A8
ctcacactagcgaccaacccccaaccctagaccttcctctccggcggcggccggcgcgcgcgcgtaggagatggaccgcccttccggcacatcgtaccagcgcttcccccgcgttcggatccgcgagctcaaggacgactacgccaagttcgaactccgcgacaccgacgctagcatggccaacgccctccgccgcgtcatgatcgccgaagtcccaactgtcgccatcgatctcgtagagatcgaggttaactcctccgtcctcaacgacgagttcatc

SEQ ID NO: 2958 - DNA, 78 bp, Zea mays
  Clone ID: LIB3061-034-Q1-K1-A9
gcgagagttacacgctaatcgatcatatagtcaactggtcccttagctatcgacaccgtgagctccactgagcgcggt

SEQ ID NO: 2959 - DNA, 423 bp, Zea mays
  Clone ID: LIB3061-034-Q1-K1-B1
cgcgtctccggtcccgtccgtaataacactgatccgatccacgccggccggcgatggggctgatcaagtccagggcgaccgtgtgcgcgctcctcctggcgctgctcctgctctcacactacgacggcgggacgacgacgacgatggtggcggaggcccgggtgtgcatgggcaagagccagcaccactcgttcccctgcatctccgaccgcctctgcagcaacgagtgcgtcaaggaggacggcgggtggaccgccggctactgccaccttcgctactgcaggtgccagaaggcgtgctaagcaaagctcttcaaacacccttggcttgccagaactgaactctagtagtactaagtaacacccttggctagctgtgcacaacctacgtaccgtgcatgcatgtaatgtggtgtcatgtaac

SEQ ID NO: 2960 - DNA, 394 bp, Zea mays
  Clone ID: LIB3061-034-Q1-K1-B10
attgagaccaactagcaacatagaaagcacaatactgcaccaacaatggcagccaaaggattgtgcttccttatgctccttggtctttctgcaagtgctgctaccgcaaccattttcccacaatgctgacaagctcatatagcttgctttcttcccccatacctctcaccagcggagtcttcaggatgcgaaaacccaattcttcaaccctacaggatccatcaggctatcgcatccggcattttacctttatcacccttgatcctccaacaacgcgtagacctattccagacattacctttggtgcactacttcggccagagcatgcaggcacagctgcttcctctacttgcgctaagaaaccttgatgcctactactagctgcagcggactc

SEQ ID NO: 2961 - DNA, 305 bp, Zea mays
  Clone ID: LIB3061-034-Q1-K1-B11
gcgcagcatgtcaaaaacatcaccaagtcgaagctgcactagcaacgactctaacatccaatggctggccaagatattagccgctccttgcgcttcttgcccttttagtgagcgcaacacatgcgttcattattccacagtgctcacttgctcctagtgccattattccacagttcctcccaccagttacttcaatgggcttcgaacatccagccgtgcaagcctacaggctacaactagcgcttgcggcgagcgccttacaacaaccaattgcccaattgcaacaacaatccttggcacatcta

SEQ ID NO: 2962 - DNA, 406 bp, Zea mays
  unsure (1)..(406): unsure at all n locations; Clone ID: LIB3061-034-Q1-K1-B12
gcgatgacgatggcgacgaaggcggcgtgcgtgctggcggtgtgggtgctcgtcgcgtcgggcctgtccgacctgggctcagcgcgcgcgcccctgggcagcaagccgcagcgggagttcgactacttcgcgctctccctccagtggcccggcaccatctgcgcctccacccgccactgctgcgccaccaacggctgctgccgctcggagcctctccagacgttcacgatccacgggctatggccggactacgacgacgggacctggccgtcgtgctgccgccgcacccaattcgagatggacaagatattgccactgaaggaggtgcttgacaagtactggccgtncctctactgctccaaatctggaacatgcttcagcggcaagggactcttctgggctcacg

SEQ ID NO: 2963 - DNA, 368 bp, Zea mays
  unsure (1)..(368): unsure at all n locations; Clone ID: LIB3061-034-Q1-K1-B2
acggacgagncggcaacatagaaagtagaattcattagcaacaatagagcaacaatggcggccaagatattttccctccttatgctccttgctctttctacatgtgttgctaacgcgacaattttccctcaatgctcacaagctcctatagcttcccttcttcccccataccttccatcaattatagcttcagtatgtgaaaacccagcttttcaaccatataggcttcaacaagcaatcgcagcaagcaacatacctttatcgcccttgttgtttcaacaatcaccagccctatctttggtgcagtcattggtacaaaccatcagggcacaacagttgcagcaactcgggctacctgtgatcaacca

SEQ ID NO: 2964 - DNA, 80 bp, Zea mays
  Clone ID: LIB3061-034-Q1-K1-B3
aagaaaaaaaaaaaaaaaaaaaaaaatataaaataaaaaaaaaaaaaaaaaaaaaaaaggaaagggtccaacgatctaat

SEQ ID NO: 2965 - DNA, 314 bp, Zea mays
  Clone ID: LIB3061-034-Q1-K1-B4
cacgtctcgtcggaccggcccccgggcgtcaccaggggccggtactggctgggcttgtcggggacgctctgcgccgcggcgctttacggcctcgtcctgccgctggtggagctcgcgtacaggcgcgccgcgggcggtggccgcgccgtgacgtacgcgctggtggtggagatgcagctggtgatggggttcttcgccaccggcttctgcacggtaggcatggtcgtgaacaaagacttgcaggcgatcccgagggaggcgaggcagtacgagcatgcgtaggcccggtactacatggtgctgtcgtgggcggc

SEQ ID NO: 2966 - DNA, 349 bp, Zea mays
  unsure (1)..(349): unsure at all n locations; Clone ID: LIB3061-034-Q1-K1-B6
attgagaccaactagcaacatataaagcacaatagtgtaccaacaatggcaggcaagatattttgcctccttatgctccttggtctttctgcaagtgctgctacggcgaccattttcccgcaatgctcgcaagctcctatagcttcccttcttcccccgtacctctcaccagcggtgtcttcggtatgtgaaaacccaattcttcaaccctacaggatccaacaggcaatcacagctggcatcttacctttatcacccttgttcctccaacaatcatcagccctattacatcagttacctttggtgcatttattggcacanaacatcagggcacaacaactacaacaac

SEQ ID NO: 2967 - DNA, 325 bp, Zea mays
  unsure (1)..(325): unsure at all n locations; Clone ID: LIB3061-034-Q1-K1-B9
cccacgcggccgacagagcgcacaagaacccgatcgacaccatgagggtgatgctcggggtcctcgctctcctggctctcgctgcgagcgccacctacacgcatacaagcggcggctgcggctgccagccaccgacgtcggctcatctaccgacgncggtgcatctgccaccttcggttcacctgccacctacggcgcatatcccaccggcggtacaactgacgccgacggtgcacctgacaccgacggtccatgtgccgtcgacagttaatatgccgacgtcagcatgccactacgctactcaaccgcaccggactnaagctga

SEQ ID NO: 2968 - DNA, 309 bp, Zea mays
  Clone ID: LIB3061-034-Q1-K1-C1
ctctgctgcttatttacaacagcaacagctaccaccattcagccagctagctgatgtgagccctgttgccttcttgacacaacaacagttgttgccgttctacctgcacgctgcgcctaacgctggcaccctcttacaactgcaacaattgctgccattcaaccaacttgctttgacaaacccaacagcgttctaccaacaacccatcattggtggtgccctcttttagattgcttatgagttatacttcaataatgaagttttttggatgatgtttgtggcttcccagaaataagaaagtacatttct

SEQ ID NO: 2969 - DNA, 419 bp, Zea mays
  Clone ID: LIB3061-034-Q1-K1-C10
aacaacaatggctaccaagatattatccctccttgcgcttcttgcgctttttgcgagcgcaacaaatgcgttcattattccacaatgctcacttgctccaagttccattattacacagttcctcccaccagttacttcaatgggcttcgaacacccagctgtgcaagcctataggctacaacaagcaattgcggcgagcgtcttacaacaaccaatttcccagttgcaacaacaatccttggcacatctaacaatacaaaccatcgcaacgcaacagcaacaacaattcctaccagcactgagccacctagccatggtgaaccctgccgcctacttgcaacagcagttgcttgcatcaaacccacttgctctggcaaacgtagttgcaaaccagccacaacaacagctgcaacagtttc

SEQ ID NO: 2970 - DNA, 227 bp, Zea mays
  Clone ID: LIB3061-034-Q1-K1-C12
gttcaagggctccacgctcctcatcaacgggatggtgacggaagggtccgacgagtgggcggtctacggcgggactggagcgtttgcgatggccaccggcgtcatcagaaggaagaacctttttgccggttgcggtgacagttgccggaacttcgaccagcttaacattgaagtgttctggccggtgttcgggttaacggaacaaccggccaaggaccaccaggatt

SEQ ID NO: 2971 - DNA, 420 bp, Zea mays
  Clone ID: LIB3061-034-Q1-K1-C2
ttcagaaacacaccaagcgaagcgcactagcaacgacctaacaacaatggctaccaagatattagccctccttgcgcttcttgccctttttgtgagcgcaacaaatgcgttcattattccacaatgctcacttgctcctagtgccattattccacagttcctcccaccagttacttcaatgggcttcgaacacctagctgtgcaagccaacatgcaacaacaagcgcttgcggcgagcgtcttacaacaaccaattgcccaattgcaacaacaatccttgccacatctaacaatacaagccatcacaacgcaacagcaacaacagttcctaccagcactgagccacctagccatggtgaaccctgccgcctacttgcaagagcagctgcttgcatccaacccacttgctctggcgaacgt

SEQ ID NO: 2972 - DNA, 419 bp, Zea mays
  Clone ID: LIB3061-034-Q1-K1-C3
attgagaccaacaagcaacatagaaagtggaatccagtagcaacaacagagcaacagtggcgaccaagatattttccctccttatgctccttgctctttctgcatgtgttgctaacgcgacaattttccctcaatgctcacaagctcctatagcttcccttcttcccccataccttccatcaatgatagcttcagtatgtgaaaacccagctcttcagccctataggctccaacaagcaatcgcagcaagcaacatacctttatcacccttgttgtttcaacaatcgccagccctatctttggtgcagtcattggtacaaaccatcagggcacagcagctgcagcaactcgtgctacctgtgatcaaccaagtagctctggcaaacctttctccctactctcagcaacaacaatttctt

SEQ ID NO: 2973 - DNA, 435 bp, Zea mays
  Clone ID: LIB3061-034-Q1-K1-A5
ggcgatggatcctgtagggttgaacaggcaatctcaacacttatcttaccattatcacccttgatcctccagcaacggtcagccctattacaggagatacctttggtccatttggtggcacaaaacatcagggcacaacaactacaacaacttgtgctagcaaaccttgctgcatactctcagcaacatcagtttcttccattcaaccaactgtctgcattgaactctgctgcttatttgcaacaacaattaccattcagccagctagctgctgtctacccccagcaatttctaccattcaaccaactatcaccattgaactctgctgcttatttacagcaacatcaactactaccattcagccaactagctgatgtgagccctgctgccttcttgacacaacaacagttgttgacgatatacctgcacgctatg

SEQ ID NO: 2974 - DNA, 420 bp, Zea mays
  Clone ID: LIB3061-033-Q1-K1-H10
gcaacatagaaagcacaatagtgtaccaacaatggcagccaaaatattttgcctcctgatgctccttggtctttctgcaagtgctgctacggcgaccattttcccgcaatgctcgcaagctcctatagcttcccttcttcccccgtacctctcaccagcggtgtcttcggtatgtgaaaacccaattcttcaaccctacaggatccaacaggcaatcgcagctggcatcttacctttatcacccttgttcctccaacaatcatcagccctattacaacagttacctttggtgcatttattggcacaaaacatcagggcacaacaactacaacaacttgtgctagcaaaccttgctgcctactctcagcaacagcagtttcttccattcaaccaactaggttcattgaactctgcttctta

SEQ ID NO: 2975 - DNA, 415 bp, Zea mays
  Clone ID: LIB3061-033-Q1-K1-H11
acgatcgacaccatgagggtgttgctcgttgccctcgctctcctggctctcgctgcgagcgccacgttcacgcatacaagcggcggctgcggctgccagccaccgccggcggttcatctaccgccgccggtgcatctgccacctccggttcacctgccacctccggtgcatctcccaccgccggtccacctgccgccgccggtccacctgccaccgccggtccatgtgccgccgccggttcatctgccgccgtcaccatgccactaccctactcaaccgccccggcctcagcctcatgcccagccacactcatgcccgtgccaacagccgcatccaagcccgtgccagctgcagggaacctgcggcgttggcagcaccccgatcctgggccagtgcgtcgagttcctgaggcatc

SEQ ID NO: 2976 - DNA, 395 bp, Zea mays
  Clone ID: LIB3061-033-Q1-K1-H12
accaagcggtccgccagaaccgccggaaaaagagagaccgacccgccggcagatcccaagctcaccggagagggggaagagggcgaccgaaggcggcgatgggtttcatcatggacttcgcggagaatctgatcctccgtctgatggaggacccggacaagcgcgaccaggttcggcgggagcatgtctacaagatgaaggagcggtgcgagcgcactaaggcggcgtggagcctccctctgcgcccctacggcttctggaccttcgaccgcttcaactcgcagctctcctgggatccccagatcagccaggccgccggccgtcgggacccctacgacgacctcatcgcccgccactctggctcgccgccgtcttcctgaacacccgttccgatc

SEQ ID NO: 2977 - DNA, 361 bp, Zea mays
  Clone ID: LIB3061-033-Q1-K1-H2
ccttataccacctgctcaaaagagtttgaaccctatggactactcccctactgaagcaaaacaactgtcacgcgcagggtaccaacatgatattgtggggctcttcttgaagaacatggtaaatgagaaactgggtccaataagcaatgctcatgttgttcacgctgatatgaactagtatggaacaatggatgataaacatattcaattggcagaactatcagcagctgctgctgacttccccaagcacaggcaaaattgtgacaatgccagcattccttggaccaaaaatatatcctgacttcatggcaaaagatgatgctatctgctatagatcagataagatccttggaaggcttta

SEQ ID NO: 2978 - DNA, 364 bp, Zea mays
  Clone ID: LIB3061-033-Q1-K1-H3
cttggacagcggcaccagaacctctgcctccgcagggtgcttgctggtatcattacagtctggtagttttagtggttgggcttgacttcctactattcagaaacacagtaccgagaagtctttaggtggggtcaaagatggtgtcgctgaagttgcaaaagcgccttgccgcgagctacctcaagtgtgggaaaggcaaggtgtggcttgacccaaatgaagttagtgagatctccatggcaaactcccgccagaatatccggaagttggttaaggatgggtttatcatcaagaagcctcataagatccactctagatcccgtgcaagaagggcacatgacgccaagcattaagggacgccact

SEQ ID NO: 2979 - DNA, 301 bp, Zea mays
  Clone ID: LIB3061-033-Q1-K1-H4
accgaattgccgggtcgtgcttccttcttgacacagcaacagttgctgcctttctacaagcagtttgcggctaaccccgcaaccctgttacagctacaacaattgttgccctttgtccaacttgctttgacaaacccagcagcctcctaccaacaacacatcattggtggtgccctcttttagattgattattagttgtaattcaataataaagttttttggatgatgtatgtggccaaccagaaataagaagttacatttccagattctaatgtgatattggtctccaagggtgttcgat

SEQ ID NO: 2980 - DNA, 338 bp, Zea mays
  Clone ID: LIB3061-033-Q1-K1-H5
cgctggctactcctccccctcttatcaagtcctcctcgggttagggttccttagggttttgtggaggggcgatggcggcggctgatgtggagtaccgttgcttagtcggcggacttgcctgggccaccagcaacgagtcgctggagaatgccttcgccttctacggcgagatcctcgactccaaggtcatcaccgaccgggagacggggaggtcccgcggcttccgcttcgttaccttctacttcgagaactccatgctcgacgctatcgagaacatgaacggcaaggagctcgacggccgtaacatcaccgataaccaggcccattcccgtggcggc

SEQ ID NO: 2981 - DNA, 355 bp, Zea mays
  unsure (1)..(355): unsure at all n locations; Clone ID: LIB3061-033-Q1-K1-H6
tccgtccgcgcgtttaatcaacccttnnngttgtttcaaacccaatcgncgcagcccttatctnnnttggtgccagtgcgattgggtaccaaacncnnatcagtggcacccagcagcntnngcagcaaccctcgtgccctacctgtgnnnatcaaccannagtagnnctctggcanannacctttctcgcctaactctcagncaaccaaccaatnnttcttccatttcaaccccaactggtctacnnactgaacccnntgctgcttaaatttgcagcaaccannactattacncnnattcagccagcttanngctactgcnnctactcnntcagcaacaaccaactnnntcttcc

SEQ ID NO: 2982 - DNA, 293 bp, Zea mays
  Clone ID: LIB3061-033-Q1-K1-H7
cagcaagcaacatagaaagtagaatccattagcaacaatagagcaacaatggcgaccgggatattttccctccttatgctccttgctctttctacatgtgttgctaacgcgacaattttccctcaatgctcacaagctcctatagcttcccttcttcccccataccttccatcaattatagcttcagaatgtgaaaacccagctcttcaaccatataggcttcaacatgcaatcgcagcacgcaacataccttaatcgcccttggtgtttcaacaatcaccagccctatcttt

SEQ ID NO: 2983 - DNA, 360 bp, Zea mays
  Clone ID: LIB3061-033-Q1-K1-H8
agcaaatcgttctgatgcctgtgtgaaattctctgctgttgatgaaaatggcgttgggcatatgatgttgtgccgtgttataatggggaacgtagaaatagttcaccctggatctaagcagcaccaacctagtagtgactattttgatagtggagtagatgaccttaaaaacccacaacattacattgtgtgggatatgaatctgaataggcacatctatcctgagtttgtagtcaccgtcaaattgccttctaaaacaaaagattacttcgtatcgcaagaagactgccagaattcatctgatctgtcactggtgttgaattctagttcacccgactgtatttcagaagagatgaacct

SEQ ID NO: 2984 - DNA, 418 bp, Zea mays
  Clone ID: LIB3061-034-Q1-K1-A1
gcaactgtggcttctgtttttgtgcgcatagcggatctgtacaataagtcagggaagctgagggagtcaaaatcttactgtgaaaacgctctcaaaatttaccaaaaacctattccagggacttctctggaagaaattgccactggtttaactgatgtttcagccatatatgagacgatgaatgagcatgagcaagcactcaagttacttcagaaggccttaaaaatgtacaacaattctgctggccaacagagcacaattgctggaattgaggctcagatgggtgtcttgcactatattttgggcaattatggcgagtcatatgattccttcaagagtgcgattgcaaagctccgcacctgtggtgagaaaaagtctgccttcttcggaattgccctgaaccagatgggattggcat

SEQ ID NO: 2985 - DNA, 399 bp, Zea mays
  unsure (1)..(399): unsure at all n locations; Clone ID: LIB3061-034-Q1-K1-A11
gagaaagtaatacaataccagggattgaattccttcaatagcttaacaatacgccaggccacttcccctcacactgcttaagtaaaatcagattttgcattaaaacaggcggcaaaaggctggctgcacgaacataccgcctctccttatgcaacacattggcgccagctcgtgtttggctttccaataatggtcagattctacaccttgaattgcctatggcacaacgaagaatcagaaagagcaaggtttaaacaccatagagccttcgcctatggtccagcggtgggcaataaagtgagcccaagatgccgnctagcatggtctgggatcagcctgttgatgagctccggggaggcatttgctagttcctgtttaaagctgaacagtggaggaaat

SEQ ID NO: 2986 - DNA, 421 bp, Zea mays
  Clone ID: LIB3061-034-Q1-K1-A12
ggaatacagtagcaacaatagagcaacaatggcggccaagatattttccatgcttatgctccttgctctttctgcatgtgttgctaacgcgaccatttttcctcaatactcacaagctcctatagctgcccttcttcccccataccttccatcaatgaccgcttcagtttgtgaaaacccagcccttcaaccctacaggctccaacaagcaatcgcaacaagcaacttacctttatcacccctgttctttcaacaatcgccagccctatctttggtgcagtcattggtacaaaccatcagggcacaacagctgcaacaactcgtgttaccagtgatcagccaagtagctctggcaaacctttctccctactctcagcaacaacaatttcttccattcaaccaactgtctacactgaaccct

SEQ ID NO: 2987 - DNA, 324 bp, Zea mays
  Clone ID: LIB3061-034-Q1-K1-A2
acggccgcccttttttttttttttttttttttttttttttttttttttttttttttttttgggttggtttttttttttttttttttttttaaaaagggccggatcaaaaaattcagtccccagtttttttttggagtttgaatatccagggggggacctttaaaaaacatttttaacatatcaaattttacggattcccaagggatgataacccctttttttggaccactttgccagttgacaacaatacattcgggttctggaaaggaatcaatcaaaggtacaattgggtcttttaccaaaatagaccattttaaaacgcaa

SEQ ID NO: 2988 - DNA, 423 bp, Zea mays
  Clone ID: LIB3061-034-Q1-K1-A3
tgagaccaactagcaacatagaaagcacaatagtgtaccaacaatggcagccaaaatgttttgcttccttatgctccttggtctttctgcaagtgctgctaccgcaaccattttcccacaatgctcacaagctcctatagcttcctttcttcccccatacctctcaccagcggtgtcttcagtatgtgaaaacccaattcttcaaccctacaggatccaacaggcaatcgcagcaggcatcttacctttatcacccttgttcctccaacaaccgtcagccctattacagcagttacctttggtgcatttgttggcacaaaacatcaaggcacaacaactacaacaacttgtgctaggaaaccttgctgcctactctcagcaacagcagtttcttccattcaaccaactggctgcattgaactc

SEQ ID NO: 2989 - DNA, 347 bp, Zea mays
  unsure (1)..(347): unsure at all n locations; Clone ID: LIB3061-034-Q1-K1-A4
aacaagcaacatagaaagtggaatccagtagcatcaacagagcaacaatggcgaccaagatagtttccctccttatgctccttgctctttctgcatgtgttgctaacgcgacaattttccctcaatgctcacaagctcctatagcttcccttcttcccccataccttccatcaatgatagcttcagtatgtgaaaacccagctcttcagccctataggctccaacaagcaatcgcagcaagcaacatacctttatcaccnncttgtgttcaacaatcgccagccctatctttggtgcagtcattggtacaaaccatcagggcacagcagctgcagcaactcgtgcta

SEQ ID NO: 2990 - DNA, 361 bp, Zea mays
  Clone ID: LIB3061-033-Q1-K1-H1
gtagaagttcccaggcaaggtgcgcgccgtggtcaagttcaacgcggcgctggcgcaccacggcatggccggcgccgacgtgctcgccgtcaccagccgctttgagccctgcggcctcatccatctgcaggggatgcgatacggaacgccatgcgcatgtgcgtgcatcggatgactgatcgataccataatcggagacaagaccgggtttcacattggcctcctacgcgtatactgtcacgacgatgaaccgttgtgacactagaaggtggacaccacattgctgtgttccgtgcaggggttgggaccgaccatgtacgcacagaagctgcagcaactcatgatacctgagctctaccaa

SEQ ID NO: 2991 - DNA, 319 bp, Zea mays
  Clone ID: LIB3061-033-Q1-K1-F5
caactagcaacatacaaagcacaatactgtaccaacaatggcagacacactatgggggttccttatgctccttggcctttctgaaagtgttgctacggtaaccatttactctcaatgctcacatgctcctatacctttaatcattgctccattacctcttaccaacaactgtacttcaatgaagcgatacacgcaccagctaacattaccagatgcaatatgacctattaaaggtatcttacatcatcactcttgtccattaaaactgacctccttgcacagattgaccttaacatcatgggacagcaactacaataac

SEQ ID NO: 2992 - DNA, 369 bp, Zea mays
  Clone ID: LIB3061-033-Q1-K1-F6
gtcactatcactatagctacaccactaacatatatatacacacgcacacatcatcatgcgtactacgcgtgcctgcaatgcatgcagaggaggcggcgccgttggcggaggcgcgcgtgtgccggcgccggagcgcgggcttcaagggggtctgcatgtccgaccacaactgcgcgcaggtgtgcttgcaggagggctacggcggcggcaactgcgacggcatcatgcgccagtgcaagtgcatcagggagtgctagctagctaggctctaggatctagcaagctagctatatcggcctttaattaaattaataaggatcgacgtcgtggccggtcgctaaatatgtactactatacgtctacactaca

SEQ ID NO: 2993 - DNA, 386 bp, Zea mays
  Clone ID: LIB3061-033-Q1-K1-F7
accggtcggattccggcccaagcgaacgcctagcaacgactacaccaatggctaccaagatattaccctccttgcgctggtgcgctttatgagcgcatcaagcgtcattattccacagtgctcacttgctcctagtgccattatttcacagttccttccaccagttacttcaatgggcttcgaacatccagccgtgcaagcctacaggctacaactagcgcttgcggcgagcgccttacaacaaccaattgcccaattgcaacaacaatccttggcacatctaaccctacaaaccattgcaacgcaacaacaacaacaacaacagtttctgccatcactgagccacctatccgtggtgaaccctgtcacctacttgcaacagcagc

SEQ ID NO: 2994 - DNA, 220 bp, Zea mays
  Clone ID: LIB3061-033-Q1-K1-F8
gtctttgggtaatatgtggactggatggatgggtcactgttgaatgcaggatgtaggatcatcatggtgaggggactgagtaatatggacatgtatcttgcgtattgtgcaatgaatgtgttggctgttgggtcgcttgcctacgcattctgtaagattgcagttaccattaggaactgaactcaactcgactgaattaatatcatttggctctactcgt

SEQ ID NO: 2995 - DNA, 412 bp, Zea mays
  Clone ID: LIB3061-033-Q1-K1-F9
agctgatgaacgctcactgccgaattgtgtactagcagaggactatgctagtaccaattagggtgctaacctcacctatgcaagctagcttgttgacccaatggcacttgcagagtcattaccagctgttggaccttaagaatgcggcgctgttactgctgcaaatgctgaccgcctcaggacaactggctaaagaatatccgtgacactattagactctgcagacattatatcgtgcactgctgtacaatgaatatcttacgtagctaatggcctgaagggagtggacaggagcatgcccacatcagatagtccaagatgcagttgcaaagaatatgaatctcaagttctttgaggtgcctactgggtggaaatcctttgcgaatttgatggatgctggaatgtgctcaat

SEQ ID NO: 2996 - DNA, 283 bp, Zea mays
  Clone ID: LIB3061-033-Q1-K1-G1
cggacgcgtgggttttttatctgatacttttagcaggcttccagcttaatttacagaggatgataacacaggggagctgctgcggttcgatcgaggtcaccgatcgacgacgacgacgacgacatgtacatgctacaaacacgctcacgctcacacaaacttactagtagcagagcacgcgcgcggctagctcgtggaggcagatgccgtatccggcggtgcattcaggcccggtgccgacgcagagaccctgcgcggcgacgaacgctgggcttccgcggct

SEQ ID NO: 2997 - DNA, 431 bp, Zea mays
  Clone ID: LIB3061-033-Q1-K1-G11
acgcagcaacatagaaagcacaatagtgtaccaacaatggcagctaaaatattgtgcctcgttatgctccttggtctttctgcaagtgctgctacggcgaccattttgccacaatgctcacaagcttctatagcttgccttcttcccccgtacctctcaccaacggtgtcttcggtatgtgaaaacccaattcttcaaccctacaggatccaacaggcaatcgcagctggcatgttacctttatcacccttgttcctccaacaatcatcagccctattacagcagttacctttggtgcattcattggcacaaatcatcagggcacatcaactacaacaacttgtgctagcaaaccttgctgactactctcagcatcagcagtttcttacattcagccaactagctgcattgaactctgcttcttatatgca

SEQ ID NO: 2998 - DNA, 417 bp, Zea mays
  Clone ID: LIB3061-033-Q1-K1-G12
caacaagcaacatagaaagtggaatccagtagcaacaacagagcaacaatggcgaccaagatattttccctccttatgctccttgctctttctgcatgtgttgctaacgcgacaattttccctcaatgctcacaagctcctatagcttcccttcttcccccataccttccatcaatgatagcttcagtatgtgaaaacccagctcttcagccctataggctccaacaagcaatcgcagcaagcaacatacctttatcacccttgttgtttcaacaatcgccagccctatctttggtgcagtcattggtacaaaccatcagggcacagcagctgcagcaactcgtgctacctgtgatcaaccaagtagctctggcaaacctttctccctactctcagcaacaacaatttcttccattc

SEQ ID NO: 2999 - DNA, 324 bp, Zea mays
  Clone ID: LIB3061-033-Q1-K1-G2
atgggatctgatgcggaggcggggggcaggaagaggcgggtgccagcggtgaacgaggtcggcaaggacgcgcctgcggtgaacgggatgcgcaaggaggagcccgtggccgcgcctgccaggttgctcacgctgcccactgtgctcaccattggccgcgtcgctgctgtgcctcttctgatcagcactttctacatggagggtccatgggcagctatggccacaacaggcatcttccttgctgccgcagtcactgattggctagatggttatattgctagaaagatgcagctaggaacacctttttgtgcatttcttgatcct

SEQ ID NO: 3000 - DNA, 369 bp, Zea mays
  Clone ID: LIB3061-033-Q1-K1-G3
ccaacaagcaacatagaaagtggaatccagtagcaacaatagagcaacaatggcgacggaagagactttccctccttatgctccttgctctttctgcatgtgatgctaacgcgacaattttccctcaatgctcacaagctcctatagctctccttcttcccccataccttccatgaacgatagcttcagtatgtgaaaacccagctcttcaaccctataggctccaacaagcaatcgcagcaagcaacatacctttatcacccttgttgcaacaatcgccagccctatctttggcgcagtcattggtacaaaccatcaaggcacagcagctgcagcaactcgtgctacctgtgatcaaccaagtagctc

SEQ ID NO: 3001 - DNA, 372 bp, Zea mays
  Clone ID: LIB3061-033-Q1-K1-G4
gccggggatagaactagctactgcattttttccacagtttttcctaccaatggcaggcatggcaaatgttgttaagaatgttgctgctgtcacttccacctctactcgaacaccaatctacaaggcatatgccaaaggagaaaatatcggtgatgtcactgctaaaggagaaagtgttggaaacattgctgatctgttgggaactggaatgagcattctaatctctaaaagcaatccatcactggtaacttcatttgccttcttgtcgtgcggatatcttctcagttcatatcacgaggtgagatctattgtactgaatactctgaatacggcaaggttcactgtggctgtggattctttcatcaggactgg

SEQ ID NO: 3002 - DNA, 354 bp, Zea mays
  Clone ID: LIB3061-033-Q1-K1-G5
acgacggaatcgtacctgtcgagcttcagcacgagcatccagagagctgcatacaggaccgcgagcgactcgttaggagaggctgctctttatgcatgtgcaggtacacgcggatcatcgcgctcactgactgacgagcagatctcgcagctgttgttccacgcttccgtagatgaacactggctcgactgtctcctgacgccgttcggcgagtctatcggctcctacaggctattggaccaggcaacatacatttacaaccattactgccagatttacgaggcctatgctcgcagctatcattagctcttaccatccaaggtcagcgactgttcgacatctctacctgtgatc

SEQ ID NO: 3003 - DNA, 366 bp, Zea mays
  Clone ID: LIB3061-033-Q1-K1-G6
gaagaccgaagaccgagccgtgcgggggctcgggacgggaacgggacaggacgtcaggatctcagatccttcctgcccgcccgcccgtgcccgtcgacgcgtcgttcttgccggccgcgccccacctccgccctctcctcctccagggggatcggatacgccacaggctgcgcgatggtgctgtgggtcttcggctacggctccctcatctggaaccccggcttcgacttcgacgacaaaatcctcggcttcatcaagggctacaagcgcacctttaatctcgcttgcattgaccacagaggcacaccggagcatccggcgaggacctgcacgcttgaaaccgacgacgaggccatatgctggggg

SEQ ID NO: 3004 - DNA, 255 bp, Zea mays
  Clone ID: LIB3061-033-Q1-K1-G7
aaaccctagccctcgcgccgccgactccttcgccacccagcgctcgagctccgggctgcctgcgagcgcgcgccgcaacgccaccatgaagttcaacatcgcgaacccttccaccgggtgccaaaagaagctggaaatcgatgacgaccagaagctacgtgccttttatgaccggaagatatcccaggaggtcagtggtgatgctctggtgaggagttcacggggtatgtcttcaagatcatgggtggatgtgac

SEQ ID NO: 3005 - DNA, 362 bp, Zea mays
  unsure (1)..(362): unsure at all n locations; Clone ID: LIB3061-033-Q1-K1-G8
gggatagaactagctactgcagctttcccacagtttttcctaccaatggcatgcatagcaaatgttgttaagaatgttgctgctgtcacttccacctctactcgaacaccaatctacaaggcatatgccaaaggagaaaatatcggtgatgtcactgctaaaggagaaagtgttggaaacattgctgatctgttgggaactggaatgagcattctaatctctaaaagcaatccatcactggtaacttcatttgccttcttgtcgtgcggatatcttctcagttcatatcacgaggtgagatctattgtactgaatactctgaatacggcaaggttcactgtnggctgtggattctttcatca

SEQ ID NO: 3006 - DNA, 422 bp, Zea mays
  Clone ID: LIB3061-033-Q1-K1-G9
ggcagccaaaatattttgcttccttatgctccttggtctttctgcaagtgctgctacggcagcgcattttcccacaatgctcacaagctcctatagcttcctttcttcccccatacctctcaccagcggtgtcttcagtatgtgaaaacccaattcttcaaccctacaggatccaacaggcaatcgcagcaggcatcttacctttatcacccttgttcctccaacaaccgtcagccctattacagcagttacctttggtgcatttgttggcacaaaacatcaaggcacaacaactacaacaacttgtgctaggaaaccttgctgcctactctcagcaacagcagtttcttccattcaaccaactggctgcattgaactctgctgcttatttgcaacaacaactaccattcagtcagctagct

SEQ ID NO: 3007 - DNA, 368 bp, Zea mays
  Clone ID: LIB3061-033-Q1-K1-F4
cagaccattagctttatctactccagagcgcagaagaacccgatcgacaccatgagggtgtggctcgttgccctcgctctcctggctctcgctgcgagcgccacctccacgcatacaagcggcggctgcggctgccagccaccgccgccggttcatctaccgccgccggtgcatctgccacctccggttcacctgccacctccggtgcatctcccaccgccggtccacctgccgccgccggtccacctgccaccgccggtccatgtgccgccgccggttcatctgccgccgccaccatgccactaccctactcaaccgccccggcctcagcctcatccccagccacacccatgcccgtgccaacagcc

SEQ ID NO: 3008 - DNA, 338 bp, Zea mays
  Clone ID: LIB3061-015-Q1-K1-B4
ctggacgtcagcctagcaattagctcatcgactccagattggagaactcgacaccatgaaggtgctgatcgttgcccttgctctcctggcgctcgctgcgagcgccgcctccagtacaagcggcggctgtggctgccagacaccaccgtttcatctaccgactgcgttctatatgccgcctacgttctatctgccgacgcagcagcagccgcagccatggcaatacccgactcaaccaccgcagctaagcccgtgccagcagttcggatcctggcggcgtcggcagcgtcggcagcccgttcctgggccagtgcgtcgagttcctgaggcaccagtgc

SEQ ID NO: 3009 - DNA, 424 bp, Zea mays
  Clone ID: LIB3061-015-Q1-K1-B5
ccaactaccaacatacatagtgaagtacactagcaacatcttagcaccaatggcagccaagatttttgcgctccttgccctccttgctctttcagcaagtgttgctaccgcgactattattccacaatgctcacaacaatacctctctccagtgatagccgcgagatttgaatacccatctatacaatcctacaggctacaagaggccatcacagcaagcatcttacggtcgttagcattgaccgtccaacaaccatatgccctattgcaacaaccatccttagtgaatctgtatctccaaagaatcacagcacaacaactacaacaacggttgcttccaacaattaatcaagtagttgcagcgaaccttgctgcttaccttcagcaccaacaatttcttccattcaatcaactagctggggtg

SEQ ID NO: 3010 - DNA, 425 bp, Zea mays
  Clone ID: LIB3061-015-Q1-K1-B7
tcaaatcttcgcatcagtgcaaacttcaatgagcatctctgcagaaaagtaactgaggcttgtgctcgtgtaggtgccgttgactatgggttgaaggctttatggaaacataatgtttatggaataacaccaacgattggttctgctcattatctactgcaacatgctaaagagcaaaatgacaacaaactaatggaaaacgtaattcatgtactatcgagaaatttcttaccgctgcaaccaggcacagctgatataggcttcagtatctgttataatgctgatagatgggatttactctcaaaatacgcggagagatttgataaggcaggtgtcaaactgcatcgagctgcatttgacatttggatggactgtgctgccaaagttggcgattctcaatctatttggcacattaatagtctaag

SEQ ID NO: 3011 - DNA, 428 bp, Zea mays
  unsure (1)..(428): unsure at all n locations; Clone ID: LIB3061-015-Q1-K1-B8
cgcaaattgcaccaagaaatccatcgagaggccgtcgacaggggaattaatggcgtggtcgtctagcagcagccaccgtcgtctcatcctcgcagccgccgtcctgctctccgtgctcgcggctgccagcgccagcgccgggacctcctgcgtgccggggtgggccatcccgcacaacccgctcccgagctgccgctggtacgtgaccagccggacctgcggcatcgggccgcgcctcccgtggccggagctgaagaggagatgctgccgggagctggcggacatcccggcgtactgccggtgcacggcgctgagcatcctcatggacggcgcgatcccgccgggcccggacgcgcagctggagggccgcctagaggacctgccgggctgcccgcgggaggtgcagaggggattcgccgncaccctcg

SEQ ID NO: 3012 - DNA, 432 bp, Zea mays
  Clone ID: LIB3061-015-Q1-K1-C1
cttctctctcctctcgatcgattgcttcctccaccgaggcgggggaaagcgccgcccagatcgccgtaggcaagcggcgatcactccagctctgagcataagtttctgcagggaggctcgtgaagtcagtagtcgtatctggcagtggcagcacagcgcaccatggaatggctgagctggagaacggtgtgttgtttatcagtgctgtgcaccgtgctgttcttgcgcccggtcgagggcattcgcttcgtgatcgatagagaagagtgcttctcgcataacgtggagtatgagggggatactgtccatgtatccttcgtcgtcatcaaggctgacaccccgtggcattacagcgaagaaggcgttgatcttgtggttaaggatcctaatggcgctcaagtccgtgattctcgagataagactagtgataag

SEQ ID NO: 3013 - DNA, 521 bp, Zea mays
  unsure (1)..(521): unsure at all n locations; Clone ID: LIB3061-015-Q1-K1-C10
ccgtccgctgctnngctgcttnnatttgcaaccaactatactacncnnattcagtcanngctagctnngctgcctacgcgcccnnagcaatttgcttccatttcannaccaactgnngcagcattgaacctctgctnnngcttatttacccaacagnncaacagcntnnaccaccannttcagccagcttanngctgatgtganngccctgttgcnncttcttgacaccannacaacagnnttgttgggccgttctaaacctgcannngctgcgcnnctaacgcnntggcaccctttcttaccaactnggcaacaattggctgcnncattcannaccaacttgggctttgacccaaacccannacagcgttctaaccanacaacnnccatcannttggtggtgggccctctnnttagaattgggcttatgagttattacccttcaataatggannagttttttgggatgaaatgtttggtggctttttcccagannnataagaaaaggtacaaaatttcta

SEQ ID NO: 3014 - DNA, 294 bp, Zea mays
  Clone ID: LIB3061-015-Q1-K1-C11
tccaacaatcatcagccctattacattagttacctttggtgcatttattggcacaaaacatcagggcacaacaactacaacaacttgtgctagcaaaccttgctgcctactctcagcaacaacaattgctgccattcaaccaacttgctttgacaaacccaacagcgttctaccaacaacccatcattggtggtgccctcttttagattgcttatgagttatacttcaataatgaagttttttggatgatgtttgtggcttcccagaaataagaaagtacatttctagattctt

SEQ ID NO: 3015 - DNA, 432 bp, Zea mays
  Clone ID: LIB3061-015-Q1-K1-C2
cagctcttcagccctataggctccatcaagcaatcgcagcaagcaacataccttgatcacccttgttgtttcaacaatcgccagccctatctttggtgcagtcattggtacaaaccatcagggcacagcagctgcagcaactcgtgctacctgtgatcaaccaagtagctctggcaaacctttctgcctactctcagcaacaacaatttcttccattcaaccaactgtctacactgaaccctgctgcttatttgcagcatcaactattaccattcagccagctagctactgcctactgtcagcaacaacaacttcctacatttaaccaattggccgcactgaaccccgctgcttatttgcagcatcacatactactaccatttagccagctagctgcagcaaaccgtgctttcttcttgacacagcatcagt

SEQ ID NO: 3016 - DNA, 435 bp, Zea mays
  unsure (1)..(435): unsure at all n locations; Clone ID: LIB3061-015-Q1-K1-C3
cccacgcgtccgagcagatcaaacaagtagcgacagctcgacaaagatttgtgagagtgatccggcgctgagaagagatggctaagatcgccgcagccgccgcggcggcggcggcgctgtgcttcgcggccctggtggccgtggccgtctgccaaggcgaggtcgagcggcagaggctcagggacctgcagtgctggcaggaggtccaggagagcccgctcgacgcgtgccgccaggtcctcgaccggcagctaaccggcggcggcgtcggcggcccgttccggtggggcaccgggctccggatgcggtgctgccagcagctccaggacgtgagccgcgagtgccgctgcgccgncatccggagcatggtcaggggctacgaggaggccatgccgnctctggagaaaggctggtggccatgggggcngcagcagc

SEQ ID NO: 3017 - DNA, 418 bp, Zea mays
  unsure (1)..(418): unsure at all n locations; Clone ID: LIB3061-015-Q1-K1-C4
cttgacgactcacgagcacagcaaggctcgctcgctcgcacacaccaagcaagcaggccgcaggcgtctcacaggctctccgccgtcccccaacgcgctttccccggcgccatggccaggctggcgctggtgctcctcctgctgctggccgtggcggcgtccgcgtgggccggcgccggcgcgagccacctcgatctgggcttgggcttcctctcctccggggaccgccggcgggagtgccgcggcacggtggccgagtgcctggacgagtcagagggcctggacctgggggcggggcccgcgtccgtggagtcccaccgncgcgcgctctacggcggcggcggcgggtacatcagctacggcgcgctgcggcgggacaacgtgccctgctcccgccgcggcgccagctactacaact

SEQ ID NO: 3018 - DNA, 377 bp, Zea mays
  Clone ID: LIB3061-015-Q1-K1-C5
gacgcaatgtagccatgaggtgtgctatacaatttgatagtgtgtggcctgtttgagtcaattatatatgccagcattggatcctcgccctctacttagtcacataagtatacaataagtggtggaaacagtttactgtaatgaccgctacagatgcaccgtcgcatgattgggcctgtggctctagtttcagccaatctggaacatggtggccagtgtatcttgtctgccaatgactgaatgctttaggttgaagcaataccataattccagagagactgcggtacagcaacctcaggttatgtgggggggtcgtcggcaaaacgacgctcgtttggcattggctacggcagaaactagtgtctggctgccattgg

SEQ ID NO: 3019 - DNA, 430 bp, Zea mays
  unsure (1)..(430): unsure at all n locations; Clone ID: LIB3061-015-Q1-K1-C6
gctgtgcaagcctataggctacaacaagctgggtgttcgaaggccattgaagtaactggtgggaggaactgtggaataatggaactaggagcacccagctgtgcaagcctataggctacaacaagcgattgcggcgagcgtcttacaacaaccaattgcccaattgcaacaacaatccttggcacatctaacaatacaaaccatcgcaacgcaacagcaacaacagttcctaccagcactgagccacctagccatggtgaaccctgtcgcctacttgcaacagcagctgcttgcatccaacccacttgctctagcaaacgtagttgcaaaccagcaacaacaacaactgcaacagtttctgccagcgcttagtcaactagccatggtgaaccctgccgnctacctacaacagcaacaactgctttcatct

SEQ ID NO: 3020 - DNA, 341 bp, Zea mays
  Clone ID: LIB3061-015-Q1-K1-C7
cgcaaccctcttacaactgcaacagttgctgccctttgtccaacttgctttgacaaacccagcagccttctaccaacaacacatcattggcggtgccatcttttagattgcttattagttgtaattcaataatgaagttttttggctgatgtatgtggcctcctagaaataagaagttacatttccaaattctaatgtgctattggcctgcaagggtgttcgataattattttccctaagattgggaagcaagctataaatcatccttatagtgtgatacccgattcattgagaattataaaacacagacatcacgaggatggtataatcaaaaaaaaaca

SEQ ID NO: 3021 - DNA, 430 bp, Zea mays
  Clone ID: LIB3061-015-Q1-K1-B3
gctgaggcacatgagagaagatattgcatcgattgaatcacgtaacaatggcttggagatgcagtctgtaaacaacaaagggcttatggaagagctagataaattgcttgagcgtctgcggattccacaagagtttgcagcatcattaactggaggctcatttgaagagtcacggatgctgaaaaatgttgaggcatgtgaatggttgacaggggccattcgcagtcttgaagttcctaatttggacccatgctatgtcaacatgcgcgctgttagagagaaaaaggcagagctggagaaactgaaaacaacttttgttcgacgagcatcagagtttttgcggaactacttctccagtttggtagacttcatgatcagtgacaaaagctacttttcacagcgtggacaattgaagcggcctgatcatgca

SEQ ID NO: 3022 - DNA, 529 bp, Zea mays
  unsure (1)..(529): unsure at all n locations; Clone ID: LIB3061-015-Q1-K1-A10
cgtctcgctgaacccattctacnnagcaggcnntggaaagtaaagaagnngaggaggnannatttagcanncaggcccgtgtnngtcagtccttaanntgatgagtnnngttaagaaacccaacaccnnncaggtattgcccaatttaaatcctgtnnttcccttccanngttattttgctttagaaaccttannagtgcattgtgctttattaannttttcgttctttggggttaccatacccaagcttnngaggataccanngattgagaaattaagaacacctnnttcggtgaatgggggaaaggcactttatacatgannctcagcttctggttatgtacactttcgtttctgtcanttttactttcccaatcaaaaacccttaattaatagtcatcgttgcattttgaaataaaactgtcttgtgtatnctccgtgaaatgccgcagttaaattctacagcnttagaaatgctgtatccaacgtagtagttggttctctgtacatcttctgatcttattcccgg

SEQ ID NO: 3023 - DNA, 419 bp, Zea mays
  Clone ID: LIB3061-015-Q1-K1-A11
cgcaaatcgccccccaaaccaactgggccagccgacacaagcagcatcccgccggcggcgatggacctggcgtcgagcgacctcgcggcgctgggcgcggtggagctggtccgcgtctcggcgtcgatcccgcgcgcggctccgcgcaccttcgcgctgctcaccgcctgcctcgtcttcccgctctccttcgccgtgctcgcgcactccctcttcacccaccccatcctgctccgcatccggggcgccgcccactcggggttcgcgccgtggctcggcctcttcgcgtaccagttcatgtacctcatcgtcctcttcaccttctccctcctctccaccgccgccgccgtcttcaccgtcgcctccctctacgccgggaagcccgcgtccgtctcctcctcgctcagcgcgctgcgccc

SEQ ID NO: 3024 - DNA, 391 bp, Zea mays
  Clone ID: LIB3061-015-Q1-K1-A2
gtgataactaagtgacaaatctgcttacagcatacctgtgaactgaatggagaggctacgacctaactgcagagttagccaatagcattgccctgcgtagataaggacctgcaagagtcctgaatttggaagcaacttgtgggcagaatctcggaccgagggtttaacttggggctcaagattacaaggagctgatgcagcttttttaggatagcaacagcatcgcccgttgaggaactgtaactgtatgtgacggaatcacaaacatttaccattgtatttgttcaagctacacgtgccacagttttttatgttgagattggtaggtacggagaagttagacctctagtgctattgggaagaaaattaccattacatttatttaatatat

SEQ ID NO: 3025 - DNA, 440 bp, Zea mays
  Clone ID: LIB3061-015-Q1-K1-A3
attgagaccaactagcaacatagaaagcacaatagtgtaccaacaatggcagccaaaatattttgcctccttatgctccttggtctttctgcaagtgctgctacggcgaccattttcccacaatgctcacaagctcctatagcttcccttcttcccccgtacctctcaccagcggtgtcttcggtatgtgaaaacccaattcttcaaccctataggatccaacaggcaatcgcagctggcatcttacctttatcacccttgttcctccaacaatcatcagccctattacagcagttacctttggtgcatttattggcacaaaacatcagggcacaacaactacaacaacttgtgctagcaaaccttgctgcctactctcagcaacaacagtttcttccattcaaccaactagctgcattgaactctgcttcttatttgca

SEQ ID NO: 3026 - DNA, 410 bp, Zea mays
  Clone ID: LIB3061-015-Q1-K1-A4
aacatcagacaaaaaactttattattgaactataactcataagaaatctaaaagagggcaccaccaatgatgggttgttggtagaacgctgctgggtttgtcaaagcaagttggttgaatggcagcaattgttgcagttgtaagagggtgccagcgttaggcgcagcgtgctggtagaacggcaacaattgtggttgtgtcaagaaggtagcagggctcacaccagctagctggctgaatggtagtagttgttgctgctgtaaataagcaggagagttcaaagctgtcagttggttgaatggaagaaattgctgggggtaggcagcagatagctggctgaatggtagttgttgttgttgcaaataagaagcagagttcaatgcagctagttggttgaatggaagaaactg

SEQ ID NO: 3027 - DNA, 301 bp, Zea mays
  Clone ID: LIB3061-015-Q1-K1-A5
cgatgctgctgccgatgggcgcggtgatgcagaaacgtgggattctatggacgcgcgacgaccaggctcgtcgctgcgatcggtgtctacctgcgccaactttagtctggtttcagcagcaggacgggtactacagatatgctagataaaggtcttatatatgtcatatgacctatcatggtcttatatgttcgatcgtcgtcgtgtctgtatgtacatacatggttgtcaaataaagctctttgcattctgataaaacttgtgctgtaagcacgctttttcaaggcacatcataatatcc

SEQ ID NO: 3028 - DNA, 407 bp, Zea mays
  Clone ID: LIB3061-015-Q1-K1-A6
gcattttacacagaaaaacacattcggattccatgctttggcggtgaacgtgaagttaccttcttccatgagtctcgagattcagttgactgggtgtttgtcgatcatgcctcatatcacacacctggaaatatatatggagataagttcggtgcttttggtgatcatcagttcagatacacactcctttgctatgctgcatgtgaggctcctttgcaccttgaatcgggaggatatatttatggacagcatagcatgtttgttgtcaatgattggcatgccactctagtgccagtacttcttgctgcaaaatatagaccatatggcgtttataaagactcccgcagcattcttgtgatacataatttatcacatcaaggtgtacagcctgcaagcacatatgctga

SEQ ID NO: 3029 - DNA, 393 bp, Zea mays
  Clone ID: LIB3061-015-Q1-K1-A7
ggaatccagctcgagcacgcgtacggagttacctttggtgcatttattggcacaaaacatcagggcacaacaacgacaagaacttgtgctagcaaaccttgctgcctactctgagcaacagcagagtgcttacattcaaccaactacctgcattgaactctgctgcttatgtgcaacatcaacaactaccattcagacagctatctgctgcctacccccagcagtgacttgcattcgaccaactgacagcattgaactctactgcttatttacagcagcaacgactactaccattcagccagctagctgaagtgagccctgctaccttgtagacacagccacacaagctgtcgaactaccagcacgctgcgcctaacgctgacactatattac

SEQ ID NO: 3030 - DNA, 429 bp, Zea mays
  Clone ID: LIB3061-015-Q1-K1-A8
cctgaatttatcggcaagattggaacggacattgaagattacaagtgctcatgggtagttgtgcaagcccttgagcgtgctgatgagagccaaaagcgcattctatttgaaaattatggcaagaaagatccagcctgtgtggcaaaagtgaagaacctctacaaagaacttgacctagaggcggtatttcaggagtacgagaatgagagctacaagaagctgattgcagacattgaagcccagccaagcattgcggttcagaaagtgctgaaatccttcttgcacaagatctacaagaggcagaagtagggtgctcttggataaacgagctcaggagtcgttactccttcgcatgcttgacataaccggacttcctcacctggttgctctagtatgatgtggagcgtctagttaaaaaaaatcgatgta

SEQ ID NO: 3031 - DNA, 439 bp, Zea mays
  Clone ID: LIB3061-015-Q1-K1-A9
gcaacatagaaagcacaatagtgtaccaacaatggcagccaaaatattttgcctgcgtatgctccttggtctttctgcaagtgctgctacggcgaccattttcccgcaatgctcgcaagctcctatagcttcccttcttcccccgtacctctcaccagcggtgtcttcggtatgtgaaaacccaattcttcaaccctacaggatccaacaggcaatcgcagctggcatcttacctttatcacccttgttcctccaacaatcatcagccctattacaacagttacctttggtgcatttattggcacaaaacatcagggcacaacaactacaacaacttgtgctagcaaaccttgctgcctactctcagcaacagcagtttcttccattcaaccaactaggttcattgaactctgcttcttatttgcaacaacaacaacta

SEQ ID NO: 3032 - DNA, 438 bp, Zea mays
  Clone ID: LIB3061-015-Q1-K1-B1
gatcattggaaggggagaaaagggaatggagcatgatgaagaggaggagctgccttcaccttcttcctccttgggctacctgatgctgtgtaggatctgccacgaggaagaggacggagggcgtgcgaccatggagtccccttgtggatgttccggctctctcaagtacgctcacaggcgatgtgtgcagagatggtgtgatgagaaggggaccgccatctgtgagatttgccttcagaatttcgagccagggtacacaatgcctccaaagaaaactccggtggttgaaacggcggtcacgatcagtgaacacgaggacatgcaatctttggaatctcgggagggcttgagtgggggtgcaggctacaccaggtgctcctacaccgcagatcaatgcgccacatggtgccggtcgctggcgatcacgttcaccattat

SEQ ID NO: 3033 - DNA, 205 bp, Zea mays
  unsure (1)..(205): unsure at all n locations; Clone ID: LIB3061-015-Q1-K1-B10
cgagaccaacaangcaacatangaaaggtggaatacagtnagccaactaatagagcaacccaatggcgnngccaagatnattggcggcgatccttatgctnnccttgctctgttnnctgcatgnnngttgctaacngcngnnaccatttnnttcctcaatacctcnnacaagctcnnctatagnnctgcccnnttcttnnccccc

SEQ ID NO: 3034 - DNA, 438 bp, Zea mays
  Clone ID: LIB3061-015-Q1-K1-B11
gatctgacgctcatcccacatcagtagtcgaccaagcacaagcagcagagccggccggaatatgtggacgatcaggaaggtggcgacgccgcaggtggccgtcctcctgctgctcctcatcgtcgttgcgcaggaggcggcgccgttggcggaggcgcgcgtgtgccggcgccggagcgcgggcttcaagggggtctgcatgtccgaccacaactgcgcgcaggtgtgcttgcaggagggctacggcggcggcaactgcgacggcatcatgcgccagtgcaagtgcatcagggagtgctagctagctaggctctaggatctagcaagctagctatatcggcctttaattaaattaataaggatcgacgtcgtggccggtcgctaaatatgtactactatacgtctacactacatgcaataatgcaccacatgtacgcg

SEQ ID NO: 3035 - DNA, 440 bp, Zea mays
  Clone ID: LIB3061-015-Q1-K1-B12
gccgccggttcatctaccgccgccggtgcatctgccacctccggttcacctgccacctccggtgcatctcccaccgccggtccacctgccgccgccggtccacctgccaccgccggtccatgtgccgccgccggttcatctgccgccgccaccatgccactaccctactcaaccgccccggcctcagcctcatccccagccacacccatgcccgtgccaacagccgcatccaagcccgtgccagctgcagggaacctgcggcgttggcagcaccccgatcctgggccagtgcgtcgagttcctgaggcatcagtgcagcccgacggcgacgccctactgctcgcctcagtgccagtcgttgcggcagcagtgttgccagcagctcaggcaggtggagccgcagcaccggtaccaggcgatcttcggcttggtcctccagt

SEQ ID NO: 3036 - DNA, 434 bp, Zea mays
  Clone ID: LIB3061-015-Q1-K1-B2
gcacaatagtgtaccaacaatggcagccaaaatattttgcctccttatgctccttggtctttctgcaagtgctgctacggcgaccattttcccgcaatgctcgcaagctcctatagcttcccttcttcccccgtacctctcaccagcggtgtcttcggtatgtgaaaacccaattcttcaaccctacaggatccaacaggcaatcacagctggcatcttacctttatcacccttgttcctccaacaatcatcagccctattacatcagttacctttggtgcatttattggcacaaaacatcaaggcacaacaactacaacaacttgtgctagcaaaccttgctgcctactctcagcaacagcagtttcttccattcaaccaactagctgcattgaactctgcttcttatttgcaacaacaacaactaccattca

SEQ ID NO: 3037 - DNA, 439 bp, Zea mays
  Clone ID: LIB3061-015-Q1-K1-A1
ctttattgaatttgaggatgtgaatgctgctacatctgtgcaccaaactctgcagggtgctgttattcctagttctggtcgtggtggaatgcgaattcaattttcaaagaatccctttgggcgaaggaaggattcagctgctggccttgcgagcgttctaaatggggctcctgcaaattgattgcagcctgaggggatgtatcttgaactttagcatgccatcatggatttcatactaccacatcttatttatgatctgcatacttctgctgaatgcacgctctctcacgtggcatcatcatcttcatttggtggagtatctgggacatgatcatcatctatcatctttattaggtggagtttcaggggcatgatcatcatctggctgacattgcattgtcaccaaaacatgcttgtgttacttttttttacattatct

SEQ ID NO: 3038 - DNA, 307 bp, Zea mays
  Clone ID: LIB3061-014-Q1-K1-G4
tcttttagacgggcttccattagaatatatctatcagcaatgaccttcaatatattttccatccttatgctccttgctctttctgcatgtgttgctaacgcgaccatttttcctcaatactcacaagctcctatagctgccctttttgacccataccttccatcaatgaccgatctagtatgtgaaaaccgcaccctttaaccctacaggatccatcaagcaactctaacatgcaacttacctttatcacacctgttatttcaacaatcgccagtcctatctttggtgcaatcatctgtacaaacca

SEQ ID NO: 3039 - DNA, 285 bp, Zea mays
  Clone ID: LIB3061-014-Q1-K1-G6
gcaacatagaaagtggaatccagtatcatcaacagagcatcaatggcgaccaagatattttccctccttatgctccttgctctttctgcatgtgttgctaacgcgacaattttccctcaatgctcacaagctcctatagcttcccttcttcccccataccttccatcaatgatagcttcagtatgtgaaaacccagctcttcagccctataggctccaacaagcaatcgcagcaagcaacatacctttatcacccttgttgtttcaacaatcgccagcccctatc

SEQ ID NO: 3040 - DNA, 420 bp, Zea mays
  Clone ID: LIB3061-014-Q1-K1-G7
gaccaacaagcaacatagaaagtggaatccagtagcaacaatagagcaacagtggcgaccaagatattttccctccttatgctccttgctctttctacatgtgttgctaacgcgacaattttccctcaatgctcacaagctcctatagcttcccttcttcccccataccttccatcaattatagcttcaatatgtgaaaacccagctcttcaaccatataggcttcaacaagcaatcgcagcaagcaacatacctttatcgcccttgctgtttcaacaatcgccagccctatctttggtgcagtcattggtacaaaccatcatggcacaacagctgcagcaactcgtgctacctctgatcaaccaagtagctctggcaaacctttctccctactctcagcaaccaccatttcttccattc

SEQ ID NO: 3041 - DNA, 447 bp, Zea mays
  Clone ID: LIB3061-014-Q1-K1-G8
cttacctactcgccccataccttacatcaatgatagcttcattatgagaaaacccagctcttcagcgcctaggggctacaacaagcaatctcattatgcaacatacctttatcacccttgttgtttcaacaatcgccagccctatatttggtgcagccattgttacttaccatcatggcacataagttgcatcaactatagctacctgtgatcaaccaagtagctttggcaaacctttcttcctactctcagcaacaacaatctatttcattcaaccaactgtctacactgaaccctgctgattattagcagcaacaactattaccattcagacagctagctactgcctactctcagcaacaacaacttctttcatttaaccaattggcctcactgaaccccgctgcttatttgcagcagcacatactactaccatttagccagcta

SEQ ID NO: 3042 - DNA, 428 bp, Zea mays
  Clone ID: LIB3061-014-Q1-K1-G9
gaattcccggctcaagccttccatcggcaacaccggaggccccgacacttccttgcccatggggatccgtacgacggcggacggaccgttgctggacggcttgaacctgttggggcaccaggacacgctgtacgcgcacgccttgcgccagttctacacccggtgccgcgtggcgggcaccgtcgacttcgtcttcggcaactccgccgcggtgctccacgacaccgtcctcgtcgtgctgccgcggcagctgcggccggagaagggcgagaacgacgccgtcacggcgcagggccgcaccgacccggcccagcccacggtgatcgtgctcagccgctgctccgtcaacggcagcgaggagtacatggcgctgtaccgcgagaggcccggcgtgcaccacgtctacctgatgccgccgtggaaggagt

SEQ ID NO: 3043 - DNA, 409 bp, Zea mays
  Clone ID: LIB3061-014-Q1-K1-H1
ggcaacttcgccaggcccaccttttgtgccatggaggtgaggcccagcttcaaccggctgtaccaggccgacgtctacagccctggggctgggaggatcacacgcctgaccagccacaagttccccgtgctcaacctcgtacagatgagcgcggtgcgggtagacctgtaccaggacgccatcatgtcgccgttctggaacttcaacgcccacagcgccatgtacggcatcaggggcagtgcaagggtccaggtcgccagcgacaacgggaccacggtgttcgacgacgtgctccgtgcggggcagctgctcatcgtaccccagggctacctcgtcgccaccaaggcgcatggagaaggcttccagtacatcgccttcgagacgaaccctgacaccatggtcagccacg

SEQ ID NO: 3044 - DNA, 100 bp, Zea mays
  Clone ID: LIB3061-014-Q1-K1-H10
tggagaccaactagcaacatagaaagcacaatagtgttccaacaatggcagccaaaatattgcctccttatgctccctgggctttctgcaagtgctggta

SEQ ID NO: 3045 - DNA, 417 bp, Zea mays
  Clone ID: LIB3061-014-Q1-K1-H11
attgagaccaacaagcaacatagaaagtggaatacagtagcaacaatagagcaacaatggcggccaagatattttccatccttatgctccttgctctttctgcatgtgttgctaacgcgaccatttttcctcaatactcacaagctcctatagctgcccttcttcccccataccttccatcaatgaccgcttcagtttgtgaaaacccagcccttcaaccctacaggctccaacatgcaatcgcaacaagcaacttacctttatcacccctgttctttcaacaatcgccagccctatctttggtgcagtcattggtacaaaccatcagggcacatcagctgcaacaactcgtgctaccagtgatcagccaagtagctctggcaaacctttctccctactctcagcaacaacaatttt

SEQ ID NO: 3046 - DNA, 409 bp, Zea mays
  Clone ID: LIB3061-014-Q1-K1-H12
tcggccaacatacagctaactggcgagccgtggacgctcggccagctctgctggccgactaaggagggcgtcgttgggccttaccgccgccgagtgcgtccctgcgggtgggcacactgccgtcggttgtccagcacagctacaagtcgaggagctctgcagtaaaggaagtgtgtagtcaccatggtccatttcaagaataggtatatggtggtggagatctttatagatgcaggtagaggtgaacaggaccctataatcctcacccaatttaatatatcaaaagttataaaagacagcattcagctcaactttggtgagcgtggcctatctggatctcttggatcattgcaagttaagcatgtcaatcctgtaacgaatctctgcattgtccgcgtgtctcgcgaag

SEQ ID NO: 3047 - DNA, 434 bp, Zea mays
  Clone ID: LIB3061-014-Q1-K1-H2
ggcctaggcgtaccggtggtccggggcaggcgtacgtcgtggaccacctgctgggcgacatcgaaggccaggacggaaccgccgccgccatcgtcggccacgacggcagcgtctgggcacagtccgagaacttccccgagttaaagcctgacgaggttgctgggatgataaaggactttgatgaacctggaactcttgcaccaactggtctttttgctggaggtacgaagtacatggtgatccaaggtgaacctggagttgtcatccgaggaaagaagggcactggaggcattactatcaagaaaactggcatgtccttgattatcggtatctatgatgagccaatgactccagggcaatgcaatatggtggtggagaggctcggcgattacctgatcgaacagggcttctaagtttgtcataatgctattttg

SEQ ID NO: 3048 - DNA, 429 bp, Zea mays
  Clone ID: LIB3061-014-Q1-K1-H3
aaggcccattatggtcccaccatggccacctaaaaattttggcctcctaatgctcctgggtcttcctgcaagtgctgctacggctaccattttccaacaatggctcacaagctcctatagcttcccttcttcccccgtacctctcaccaacggtgtcttcggtatgtgaaaacccaattcttcaaccctacaggatccaacaggcaatcgcagctggcatcttacctttatcacccttgttcctccaacaatcatcagccctattacagcagttacctttggtgcatttattggcacaaaacatcagggcacaacaactacaacaacttgtgctagcaaaccttgctgcctactctcagcaacagcagtttcttccattcaaccaactagctgcattgaactctgcttcttatctgcaacaacaacaac

SEQ ID NO: 3049 - DNA, 332 bp, Zea mays
  Clone ID: LIB3061-014-Q1-K1-H4
tatgctccggggtcgttctgcaagtgctgctacggcgaccattttcccacattgctcacaagctcctatagcttcccttcttcccccgtacctctcaccaacggtgtcttcggtatgtgaaaacccaattcttcaaccctactggatccaacaggcaatcgcagctggcatcttacctttatcacccttgttcctccaacaatcatcagccctattacagcagttacctttggtgcatttattggcacaaaacatcagggcacaacaactacaacaacttgtgctagcaaaccttgctgcctactctcagcaacagcagtttcttccattca

SEQ ID NO: 3050 - DNA, 290 bp, Zea mays
  Clone ID: LIB3061-014-Q1-K1-H5
gcggcgctgatggcggcccaggtagcgcagcagctgacggcgatgtgcggtctgcagctgcagcagccaggtccctgcccttgcaacgcagctgccggcggtgtctactactgaggaaactatgtactgtagtaataatgtaatggagccgctgactagctacctatagggctatagctagttcactcgtttagcggcgatgagtaacggagtgtcacccatcaccatgggtggcaatgtgagcaatgacctggatgaaccattggaatggaaaggaataatatataggg

SEQ ID NO: 3051 - DNA, 431 bp, Zea mays
  Clone ID: LIB3061-014-Q1-K1-H6
ctagcaacatacatagtgaagtacactagcaacatcttagcaccaatggcagccaagatttttgccatccttgccctccttgctctttcagcaagcgttgctaccgcgactattattccacaatgctcacaacaatacctctctccggtgacagccgcgagatttgaatacccaactatacaatcctacaggctacaagaggccatcgcagcaagcatcttacggtcgttagcattgaccgtccaacaaccatatgccctattgcaacaaccatccttaatgaatctatatctccaaagaatcgcagcacatcatctacaacaacagttgcttccaacaatcaatcaagtagttgcagcgaaccttgctgcttacctccagcaacaacaatttcttccattcaatcaactagctggggtgaaccctgctgc

SEQ ID NO: 3052 - DNA, 346 bp, Zea mays
  Clone ID: LIB3061-014-Q1-K1-H7
ctttctacaagcagattgcggctaactacgcaccccttttacaacttcaacgatgggagccctgtgatcatcttgctttgacatacccaacggcctgctactaacaacactttattggcggagcgctcacttaaattgctcattagtgggactgcaatgataaaggaatacggatgaagtctgtggtacacgctacatgagaacatacatttacagatcttaatgtcgatagcattgaccgtacaacaaccatatgccctattgcaacaaccatgctcaatgaatgtatatcttcaaagaatcgcagcacatcaactaccatcacagttgcttccaacaatcaatc

SEQ ID NO: 3053 - DNA, 100 bp, Zea mays
  Clone ID: LIB3061-014-Q1-K1-G3
aaacattccaataagcttcaaatggtaaaggcctttttggttcaaccttttttttggacaaacttcaataaaaatatacctatggggaaaatctggtttc

SEQ ID NO: 3054 - DNA, 433 bp, Zea mays
  unsure (1)..(433): unsure at all n locations; Clone ID: LIB3061-014-Q1-K1-H8
gcgccgccaacatctccggcggccacgtcaacccggccgtcaccttcggcgcgctgatcgccggccggatctgcctcgtccgctccctcatctactgggccgcgcagttgctcggcgccgtcgccgccgcgctcgtgctcaggctcgccaccggagggatgcatctgccggagtacgcgctggccgggggcgtgagcggatggaacgcggcggtgctggaggcggccatggcgttcgggctcatgtacgcctactttgcgacggtgatggacaaagcgcggagggtccgcgccggcgccggagcgctggcggcgccgctcgccgtggggctcctggcggtggccaacgtgctggcctgcggcgcgctggagggcgccgtgatgaatccggcgcgcgcgttcggtcccgncgtcgtgggctcccgtcgctggaa

SEQ ID NO: 3055 - DNA, 412 bp, Zea mays
  Clone ID: LIB3061-014-Q1-K1-H9
gcagcgaaccttgctgcttatctccagcaacaacaatttcttccattcaatcaactagctggggtgaaccctgctgtctacttgcaggcacaacaactactaccatttaaccaacttgtcgggagccctgatgccttcttactgcaacaacagcttctgccattccatctgcaagctgtggaaaacattgcttctttcttgcgacaacaacaattgttgccattttacccacaggttgtgggaaacattaatgccttcttgcaacagcaacaattgctgccattctacccacataatgtggcaaacattgttgccttcttacaacaacaacaattgctgccatttagccaacatgctttgacgaatcctaccaccttattgcaatcgcccaccattggtggtgccatcttct

SEQ ID NO: 3056 - DNA, 280 bp, Zea mays
  Clone ID: LIB3061-033-Q1-K1-D8
gtggtacgggaacgtccgcacgccgaacccagtcatgtcgcaggcggcgtccatatgcgctagcccgggctaaccacctcagccaatcatgctcttgaaagcgagtcagactccgacagcgaatcactgtatgaggtagagggagttccatacgagcgaggtaacagatccattgagacgaagcgaataagaaggatggtgtccaatagggagtctgcgcggcggtctaggaggaggaaacaggcacagttgtctgaccttgagtcacaagttgaacgac

SEQ ID NO: 3057 - DNA, 426 bp, Zea mays
  Clone ID: LIB3061-033-Q1-K1-D9
acgattgagaccaactagcaacatacaaagcacaatagtgtaccaacaatggcagccaagggattgtgcctccttatgctccttgggctttctgcaagtgctgctacggcgaccattttcccgcaatgctcgcaagctcctatagcttcccttcttcccccgtacctctcaccagcggtgtcttcagtatgtgaaaacccaattcttcaaccctacacgatccaacaggcaatcacagctggcatcatacctttatcaccctcgttcctccaacaatcatcagccctattacatcagttacctttggtgcatctattggcacaaaacatcacggcacaacaactacaacaacttgtgctagcatacctcgctgactactatcagcaacagcagtttcttccattcaaccaactagctgcattgaac

SEQ ID NO: 3058 - DNA, 376 bp, Zea mays
  Clone ID: LIB3061-033-Q1-K1-E1
ggccagccgccgatggttaggatgccaggtcaaatggttcatatgccaaccagcattcctccgcctcctggccggactgagtttatgcctggtccaccacgcacatttgctatgcccccatcatcgcacatgccacccatgatcaatcccattggaatccctcagcctccagcaccgcctctgcctccacagcctcctgctgaagagcaaccacctacacccgatgaaccagaacctaagaggcagagaacagatgatgcttctctcatcccagcagagcagtaccttgttcagcatccgggtcctgctagcatctctgtatctgtacccaaccttgatgaagggaacttgcgaggccaaattttgcagattcctg

SEQ ID NO: 3059 - DNA, 370 bp, Zea mays
  Clone ID: LIB3061-033-Q1-K1-E10
cggaacgaatcgagccggggcccacttcgatcgaaacgagatggctccggggaagcgaggcaaggccaaaggggcggcgccgccgccgcccaccgcggcggcgagtaccggagctgtagggttccctggctgcctccgcctgatgccgccgtcgaccgtggccatatctatacacgccaagcccggctccaaggtcgccaccatcacagagattggggacgaggcggtgggcgtgcagatcgacgcgccggcgagggatggcgaagccaacgccgcgcttgtcgactttatcagctcggtacttggggtgaagaaaagagaagtgtctataggctcgggttctaaatcgagggaaaaggttgtgctggta

SEQ ID NO: 3060 - DNA, 397 bp, Zea mays
  Clone ID: LIB3061-033-Q1-K1-E11
acgctgggtcttcagaccattagctatatctactccagagcgcagaagaacccgatcgacgccatgagggtgctgctcgatgccctcgctctcctggctctcgctgcgagcgccacctccacgcatacaagcggcggctgcgggtgccagccaccgtcgccggttcatctaccgccgccggtgcatctgccacctacgggtcacctgccacctacggtgcatctcccaccgccggtccacctgccgtcgccggtccacctgccaccgacggtccatgtgccggcgacggctcatctgccgccgtcaccatgccactaccctactcaaccgacccggcctcaggctcatccccagccacacccatgcacgtgccaacagccgtatccaagcccgtgcc

SEQ ID NO: 3061 - DNA, 413 bp, Zea mays
  Clone ID: LIB3061-033-Q1-K1-E12
cacccttgttcctccaacaaccgtcagccctattacagcagttacctttggtccatttggtggcacaaaacatcagggcacaacaactacaacaacttgtgctagcaaaccttgctgcatactctcagcaacatcagtttcttccattcaaccaactggctgcattgaactctgctgcttatttgcaacaacaattaccattcagccagctagttgctgcctacccccagcaatttcttccattcaaccaactagcagcattgaactctgctgcttatttacagcagcaacaactactaccattcagccagctagctgatgtgagccctgctgccttcttgacacaacaacagttgttgccgttctacctgcacgctatgcctaacgctggcaccctcttacaactgcaacaa

SEQ ID NO: 3062 - DNA, 212 bp, Zea mays
  Clone ID: LIB3061-033-Q1-K1-E2
caaaatattctgcttccttatgcgccttggtctttctgcaagtgttgctaccgcaaccattttcccacaatgctaacaagctcctatagcttccctttttcccccatacctttcaccagcggtgccttcaatgtgagaaaccccaattgttcaaccctacaggatccaacaggcaattgcaacaggcttcttaccattataacccttgtttc

SEQ ID NO: 3063 - DNA, 369 bp, Zea mays
  Clone ID: LIB3061-033-Q1-K1-E4
ttcagaaacacacctagcgaagcgcactagcaacgacctaacaacaatggctaccaagatagtatccctctttgcgcttcttgccctttttgtgagcgcaacaaatgcgttcattattccacaatgctcacttgctcctagtgccattattccacagttcctccctccagttacttcaatgggcttcgaacacccagctgtgcaagcctacaggctacaacaagcgcttgcggcgagcgtcttacaacaaccaattgcccaattacaacaacaatccttggcacatctaaccatacaaaccatcgcaacgcaacagcaacaacaatttctaccagcactgagccaactagctgtggtgaaccctgtcgc

SEQ ID NO: 3064 - DNA, 204 bp, Zea mays
  Clone ID: LIB3061-033-Q1-K1-E5
agaaagtggaatacagtagccattatagagcaacaatggccgccaagatattggtacgggcttatgctccttgctctttctgcatgtgttgctaacgcgaccattgttcctcaatactcacaagctactatagctgaccttcttcccccataccttccatcaatgatcgatttagtatgggagaacccagcccttctaccctac

SEQ ID NO: 3065 - DNA, 294 bp, Zea mays
  Clone ID: LIB3061-033-Q1-K1-E6
gcaacatagaaagcacaatagtgtaccaacaatggcagccaaaatattttgcctcctgatgctccttggtatttctgcaagtgctgctacggcgaccattttcccgcaatgctcacaagctcctatagcttcccttcttcccccgtacctctcaccagcggtgtcttcggtatgtgaaaacccaattcttcaaccctacaggatccaacaggcaatcgcagctggcatcttacctttatcacccttgctcctgcaacaatcatcagccctattacagcagttacctttggcgca

SEQ ID NO: 3066 - DNA, 316 bp, Zea mays
  Clone ID: LIB3061-033-Q1-K1-E7
ggacaggtgctgcgcgctgcgatctctgtcaccgcgcaacatggcggggggtgccacgccgccaactggaagcccgggagtgcgccgcatcggcccggcgtctcgagaggaggccaggaagatgttcccgcaggggttcgaaccgccacctgccctccaagagggctacctccgtttaccaaggtttagctagccgacgtacggcacggacatctagctcgtctgtcagtccgcgtcgaccggggtgcgcggatcttttgtgcctgctggtggtttctctgactagtactagtatatatataggctctatgtatgt

SEQ ID NO: 3067 - DNA, 392 bp, Zea mays
  Clone ID: LIB3061-033-Q1-K1-E9
acctacgagtgagaccaactgtcaacatcaaaagcaccattatggacccacagtggcccctaagagatggcgtcctcatacgctccgtgctctttatgcacgttctgataccgacaccattttctcacagctctcacaagctcctatagcttccctttttcccatacacctcataaaagctgtctacaccatatgtgaacacccatttcttaacacatacacgatccaacacgctctcgcacctggcatcacacctatatcactcgtggtcctaccactatcatgacccatattacaggaattacctgatgcgcaccaattggcacaaaccattacggcacatcatctacaacaacatgtgctagcaaaccttggtgactactcgtagctac

SEQ ID NO: 3068 - DNA, 424 bp, Zea mays
  unsure (1)..(424): unsure at all n locations; Clone ID: LIB3061-033-Q1-K1-F10
ggtcttcagaccattagctttatctactccagagcgcagaagaacccgatcgacaccgtgagggtgttgctcgttgccctcgctctcctggctctcgctgcgagcgccacctccacgcatacaagcggcggctgcggctgccagccaccgccgccggttcatctaccgccgccggtgcatctgccacctccggttcacctgccacctccggtgcatctgccaccgccggtccacctgccgccgccggtccacctgccaccgccggtccatgtgccgccgccggttcatctgccgtcgccaccatgccactaccctactcaaccgccccggcctcagcctcatccccagccacacccatgcccgtgccaacagccgcatncaagcccgtgccagctgcagggaacctgcggcgttggcagcaccc

SEQ ID NO: 3069 - DNA, 378 bp, Zea mays
  Clone ID: LIB3061-033-Q1-K1-F11
aattagctcatcgactccagattggagaactcgacaccatgaaggtgctgatcgttggccttgctctcctggcgctcgctgcgagcgccgcctccagtacaagcggcggctgtggctgccagacaccaccgtttcatctaccgcctccgttctatatgccgcctccgttctatctgccgccgcagcagcagccgcagccatggcaataccccactcaaccaccgcagctaagcccgtgccagcagttcggatcctgcggcgtcggcagcgtcggcagcccgttcctgggccagtgcgtcgagttcctgaggcaccagtgcagcccggcggcgacgccctacggctcgccacagtgccaggcgctgcagcagcagtgct

SEQ ID NO: 3070 - DNA, 415 bp, Zea mays
  Clone ID: LIB3061-033-Q1-K1-F12
gttgcaaaccatggacatggctttggcgtctaaagcctcccctccgccatggaatgccaccggcgccgagcagccaattccaaagcgtgacaaagccgctgcaaatgattcaacatacctcaatcctcaagctcatgatagtgttcttggaatcattctgggaggtggtgctgggactagattgtaccccttgacaaagaagcgtgccaagcctgcagtgccattgggtgccaactatagactgattgatattcctgtcagcaattgtctcaacagcaacatatccaagatctatgtgctaacgcaatttaactctgcttccctcaaccgtcacctctcaagagcctacgggagcaacattggagggtacaagaatgaagggtttgttgaagtcttagctgcacagcagagccca

SEQ ID NO: 3071 - DNA, 372 bp, Zea mays
  Clone ID: LIB3061-033-Q1-K1-F2
cgcgacgctggacccgcccttcgacccctacgagaacagcctcaacttcctcgtcgggtcctgacatcatcccctacgtcggcctcaccggctacgtcggcgccaaccccaggctcctcacccctcaggccagaaagctgctggcggggctgctggcggtggagtcggcgcaggacgcggtgatcaggacgctgctgtacgagcgcgggatggcgcgtgtgccgagctacgccggcggggtggcggagatcacggcgcgcatctcggacctccggaactcgctggggaggaggggcgtgaaggacgagggcctggtggtggcgcccgagctggggcccgaggggctgaccgtggggaacatcatcgccggcg

SEQ ID NO: 3072 - DNA, 345 bp, Zea mays
  Clone ID: LIB3061-033-Q1-K1-F3
agagcacaatagtgtaccaacaatggcagccaaaatattttgcctccttatgctccttggtagttctgcaagtgctgctacggcgaccattttcccgcaatgctcacaagctcctatagcttcccttcttcccccgtacctctcaccagcggtgtcttcggtatgtgaaaacccaattcttcaaccctacaggatccaacaggcaatcgcagctggcatcttacctttatcacccttgttcctccaacaatcatcagccctattacagcagttacctttggtgcatttattggcacaaaacatcagggcacaacaactactacaacttgtgctagcaaaccttgc

SEQ ID NO: 3073 - DNA, 362 bp, Zea mays
  Clone ID: LIB3061-033-Q1-K1-D7
attcagaaacacaccaagcgaagctacctagcaacgacttaacaacaatggctaccaggatattagccctccttgcgcttcttgccctttttgtgagcgcaacaaatgcgttcattattccacaatgctcacttgctcctagtgccattataccacagttcctccgaccagttacttcaatgggcttcgaacacctagctgtgcaagcctacaggctacaacaagcgcttgcagcgagcgtcttacaacaaccaattaaccaattgcaacaacaatccttggcacatctaaccatacagaccatcgcatcacaacagcagcagcagttcctaccagcactgagccaactagatgtggtgaac

SEQ ID NO: 3074 - DNA, 368 bp, Zea mays
  Clone ID: LIB3061-033-Q1-K1-C2
gaccaactagcaacatagaaagcacaatagtgtaccaacaatggcagccaaaatattgtgcggccttatgctccttggtatttctgcaagtgctgctacggcgaccattttcccgcaatgctcacaagctcctatagcttcccttcttcccccgtacctctcaccagcggtgtcttcggtatgtgaaaacccaattcttcaaccctacaggatccaacaggcaatcgcagctggcatcttacctttatcacccttgttcctccaacaatcatcagccctattacagcagttacctttggtgcatttattggcacaaaacatcagggcacaacaactacaacaacttgtgctagcaaaccttgctgcct

SEQ ID NO: 3075 - DNA, 368 bp, Zea mays
  Clone ID: LIB3061-033-Q1-K1-C3
gctccttggtctttctgcaagtgctgctacggcgaccattttcccgcaatgctcgcgagctgctatagcttcccttcttcccccgtacctctcaccagcggtgtcttcggtatgtgaaaacccaattcttcaaccctacaggatccaacaggcaatcacagctggcatcttacctttatcacccttgttcctccaacaatcatcagccctattacatcagttacctttggtgcatttattggcacaaaacatcagggcacaacaactacaacaacttgtgctagcaaaccttgctgcctactctcagcaacagcagtttcttccattcaaccaactagctgcattgaactctgcttcttatttgcaac

SEQ ID NO: 3076 - DNA, 308 bp, Zea mays
  Clone ID: LIB3061-033-Q1-K1-C4
agccaagcggcagtgtgtatagaggatcgtcgaacagaacagcatgaacatggtcatggctgctcgcgtgtgcctgggtctggcagctggcagcgcctgtgcaatgcatatgccctgcccctgcacgaggctgcagggcttgcacagcgctggcaccggcctgacgacgatgatgggcgccgccgggctgtacccatacacacagtacctgaggcagccgcaatgcagtccactagcagcggcgcgctactacgccgagtgtgggcagacgagcgccatgtaccagacgatcctgcaacactgctgcc

SEQ ID NO: 3077 - DNA, 363 bp, Zea mays
  Clone ID: LIB3061-033-Q1-K1-C5
catccatcgaccgatcgatcgccacagtcaacaccacccgccgaggcgacgcgacaggcgccaggaggaaggaatacactcactgccagccagtgaagggggagaagtgtactgctccggcgaccagtgcgcgcaccgcccggcagggctgctcatctcgtcgacgaccagtggattaatcggcatggcggctctggccacgtcgcagctcgtcgcaacgcgcgccggcctgggcgtaccggacgcgtccacgttccgccgcggcgccgcgcagggcctgaggggggcccggtcgttggcggcggcggacacgctcagcatgcggaccagctcgcgcgctgcgcccaggcaccagcagcaggc

SEQ ID NO: 3078 - DNA, 366 bp, Zea mays
  Clone ID: LIB3061-033-Q1-K1-C6
caacaagctgccccgcagcaacgaacacgaaccttggcagaacgaagctgaagtagggcgttgtgaacccagtatggcaaacgcgccgaggatcctggccctcggcctgctgctagcgctcctgtgcgctgccgccggcccggccgccgcgcagaactgcggctgccagcctaacttctgctgcagcaagttcggctactgcggcacgaccgacgactactgcggcgacgggtgccagtcgggcccgtgccgctcgggcggcggcggcggcggcggcggaggcggaggcagtggcggtgcgaacgtggctaacgtggtcagcgacgcgttcttcaacggcatcaagaaccaggccgggagcgggtg

SEQ ID NO: 3079 - DNA, 360 bp, Zea mays
  Clone ID: LIB3061-033-Q1-K1-C7
attgagaccaactagcaacatagaaagcacaatagtgtaccaacaatggcagccaaggtattttgcctccttatgctccttggtctttctgcaagtgctgctacggcgaccattttcccacaatgctcacaagctcctatagcttcccttcttcccccgtacctctcaccagcggtgtcttcggtatgtgaaaacccaattcttcaaccctataggatccaacaggcaatcgcagctggcatcttacctttatcacccttgttcctccaacaatcatcagccctattacagcagttacctttggtgcatttattggcacaaaacatcagggcacaacaactacaaacaacttgtgctagc

SEQ ID NO: 3080 - DNA, 366 bp, Zea mays
  Clone ID: LIB3061-033-Q1-K1-C8
ccatcaatcatcattcatcttagtagtataggcaccaaatcaaatctgcaacgtcaagtatctaactccaaaaaccatgaagctggtgcttgtggttcttgctttcattgctttagtatcaagtgtttcttgtacacagacaggcggctgcagctgtggtcaacaacaaagccatgagcagcaacatcatccacaacaacatcatccacaaaaacaacaacatcaaccaccaccacaacatcaccagcagcagcaacaccaacaacaacaagttcacatgcaaccacaaaaacatcagcaacaacaagaagttcatgttcaacaacaacaacaacaaccgcagcaccaacaacaacaacaacaaca

SEQ ID NO: 3081 - DNA, 426 bp, Zea mays
  Clone ID: LIB3061-033-Q1-K1-C9
gtttctgcgaaagagttctttgaagatcctgtatctccaacaattgatgctgcagttcgtttgcagcctagatgcagcgagaaaagtgatttagaatcagctgagcagtcatacacaacacgcttgctggtgtcaacatcacgtattgggtgcctaattggcaaaggtggttcaatcattactgagatacggagaacatccagagcaaatgtacgcattctttcaaaagaaaatgttccaaaggtagcagcagaagatgatgagatggttcagatcactggaggccttgatgttgcaagaaatgctcttgtgcaaatagctacaaggctgaaagccaatttctttgaaagagagggctctttatctgcatttccacctgttatcccttaccatcctttgcctgctggtgtttcggatgaaccaaaa

SEQ ID NO: 3082 - DNA, 363 bp, Zea mays
  Clone ID: LIB3061-033-Q1-K1-D1
ggatatcctgaacgctgaaggcgatgagatctatattaaggaaattgggctgtacatgaagggaggagagaaaatatcattcttggagctctctgaaagagcagttttacgccgtgaagttgcgattggttacatcaaggacggcaagcagcatattaatcctatcaacaaatcggagccgctgtcccttgaaatgaatgattcgctcattgtgatatcggagtttgaaggtgaacaaccaattatgatgggcggagaatcttcaggatgaaattttcagctttatatctcttcacagaaactctaacaactgttgctaccatgaagagataacatataaccttgtttataatccttttcttt

SEQ ID NO: 3083 - DNA, 443 bp, Zea mays; identical to SEQ ID NO: 1460
  Clone ID: LIB3061-033-Q1-K1-D10

SEQ ID NO: 3084 - DNA, 438 bp, Zea mays
  Clone ID: LIB3061-033-Q1-K1-D11
aggatcctggccctcggcctgctgctagcgctcctgtgcgctgccgccggcccggccgccgcgcagaactgcggctgcgagcctaacttctgctgcagcaagttcggctactgcggcacgaccgacgactactgcggcgacgggtgccagtcgggcccgtgccgctcgggcggcggcggcggcggcggcggatgcggaggcagtggcggtgcgaacgtggctaacgtggtcagcgacgcgttcttcaacggcatcaagaaccaggccgggagcgggtgcgagggcaagaacttctacacccggagcgcgttcctgagcgccgtcaacaagtacccgggcttcgcccatggcgggacggaggtggagggcaagcgcgagatcgccgacttcttcgcgcacgtcacgcacgagaccggacatttctgctacatcagcgag

SEQ ID NO: 3085 - DNA, 442 bp, Zea mays
  Clone ID: LIB3061-033-Q1-K1-D12
attgagaccaactagcaacatagaaagcacaatagtgtaccaacaatggcagccaaaatattttgcctccttatgctccttggtctttctgcaagtgctgctacggcgaccattttcccacaatgctcacaagctcctatagcttcccttcttcccccgtacctctcaccagcggtgtcttcggtatgtgaaaacccaattcttcaaccctataggatccaacaggcaatcgcagctggcatcttacctttatcacccttgttcctccaacaatcatcagccctattacagcagttacctttggtgcatttattggcacaaaacatcagggcacaacaactacaacaacttgtgctagcaaaccttgctgcctactctcagcaacaacagtttcttccattcaaccaactagctgcattgaactctgcttcttatttgcaac

SEQ ID NO: 3086 - DNA, 369 bp, Zea mays
  Clone ID: LIB3061-033-Q1-K1-D2
gacgtgcagtccgtcgcgcagcagctgcagatgatgatgcagcttgagcgtgccgcggccggcagcagcagcctgtacgagccagctctgatgcagcagcagcagcagctgctggcagcccagggtctcaaccccatggccatgatgatggcgcagaacatgccggccatgggtggactctaccagtaccagtaccagctgcccagctaccgcaccaacccctgtggcgtctccgctgccattccgccctactactgattcatgatatttgggaaatctcctctatccatccctctctatctatatatgtaataatgcagtaagacgacacacattatcatgtgtggtatgaccaataatatatgcatc

SEQ ID NO: 3087 - DNA, 368 bp, Zea mays
  Clone ID: LIB3061-033-Q1-K1-D3
acgcgtgcgcccaccgggatacaatgcagagagtgcataagctgctgaaattgaagatgaggggaagaggtcggatccaggtgacatgggtactgcatctgcaagtacctcttcaatacctgacaagggacctgaaaaggctaaatcaggcgcagataagaaaaataggccaaaagatgtttctggtcggccattggcaacagaacatgaatttgaagttctcatgaatgctgcaaggttagacacaggtgctcctgcacgggtcaaaccatttggagttgaagttcgtaatgatagatgcttacggtgtggaaactatggtcaccaaagtggtgaccgagaatgtcccttgcaacgatgcaatcatg

SEQ ID NO: 3088 - DNA, 280 bp, Zea mays
  Clone ID: LIB3061-033-Q1-K1-D4
ggcagatgaaccggcggcggcacatgttccgtgtggtggcaggtggaccggcagcgggtggtgtatcgtccgtgggagatgcacctgacgttgcagttgtcgatgtcgaatcacttttatatatgaccttactatttcattgatttggtggcacatactctgttatcgtcaaatccatttttattctccttgttacaactattatgattgctgttgactcttcgtgatactataacaggtcaatatacattgatccttattacattatatcacactttat

SEQ ID NO: 3089 - DNA, 290 bp, Zea mays
  Clone ID: LIB3061-033-Q1-K1-D5
attcccatggcctactccaccccgcccatgagctaccctgctgccccctacggcgggtatggcaacggcatgccagcttacaccaatggaatggctcctgccttccaccaggcttactaccgctaggttcactcaggaaacgaagaattcgatgatgaatgacatgactacaactgatgatgcctacgactcaaaaccccgctcaatggccctgtttagtaccgactgactacacccgtaggctgggtacctgatcttccatgtccttacccaccgctactactagatgt

SEQ ID NO: 3090 - DNA, 339 bp, Zea mays
  Clone ID: LIB3061-033-Q1-K1-D6
gttgtggagggaagcgttccagaaacaaccgcactcttggaacagagatggggtaagagcttctacacaggtaatggaactgtaggacgtatagtgatggcagcagccgcaaagcatctgaccccggtagctctggagcttggtgggaaatcccctgttatcgtggattcaaatgttgatctgcatgttgctgctaagaggattgctgttggcaaatggtgatgcaacaactgccaagcatgcattgctccagattacatcataacgacaaaatcatttgcaccggagctggtggcctttttcaaaagagttttggaaaggttctatggggaggatcct

SEQ ID NO: 3091 - DNA, 413 bp, Zea mays
  Clone ID: LIB3061-033-Q1-K1-C12
agctactgactactctcatcaacaacaacttcttccatttaaccaattggccgcactgaacctcgctgcttatttgcagcagcaaatattactaccatttagccagctagctgcagcaagccgtgcttccttcttgacacagcaacagttgctgcctttctaccagcagtttgcggctaaccccgcaaccctcttacaactacaacaattgttgccctttgtccaacttgctttgacaaacccagcagcctgctaccaacaacacatcattggtggtgccctcttttagatagcttattagttgtaattcaataataaagttttttggatgatgtatgtggccaaccagaaataagaagttacattttcaaaaaaaaagtgctgtcccattcaagcaagggtacctcactcac

SEQ ID NO: 3092 - DNA, 320 bp, Zea mays
  Clone ID: LIB3061-033-Q1-K1-A7
atcgacatataaacaacaatcatccatatacaatgtgcagcaatatatacaggtcatgtatgctcatcagcctgtatagctcgcgctatactcggaaccaccaagttactatgctaaaaagtttttattactctcatcattaacaaatacttctattcaaccaactgtttacactgaacactgctaattatttacaactacaacaatcaccatgcaatcagataactactgtctactctataacccttcaacttcttacatccaaccaacttatcacactgaaccgctttgctgcatttgcagaccaaatactactggca

SEQ ID NO: 3093 - DNA, 424 bp, Zea mays
  Clone ID: LIB3061-033-Q1-K1-A9
gctggggtgaaccctgctatctacttgcaggcacaacagctactaccatttaaccaggttgtcgggagcccttatgccttcttactgcaacaacagcttctgccattccatctgcaagctgtggcaaacattgttgctttcttgagacaacaacatttgttgccattttacccacaagttgtgggaaacattaatgccttcttgcaacagcaacaattgctaccattctacccacagaatgtggcaaacattgttgccttcttacaacaacaacaattgctaccatttagccaacatgctttgacgaatcctaccaccttattgcaaccgcccaccattggtggtgccatcttctagattttttatgatttatactgtaataataaagttctcatgctgatatgtgcgacctctcagtaataaa

SEQ ID NO: 3094 - DNA, 363 bp, Zea mays
  Clone ID: LIB3061-033-Q1-K1-B1
aacatagaaagcacaatagtgtaccaacaatggcagccaaaatattttgcttccttgtgctcgttggtctttctgcaagtgctgctaccgcaaccattttcccacaatgctcacaagctcctatagcttcctttcttcccccatacctctcaccagcggtgtcttcagtatgtgaaaacccaattcttcaaccctacaggatccaacaggcaatcgcagcaggcatcttacctttatcacccttgttcctccaacaaccgtcagccctattacagcagttacctttggtgcatttgttggcacaaaacatcaaggcacaacaactacaacaacttgtgctaagaaaccttgctgcctactctc

SEQ ID NO: 3095 - DNA, 420 bp, Zea mays
  Clone ID: LIB3061-033-Q1-K1-B10
gcacaatagtgtaccaacaatggcagccaaaatattttgcctccttatgctccttgggctttcgtgcaagtgctgctacggcgaccattttcccgcaatgctcgcaagctcctatagcttcccttcttcccccgtacctctcaccagcggtgtcttcggtatgtgaaaacccaattcttcaaccctacaggatccaacaggcaatcacagctggcatcttacctttatcacccttgttcctccaacaatcatcagccctattacatcagttacctttggtgcatttattggcacaaaacatcagggcacaacaactacaacaacttgtgctagcaaaccttgctgcctactctcagcaacagcagtttcttccattcaaccaactagctgcattgaactctgcttcttatttgcaacaac

SEQ ID NO: 3096 - DNA, 359 bp, Zea mays
  Clone ID: LIB3061-033-Q1-K1-B11
acgaagcaacatagaaagtagaatccattatcaacaatagagcaacaatggcgaccaagatgtttgccctccttatgctccttgctgttcctacatgtgttgctaacgcgacaattttgcctcaatgctcacaagctgctatagctttccttcttcccccataccttacatcaattatagcttcagtatgtgaaaacccagctattcaaccatataagcttcaacacgcaatctcaggatgcaacatacctttatagaccttgctgttgcaacaatgaccagccctatctttggtgcagtcattggtacaaaccatgagggcacaccagctgcagcaactcgtgctacctgtgatcaac

SEQ ID NO: 3097 - DNA, 333 bp, Zea mays
  Clone ID: LIB3061-033-Q1-K1-B12
cctccgtgtccactctcgatcttcccttccccctcggcgccggtctccaaacccgctgtccgcgtttcgtaccgcttccggttccgggggcgggcgggcagcaccgtctcggctctcggatactatggcttccggcgaggggtgggaggcggcggtgcgggcggaggtggtcgccgctgcattgttggaccacctgcagatggtggagctcggagcctgttcaaaggttcacaatgcacagcctatggactgactactaccaacggacctgttctggaaggtgccgctgcacccaattggcgatcgacaacatattggcactgaaggaggtga

SEQ ID NO: 3098 - DNA, 368 bp, Zea mays
  Clone ID: LIB3061-033-Q1-K1-B2
gcgagcaacatagaaagtcgaatccattagcatcaatagagcaacaatggcgaccaaggataggtgtccctacttatgctgcttgctctttctacatgtgttgctaacgcgacaattctccctcaatgctcacaagctactatagcttcccttcttcccccataccttccatcaattatagcttcagtatgtgaaaacccagctcttcaaccatataggcttcaacaagcaatcgcagcaagcaacataccttcatcggccttgttgtatcaacaatcaccagccctatctttggtgcagacataggtacaaaccatcacggcacaacagctgcagcaactcgggctacctgtgatcaaccaagtagc

SEQ ID NO: 3099 - DNA, 366 bp, Zea mays
  Clone ID: LIB3061-033-Q1-K1-B3
ttctagatcgcgagccgcccttcttttttctttcttttttttctttattccatcttggatccgtgtttctctcttgttttttcttttttgaaaaaacgaggagggcgtcgtcagcggccctcctgctagccttgttggcggtggccctggtctccctggccggcccagccacggccgcggggaacaagaccgggcaggtgaccgtgttctggggccggaacaaggccgagggcacgctgcgcgaggcctgcgactcgggcctctacaccatggtgatcatgtccttcctcgacgtctacggcccgcagcgcggcggctaccaccagtaccacctggacctgtcggggcactccgacggcccggcat

SEQ ID NO: 3100 - DNA, 369 bp, Zea mays
  Clone ID: LIB3061-033-Q1-K1-B4
gcaacatagaaagtggaatacagtagctacaatagagcaacaatggcggccaagatagtttgcatccttatgctccttgctctttctgcatgtgttgctaacgcgaccatttttcctcaatactcacaagctcctatagctgcccttcttcccccataccttccatcaatgaccgcttcagtttgtgaaaacccagcccttcaaccctacaggctccaacaagcaatcgcaacaagcaacttacctttatcacccctgttctttcaacaatcgccagccctatctttggtgcagtcattggtacaaaccatcagggcacaacagctgcaacaactcgtgctaccagtgatcagccaagtagctctggca

SEQ ID NO: 3101 - DNA, 333 bp, Zea mays
  Clone ID: LIB3061-033-Q1-K1-B6
atttgagcattcagaaacacatcaagtgaagctacctagcaacgacttaacgacaggggctaccaagatattagtccttcttgctcttcttgccctttttgcgagcgcaacaaatgcgtgcattattccacaatgctcacttgctcctagtgccattataccacagctcctacgaccagttacttcaatgggctttgaacacttagctgtgcaagcctacacgctacaacaagcgctcgcggctagcgcctgacaactaccaattcaccaactgctactacaatgcttggcacatttcaccctacaaaccatcgcaacacagcagcaacaaca

SEQ ID NO: 3102 - DNA, 365 bp, Zea mays
  Clone ID: LIB3061-033-Q1-K1-B7
gcaataggacgatcgagcaagaagcaagcagcagtaacaagaaaccatcatcgatccgatgtatccaccaatggcggcgctcggaggacggcggaggagggcgtcgtcagcggccctcctgctagccttgttggcggtggccctggtctccctggccggcccagccacggccgcggggaacaagaccgggcaggtgaccgtgttctggggccggaacaaggccgagggcacgctgcgcgaggcctgcgactcgggcctctacaccatggtgatcatgtccttcctcgacgtctacggcccgcagcgcggcggctaccaccagtaccacctggacctgtcggggcacccgaacggccggcatcggg

SEQ ID NO: 3103 - DNA, 430 bp, Zea mays
  Clone ID: LIB3061-033-Q1-K1-B9
acccacgcgtacgcctgccaccagttacttcaatgggcttttaacacccagctgtgcaagcctataggctgcaacgagcaattgcggcgagcgtcttacaacaaccaatttcccagttgcaacaacaatccttggcgcatctaacaatacaaaccatcgtatcgcaacagcaacaacaattcctaccagcactgagccacctagccatggtgaaccctgtcgcctacttgcaacagcagttgcttgcatcaaacccacttgctctggcaaacgtagctgcaaaccatccacaacaacagctgcaacagcttatgccagcgctcagtcaactagccatggtgaaccctgacgactacctacaacagctacaactgcttttatctagcccgctcgctgtggccaatgcacctacatacctgcaacaacaatt

SEQ ID NO: 3104 - DNA, 364 bp, Zea mays
  Clone ID: LIB3061-033-Q1-K1-C1
ctccccacctcctatcgcccccctctctctagcaccagcagcggtacgaggatggccgtcgggtagtggccggatgcataccatttaagtatagagctaacaatgatgaaatctctggtgacaaatctaagaaagtcgtggaagttctcatgataaattcccaaagcggacctggtcttttgtttccaaagggaggatgggaaaatgatgaaactgttgaagaggcagcagctcgagaagctatagaagaagccggagttcgaggtgatatagtgcattttctggggtcgtatgacttcaaaagcaagacacatgatgatgcgtgctgcacttagggtatgtgcagggctgcagtgtttgcgct

SEQ ID NO: 3105 - DNA, 422 bp, Zea mays
  unsure (1)..(422): unsure at all n locations; Clone ID: LIB3061-033-Q1-K1-C10
cccacgcgtccgattcaaatggccaggagttgctatccactcttttgaagaacctagggtctgttgccaaatcactggagccaaaagaactatgtaaactcctggaggcataccaaagcctgcaaaatggatcaaatgctggaacctctggaacagctaatgccacagaagaggctgcagggccatctaactctaagttgcctttcgtgaatggtagtcattgtggacatgcatcatcatctgttgtgccagtacagtcgaaggctaccatagtggtaactccagagcccgcatcatgcaagcttaaggattttgatctgaatgacacttgtaatgatatggaaggctttgaggatcgacaagaaggttcacctacacctgcctttaagacagctgactctnctaattgtgcatcatggatg

SEQ ID NO: 3106 - DNA, 429 bp, Zea mays
  Clone ID: LIB3061-033-Q1-K1-C11
cgtgccaacagccgcatccaagcccgtgccagctgcagggaacctgcggcgttggcagcaccccgatcctgggccagtgcgtcgagtttctgaggcatcagtgcagcccgacggcgacgccctactgctcgcctcagtgccagtcgttgcggcagcagtgttgccagcagctcaggcaggtggagccgcagcaccggtaccaggcgatcttcggcttggtcctgcagtccatcctgcagcagcagccgcaaagcggccaggtcgcggggctgttggcggcgcagatagcgcagcaactgacggcgatgtgcggcctgcagcagccgactccatgcccctacgctgctgtcggcggtgtcccccactgaagaaactatgtgctgtagtatagccgctggctagctagctagttgagtcatttagcggcga

SEQ ID NO: 3107 - DNA, 364 bp, Zea mays
  Clone ID: LIB3061-033-Q1-K1-A6
gaaacacaccaagcgaagcgcactagcaacaacctaacaacaatggctaccaggatagtatccctccttgcgcttcttgcgctttttgcgagcgcaacaaatgcgtccattattccacaatgctcacttgctcctagttccattattccacagttcctcccaccagttacttcaatggccttcgaacacccagctgtgcaagcctataggctacaacaagcgattgcggcgagcgtcttacaacaaccaattgcccaattgcaacaacaatccttggcacatctaacaatacaaaccatcgcaacgcaacagcaacaacagttcctaccagcactgagccacctagccatggtgaaccctgtcg

SEQ ID NO: 3108 - DNA, 364 bp, Zea mays
  unsure (1)..(364): unsure at all n locations; Clone ID: LIB3061-014-Q1-K1-F10
attgagaccaactagcaacatataaagcacaatagtgtaccaacaatggcagccaggatattttgcctccttatgctccttggtctttctgcaagtgctgctacggcgaccattttcccgcaatgctcgcaagctcctatagcttcccttcttcccccgtacctctcaccagcggtgtcttcggtatgtgaaaacccaattcttcaaccctacaggatccaacaggcaatcacagctggcatattacctttatcacccttgttcctccaacaatcatcagccctattacatcagctacctttggtgcatttattggcacanatcatcagggcacaacaactactacaacttgtgctagcaaacc

SEQ ID NO: 3109 - DNA, 417 bp, Zea mays
  Clone ID: LIB3061-014-Q1-K1-F11
gaactctgcttctaattggcaccacctccacctaccattaacccagctacctgttgggtacccccaacaatttcttccattcaaccaactggcagcattgaactctcctgcttatttacagcagcaacaactactaccattcagccagctagctggtgtgagccctgctaccttcttgacacaaccacagttgttgccgttctaccagcacgctgcgcctaacgctggcaccctcttacaactgcaacaattgctgccattcaaccaacttgctttgacaaacctagcagtgttctaccaacaacccatcattggtggtgccctcttttagatttcttatgagttatagttcaataataaagttttttgtctgatgtttgtggcttcccagaaataagaaagtacatttctagattc

SEQ ID NO: 3110 - DNA, 389 bp, Zea mays
  Clone ID: LIB3061-014-Q1-K1-F12
attcaaaaacacaccaagcgaagcgcactagcaacgacctaacaccaatggctaccaagatattagccctccttgcgcttcttgcccttttagtgagcgcaacaaatgcgttcattattccacagtgctcacttgctcctagtgccattattccacagttcctcccaccagttacttcaatgggcttcgaacatccagccgtgcaagcctacaggctacaactagcgcttgcggcgagcgccttacaacaaccaattgcccaattgcaacaacaatccttggcacatataaccctacaaaccattgcaacgcaacaacaacaacaacaacagtttgtgccatcactgagccacctagccgtggtgaaccctgtcacctacttgcaacag

SEQ ID NO: 3111 - DNA, 375 bp, Zea mays
  Clone ID: LIB3061-014-Q1-K1-F3
cgggcggcctaaagggttggccttggtacctacaacgtttcttcaggagcctccaggggcctttactgccttggacggaaagactctcgatggacggatcataccgcttaatcatgctaacgagaagaccggtggcttacgtggcggctgtggctatgttgcggcggatatggtggtggtggaggctatggtggtgctggtggaagccgtggatactgtggcagcgactatggtggcagctacagcaacatgggtggtggtggtgattatggtgacgctggttgacgttgaggcaactatactgccagacgttgcgaccgcttcgcctacagtaactttggctatgacagtatctccggtggaaacggggctagc

SEQ ID NO: 3112 - DNA, 435 bp, Zea mays
  Clone ID: LIB3061-014-Q1-K1-F4
tttcgggacgtcaaccttcaaaaccgcggtatcgtccaggaaattgatgtggcccaatgccttttaacccttctggtggtggcagcatctatgttgacgaagcttatgggacagcaaagcatgcaaaaactgcttctgctgctgctgctgcaaacaatgtcgcctgcaatgtatacagctcaattacaatgcctgtgcacccaatgccttggcagcagcaaggctatgagaacttttatggggcttatggctccaggatgtatagctcttacatgggatatagggtgccctatggagataacatgtgctcaggctatggaagaggttatggcggttcgtcatgaggttccagaatgtatggtggatcaacgtatatcgctggaatgttacgaccctatggtggctatgggatggtcatgagtccttataatcagg

SEQ ID NO: 3113 - DNA, 409 bp, Zea mays
  unsure (1)..(409): unsure at all n locations; Clone ID: LIB3061-014-Q1-K1-F5
agaccattagcatttatctaactccagagtcgcagaagaactccgatcgacgaccatgaggggtgtctgctcgttgcacctcgctctcctggcatctcgctgctgagcgtccacctccacgcatacatagcgtgcggctgcggcttgccagtccaccgtcgtccggttcatcgtaccgtcgtcggtgcatctgccaccgtncggttcacctgccacctccggtgcatctcccaccgccggtccacctgccgccgccggtacacctgccaccgccggtccatgtgccgtcgtcggttcatctgccgccgccaccatgccactaccctactcaaccgtcccggcctcagcctcatccacagccacacccatgcccgtgccaacagccgcatccaagcccgtgccagctgca

SEQ ID NO: 3114 - DNA, 423 bp, Zea mays
  Clone ID: LIB3061-014-Q1-K1-F6
gcaaaaccatcagatctagcagaactctctcgacctcatcggcgttggcggagcgcgtgttgaccggagatggcgccgatcgggtggaggaggagcgcggcggcgcgggtcgcctggcgcccggccacggtttgcctgtggctcgcgctcgccgccgccgcactgacgctcgcccaggctaagaaggacctgacggatgttacccacatggtctacttcgacatcgagatcgacggctagcccgtaggccggattgtcatggtgctttttgggaagactgttcctaagacggcagagaacttgcgagctctttgcacatgagagaaaggcgtcggcaagagtggcatagccctccactacaagggaagtaagttccacagaatcatccacagcttcatgctccaaggaggtgacttcactctc

SEQ ID NO: 3115 - DNA, 371 bp, Zea mays
  Clone ID: LIB3061-014-Q1-K1-F7
atagaaagcacaatagtgtaccaacaatggcagccaaaatattttgcttccttatgctccttggtctttctgcaagtgttgctaccgcaaccattttcccacaatgctcacaagctcctatagcttcccttcttcccccatacctctcaccagcggtgtcttcaatgtgtgaaaccccaattgttcaaccctacaggatccaacaggcaatcgcaacaagcatcttaccattatcacccttgttactgcaacaaccgtcagccctattacaacaggtacctttggtccattcggtggcacaaaacattaaggcaccacaactaccacaacctgggcttgcaaaccttgctggatacttttaacaacattaa

SEQ ID NO: 3116 - DNA, 418 bp, Zea mays
  Clone ID: LIB3061-014-Q1-K1-F8
cttgcatccaacccacttgctctggcgaacgtagctgcataccagcaacaacaacagctgcaacagtttatgccagtgctcagtcaactagccatggtgaaccctgccgtctacctacaactactttcatctagcccgctcgcggtgggcaatgcacctacgtacctacaacaacagttgctgcaacaaattgtaccagctctgactcagctagctgtggcaaaccctgctgcctacttacaacagttgcttccattcaaccaactggctgtgtcaaactctgctgcgtacctacaacagcgacaacagttacttaatccattggcagtggctaacccattggtcgctaccttcctgcagcagcaacaacaattgctgccatacaaccagttctctttgatgaaccctgccttgcagc

SEQ ID NO: 3117 - DNA, 397 bp, Zea mays
  Clone ID: LIB3061-014-Q1-K1-F9
agccttccgccacttgccaccttaaaaggcccatttttgtcccaccattggcagccaaaatatttggctgccttatgctccttggtctttctgcaagtgttgctaccgcaaccattttcccacaatgctcacaagctcctatagcttcccttcttcccccatacctctcaccagcggtgtcttcaatgtgtgaaaacccaattgttcaaccctacaggatccaacaggcaatcgcaacaggcatcttaccattatcacccttgttcctccaacaaccgtcagccctattacagcagttacctttggtccatttggtggcacaaaacatcagggcacaacaactacaacaacttgtgctagcaaaccttgctgcatactctcagcaacatcagtttct

SEQ ID NO: 3118 - DNA, 425 bp, Zea mays
  Clone ID: LIB3061-014-Q1-K1-G1
ggtgggtcggcttctcctcccccttcggttcgggttcgggttcgtgaggttctccgggtttcggtttcgtgggtgggcggatcgagatggcggcgtcggatgttgagtaccgctgcttcgtcggcggcctcgcctgggccacggacgaccactccctccacaacgccttcagcacctacggcgaggtcctcgagtccaagatcatcctcgatcgggagacgcagaggtcccgcggcttcggcttcgtcaccttctccacggaggaggcgatgcggaacgccatcgagggcatgaacggcaaggagctggacggtcgcaacatcaccgtcaacgaggcccagtcccgcggcggccgtggaggcggcggcggcggctacggtggtggcccgtgaggcggcggctacgggcgtggcgggcgccgtgat

SEQ ID NO: 3119 - DNA, 390 bp, Zea mays
  Clone ID: LIB3061-014-Q1-K1-G10
cgctgcaactacttgattgattgttggtagcgaaccttgctgcttatctccagcaacaacaatttcttccattcaatcaactagctggggtgaaccctgctgtctacttgcaggcacaacaactactaccatttaaccaacttgtcgggagccctgatgccttcttactggaacaacagcttctggcattccatctggaagctggggaaaacattggttctttcttgcgacaaccaccattggtggcacattacacccacagtttggggaacacataaatgctcttttgcaacagaaacaatggcggccattctacccacataatgtggcaaacattgttgccttcttacaacaacaacaattgctgccatttagccaacatgctttgac

SEQ ID NO: 3120 - DNA, 344 bp, Zea mays
  Clone ID: LIB3061-014-Q1-K1-G11
gacagacaaagatttgtgaaggtgatccgcgctgacaagagatggataagatggacgaggcggcggcggcatcgctgtgcttagcggccctgatggccgtggtcgtctggcaaggccaggtcgagctgcagaggctcagggacctgcagtgctgtcaggaggtccaagagagcccgctcgacgcgtgccgccaggtgctcgaccggcagctaaccggcggcggctgccgacgacgcgttggcccgttacggtagcgcaccgttctacggatgctgtgctgccagcagctacaggacgtgagcctcgaatgccactgagacgtcatccggagcatggtcaaggga

SEQ ID NO: 3121 - DNA, 350 bp, Zea mays
  Clone ID: LIB3061-014-Q1-K1-G12
cgtacctacaacagcgacaacagttacttaatccattggtagtggctaacccattggtcgccgccttcctacagcagcaacaattgctgccatacaaccagttctctttgatgaatcctgtcttgtcgaggcagcaacccatcgttggaggtgccatcttttagattacatatgagatgtactcgataatggtgccctcataccgacgtgtgtttcctagaaataatcaatatattgattgagatttatctcgataaaaaaaaaaaaaaaaaaaaaaaactaaaaaaaaaaaaataaaaaaaaaatacaaaacaaaaacagaaaaaaccaaaacaaaaaaaaagggcggc

SEQ ID NO: 3122 - DNA, 392 bp, Zea mays
  Clone ID: LIB3061-014-Q1-K1-G2
cgacctacgcgtacgggggcggtggcttctactccccctcttggtctagctccggttcatgaagttctcgggatgggctgtttcgtgggtgggcggatcgagatggcggcgtctgatgttgagtaccgctgcttcgtcggcggcctcacctgggccactgacgaccactccgtacacaacgccttcagcacctacggcgaggtcctcgagtccaagatcatcctcgatcgggagacgcagaggtcccgcggcttcggcttcgtcaccttctccacggaggaggcgatgcggaacgccatcgagggcatgaacggcaaggagctggacggtcgcaacatcaccgtcaacgaggcccagtcccgctgcggccgtggaggcggctgcagcggcta

SEQ ID NO: 3123 - DNA, 414 bp, Zea mays
  Clone ID: LIB3061-014-Q1-K1-F1
gctcagaataagctatctcacatcaagggcaaatagcgaattcgggccttcgaagtgggtttcttctggcttcataaagacttgcggtgatttcaggattggtaaatatgaaagctgtgatatagtcaacatgttctctcaccagatgaaatgggataaagggccgcgtgggcttatcaaaatctatccacagaaaggtgatatctgggctgtttatcggaattggtcctctgactgggatgaagatactccagataatgtgctccatgcctacaatgtggttgaggtactggatgcctatgatgaagtccatggcatctccataattcccttagtcaaggttactggatttcgaacagtatttcagcgccatcaggatccaaatgctaccatgaagattcctaaagaagagat

SEQ ID NO: 3124 - DNA, 413 bp, Zea mays
  Clone ID: LIB3061-014-Q1-K1-D5
gcacaatagtgtaccaacaatggcagccaaaatatcttgcctccttatgctgcttggtctatctgcaagtgctgctacggcgaccattttcccgcaatgctcgcaagctcctatagcttcccttcttcccccgtacctctcaccagcggtgtcttcggtatgtgaaaacccaattcttcaaccctacaggatccaacaggcaatcacagatggcatcttacctttatcacccttgttcctccaacaatcatcagccctattacatcagttacctttggtgcatttattggcacaaaacatcagggcacaccaactacaacaactcgtgctatcaaaccttgctgcctactctcagcaacagcagtttctttcattcaaccaactagctgcattgaactctgcttattatttgc

SEQ ID NO: 3125 - DNA, 415 bp, Zea mays
  Clone ID: LIB3061-014-Q1-K1-D6
gacgtcagcctagcaattagctcatcgactccagattggagaactcgacaccatggaggtgctgatcgttgcccttgctctcctggcgctcgctgcgagcgccgccttcagtacaagcggcggctgtggctgccagacaccaccgtttcatctaccgcctccgttctatatgccgcctacgttctatctgccgccgcagcagcagccgcagccatggcaataccccactcaaccaccgcagctaagcccgtgccagcagttcggatcctgcggcgtcggcagcgtcggcagcccgttcctgggccagtgcgtcgagttcctgaggcaccagtgcagcccggcggcgacgccctacggctcgccacagtgccaggcgctgcagcagcagtgctgccaccagatcaggcaggtggag

SEQ ID NO: 3126 - DNA, 404 bp, Zea mays
  unsure (1)..(404): unsure at all n locations; Clone ID: LIB3061-014-Q1-K1-D7
tcggacagcattgcaactctcctggcttatttacagcagcaaacgaactacttaccattgcagggcagtctacgctgagtgtgagcctctgcttaccttcgttggacacaatccagcagcttgttgctcgtatctacacagcagcgtctgcgtcctaacgcatgagcacactgttacaatctgcaacacattgcttgtcattcgaaccaacttgcttnagacaaacgccagcatgcattctaccaacaactccatcatatggtggtgccactattcgtagattctcttatgagtctatnagttcaagtaataagagtctttttagtcatgatgtatcgtggccttcccatgaaataagtacagtacagtttctagaattcctcaatgcagaaacaaaaaggtga

SEQ ID NO: 3127 - DNA, 292 bp, Zea mays
  Clone ID: LIB3061-014-Q1-K1-D8
gctgcagcaagtcgtgcttccttcttgacacagcatcagttgctgcctttctacaagcagtttgcggctaaccccgcatccctcttacaactacaacaattgttgccctttgtccaacttgctttgacaaacccagcagcctcctaccaacaacacatcattggtggtgccctcttttagattgattattagttgtaattcaataataaagttttttggatgatgtatgtggccaaccagaaataagaagttacatttccaaaataataaagttttttgtctgatgtttgtg

SEQ ID NO: 3128 - DNA, 353 bp, Zea mays
  Clone ID: LIB3061-014-Q1-K1-D9
tccgattcggtcgaccagctcgagggctggcccctgaaaacctggttgtcttgatccaatgaaggacgggtaggaccattccggaaaggaccgtccgatcaccggtcggccgtcagcgatgctggatggaattacaccccgttacaccatgagatcgactcgcatgaatctaggcgagagtggagctaaagacagcagaacacaatgtatcaccttcaaagcctgacttggctctttagctgggtcgaattgctgatgccgtgctgctgctttgagatctgatgggatcctttggatcaagacggagacttgcgagggacattgtcggcgctttggcgttatcaggaaggagc

SEQ ID NO: 3129 - DNA, 285 bp, Zea mays
  Clone ID: LIB3061-014-Q1-K1-E1
gtcctaaatgccagccgcgccccttttttttcttttttttgcataattttttctggtatggctctcacaattcctttatttccaacttaaatttagactcttgatcattttttattcagaacgagcactagtgtcacgttatgacgacgtgaccaccttgagctcgaattcctcgacgacgaccagcgacaacccttccacttgagcggcacctagtgcttcgtgcctttgataccctagcgtcgcgccattcgagttgtgcatcttaacgccattgacatacac

SEQ ID NO: 3130 - DNA, 416 bp, Zea mays
  Clone ID: LIB3061-014-Q1-K1-E10
ccttcttcccccgtacctctcaccagcggtgtcttcggtatgtgaaaacccaattcgtcaaccctacaggatccaacaggcaatcacagctggcatcttacctttatcacccttgttcctccaacaatcatcagccctattacatcagttacctttggtgcatttattggcacaaaacatcagggcacaacaactacaacaacttgtgctagcaaaccttgctgcctactctcagcaacagcagtttcttccattcaaccaactagctgcattgaactctgcttcttatttgcaacaacaacaactaccattcagccagctacctgctgcctacccccagcaatttcttccattcaaccaactggcagcattgaactctcctgcttatttacagcagcaacaactactaccattca

SEQ ID NO: 3131 - DNA, 419 bp, Zea mays
  Clone ID: LIB3061-014-Q1-K1-E11
cggacgcgtgggtcagcattcaaaaacacaccaagcgaagcgcactagcaacgacctaacaccaatggctaccaagatattagccctccttgcgcttcttgcccttttagtgagcgcaacaaatgcgttcattattccacagtgctcacttgctcctagtgccattattccacagttcctcccaccagttacttcaatgggcttcgaacatccagccgtgcaagcctacaggctacaactagcgcttgcggcgagcgccttacaacaaccaattgcccaattgcaacaacaatccttggcacatctaaccctacaaaccattgcaacgcaacaacatcaacaacaacagtttctgccatcactgagccacctagccgtggtgaaccctgtcacctacttgcaacagcagctgcttgcat

SEQ ID NO: 3132 - DNA, 414 bp, Zea mays
  Clone ID: LIB3061-014-Q1-K1-E12
gtttgatattgatgcaaatggtatcctctcagttgctgccattgataagggcactggaaagaaacaggacatcaccatcactggtgctagtacgctacctaaggatgaggttgagagaatggtagaagaagccgataagtttgccaaggaggacaaagagaagagagatgcaatcgacaccaaaaaccaggcggactcagtggtctaccagactgagaagcaactgaaggagcttggcgacaaagtccccgctcctgtgaaagagaaggtggatgtgaagctccaggagctcaaagacgccatttctggtggatcaacacagagtatgaaagatgccatggctgctctgaaccaggaggtgatgcagattggccaggcaatgtataaccagcctggtgccagtgctgctgggcc

SEQ ID NO: 3133 - DNA, 452 bp, Zea mays
  Clone ID: LIB3061-014-Q1-K1-E3
gtccggattccgggctagatgtggcgaccccggtcgcttacttgcacctgccggtgctggcttccaacccatttgctctgccaaaggtggctgcataccaacagcatcaacaattgcaacagtttatgccagagctcagactactagccatggtgaaccttgccgactacctacaacagcgacaactgctgtcatctagccctctcgtcgtggctaatgcacatacttacctgcgacatcaattgctgcagcagatagcaccagctctgactcagctagctgcggcaaacgctgctgcctactatgcacagctgcttacattcaaccaactgactgtttcgaactctgctgcgtacgtacaacagcgactacaggtacttaatccagtatcagtgcctaacccattgttcactgccttactacagctacaacaattgctaccatacagtcag

SEQ ID NO: 3134 - DNA, 422 bp, Zea mays
  Clone ID: LIB3061-014-Q1-K1-E4
tcgctgggtcctgtgccgtatctacaactggagggccggcggcctgaaaaaggcgggggcgcgctcggacggcggcgaccacaagcctgtgttcgccacggcggcagtgagctccccgtcggagcataagccgttcgtggcggctgcgggcggtctgcccccggcgttccaggagctggcggcgtactacgaccggccgtcggactcgatgccgcggctgcactcggactactccagctgctcggagcaagtgctgtccacggagcagctggcgtgcgaccggtaggtgcagagccagcccaagatcagcgagtgggagcggaccttcgactccgaccgcgtgaaccccgcgggctccatgctcgaccccgtcgtctgccacgccggcggcgacccgctgctgcaggacatactcatgtact

SEQ ID NO: 3135 - DNA, 425 bp, Zea mays
  Clone ID: LIB3061-014-Q1-K1-E5
gcatcatagaaagtggaatccagtagcaacaatagagcaacaatggcgaccaagatattttccctccttatgctccttgctctttctacatgtgttgctaacgcgacaattttccctcaatgctcacaagctcctatagcttcccttcttcccccataccttccatcaattatagcttcaatatgtgaaaacccagctcttcaaccatataggcttcaacaagcaatcgcagcaagcaacatacctttatcgcccttgttgtttcaacaatcgccagccctatctttggtgcagtcattggtacaaaccatcatggcacaacagctgcatcaactcgtgctacctctgatcaaccaagtagctctggcaaacctttctacctactctcagcaactacaatttcttccattcaaccaactgtctac

SEQ ID NO: 3136 - DNA, 401 bp, Zea mays
  Clone ID: LIB3061-014-Q1-K1-E6
agttacttaatccattggcagtggctaacccattggtcgctaccttcctgcagcagcaacaacaattgctgccatacaaccagttctctttgatgaaccctgccttgcagcaacccatcgttggaggtgccatcttttagattacatatgagatgtactcgacaatggtgccctcataccgacatgtgtttcctagaaataatcaatatattgattgagatttatctcgataaaaaaaaaaaaaaaaaaaaaaaaaaaaaaaaaaaaaaaaaaaaaaaaaaaaaaataaaaagaaaaaaaaaaaaaagaaaaaaaaaaaacaaaaaaaaaaatacacaacaaaaagaacaaactaaaactaactaaaaaaaaaacaaaaaacgggggccctctttaaaggg

SEQ ID NO: 3137 - DNA, 340 bp, Zea mays
  Clone ID: LIB3061-014-Q1-K1-E7
agtacactatatgacatcaatggcttctaccgaatatcagccttggcaagggatgggttatggctacatagctacttagaacgatttcatgattggctaatacgacagctgtgatataatgcacatgatctctgacaacatgaaatgatataaaagaccttgtaggcttaatagaatttatacacagaaaggtgatatctgagctgtatatgctaattggtgctctgactgcgatgaacatacttcaaataatgttctccatgcatacattgtgggtgatgtactggatgcctatgatgatacccatggtaactgcataattcccttagtcaaggttact

SEQ ID NO: 3138 - DNA, 419 bp, Zea mays
  unsure (1)..(419): unsure at all n locations; Clone ID: LIB3061-014-Q1-K1-E8
gcatacactagtgcttttgctagctacttgtgcgagaagagagagcgcacggcgatagatatggcgcatagcaagcgcgaaatcaagcccgggagggcgcataccaaggtggccggcgacgacgagatgctgcggaccgggttcttcgacggcacgccgctggagggcggcaagatcgccgactcccagcccgtcgacctcttcgccgctgcccgccgcgtcgccgacgccccgtactcatcgcagcaggaaggaccacacgaggaggggaccaacaagaacgccgtcatcgcggagtcggagcccgtcgacctgcccgcgagcgcgcggggcgtggcggaggtgaaccgtgctgggccggaggagcagacaggccgcggtcggcagggcatggccgagcccaccgncggtggacgtcg

SEQ ID NO: 3139 - DNA, 158 bp, Zea mays
  Clone ID: LIB3061-014-Q1-K1-E9
gtcgatgattgaataataatggggtaatccttaacattggttgcaatggtcaattggggcattgacctgattgaccattggaattgaaaagaaaaaagtattgttccaaaaaaaaaaaaaatactaaattttacagatcatattacaaaataaataac

SEQ ID NO: 3140 - DNA, 148 bp, Zea mays
  Clone ID: LIB3061-014-Q1-K1-D3
tcggggaaccatggggccgtaccaggtcctgaatggggttaatttttctgggcttttacggttcggccaagggcttgaaggtttcgaacccaaagttaacctttgcctcccttggaacggccttcatggttaactaccggattccgga

SEQ ID NO: 3141 - DNA, 409 bp, Zea mays
  unsure (1)..(409): unsure at all n locations; Clone ID: LIB3061-014-Q1-K1-C10
ggtggagatgctggggcgcgccggggaggtggaggaggccgagcgactcgtggccgggatggaggcgcgcccggacagggtcatcttcgcggcgctcctcgccgcgtgccgcgtgcacggccgggttgacgttgccgagcgggtggccgggctcatgcgccggtatgccgttgcgtgaaaactcgcggtctgactaatgcatcatcagttgaagacttgaagcgcagttcagacctgtgatctgaaataatcatccatcgccatgcatcttttgggttgattgcttgcttggacacgaatcggactaagaaatactccatagctggcaatgtggtagcgttgcttgtaagtgcattgtatgttttcagtcattcatgcagcangagcccctcctggctagtaaaatcag

SEQ ID NO: 3142 - DNA, 418 bp, Zea mays
  Clone ID: LIB3061-014-Q1-K1-C11
ggtcttcagaccattagctttaactactccagagcgcagaagaacccggacgacacgatgagggtgttgctcgttgccctcgctctcctggctctcgctgcgagcgccacctccacgcatacaagcggcggctgcggctgccagccaccgccgccggttcatctaccgccgccggtgcatctgccacctccggttcacctgccacctccggtgcatctcccaccgccggtccacctgccgccgccggtccacctgccaccgccggtccatgtgccgccgccggttcatctgccgccgccaccatgccactaccctactcaaccgccccggcctcagcctcatccccagccacacccatgcccgtgccaacagccgcatccaagcccgtgccagctgcagggaacctgcggcgttggca

SEQ ID NO: 3143 - DNA, 399 bp, Zea mays
  Clone ID: LIB3061-014-Q1-K1-C12
gagaccaactagcaacatagaaagcacaatagtgtaccaacaatggcagccaaaatattttgcctccttatgctccttggtctttctgcaagtgctgctacggcgaccattttcccgcaatgctcgcaagctcctatagcttcccttcttcccccgtacctctcaccagcggtgtcttcggtatgtgaaaacccaattcttcaaccctacaggatccaacaggcaatcgcagctggcatcttacctttatcacccttgttcctccaacaatcatcagccctattacaacagttacctttggtgcatttattggcacaaaacatcagggcacaacaactacaacaacttgtgctagcaaaccttgctgcctactctcagcaacagcagtttcttccattc

SEQ ID NO: 3144 - DNA, 395 bp, Zea mays
  Clone ID: LIB3061-014-Q1-K1-C2
attgagaccaactagcatcatagaaagcacaatagtgtaccaacaatggcagccaaaatgttttgcctccttatgctccttggtctttctgcaagtgctgctacggcgaccattttcccgcaatgctcgcaagctcctatagcttcccttcttcccccgtacctctcaccagcggtgtcttcggtatgtgaaaacccaattcttcaaccctacaggatccaacaggcaatcacagctggcatcttacctttatcacccttgttccttcaacaatcatcagccctattacatcagttacctttggtgcatttattggcacaaaacatcaaggcacatcaactacaacaacttgtgctagcaaaccttggttgctactttcagcaacagcagtttct

SEQ ID NO: 3145 - DNA, 428 bp, Zea mays
  unsure (1)..(428): unsure at all n locations; Clone ID: LIB3061-014-Q1-K1-C3
ccaactagcaacatagaacgcacaatagtgtaccatcaatgggccgccaaatattgggcctccttatgctccttggtctntctgcaagtgctgctacggcgaccattttcccacaatgctcacaagctcctatagcttcccttcttcccccgtacctctcaccagcggtgtcttcggtatgtgaaaacccaattcttcaaccctataggatccaacaggcaatcgcagctggcatcttacctttatcacccttgttcctccaacaatcatcagccctattacagcagttacctttggtgcatttattggcacaaaacatcagggcacaacaactacaacaacttgtgctagcaaaccttgctgcctactctcagcaacaacagtttcttccattcaaccaactagctgcattgaactctgcttcttat

SEQ ID NO: 3146 - DNA, 383 bp, Zea mays
  Clone ID: LIB3061-014-Q1-K1-C4
ttttatggcctccctagagcccttccggttcctgtatagaggtttcctggtcctgaacttgaaaaggctcaggtactacgtcgttgatgaactgcctccacacctgctgcgaccagaagacgctgaagaagtggtttttcatcgacatgacagtaggctaaatccagtcccagagaacaaattgaagcaccactctccagtaccgcacagcagcacagctcttctattcaccgatcccgatggatatgggcagcggctcgtcacctgttatcaccgatccgatatcgataagcccaccggtgctgggacgcttgacgtcgaacctgatgccgttctcggtcatgtccggaggctgcttcctcagtcctagcatgagcgccagc

SEQ ID NO: 3147 - DNA, 91 bp, Zea mays
  Clone ID: LIB3061-014-Q1-K1-C5
cggactcgtgggtaataatgcagtatgacgacacacattatcatgtgtggtatgagcaataatatatgcatcataataaagttttggtttt

SEQ ID NO: 3148 - DNA, 444 bp, Zea mays
  Clone ID: LIB3061-014-Q1-K1-C6
cacaatagtgcaccaacaatggcagccaaaatattttgcctccttatgctccttggtctttctgcaagtgctgctacggcgaccattttcccacaatgctcacaagctcctatagcttcccttcttcccccgtacctctcaccagcggtgtcttcggtatgtgaaaacccaattcttcaaccctataggatccaacaggcaatcgcagctggcatcttacctttatcacccttgttcctccaacaatcatcagccctattacagcagttacctttggtgcatttattggcacaaaacatcagggcacatcaactactacaacttgtgctagcaaaccttgctgcctactctcagcaacaacagtttcttccattcaaccaactagctgcattgaactctgcttcttatttgcaacatcaacatctaccattcagccagctatct

SEQ ID NO: 3149 - DNA, 390 bp, Zea mays
  Clone ID: LIB3061-014-Q1-K1-C7
gtggtcatttagactttgtcattggaaaagatggtgcaaaggtatgcactactggggcttgacttcttttatatgaaagtcttcttctggtattgcaaaatataagttaatcactctattaagtagtaagtttattttcctttatctaaaaaagaagtaatttattctaagatggctgtggtgttatttatgcttgatcatggataaaggactcttttgcttaagcaacatcctagttttaaattaaccactgggaccttgaataatggtccctacgataactttagtaagtgatagatgataaagagatatttatcagtttaacggagttgtgccaatcggtgaaggatattaaagtgtacttaatgtatatctcaagttcctgtatca

SEQ ID NO: 3150 - DNA, 419 bp, Zea mays
  Clone ID: LIB3061-014-Q1-K1-C8
cccaattccctccgtcggccgccgctccatcccgtacgacgacaccatgagggagtgcatttcgatccacatcggccaggccggtatccaggtcggaaacgcgtgctgggagctgtactgccttgagcatggcattcaggctgacggtcagatgcccggtgacaagaccattgggggaggtgatgatgctttcaacaccttcttcagtgagactggtgctgggaagcacgtgccccgtgctgtttttgttgaccttgaacccactgtcatcgatgaggtgaggactggcacctaccgccagctcttccaccctgagcagctcatcagtgggaaggaggatgccgccaacaactttgcccgtggtcactacaccattggcaaggagattgttgacctgtgccttgatcgcatcaggaagc

SEQ ID NO: 3151 - DNA, 404 bp, Zea mays
  Clone ID: LIB3061-014-Q1-K1-C9
ggacgtcagcctagcaattagctcatcgactccagattggagaactcgacaccatggaggtgctgatcgttgcccttgctctcctggcgctcgctgcgagcgccgcctccagtacaagcggcggctgtggctgccagacaccaccgtttcatctaccgcctccgttctatatgccgcctccgttctatctgccgccgcagcagcagccgcagccatggcaataccccactcaaccaccgcagctaagcccgtgccagcagttcggatcctgcggcgtcggcagcgtcggcagcccgttcctgggccagtgcgtcgagttcctgaggcaccagtgcagcccggcggcgacgccctacggctcgccacagtgccaggcgctgcagcagcagtgctgccaccagatc

SEQ ID NO: 3152 - DNA, 444 bp, Zea mays
  Clone ID: LIB3061-014-Q1-K1-D1
tccgcccaagccttccgaggaaggcaccttgaaaggagaattcatttaccaccattgaaccaccattgccagccaggatattttccttcctaatgctcctggctctttctacaggtgttgcttaacgcgacaattttccttcaatgctcacaagctcctatagcttcccttcttcccccataccttccatcaattatagcttcagtatgtgaaaacccagctcttcaaccatataggcttcaacaagcaatcgcagcaagcaacatacctttatcgcccttgttgtttcaacaatcaccagccctatctttggtgcagtcattggtacaaaccatcagggcacaacagctgcagcaactcgtgctacctgtgatcaaccaagtagctctggcaaacctttctccctactctcagcaacaacaatttcttccattcaaccaactg

SEQ ID NO: 3153 - DNA, 412 bp, Zea mays
  Clone ID: LIB3061-014-Q1-K1-D10
caaactattcgtatcgtgcgtaggtgttgcttgctgttgcaacggaccatccatctggtgcttgcattgctgtcgcactcgctcagctatctccaccgctattggttgttgtttggttacccacgccctgctctctgataccagttgatagcagcagcagctagctataggttgtcagcaggatcgaccagatagatagcgcgcgcggatcggagttaacagcgctgcaggatggtgaagagcacgacgacgatgggggcggcgagctgcggcggcggcgtgctgccgctggcgtcgctgaaccacatcagcatcgtgtgccggtcggtggaggcgtcgctgcgcttctacacggatgtgctcggcttcgtccccatccgccgccccggctctttcgacttcggcggcgcct

SEQ ID NO: 3154 - DNA, 413 bp, Zea mays
  unsure (1)..(413): unsure at all n locations; Clone ID: LIB3061-014-Q1-K1-D11
cggacgcgtgggcggcatccgccgccatcgatcgatcgcccggaaactgacctctaccgatgtctggagccggcgaggaggataagaagcccgcggagggcggcgcccacatcaaccttaaggtcaagggacaggatggcaatgaggtgttctttcgcataaagaggtccacccagctgaagaagctgatgaacgcctattgcgaccgccagtctgtggacatgaatgccattgcattcctgtttgatggccgcaggcttcgcggcgagcagacccctgatgagctggagatggaggacggcgacgagatcgacgccatgcttcaccagaccggaggcagcgttcctagcaccacctaatagcagcagctgcggagcctcgttttgctctccgncctgcgtagtactaaacaa

SEQ ID NO: 3155 - DNA, 413 bp, Zea mays
  Clone ID: LIB3061-014-Q1-K1-D12
ccaactagcaacatagaaagcacaatagtgtaccaacaatggcagccaaaatattttgcttccttatgctccttggtctttctgcaagtgttgctaccgcaaccattttcccacaatgctcacaagctcctatagcttcccttcttcccccatacctctcaccagcggtgtcttcaatgtgtgaaaccccaattgttcaaccctacaggatccaacaggcaatcgcatcaggcatcttaccattatcacccttgttcctccaacaaccgtcagccctattacagcagttacctttggtccatttggtggcacaaaacatcagggcacaacaactacaacaacttgtgctagcaaaccttgctgcatactctcagcaacatcagtttcttccattcaaccaactggctgcattg

SEQ ID NO: 3156 - DNA, 359 bp, Zea mays
  unsure (1)..(359): unsure at all n locations; Clone ID: LIB3061-014-Q1-K1-D2
gcgatctaagccgtcgactctactactgcatctacctcgctctcgccgtctcgatcgctgggtcttcgccccgtaccgtcccgagcagagcgcagtcctatgctgagctgggatggcggacgcgaagcagcagcagcagcagcagcagcagtcacagcaggcggctgcggtagccaccggcgtgtggaagacggtcaagcccttcgttaacggtggnggctctgggatgctcgcgacctgcgtcatacagcctatcgacatgggcaaggtgaggatccagctgggcgatggctgctgtggtcatggtaccaggcacatgcgttgcaacgacggtggccggtccttctaccaggggttgg

SEQ ID NO: 3157 - DNA, 401 bp, Zea mays
  Clone ID: LIB3061-014-Q1-K1-B9
gtgagcgcaacaaatgcgttcattattccacaatgctcacttgctcctagtgccatgattccacagttcctcccaccagttacttcaatgggcttcgaacacctagctgtgcaagccaacatgcaacaacaagcgcttgcggcgagcgtcttacaacaaccaattgcccaattgcaacaacaatccttgccacatctaacaatacaagccatcacaacgcaacagcaacaacagttcctaccagcactgagccacctagccatggtgaaccctgccgcctacttgcaagagcagctgcttgcatccaacccacttgctctggcgaacgtagttgcaaaccagcaacaacaacagctacaacagtttctgccaacgctcagtcaactagccatggtgaaccc

SEQ ID NO: 3158 - DNA, 408 bp, Zea mays
  unsure (1)..(408): unsure at all n locations; Clone ID: LIB3061-032-Q1-K1-H12
cgaaaattccaagacatgtacaatgtggataaattcgtgaggagcctagatggtggggtcgaagtaatagatgaaatacctgatgaagtgagtgctaagaagccagcagttatcagagtaccaaaccgtgtgactgaaagcttcatcatggacaccatccagcccatctttaaaaaaaacaagtacttaagacttgcggtcattttctcttcagtaagtttaaggccaaaggagacgagtaacaaggacttggatgcgactgctttgctttgcatggtcaatgggctcgaactgaagcatgaatattcttgagtcgncaggaaaatggtggataggcttcaagaattaagcaagaaatcagatgggaaggtctttggcatcgatttgcggaccgacttgctggaaaga

SEQ ID NO: 3159 - DNA, 375 bp, Zea mays
  Clone ID: LIB3061-032-Q1-K1-H2
ccaacaagcaacatagaaagtggaatacagtagcaacaatagagcaacaatggcgggcaagagattttccatccttatgctccttgctctttctgcatgtgttgctaacgcgaccattattcctcaatactcacaagctcctatagctgcccttctttccccataccttccatcaatgaccgcttcagtttgtgaaaacccagcccttcaaccctacaggctgcaacaagcaatcgcaacaagcaacttacctttatcacccctgatctttcaacaatcgccagacctatctttggtgcagtcattggtacaaaccatcagggcacaacagctgctacaactcgtgctaccagtgatcagccaagtagctctggc

SEQ ID NO: 3160 - DNA, 434 bp, Zea mays
  Clone ID: LIB3061-032-Q1-K1-H3
gtttgatggtttccgttttgatggtgtgacctccatgatgtacactcatcacggatgacaagtaacatttacggggaacttcaatgagtattttggctttgccaccgatgtagatgcagtggtttacttgatgctggtaaatgatctaattcatggactttatcctgaggctgtaaccattggtgaagatgttagtggaatgcctacatttgcccttcctgttcacgatggtggggtaggttttgactatcggatgcatatggctgtggctgacaaatggattgaccttctcaagcaaagtgatgaaacttggaagatgggtgatattgtgcacacactgacaaataggaagtggttagagaagtgtgtaacttatgctgaaagtcatgatcaagcattagtcggcgacaagactattgcgttttgggtgatgg

SEQ ID NO: 3161 - DNA, 399 bp, Zea mays
  Clone ID: LIB3061-032-Q1-K1-H4
cgcgtccgcgaattctcaggcagacgaagaccacacgaggtcgggaagaccgaagaccgagccgtgcgggggctcgggacgggaacgggacaggaccccaaaatctcagatccttcctgcccgcccgcccgtgcccgtcgacgcgtcgttcttgccggccgcgccttacctacgccctctcctactccagggggatcggatacgccacaggctgcgcgatggtgctgtgggtcttcggctacggctccctcatctggaaccccggcttctacttcgacgacaaaatcctcggcttcatcaagggctacaagcgcacctttaatctcgcttgcattgaccacagaagcacactcgaacattcgggcaggacctgcacgcttgaaaccgacgactaggcca

SEQ ID NO: 3162 - DNA, 408 bp, Zea mays
  Clone ID: LIB3061-032-Q1-K1-H5
aactatcaccatttaacctgatagcttctgcctactctaactagccaccacggatgggattaaaccaattgttcgtactgtacccctctgtttattcgcagcatccaatactactgccatttagcgagctacctgcagcacgtcgtacttacttcttgacacatctacacctgctgcctttcaactagcagtttgcggctaaccgcgcaactctcttacaactactacaattgctgacctttgcccaacttgctttgacaaaccctgcagcctcctaccaacaacacatcattggcggtgccctctcttagattgactattagacgtaattcaataataaagtacttcgtatgatgtatgacaccaaccagaactaagacgttacatctgcagattcttcaagcaggt

SEQ ID NO: 3163 - DNA, 384 bp, Zea mays
  unsure (1)..(384): unsure at all n locations; Clone ID: LIB3061-032-Q1-K1-H6
atcgcagcaggaaggaccacacgaggaggggaccaacaagaacgccgtcgtggcggagtcggagcccgtcgacctgcccgcgagcgcgcggggcgtggcggaggtgaaccgtgctgggccggaggagcagacaggccgcggtcggcagggcatggccgagcccaccgccggtggacgtcgcttgggattaggtcgcccggccccggcttaacgatccagatcaagcagtactcgactaccgccactacactacctgctctgctcgtgtcttgtttccagttttctttctctgtaagcggtgtagggtttgccaaacttttatgtacgaattatgaatatcaataaagtcgatctgctgctgcgttaaaaaaaaaaaggtgnttg

SEQ ID NO: 3164 - DNA, 432 bp, Zea mays
  Clone ID: LIB3061-032-Q1-K1-H7
cccacgcgtccgattgagaccaactagcaacatagaaagcacaatagtgtaccaacaatggcagccaaaatattttgcctccttatgctccttggtctttctgcaagtgctgctacggcgaccattttcccgcaatgctcgcaagctcctatagcttcccttcttcccccgtacctctcaccagcggtgtcttcggtatgtgaaaacccaattcttcaaccctacaggatccaacaggcaatcacagctggcatcttacctttatcacccttgttcctccaacaatcatcagccctattacatcagttacctttggtgcatttattggcacaaaacatcagggcacaacaactacaacaacttgtgctagcaaaccttgctgcctactctcagcaacagcagtttcttccattcaaccaactagcttgcatg

SEQ ID NO: 3165 - DNA, 374 bp, Zea mays
  Clone ID: LIB3061-032-Q1-K1-H8
caatgccaagcgacatgcaatgataaatggtagaaacccatcacctatgtgggacaagttggtatttaacaaaattaaagctagacttggtggacgaatgaggcttatgacttcaggtgcttctccattgtcaccagatgtcatggaatttttaagaatatgcttcggtgaagttcttgaagggtatggaatgacagagacatcttgtgtcatcagtacaatgaatattggtgacagatcaattggacatgttggatctccaaatccttcttgtgaagttaaacttgtggacgtcccaaaaatgaattatacttccgaagatcaaccctatccttgtggaaagaattgggttaagggacctataataatctggg

SEQ ID NO: 3166 - DNA, 401 bp, Zea mays
  Clone ID: LIB3061-032-Q1-K1-H9
ccaagatccaggacaaggagggcattccaccggaccagcagcgcctcatcttcgccgtcaagcagctggaggatggccgcaccctggcggattacaacatccagaaggagagcactctccacctggtgctccgcctcaggggtggcatgcagatttttgtgaagacattgactggcaagactatcaccttggaggtggagagctctgacaccattgacaatgtgaaggccaagatccaggacaaggagggcattcccccagaccagcagcgtctgatctttgcgggcaagcagctggaggatggccgcactctcgcggactacaacatccagaaggagagcacccttcaccttgttctccgcctcaggggtggtatgcagatctttgtgaagaccctgact

SEQ ID NO: 3167 - DNA, 250 bp, Zea mays
  Clone ID: LIB3061-033-Q1-K1-A1
ctgtccctccttatactccttgctatttctgcataacttgctaacgctacaattttccctcaatgctcacaagctcctatagcttcccttcttcccccataccttccatcaattatagcttcaatatttgaaaacccacctctttaaccctataagctccaacaagcaatctcatcaagcaacatacctttattacccttgtttcaacaatctccaaccctatctttatttcaatcatttgtacaaacca

SEQ ID NO: 3168 - DNA, 436 bp, Zea mays
  Clone ID: LIB3061-033-Q1-K1-A11
ccggttcggattcgacccacgcgtacgcaacaagcgacatagaaagtggaatacagaagcaacaatagagcaacaatggcggtcgagaagttaccatccttatgctgcttgctctatatgcatagtgttgctaacgccaccatttttactgattactgacaagctattatagctgtccttattcaccaaaacgttgcatgaatgaccgctgcagttcagatgaaaacccagaccttcaaccctacaggcttcatcaagcactcgcaacaagcaacttacctgtatcaccactgtacattcaacaattatcagccatatctttgcagcaaacattgctacaaacgatgactacactgcagttggatcaacttgtgctagcactgatcagacgcatatgtttggcacagcttaatgcctactatcagcagcaacggtc

SEQ ID NO: 3169 - DNA, 428 bp, Zea mays
  Clone ID: LIB3061-033-Q1-K1-A12
agaccaactagcaacatagaaagcacaatagtgtaccaacaatggcagccaaaatatgttgcctccttatgctccttggtctttctgcaagtgctgctacggcgaccattttcccgcaatgctcgcaagctcctatagcttcccttcttcccccgtacctctcaccagcggtgtcttcggtatgtgaaaacccaattcttcaaccctacaggatccaacaggcaatcgcagctggcatcttacctttatcacccttgttcctccaacaatcatcagccctattacaacagttacctttggtgcatttattggcacaaaacatcatggcacaacaactacaacaacttgtgctagcaaaccttgctgcctactctcagcaacagcagtttcttccattcaaccaactaggttcattgaactctgctttt

SEQ ID NO: 3170 - DNA, 371 bp, Zea mays
  Clone ID: LIB3061-033-Q1-K1-A2
gaaagcacaatagtgtaccaacaatggcagccaaaatattttgcctccttatgctccgtggtctttctgcaagtgctgctacggcgaccattttcccgcaatgctcgcaagctcctatagcttcccttcttcccccgtacctctcaccagcggtgtcttcggtatgtgaaaacccaattcttcaaccctacaggatccaacaggcaatcacagctggcatcttacctttatcacccttgttcctccaacaatcatcagccctattacatcagttacctttggcgcatttattggcacaaaacatcagggcacaacaactacaacaacttgtgctagcaaaccttgctgcctactctcagcaacagcagttt

SEQ ID NO: 3171 - DNA, 399 bp, Zea mays
  Clone ID: LIB3061-033-Q1-K1-A3
taccgactcggaatcccgacccacacgtacccatacgctcgatacgaaacgcactatcgacgacctaacaccaaggcttaccaagatagtaggggttcttgcacttgctgcccttgtaacgatcgcaacaaatgccttcattattccacaatgctcacttgctcctagtgccattataccacaggtgcttccaccaggtacttcactgggctttgaacattcaaccatgcaagcctacatgctacatctagcgctagctgtaagcgccttacaactaccacttgcccaattgctacaacaatacttgccacatctaaccctactgaccattgccacgcagcaacaacaactacaacagcttctgccatcactgatccaccgtatactgtgagaaccctg

SEQ ID NO: 3172 - DNA, 362 bp, Zea mays
  Clone ID: LIB3061-033-Q1-K1-A5
attgagaccaacaagcaacatagaaagtggaatccagtagcaacaatagagcgacagggcgaccaagatactttccctccttatgctccttgctctttctgcatgtgttgctaacgcgacaattttccctcaatgctcacaagctcctatagcttcccttcttcccccataccttccatcaatgatagcttcagtatgtgaaaacccagctcttcaaccctataggctccaacaagcaatcgcagcaagcaacatacctttatcacccttgtttcaacaatcgccagccctatctttggtgcagtcattggtacaaaccatcaaggcacagcagctgcagcaactcgtgctacctgtgatca

SEQ ID NO: 3173 - DNA, 398 bp, Zea mays
  Clone ID: LIB3061-032-Q1-K1-H11
agacaaaggagctgataaacagacttggtgctggagttaatgcagggcgtgcttccggcgagcagaagaaattggagaagcttgaaaaagaagggttgattgagaaacctttccaaaggaagcagctaaagatcagattccctgagcgtggaagaagtgggagaactgtgttgacgataaacaatcttcaattcggatttgagaataagactttgttcaacaatgctaatctgatagtagagagaggtgaaaagatagctattattgggcccaatggttgtgggaagagcacactgcttaaacttatgttggggatggagaagccacaaggtggtgaggtgcttcttggggagcataatgtgttgccgaactattttgagcagaatcaggcagaagct

SEQ ID NO: 3174 - DNA, 416 bp, Zea mays
  Clone ID: LIB3061-032-Q1-K1-F7
actaattaccatgcacctatcaccatggtggttaccggtatgtgaaaacccaattctgcaaccttacaggatccaactggcaagcttatctacaatcttaccttcatcaaccatgcagctagatcaatgatgagacctatgacaacagttacgatacagcgcatgtattggcacatatcataacgggacagcaactacgacaactcgcgctaacaaacgttgctgtctactctaagcaaccgcattgccttgcattcaaccaactaggttcatcgaactctgattattatttgcagccatctcaactaccattcagacagctacctgatgactacccccagcagtctgatgcattcaaccaactagcagcattgaactctactgcttatttacaggcacaacaactactgccattc

SEQ ID NO: 3175 - DNA, 295 bp, Zea mays
  Clone ID: LIB3061-032-Q1-K1-F8
cagccgcaaagcggccaggtcgcggggctgttggcggcgcagatagcgcagcaactgacggcgatgtgcggcctgcagcagccgactccatgcccctacgctgctgccggcggtgtcccccactgaagaaactatgtgctgtagtatagccgctggctagctagctagttgagtcatttagcggcgatgattgagtaataatgtgtcacgcatcaccatgggtggcagtgtcagtgtgagcaatgacctgaatgaacaattgaaatgaaaagaaaaaaagtactccatctgttcc

SEQ ID NO: 3176 - DNA, 284 bp, Zea mays
  Clone ID: LIB3061-032-Q1-K1-F9
cggacgcgtgggctagcaacatagaatgcacaatagtgtaccaacaatggcagccagaatattttgcctccttatgctccttggtatttctgcaagtgctgctacggcgaccagtactagctaccagggttaaaaaaaaaagagtgagtcggcgcgacgtgcaaggcgcagcatgtgtactgtgcgcgtgcaaatccagaatgacgtagctctgacgtgggctcgcaatattctcgcgtgttcgttacaataatgataataactatgaggaataaaaaaaagaa

SEQ ID NO: 3177 - DNA, 433 bp, Zea mays
  Clone ID: LIB3061-032-Q1-K1-G1
gcacaatagtgtaccaacaatggcagccaaaatattttgcttccttatgctccttgggctttctgcaagtgctgctaccgcaaccattttcccacaatgctcacaagctcctatagcttcctttcttcccccatacctctcaccagcggtgtcttcagtatgtgaaaacccaattcttcaaccctacaggatccaacaggcaatcgcagcaggcatcttacctttatcacccttgttcctccaacaaccgtcagccctattacagcagttacctttggtgcatttgttggcacaaaacatcaaggcacaacaactacaacaacttgtgctaagaaaccttgctgcctactctcagcaacagcaggttcttccattcaaccaactggctgcattgaactctgctgcttattgcaacaacactaccaatcagtca

SEQ ID NO: 3178 - DNA, 401 bp, Zea mays
  Clone ID: LIB3061-032-Q1-K1-G11
gcaacatagaaagcacaatagtgtaccaacaatggcagccaaaatattttgcctccgtatgctccttggtctttctgcaagtgctgctacggcgaccattttcccacaatgctcacaagctcctatagcttcccttcttcccccgtacctctcaccagcggtgtcttcggtatgtgaaaacccaattcttcaaccctataggatccaacaggcaatcgcagctggcatcttacctttatcacccttgttcctccaacaatcatcagccctattacagcagttacctttggtgcatttattggcacaaaacatcagggcacaacaactacaacaacttgtgctagcaaaccttgctgcctactctcagcaacaacagtttcttccattcaaccaactagctg

SEQ ID NO: 3179 - DNA, 411 bp, Zea mays
  Clone ID: LIB3061-032-Q1-K1-G12
gaccaactagcaacatagaaagcacaatagtgtaccaacaatggcagctaaaatatggtgcctccttatgctccttggtctttctgcaagtgctgctacggcgaccattttcccacaatgctcacaagctcctatagcttcccttcttcccccgtacctctcaccaacggtgtcttcggtatgtgaaaacccaattcttcaaccctacaggatccaacaggcaatcgcagctggcatcttacctttatcacccttgttcctccaacaatcatcagccctattacagcagttacctttggtgcatttattggcacaaaacatcaaggcacaacaactacaacaacttgtgctagcaaaccttgctgcctactctcagcaacagcaagttcttccattcaaccaactagctgc

SEQ ID NO: 3180 - DNA, 437 bp, Zea mays
  Clone ID: LIB3061-032-Q1-K1-G2
caactagcaacatagaaagcacaatagtgtaccaacaatggcagccaaaatattttgcctccttatgctccttggtctttctgcaagtgctgctacggcgaccattttcccgcaatgctcgcaagctcctatagcttcccttcttcccccgtacctctcaccagcggtgtcttcggtatgtgaaaacccaattcttcaaccctacaggatccaacaggcaatcgcagctggcatcttacctttatcacccttgttcctccaacaatcatcagccctattacaacagttacctttggtgcatttattggcacaaaacatcagggcacaacaactacaacaacttgtgctagcaaaccttgctgcctactctcagcaacagcagtttcttccattcaaccaactaggttcattgaactctgcttcttaattgcaacaac

SEQ ID NO: 3181 - DNA, 434 bp, Zea mays
  Clone ID: LIB3061-032-Q1-K1-G3
ggccatcggggtcggaggatctcactgttttcttcctgctgcctgctgcatttttcgcagggtgtgggagctgagttgggaggaggactgctgcagccatgaaggccctcattctcgtcggaggcttcggcacccgcctgcgcccgctcacgctcagcgtgcccaagccgctcgtggatttcggcaacaagcccatgatcctgcaccagatcgaggctctgaaggaagttggtgttacagaggttgtcctggccatcaattaccagcctgaggtcatgctcaactttctcaaggacttcgagagcaagcttggcatcaagatcacctgctcgcaggagacggagcccctcgggaccgcatgcccgctggcgctggcccgcgacaagctcggcgacggatccggcgaccctttcttcgtgctcaacagcgacgtg

SEQ ID NO: 3182 - DNA, 427 bp, Zea mays
  Clone ID: LIB3061-032-Q1-K1-G5
ctttggtgcatttattggcacaaaacatcagggcacaacaactacaacaacttgtgctagcaaaccttgctgcctactctcagcaacagcagtttcttccattcaaccaactaggttcattgaactctgcttcttatttgcaacaacaacaactaccattcagccagctacctgctgcctacccccagcaatttcttccattcaaccaactagcagcattgaactctcctgcttatttacagcagcaacaactactaccattcagccagctagctggtgtgagccctgctaccttcttgacacaaccacagttgttgccgttctaccagcacgttgcgcctaacgctggcaccctcttacaactgcaacaattgctgccattcaaccaacttgctttgacaaacccagcagtgttctaacaacaacc

SEQ ID NO: 3183 - DNA, 394 bp, Zea mays
  Clone ID: LIB3061-032-Q1-K1-G6
ctcatcgactccagattggagaactctacaccatgaaggtgctgatcgttggcctggctctcctggcgctcgctgcgagcgccgactacagtacaagcggcggctgcggctgccagacaccaccgtttcatctaccgcctccgttctatatgccgcctccgagctatctgccgccgcagcagcagccgcatccatggcaataccccactcaaccaccgcagctaagcccgtgccagcagttcggatcctgcggcgtcgacagcgtcggcagcccgttcctgggccagtgcgtcgagttcctgaggcaccagtgcagcccggcggcgacgccctacggctcgccacaatgccaagcgctgcaacagcagtgctgccaccagatcaagcaagtgga

SEQ ID NO: 3184 - DNA, 429 bp, Zea mays
  Clone ID: LIB3061-032-Q1-K1-G8
cccacgcgtccgcttcccttcttcccccataccttccatcaattatagcttgagtatgtgaaaacccagctcttcaaccatataggcttcaacaagcaatcgcagcaagcaacatacctttatcgcccttgttgtttcaacaatcaccagccctatctttggtgcagtcattggtacaaaccatcagggcacaacagctgcagcaactcgtgctacctgtgatcaaccaagtagctctggcaaacctttctccctactctcagcaacaacaatttcttccattcaaccaactgtctacactgaaccctgctgcttatttgcagcaacaactattaccatttagccagctagctactgcctactctcagcaacaacaacttcttccatttaaccaattggccgcactgaaccccgctgcttatttgcagc

SEQ ID NO: 3185 - DNA, 391 bp, Zea mays
  Clone ID: LIB3061-032-Q1-K1-G9
ctggcagcattgaactctcctgcttatttacagcagcaactcgtgctacctctgatcaaccaagtagctctggcaaacctttctccctactctcagcaacaacaatttcttccattcaaccaactgtctacactgaaccctgctgcttatttgcagcaacaactattaccatttagccagctagctactgcctactctcagcaacaacaacttcttccatttaaccaattggccgcactgaaccccgctgcttatttgcagcagcaaatactactaccatttagccagctagctgcagcaaaccgtgcttccttcttgacacagcaacagttgctgcctttctaccagcagtttgcggctaaccccgcaaccctcttacaactacaacaat

SEQ ID NO: 3186 - DNA, 425 bp, Zea mays
  Clone ID: LIB3061-032-Q1-K1-H1
attgagaccaacaagcaacatagaaagtggaatccagtagcaacaatagagcaacagtggcgaccaagatattttccctccttatgctccttgctctttctacatgtgttgctaacgcgacaattttccctcaatgctcacaagctcctatagcttcccttcttcccccataccttccatcaattatagcttcaatatgtgaaaacccagctcttcaaccatataggcttcaacaagcaatcgcagcaagcaacatacctttatcgcccttgttgtttcaacaatcgccagccctatctttggtgcagtcattggtacaaaccatcagggcacaacagctgcagcaactcgtgctacctctgatcaaccaagtagctctggcaaacctttctccctactctcagcaacaacaatttcttccattc

SEQ ID NO: 3187 - DNA, 424 bp, Zea mays
  Clone ID: LIB3061-032-Q1-K1-H10
cacctgagcttgataaggagaaatcttgtagagtaggtgaggtgatcatacgtccggatcctgagaaccccgagtggcctaagaggatccagacattctttgatggtaaaaatgaagaaaccactatggtaactcaaattgtgtcgataaacaaaactgggatgtattacctctattttatgttctgtgatcctcaacttaagggattgaagattacaggaagaactgtttggagaaatccacagggttaccttcctggtaaaatggctccaatgatgacattttatggtttcatgtcacttgcatatcttgtacttggacttctatggttcattcagtttgtgcgatgctggaaagacattttgcagctgcattaccatataacaggctgtattgctcttggcatgtgtgaaatggctttttg

SEQ ID NO: 3188 - DNA, 353 bp, Zea mays
  Clone ID: LIB3061-032-Q1-K1-F6
tccatcgagaggccgtcgacaggggaattaatggcgtcgtcgtctagcagcggccagcgccgcctcatcctcgcagccgccgtcctgctctccgtgctcgcggctgccagcgccagcgccgggacctcctgcgtgccggggtgggccatcccgcacaacccgctcccgagctgccgctggtacgtgaccagccggacctgcggcatcgggccgcgcctaccgtggccggagctgaagaggagatgctgccgggagctggcggacatcccggcgtactgccggtgcacggcgctgagcattctaatggacggcgcgatcccgccgggcccggacgcgcaactggagggccgtct

SEQ ID NO: 3189 - DNA, 458 bp, Zea mays
  Clone ID: LIB3061-032-Q1-K1-E11
cggtccggattcccgggctatctgccgctccagcctttcgctagggtttatccaccggcggcgcgcgcgacggcggcaagatggtgcagggtctgacctaccgcaagcggcacagctatgccacgaagtccaaccagacgcgggtcgtcaagacccctggtggcaagctcgtgtaccagtacaccaagaagagagccagcgggcccaagtgtcccgtgaccgggaagaagatccagggcattccccatctgaggccagctgagtacaaaaggtccaggttgtctaggaaccgcagaactgtgaaccgtccctatgggggagtactatctggaactgcagttagagaaaggatcatccgtgctttcctggttgaagagcagaagattgtcaagaaagtgttgaaattacagaagaccaaagacaagactttctcaaaaagtaactctgtaacagaagtg

SEQ ID NO: 3190 - DNA, 423 bp, Zea mays
  Clone ID: LIB3061-032-Q1-K1-E2
tgagcattcagaaacacaccaagcgaagcacattagcaacaacctaacaacaatggggaccaagatattatccctccttgcgcttcttgcgctttttgcgagcgcaacaaatgcgttcattattccacaatgctcacttgctccaagttccattattacacagttcctcccaccagttacttcaatgggcttcgaacacccagctgtgcaagcctataggctacaacaagcaattgcggcgagcgtcttacaacaaccaatttcccagttgcaacaacaatccttggcacatctaacaatacaaaccatcgcaacgcaacagcaacaacaattcctaccagcactgagccacctagccatggtgaaccctgccggctacttgcaacagcagttgcttgcatcaaacccacttgctctggcaaa

SEQ ID NO: 3191 - DNA, 433 bp, Zea mays
  Clone ID: LIB3061-032-Q1-K1-E3
cactagcaacatagaaagcacaatagtgtaccaacaatggcagccaaaatattttggttccttatgctccttggtctttctgcaagtgctgctaccgcaaccattttcccacaatgctcacaagctcctatagcttcctttcttcccccatacctctcaccagcggtgtcttcagtatgtgaaaacccaattcttcaaccctacaggatccaacaggcaatcgcagcaggcatcttacctttatcacccttgttcctccaacaaccgtcagccctattacagcagttacctttggtgcatttgttggcacaaaacatcaaggcacaacaactacaacaacttgtgctaggaaaccttgctgcctactctcagcaacagcagtttcttccattcaaccaactggctgcattgaactctgctgcttatttgcaac

SEQ ID NO: 3192 - DNA, 430 bp, Zea mays
  Clone ID: LIB3061-032-Q1-K1-E5
caactagcaacatagaaagcacaatagtgtaccaacaatggcagccaaaatatttgagttccttatgctccttggtctttctgcaagtgctgctaccgcaaccattttcccacaatgctcacaagctcctatagcttcctttcttcccccatacctctcaccagcagtgacttcagtatgtgaaaacccaattcttcaaccctacaggatccaacaggcaatcgcagcaggcatcttacctttatcacccttgttcctccaacaaccgtcagccctattacagcatttacctttggtgcatttgatggcacaaaacatcaaggcacatcaactacaacaacttgtgcttggaaacctttctgcctactctcagcaacagcagtttcttccattcaaccaactggctgcattgaactctgctgcttatttg

SEQ ID NO: 3193 - DNA, 427 bp, Zea mays
  Clone ID: LIB3061-032-Q1-K1-E6
cttcctttcttcccccatacctctcaccagcggtgtcttcagtatgtgaaaacccagttcttcaaccctacaggatccaacaggcaatcgcagcaggcatcttacctttatcacccttgttcctccaacaaccgtcagccctattacagcagttacctttggtgcatttgttggcacaaaacatcaaggcacaacaactacaacaacttgtgctaggaaaccttgctgcctactctcagcaacagcagtttcttccattcaaccaactggctgcattgaactctgctgcttatttgcaacaacaactaccattcagtcagctagctgctgcctacccccagcaatttcttccattcaaccaactggcagcattgaactctgctgcttatttacaacagcaacagctaccaccattcaaccagctagc

SEQ ID NO: 3194 - DNA, 337 bp, Zea mays
  Clone ID: LIB3061-032-Q1-K1-E7
gcaatttcttccattcaaccaactagcagcattgaactctgctgcttatttacagcagcaacaactactaccattcagccagctagctgatgtgagccctgctgccttcttgacacaacaacagttgttgccgttctacctgcacgctatgcctaacgctggcaccctcttacaactgcaacaattgctgccattcaaccaacttgctttgacaaacccaacagtgttctaccaacaacccatcattggtggtgccctcttttagattgcttatgagttatagttcaataatgaagttttttggatgaaaaaaaaaaaagctaagctgatgactacc

SEQ ID NO: 3195 - DNA, 411 bp, Zea mays
  Clone ID: LIB3061-032-Q1-K1-E8
cagcctagcaattagctcatcgactccagattggagaactcgacaccatgaaggtgctgatcgttgcccttgctctcctggcgctcgctgcgagcgccgcctccagtacaagcggcggctgtggctgccagacaccaccgtttcatctaccgcctccgttctatatgccgcctccgttctatctgccgccgcagcagcagccgcagccatggcaataccccactcaaccaccgcagctaagcccgtgccagcagttcggatcctgcggcgtcggcagcgtcggcagcccgttcctgggccagtgcgtcgagttcctgaagcaccagtgcagcccggcggcgacgccctacggctcgccacagtgccaggcgctgcagcagcagtgctgccaccagatcaggcaggtggagc

SEQ ID NO: 3196 - DNA, 405 bp, Zea mays
  unsure (1)..(405): unsure at all n locations; Clone ID: LIB3061-032-Q1-K1-E9
atcacactctccagtaaccgtccgctactccagccgcatctctagccgagtctatcgcctcctcctccgccgccgcagctatcctaatggctcgcttcgccgtggtcgccgccatcgtcgccctcctcgccgtcgtcgcggcggcgcaggccccggccgccaccccgaccacagctcccaaggccgcgcccaggatggccccgctgccgcctccccctgcgcggtccccggccacagccccggcgccggccgccaagccgccgaccgccgcggcgccgtccccgctggcctctcctccggccccgcccaccgagggccccgccgcctctgcgccgtccgcgaaggccccgacctcgtccgtctccaccaccccggccggcgcccncaccgtcgcgccttccggca

SEQ ID NO: 3197 - DNA, 423 bp, Zea mays
  Clone ID: LIB3061-032-Q1-K1-F1
agcgagctttccttcggaactctctcgtgctcacctcatccgtccgacagatccacgcgaatcctctgattcagagcagggtgttggcattgatcagacgcctgccatggcggatcagttcgaggattcggcgaacaatgtgatcattgaggaggtgaacaagggcctgaacccaggaatggtggttctgcttgtggttgcaagcttcctgctgatcttctttgtggggaactatgcgctgtatgtgtatgcgcagaagacgctcccgccaaagaagaagaagccggtgtcgaagaagaagctgaagaaggaaaagctgaagcagggggtctctgcgccgggagagtaaacggccatgctgccgatccttccgtccagagctcctattcacatgattattagagaaaaaaattatatatatat

SEQ ID NO: 3198 - DNA, 352 bp, Zea mays
  Clone ID: LIB3061-032-Q1-K1-F10
tttgagcattcagaaacacaccaagcgaagcgcactagcaacgacctaacaacagtggctaccaagatattagccctccttgcgcttcttgccctttttgtgagcgcaacaaatgcgttcattattccacaatgctcacttgctcctagtgccattattccacagttcctcccaccagttacttcaatgggcttcgaacacctagctgtgcaagccaacatgcaacaacaagcgcttgcggcgagcgtcttacaacaaccaattgcccaattgcaacaacaatccttgccacatctaacaatacaagccatcacaacgcaacagcaacaacagttcctaccaacactgagcc

SEQ ID NO: 3199 - DNA, 392 bp, Zea mays
  Clone ID: LIB3061-032-Q1-K1-F11
aaggaattggacgcgaggagactcgagtactcgacagggaaaagtcgaggcctcggggccatcgactcgtgaagatgtcctcgcccgccgagtactacaaatcacttccacctataagcaaggcatatgggacattgtgtttcttcaccactgtgctagttcggctccatatcctgaatccgctgtttctgtacttatattaccctcgggtgttcaagaagtttgaggtatggaggatatttacaagtttcttcttcctgggaccattttccataaactttggtattcgccttctgatgatagcaaggtatggtgtcatgttggaaaagggagcatttgataaacggactgcagatttcttgtggatgatgatatttggtgccatctcacta

SEQ ID NO: 3200 - DNA, 361 bp, Zea mays
  Clone ID: LIB3061-032-Q1-K1-F12
attggcacaaaacatcagggcacaacaactacaacaacttgtgctagcaaacctggctgcctactctcagcaacagcagtttcttccattcaaccaactagctgcattgaactctgcttcttatttgcaacaacaacaactaccattcagccagctatctgctgcctacccccagcaatttcttccattcaaccaactgacagcattgaactctcctgcttatttacagcagcaacaactactaccattcagccagctagctggtgtgagccctgctaccttcttgacacaaccacagttgttgccgttctaccagcacgctgcgcctaacgctggcaccctcttacaactgcaacaattg

SEQ ID NO: 3201 - DNA, 231 bp, Zea mays
  Clone ID: LIB3061-032-Q1-K1-F2
cctccagatacccgtagtcaagtttcccgttcccccattggtgaattgggctttttgctctttatgaaggcaaaagatggaaggttatgttcaattaaaccaatttttgggtcacctgtagtctgttagattctgttgtaacttgaatactctgtggatgcactgcggttgctacagttcttgtccaacttttttttgacacagtgctgtaataaataggcgtctgtttgg

SEQ ID NO: 3202 - DNA, 398 bp, Zea mays
  Clone ID: LIB3061-032-Q1-K1-F3
aactattaccatttagccagctagctactgcctactctcagcaacaacaacttcttgcatttaaccaattggccgcactgaaccccgctgcttatttgcagcagcaaatactactgccatttagcgagctagctgcagcaagtcgtgcttccttcttgacacagcaacagttgctgcctttctacaagcagtttgcggctaaccccgcaaccctcttacaactacaacaattgttgccctttgtccaacttgctttgacaaacccagcagcctcctaccaacaacacatcattggtggtgccctcttttagattgattattagttgtaattcaataataaagttttttggatgatgtatgtggccaaccagaaataagaagttacatttccagattct

SEQ ID NO: 3203 - DNA, 426 bp, Zea mays
  Clone ID: LIB3061-032-Q1-K1-F4
attgagaccaacaagcaacatagaaagtggaatacagtagcaacaatagagcaacagtggcggccaagatattttccatccttatgctccttgctctttctgcatgtgttgctaacgcgaccatttttcctcaatactcacaagctcctatagctgcccttcttcccccataccttccatcaatgaccgcttcagtttgtgaaaacccagcccttcaaccctacaggctccaacaagcaatcgcaacaagcaacttacctttatcacccctgttctttcaacaatcgccagccctatctttggtgcagtcattggtacaaaccatcagggcacaacagctgcaacaactcgtgctaccagtgatcagccaagtagctctggcaaacctttctccctactctcagcaacaacaatttctttccattc

SEQ ID NO: 3204 - DNA, 417 bp, Zea mays
  Clone ID: LIB3061-032-Q1-K1-F5
cgaacctcgagtgccggatgtatgagcagcggttcccggaggtggatgccgcggtgatgatccaggtgaagcacatcgctgacatgggcgcgtacgtctccctgctcgagtacaacaacatcgagggcatgatcctcttctccgagctctcccgccgtcgtatccgctccatctcctccctcatcaaggttggtcgccaggagcccgccatcgtgctccgtgtcgaccgcgacaagggctacatcgacctttcaaagcgccgcgtctccgaggaggaggcgcacgcatgcgaggacaggtacaacaagtccaagctcgtgcactccatcatgcgccacgtcgccgagacgctcgaggtcgacctcgagccgctctaccagcggattggctggccgctctaccggaagtacggtcacg

SEQ ID NO: 3205 - DNA, 391 bp, Zea mays
  Clone ID: LIB3061-032-Q1-K1-E10
cagcattcaaaaacacaccaagcgaagcgcactagcaacgacctaacaccaatggcgaccaagatattagccctccttgcgcttcttgcccttttagtgagcgcaacaaatgcgttcattattccacagtgctcacttgctcctagtgccattattccacagttcctcccaccagttacttcaatgggcttcgaacatccagccgtgcaagcctacaggctacaactagcgcttgcggcgagcgccttacaacaaccaattgcccaattgcaacaacaatccttggcacatctaaccctacaaaccattgcaacgcaacaacaacaacaacaacagtttctgccatcactgagccacctagccgtggtgaaccctgtcacctacttgcaac

SEQ ID NO: 3206 - DNA, 418 bp, Zea mays
  Clone ID: LIB3061-014-Q1-K1-A12
atttgcactcatgcatcacaaaacatccttctatcagtaccatcaatcatcatgcatgcttagtagtataggcaccaaatcaaatctgcaacatcaattatctaactccaaaaaccatgaagctggtgcttgtggttcttgctttcattgctttagtatcaagtgtttcttgtacacagacaggcggctgcagctgtggtcaacaacaaagccatgagcagcaacatcatccacaacaacatcattcacaaaaacaacaacatcaaccaccaccacaacatcaccagcagcagcaacaccaacaacaacatgttcacatgcaaccacataaacatgagcaacaacaagaagttcatgttcaacatcaacaacaacaaccgcagcaccaccaccatacaacaacaacatcagcaccaac

SEQ ID NO: 3207 - DNA, 401 bp, Zea mays
  Clone ID: LIB3061-014-Q1-K1-A3
ggggttggctttcttgccgttaagccccaacggggacggcaagttaatgtattacaggaacccaaccgcggacatgctgtttacggaggcggagctggacctgggcctggtccggtgcgccagggtgttccactacgggtccatctcgctcatctccgatccgtgccggtcggcgcacatggccgacatgcgcgcagccaatgccgcgggcgtgctctggtcctacgacctcaacgtgcgccttccgctctggccgtcgcccgacgccgtacgcgagggcatcctcagcatctggaacgaggccgacttcatcaaggtcagcgacgacgatgtggccttactcacgcgcggggacgccaacgacgagaagaacgtgctgtccctgtggtttgacgggctca

SEQ ID NO: 3208 - DNA, 197 bp, Zea mays
  Clone ID: LIB3061-014-Q1-K1-A4
gtcttcggtatgtgaaaacccaattcttcacccctacaggatccatcaggcaatgacagctggcatcttacctttatgacccttgttcctccaacaatcatgaggcctattacatcagttacctttggtgcatttattggcacaaaacatcagggcacaacaactacaacaacttgtgctagcaaaccttgatgact

SEQ ID NO: 3209 - DNA, 428 bp, Zea mays
  Clone ID: LIB3061-014-Q1-K1-A5
atggtgtcaaattgggtcttatgtcttgctttgtcaaggctgctgtttctgcactgcaaaaccagccaattgttaatgctgtcattgatggcgatgacatcatatacagagactacgtagacgtcagtgttgctgttggcacttccaagggccttgtggtgcctgttatccgagatgctgataccatgaactttgctgacattgagaaagggataaacaaccttgcaaagaaggcaaatgagggggcgctctcgattgatgacatggcaggaggaacattcactatctccaatggtggtgtctatggaagcctcctcagcacacctatcatcaaccccccacagtcgtcaattctggggatgcattccattgtgcaacgccctgtggttgtgaatggtgacattctcgcaaggccaatgatgttcctt

SEQ ID NO: 3210 - DNA, 424 bp, Zea mays
  Clone ID: LIB3061-014-Q1-K1-A6
gctctttctgcatgtgttgctaacgcgacaattttccctcaatgctcacaagctggtgaagctatcattgatggaaggtatgggggaagaagggaagctataggagcttcagtatgtgaaaacccagctcttcaaccctataggctccaacaagcaatcgcagcaagcaacatacctttatcacccttgtttcaacaatcgccagccctatctttggtgcagtcattggtacaaaccatcaaggcacagcagctgcagcaactcgtgctacctgtgatcaaccaagtagctctggcaaacctttctccctactatcagcaacaacaatttcttccattcaaccaactatctacactgaaccctgctgcttatttgcagcaacaactattaccattcagccagctagctactgcctactctcatc

SEQ ID NO: 3211 - DNA, 437 bp, Zea mays
  Clone ID: LIB3061-014-Q1-K1-A7
cgcgtgccagcaacatagaaagtggaatccagtttcaacaatagagcaacaatggcgaccaaggtattttccctccttatgctccttgctctttctacatgtgttgctaacgcgacaattttccctcaatgctcacaagctcctatagcttcccttcttcccccataccttccatcaattatagcttcaatatgtgaaaacccagctcttcaaccatataggcttcaacaagcaatcgcagcaagcaacatacctttatcgcccttgttgtttcaacaatcgccagccctatctttggtgcagtcattggtacaaaccatcagggcacaacagctgcagcaactcgtgctacctctgatcaaccaagtagctctggcaaacctttctccctactctcagcaacaacaatttcttccattcaaccaactgtctacact

SEQ ID NO: 3212 - DNA, 381 bp, Zea mays
  Clone ID: LIB3061-014-Q1-K1-A8
ccaacaagcaacatagaaagtggaatccagtagcaacaacagagcaacaatggcgagcaagatattttccctccttatgctccttgctctttctgcatgtgttgctaacgcgacaattttccctcaatgctcacaagctcctatagcttcccttcttcccccataccttccatcaatgatagcttcagtatgtgaaaacccagctcttcagccctataggctccaacaagcaatcgcagcaagcaacatacctttatcacccttggtggttcaaccatcggcaagccctatctttggtgcaatcattggtaccaaccattaaggcacaacaactgcagcaactcgtgctacctgggatcaacccagttgcttttgccaaac

SEQ ID NO: 3213 - DNA, 376 bp, Zea mays
  Clone ID: LIB3061-014-Q1-K1-A9
gcggcccacaccgagagctcggctccctacacgacacaatcatggacgccgggccgcgtaatagctctgctatctcgcggccgtgtccctctccgaggaggcggcggtcgacggcgcgcacccggacatacgtcgacgagggcacctgcacggtggacgccgccggagcgggcgtgggctagggcccggagctgcggcgcccgaaggagcgccggcccgggcgcatcaccgacatcacgcacgcgtacgtgccggaccttatggcgtatcgcgccagcggctgtcacggagcccttggtccacctcaaggagtccatggcgaacgggtccgcggacgacctgaacgagctgccgttggagtgccacatgggcaccc

SEQ ID NO: 3214 - DNA, 390 bp, Zea mays
  Clone ID: LIB3061-014-Q1-K1-B10
attttgagcattcagaaacacaccaagcgaagcacattagcaacaacctaacaacagtggctaccaagatattatccctccttgcgcttcttgcgctttttgcgagcgcaacaaatgcgttcattattccacaatgctcacttgctccaagttccattattacacagttactcccaccagttacttcaatgggcttcgaacacccagctgtgcaagcctataggctacaacaagcaattgcggcgagcgtcttacatcaaccaatttcccagttgcaacaacaatccttggcacatgtaacaatacaaaccatcgcatctcaacagcatcaacaattactaccagcactgagccacctagccatggtgaaccctgccgactacttgcaac

SEQ ID NO: 3215 - DNA, 327 bp, Zea mays
  Clone ID: LIB3061-014-Q1-K1-B11
ggtgatatcactggctcacaaattcacgaagctgcaagttctatctctacgccagatcaggcctcagctagaagacagcggcgtggaggccgtggcaaaccactgccacgacctgcgcgagctggatctcagcagaagcttcaggctgagcgaccggtccttgtacgccctggcgcacgggtgccctcagcttaccaagcgtaacatcagcgggtgcctcaagttcaacggcctggcgctcggggtccttttcaagccatgccggaacccggaaaggcctgaaccgtgccggttgtgtaagggcagcctctgccaaagcgctccagg

SEQ ID NO: 3216 - DNA, 416 bp, Zea mays
  Clone ID: LIB3061-014-Q1-K1-B12
gctggagcacggagctagggagggggaagggttattgggaacaagtgggatctatacctcgacctcctccaggccgactactcagaaggggatgctctggatgctttggaattgttccgctactgctgcaggcgaatgctcatgacacatgttgacctcattgagaagttgctcaactacaacaccctagagaagaccgagacaagttaagcgagcacatcatgctccaaaaacactactgtttggcagtatcatagagcttaggtagtatgttgtctcttctctatcagtagaaatgggttgtgagtgtgaacatgcttttcaaggacttttcatgcgacagtgcttgttgccacctatgcaacgatgttggatattttaagtgatataattgctaaaagaaagctaatgtattt

SEQ ID NO: 3217 - DNA, 429 bp, Zea mays
  unsure (1)..(429): unsure at all n locations; Clone ID: LIB3061-014-Q1-K1-B3
cttcgtactcgcctacctccgcggctcaaacctttcccccttctcccaattccctgcgggggccgccgctccatcccgtacgacgacaccatgagggagtgcatttcgatccacatcggccaggccggtatccaggtcggaaacgcgtgctgggagctgtactgccttgagcatggcattcaggctgacggtcagatgcccggtgacaagaccattgggggaggtgatgatgctttcaacaccttcttcagtgagactggtgctgggaagcacgtgccccgtgctgtttttgttgaccttgaacccactgtcatcgatgaggtgaggactggcacctaccgtcagctcttccaccctgagcagctcatcagtgggaaggaggatgccgncaacaactttgcccgtggtcactacaccattggcaaggag

SEQ ID NO: 3218 - DNA, 427 bp, Zea mays
  Clone ID: LIB3061-014-Q1-K1-B4
attgagaccaactagcaacatagaaagcacaatagtgtaccaacaatggcagccagaatgttttgcctccttatgctccttggtctttctgcaagtgctgctacggcgaccattttcccgcaatgctcgcaagctcctatagcttcccttcttcccccgtacctctcaccagcggtgtcttcggtatgtgaaaacccaattcttcaaccctacaggatccaacaggcaatcacagctggcatcttacctttatcacccttgttcctccaacaatcatcagccctattacatcagttacctttggtgcatttattggcacaaaacatcagggcacaacaactacaacaacttgtgctagcaaaccttgctgcctactctcagcaacagcagtttcttccattcaaccaactagctgcattgaactctg

SEQ ID NO: 3219 - DNA, 130 bp, Zea mays
  Clone ID: LIB3061-014-Q1-K1-B5
cacgcgtccgggaacgcactcatcgcaactctaaatctcctgccgcatgctaactacactggccgtgcgatcatgctagcgctgtcgctgacacacaccacctacccatctacctcctccgctctatatg

SEQ ID NO: 3220 - DNA, 98 bp, Zea mays
  Clone ID: LIB3061-014-Q1-K1-B6
aaaacaatctactcatcctagtcctgctggcgccctgctagaatgtctgtaaatcgatatgcaagcaaatgcattcagtctctgcctgtgttctgatc

SEQ ID NO: 3221 - DNA, 425 bp, Zea mays
  Clone ID: LIB3061-014-Q1-K1-B7
gacctaacatcaatggctaccaagatattagccctccttgcgcttcttgccctttttgtgagcgcaacaaatgcgttcattattccacaatgctcacttgctcctagtgccattattccacagttcctcccaccagttacttcaatgggcttcgaacacctagctgtgcaagccaacatgcaacaacaagcgcttgcggcgagcgtcttacaacaaccaattgcccaattgcaacaacaatccttgccacatctaacaatacaagccatcacaacgcaacagcaacaacagttcctaccagcactgagccacctagccatggtgaaccctgccgcctacttgcaagagcagctgcttgcatccaacccacttgctctggcgaacgtagttgcaaaccagcaacaacaacagctacaacagtttct

SEQ ID NO: 3222 - DNA, 108 bp, Zea mays
  Clone ID: LIB3061-014-Q1-K1-B8
attagttgtaattcaataataaagattttaggataaggtatgctgcctgccataagtgagaactcacattaccagattataatgtgacaatgctcactagatggcagt

SEQ ID NO: 3223 - DNA, 410 bp, Zea mays
  Clone ID: LIB3061-014-Q1-K1-A11
ggagaagcacggtacctgcgcagccgacgtcttggacgagcacgggtacttccaggcggcgctgcgcctgcgggaccagctgggagtgctaggcgcgctcacctccgccggcgtcaagcccgacggcgggtactacacgctgagccagatcaagggcgccatgcgtcagggcaccggcttcgagccctacgcggagtgcaaccgcgacgaggccggcaacagccagctctaccagctctacttctgcgtcgacgccgccggcgacagcttcgtcgactgccccgtgctgctcagcggcaggcccttgcattctatgcaagaggataatggaatgctcattccccattcttcatgttgtctggcacataagcggagggcgatcggtgttccatacttaacaatcttcggct

SEQ ID NO: 3224 - DNA, 433 bp, Zea mays
  Clone ID: LIB3061-013-Q1-K1-G8
tgcaaccctacaggatccaacaggcaatcgcagctggcatcttacctttatcacccttgttcctccaacaatcatcagccctattacaacagttacctttggtgcatttattggcacaaaacatcagggcacaacaactacaacaacttgtgctagcaaaccttgctgcctactctcagcaacagcagtttcttccattcaaccaactaggttcattgaactctgcttcttatttgcaacaacaacaactaccattcagccagctacctgctgcctacccccagcaatttcttccattcaaccaactagcagcattgaactctcctgcttatttacagcagcaacaactactaccattcagccagctagctggtgtgagccctgctaccttcttgacacaaccacaagtgttgccgttctaccagcacgttgc

SEQ ID NO: 3225 - DNA, 415 bp, Zea mays
  Clone ID: LIB3061-013-Q1-K1-G9
tgtcagcgaactagtagctagcttgcttgaaatataatgatttttagggtgggaaatgaaggcagattggtatcctactacgtgatgcagatgacctgacgtatcccactgacgacctagctggaggtgcgtgggcattcggccctctttccgcgtggcgtttcttcgtgcctgaggcgacgacggtttggcaccggctctctgccgtcgagagaatggcaccagctcgtatcaccactgctggcataggtggtctgttcctcttcagctcgctgcttatttaagaaaccgtgacagagaatgcctgaccttaaatctgttgaaccaatgtaccgggggaggtaaccagtgcatcagtactccctgtacacgcctactccggcccctcagctccacttcagatcagatctcctga

SEQ ID NO: 3226 - DNA, 385 bp, Zea mays
  Clone ID: LIB3061-013-Q1-K1-H1
ccatataggcttcaacaagcaatcgcagcaagcaacatacctttatcgcccttgttgtttcaacaatcaccagccctatctttggtgcagtcattggtacaaaccatcagggcacaacagctgcagcaactcgtgctacctgtgatcaaccaagtagctctggcaaacctttctccctactctcagcaacaacaatttcttccattcaaccaactgtctacactgaaccctgctgcttatttgcagcaacaactattaccatttagccagctagctactgcctactctcagcaacaacaacttcttccatttaaccaattggccgcactgaaccccgctgcttatttgcagcagcaaatactactgccatttagcgagctagctg

SEQ ID NO: 3227 - DNA, 363 bp, Zea mays
  Clone ID: LIB3061-013-Q1-K1-H10
gatctggtagatggggcttgttagggaataacttcacggtctttctcatggttcaactgcgtgacccactacgtaactacgagccagtgggcacaccaatgttcgcgttaattcaagttgaaagggtttttgtacccccgaagcccaaaatctacagtaccgtctcagacaaaggcaacagcgagcaggatgacgaggaacccaaggccgaagaggttccagacaaggcattggtcacggaagagaaggctgaggaattagaggatcccgttccccaattcaaggttacagaagtgcatgtcgccggtttcaagagcgagcctgagaagacgataccatggtgcaatcaaacgcagcagcagt

SEQ ID NO: 3228 - DNA, 398 bp, Zea mays
  Clone ID: LIB3061-013-Q1-K1-H11
gtggctctgaattgactgacccatggttgcgacaatggcagtgacgacgatggtgaccaggaccaaggagagctggtcgccattgcaggtcccggcggtggcattcccttggaagccatgaggcggtggcaagaccggcggcctcgagttccctcgccgggcgatgttcgccagcgtcggcctcaacgtgtgcccggacgtcccggccgggcgcgacccgcgggagcccgatcccaaggtcgtacgggccgccgacaactgcgacatcgcgcgccagcttgtcgccgccgttcccggacagcaggccgcctgagaggccgatgaagaggcagcgaacaggaggaagcagaatggcggcggcagctagaagcagcaacagctgggcgatctgagcctga

SEQ ID NO: 3229 - DNA, 257 bp, Zea mays
  Clone ID: LIB3061-013-Q1-K1-H12
agcgaagctacctagcaacgacttaacaacaatggctaccaagattttagcggtccttgcacttcttgccctttttgtgagcgcaacaaatgcgtgcattattccacaatgctcacttgctcctagtgccattataccacagttcctccgaccagttacttcaatgggcttcgaacacctagctgtgcaagcctacaggctacaacaagcgcttgcggcgagcgtattacaacaaccaattgaccaattgcaacaac

SEQ ID NO: 3230 - DNA, 350 bp, Zea mays
  unsure (1)..(350): unsure at all n locations; Clone ID: LIB3061-013-Q1-K1-H2
gtctgtggcatgatacaagcaatcacttgtttcaacatacctttatcgaccttggtgaccgaancatcaccagccctatctttggtgcagccattggtacataccatcacgtcacaacagctgcagcatctcgtgctacctgtgatcaaccaagtagctctggcaaacctttctcactactatcagcaacaacaatttcttccattcaaccaactgtctacactgaaccctgctgcttatttgcagcaacaactattaccatttagccagctagctactgcctactttcagcaacaacaacttcttacatttaaccaattggccgtactgaaccccgctgcttatttgca

SEQ ID NO: 3231 - DNA, 383 bp, Zea mays
  Clone ID: LIB3061-013-Q1-K1-H3
atcagcaaagcggcagtgcgtagagaggatcgtcgaacagaacagcatgaagatggtcatcgttctcgtcgtgtgcctggctctgtcagctgccagcgcctctgcaatgcagatgccctgcccctgcgcggggctgcagggcttgtacggcgctggcgccggcctgacgacgatgatgggcgccggcgggctgtacccctacgcggagtacctgaggcagccgcagtgcagcccgctggcggcggcgccctactacgccgggtgtgggcagacgagcgccatgtaccagccgctccggcaacagtgctgccagcagcagatgaggatgatggacgtgcagtccgtcgcgcagcagctgcagatgatgatgcagcttgagcgtg

SEQ ID NO: 3232 - DNA, 408 bp, Zea mays
  Clone ID: LIB3061-013-Q1-K1-H4
acccagcctacgcgtccgatagaaagcacaatagtgtaccaacaatggcagccaaaatattttgcctccttatgctccttggtctttctgcaagtgctgctacggcgaccattttcccgcaatgctcgcaagctcctatagcttcccttcttcccccgtacctctcaccagcggtgtcttcggtatgtgaaaacccaattcttgaaccctacaggatccaacaggcaatcgcagctggcatcttacctttatcacccttgttactccaacaatcatcagccctattacaacagatacctatgctgcatccatcggcacaatacatgcccgtacaagctgtacggaacctggtgcgatcgcagcaccctgatccctgtccagtgcgtcgagttcctgaggcatcaatgc

SEQ ID NO: 3233 - DNA, 390 bp, Zea mays
  Clone ID: LIB3061-013-Q1-K1-H5
gacgcggtgaacgggacggagtacgtacccacgtacgaggacaaggatggcgactggatgctcgtcggcgacgtcccctggaagatgttcgtggaaacctgccagcgccttcgtctgatgaaaggttcagaggccgtgaacttggcaccaagagccgcccgatgaggcacactccgttgggcgttggcacgcacgcacgcactggcgtcttgaaggaaagggggaactctgctggtcttgatgaggatcttcacgtgagataggaacgtgtgtacagttgtcgccttatggtattgagttgaggaaacttggaagttccattacttgtctgtagtctctactttatatagatgcgaagaagcttgagatacacattgcctacattgtctt

SEQ ID NO: 3234 - DNA, 430 bp, Zea mays
  Clone ID: LIB3061-013-Q1-K1-H6
atagaaagcacaatagtgtaccaacatatggcagccaaaatattttgcctccttatgctccttggtctttctgcaagtgctgctacggcgaccattctcccgcaatgctcacaagctcctataactttccttcttcccccgcacctctcaccagcggtgtcttcggtatgtgaaaacccaattcttcaaccctacaggatccaacaggcaatcgcagctggcatcttaccttaatcaccctagctactacaacaatcaacacacctattacaacactaacctctggtacatttatcgacacaccacatcacagcacaacaactacaacaacttgtgctagcaaaccttgctgcctactttcaacaacagcagtttcttccattcaaccaactaggttcattgaaatcctgttcttatttgcaacaacaac

SEQ ID NO: 3235 - DNA, 321 bp, Zea mays
  Clone ID: LIB3061-013-Q1-K1-H7
agcgtgacggttgagggcagcgtctgcccggtgaaggccatggtcaggctgggcgccagcgtcggggaggccattgctgccgtggtcgagaggtacgccagggaggggagaagcccgcgcctggacccggccgcagccgagagcttccaacttcaccactcccacttcagccttgagagtctgaacaagaaggacagaatcggagacgtgggaggtaggaacttctacctgcacaagaacgattcaagcaacgacgggctctacctccagggccaggaggagcccggtgcagatccaagtggtggtgacatcagccggcac

SEQ ID NO: 3236 - DNA, 430 bp, Zea mays
  unsure (1)..(430): unsure at all n locations; Clone ID: LIB3061-013-Q1-K1-H8
ggcgagctcaagtgattaacagaacatatctcccactacacgcatacaagcggcggctgcggctgccagccaccgccgccggttcatctaccgcgcctgaggtggtgggcatgtccatcaaggaggcaagagagatcattcttaaagacatgcccaacgctaacattcaagttctaccggttggctcgcttgtgacccaagactttcgccctgatcgtgttcgcatcttcgttgatattgttgcccagactccaacagttggctgacaaggatatgccttatctataggccaaataaacaaagcctacttttatgtatcatggctaataaatcctacatctcttggntatccttgatcggtttagcttattagctatatcgccatcaaaggggcccccaagaaattacctgtatgtctatcataaaaatc

SEQ ID NO: 3237 - DNA, 426 bp, Zea mays
  unsure (1)..(426): unsure at all n locations; Clone ID: LIB3061-013-Q1-K1-H9
cttcctcccgggctacatcggcttccccgccgacgccgtcgacctctccacccgcctctcccgccgcataccgctatccatcccctgcgtcgcgtctccgatggacactgtctccgaggccgctatggccgcggccatggcatcactcggcgccgccgccgtcgtgcactgcaacaccgatccccacgcccaggccgccatcgtccgcgctgccaagtcccgccgccttcccttcgtttcctccgtgccctttttctccccgtcctccgccccgacgctcaacgatttcgctggcagcgagtacgccctcgtcaccgagcgcggagattcgctctccaggctcgtcggcgtcgctgtcgcggccgatgctgcctnccgcgaggttcccgtctctgtctcggagtacatgcgaccgacgccgcgctc

SEQ ID NO: 3238 - DNA, 423 bp, Zea mays
  unsure (1)..(423): unsure at all n locations; Clone ID: LIB3061-014-Q1-K1-A1
cctnccggcctctggcttttgcgccttcattttcggctttggtccttgcaaggtcaattttggcttccaacattggttaagaggaattccaacttaaccatgggggtaatggtcaatgtcaactttgccaagtcgaccacaacaggacacctaatctacaaccttgaaggcattgacaagcgtgtgatcaagaggttcaagaaggaggctgctgaaatgaacaagcggtccttcaagtacgcgtgggtgctcgacaagctcaaggctgagcgtgagagaggtatcaccattgatatcgctctgtggaagtttgagaccaccaagtactactgcacggtcattgatgcccctggacaccgtgacttcatcaagaacatgatcactggtacctnccaggctgactgtgctgtccttatcattgac

SEQ ID NO: 3239 - DNA, 407 bp, Zea mays
  unsure (1)..(407): unsure at all n locations; Clone ID: LIB3061-014-Q1-K1-A10
gccgccggtgcatctgccacctccggttcacctgccacctccggtgcatctcccaccgccggtccacctgccgccgccggtccacctgccaccgccggtccatgtgccgccgccggttcatctgccgccgtcaccatgccactaccctactcaaccgccccggcctcagcctcatccccagccacacccatgcccgtgccaacagccgcatccaagcccgtgccagctgcagggaacctgcggcgttggcagcaccccgatcctgggccagtgcgtcgagttcctgaggcatcagtgcagcccgacggcgacgccctactgctcgcctcagtgccagtcgttgcggcagcagtgttgccagcagctcangcaggtggagccgcagcaccggtaccaggcgatcttcg

SEQ ID NO: 3240 - DNA, 333 bp, Zea mays
  Clone ID: LIB3061-013-Q1-K1-G7
aacatagaaagcacaatagtgtaccaacaatggcagccaaaatattttgcctcctgatgctccttggtctttctgcaagtgctgctacggcgaccattttcccgcaatgctcgcaagctcctatagcttcccttcttcccccgtacctctcaccagcggtgtcttcggtatgtgaaaacccaattcttcaaccctacaggatccaacaggcaatcacagctggcatcttacctttatcacccttgttcctccaacaatcatcagccctattacatcagttacctttggtgcatttattggcacaaaacatcaaggcacaacaactacaacaac

SEQ ID NO: 3241 - DNA, 413 bp, Zea mays
  unsure (1)..(413): unsure at all n locations; Clone ID: LIB3061-013-Q1-K1-F10
cggacgcgtgggtcagcattcanaatctcatcaagcgaagcgcactagcaacgaccgaacgccaatggctaccaagatattagccctccttgcgcttcttgcccttttagtgagcgcaacaaatgcgttcattattccacagtgctcacttgctcctagtgccattattccacagttcctcccaccagttacttcaatgggcttcgaacatccagccgtgcaagcctacaggctacaactagcgcttgcggcgagcgccttacaacaaccaattgcccaattgcaacaacaatccttggcacatctaaccctacaaaccattgcaacgcaacaacatcaacatcaacagtttctgccatcactgagccacctagccgtggtgaaccctgtcacctacttgcaacagcagctgc

SEQ ID NO: 3242 - DNA, 418 bp, Zea mays
  unsure (1)..(418): unsure at all n locations; Clone ID: LIB3061-013-Q1-K1-F12
atgaatctaaaatggttgctaactgatagaatgcaccatcgaccattctgtgatgggagtctgttcacgtgtaagttttggtggtgaactcaaggactccgtgatgatgggagcggacacctatgaaactgaagaagaagcttcaaagctactgttagctgggaaggtcccagttggaataggaaggaacacanagataaggaactgtatcattgacatgaatgctaggattgggaagaacgtggtgatcacaaacagtaagggcatccaagaggctgatcacccggaagaagggtactacataaggtctggaatcgtggtgatcttgaagaatgcaaccatcaacgatgggtctgtcatatagatcggctgcgtttgcgtctacataacatgaacctacaatggtatngcatcgatg

SEQ ID NO: 3243 - DNA, 166 bp, Zea mays
  Clone ID: LIB3061-013-Q1-K1-F2
tcggacctaccttcctgcgacaaccggtgctgcaacagaatggacccactttgaaccaggttggtttggctaaccctgctggctacttgcaacagatgcgtccattccaccaaatgactgggtcaaagcttgctgggtacctacgacagcgaccaccggtaattaa

SEQ ID NO: 3244 - DNA, 118 bp, Zea mays
  Clone ID: LIB3061-013-Q1-K1-F4
tcggcggccatcgcttttccgtcccaacaaccacccgttattccgccgcccctgcaaggtgggttaatcaaaacctcttatttggcaacaagctcctgccgattcaatcaacctccaa

SEQ ID NO: 3245 - DNA, 351 bp, Zea mays
  Clone ID: LIB3061-013-Q1-K1-F5
gcggcggctgcggctgccagccacctccgccggttcatctaccgccgccggtgcatctgccacctccggttcacctgccacctgcggtgcatctgccaccgccggtccacctgccgccgccggtccacctgccaccgccggtccatgtgccgccgccggttcatctgccgccgccaccatgccactaccctactcaaccgccccggtctcagcctcatccgcagccacacccatgcccgtgccaacagccgcatccaagcccgtgccagctgcagggaacctgcggcgttggcagcaccccgatcctgggccagtgcgtcgagtttctgaggcatcagtgcagccccgacg

SEQ ID NO: 3246 - DNA, 359 bp, Zea mays
  Clone ID: LIB3061-013-Q1-K1-F6
cccacgcgtccgcaatagtgtaccatacaatggcagccaaaatattttgcctcctgatgctccttggtctttctgcaagtgctgctacggcgaccattttcccgcaatgctcgcaagctcctatagcttcccttcttcccccgtacctctcaccagcggtgtcttcggtatgtgaaaacccaattcttcaaccctacaggatccaacaggcaatcgcagctggcatcttacctttatcacccttgttcctccaacaatcatcagccctattacaacagttacctttggtgcatttattggcacataacatcagggcacaacaactacaacaacttgtgctagcaaaccttgctgcctac

SEQ ID NO: 3247 - DNA, 399 bp, Zea mays
  unsure (1)..(399): unsure at all n locations; Clone ID: LIB3061-013-Q1-K1-F8
gccagaaccacacggataaaccctagctgcgcgagccccccggcgatgtcggtggccatccgctccggcgagctccttgcgtgccccgtcgcactccggcgggcgcccttggctgtgtctgtggtgtcggtgcggatgagggctaggggcgccgtggctgtgcgggcggaggcaacggccgagggggtagggaaagaggggaagaaggcggcggngaagaagaagccggcgagcgggatcaccaagccgaagcccatctctacagagctgcaggagttcgtcggcggcgcggcggagctgccccggactgaggccatcaagctggtatgggcgcacatcaagggcaacaacctccaggatccaaacaacangaagataataatctgcgatgagaaactg

SEQ ID NO: 3248 - DNA, 349 bp, Zea mays
  Clone ID: LIB3061-013-Q1-K1-G1
ctgctctccttcgtcctgtcggtcctcgtctccgccgtcatcctgctgtgccgggactacatcagctacatcttcaccgagggtgaggacgtgtcgcaggcggtctcccggctcaccccgctgctggcgttcacgctcatcctcaacggcatccagctccagcccgtcctctctggggtcgctgtggggtgtggatggcaggcgttcgtcgcgtacgtcaacgtcggctgctactacatcgtcggcatcccgctcgggtgcctcctaggcttctactttgacctaggagcagcgggtatttggagcggtatgatcggcggcaccttgatgcagaccttgatcttgatat

SEQ ID NO: 3249 - DNA, 415 bp, Zea mays
  Clone ID: LIB3061-013-Q1-K1-G10
tcgacgctcaaatgtaaacttacgtgtagaacaccttcttagggagatcaagaaggttgcagcgaaccggtagctgttggtttcggtgtatcgactccagagcatgtgaaacagatgtgggctggggagcggaccgtgtgatcgttggcagtgcgattgtgaagcaattgtgtgaggctgctactcctgaagagggtctggaaaggctcgaggagtacgccaggagtatgaacgctgctatgccgtgagctgatctcacttcccgtcacaggcaatgtgattagaacatggttttagcaatattctgggcatgggtttggcattcagaactcatcttagtgctgtactggtcgatctccggtggtgagaacgaagtctggctttgcctatcatagaaaaaggttaaactgagttg

SEQ ID NO: 3250 - DNA, 412 bp, Zea mays
  unsure (1)..(412): unsure at all n locations; Clone ID: LIB3061-013-Q1-K1-G11
tcgatcgggaacaccgggggccccgacgcgcaacaagccctgggggttccgttcaacggcggacggaccggtcctgaacggcttgaacctgttggggcaccaggacacgctgtacgcgcacgccttgcgccagttctacacccggtgccgcgtggcgggcaccgtcgacttcgtcttcggcaactccgccgcggtgctccacgacaccgtcctcgtcgtgctgccgcggcagctgcggccggagaagggcgagaacgacgccgtcacggcgcagggccgcaccgacccggcccagcccacggggatcgtgctcagccgctgctccgtcaacggcagcgaggagtacatggcgctgtaccgcgagaggcccggcgtgcaccacgtctacctgagccgnccgtggaaggagtac

SEQ ID NO: 3251 - DNA, 393 bp, Zea mays
  Clone ID: LIB3061-013-Q1-K1-G12
gaaagcacaacagtgtaccaccatggtgcaccaaaatatttggcctcctaatgctcctggggctttctgcaagtcctgttacggcaaccattttcccacaaggctcacaacctgcaatagctgcccttcttccacagtacctgtcaccagcggtgtcttgggtatgtgaaaacccaattcttcaaccctatgcgatccaacaggcaatcgcagctggcatcttacctttatcacccttgttcctgcaacaatcatcagccctattacagcagttacctttggtgcatttattggcacaaaacatcagggcacaacatctacaacaacttgtgctagcaaaccttgctgcctactctcagcaacaacagtttcttccattcaaccaactgacag

SEQ ID NO: 3252 - DNA, 223 bp, Zea mays
  Clone ID: LIB3061-013-Q1-K1-G2
caatcatcaaccctaatacatcaagtacctttggggcatttaatggcaccaaacaggctgggacaacaacctccacaacttgggctagcaaaacttggttgctacttttagaacaagcggttctttcatttcaaccactaactgcattggactctggttcttaattgcaacaacaacaactaccaattcagcagctacctgctgcctacccccagcaatttct

SEQ ID NO: 3253 - DNA, 385 bp, Zea mays
  Clone ID: LIB3061-013-Q1-K1-G3
attcagccagctacctgctgcctacccccagcaatttcttccattcaaccaactggcagcattgaactctcctgcttatttacagcagcaacaactactaccattcagccagctagctggtgtgagccctgctaccttcttgatacaaccacagttgttgccgttctaccagcacgctgcgcctaacgctggcaccctcttacaactgcaacaattgctgccattcaaccaacttgctttgacaaacccagcagcgttctaccaacaacccatcattggtggtgccctcttttagatttcttatgagttatagttcaataataaagttttttgtctgatgtttgtggcttcccagaaataagaaggtacatttctagaataaaaa

SEQ ID NO: 3254 - DNA, 354 bp, Zea mays
  Clone ID: LIB3061-013-Q1-K1-G4
attcccggcgtcagacctacgggttcatgcaactacatgctgtctactccccttcaatctcttcaattcaaccatctgtgtggattgaactattctgctaacttactgcgacaccacctgctaccattgatccagttagatcgtgagaaccctgctaccttctacatacatccacagtagtacacgatctaccatcacggcatgtatagcgctaggcacattattacacatgaaccactagatgtcatgctagcaaatcgctctgactaatctaaccatcatctaccaataacatataatcaactagctgcattgaaagatgcctcataagtgatacatcaacaattaccattc

SEQ ID NO: 3255 - DNA, 335 bp, Zea mays
  Clone ID: LIB3061-013-Q1-K1-G5
gccgcatcctctccccatcggcagtcttcccccaagacgtctaaaccccaatccctaaatccccgacgcagaccacacgacgcgcacctccgttcacgaggcggaagcatgagtcgccacccgatcactaagtgggcacagaggtccgacagggtgttcttgacgatagagctgcccgacgcccaggatgtgaagctgaacttgaagcctgaaggccatttcaacttctcagctaagggctcagatgacttgcgctatgagtttgacattgagctgtttgatgctgtgaatgtggaggagagcaaagcagctattgccccaaggaccatatgcta

SEQ ID NO: 3256 - DNA, 407 bp, Zea mays
  Clone ID: LIB3061-013-Q1-K1-G6
gttcgatgcaccgctactccgacaaacacgactgccagttcgactatcgaactgcggctagggacgctatcgccaaggccaatccagtggtgaaggcggagaagcttgacaagatctgaggcgggggcattgggtaacgaaaaatggttgcgatctgcaagaattcagcatgtctctttgctgctttatcattgaacttcccattcttgtcttgctgtcacgtaccctggggttcaatactatgatgcgcacagcatcctggcagctgcaagaattcatccccagtcgagtcacgaaaatggtttgcgtgttgactatgtcgtgtaagcttattcagttattcttggtggtttgggtcggtatcgtgtcatgtccccgttacgtagctctgtaatctactattctca

SEQ ID NO: 3257 - DNA, 408 bp, Zea mays
  Clone ID: LIB3061-013-Q1-K1-F1
caagcaacatagaaagtagaatccattagcaacaatagagcaacaatggcgaccaagatattttccctccttatgctccttgctctttctacatgtgttgctaacgcgacaattttccctcaatgctcacaagctcctatagcttcccttcttcccccataccttccatcaattatagcttcagtatgtgaaaacccagctcttcaaccatataggcttcaacaagcaatcgcagcaagcaacatacctttatcgcccttgttgtttcaacaatcaccagccctatctttggtgcagtcattggtacaaaccatcagggcacaacagctgcagcaactcgtgctacctgtgatcaaccaagtagctctggcaaacctttctccctactcttagcaacaacaatttctt

SEQ ID NO: 3258 - DNA, 149 bp, Zea mays
  Clone ID: LIB3061-032-Q1-K1-C6
ttgaccttcgtatgacctatggttctatctcaactaccatctttacaacatctaataatacaatccggcacgtctcatcaccaacaacggttcctaccatctctgaaccatctatccatgaagaaccctgcctactacttacaaagaca

SEQ ID NO: 3259 - DNA, 368 bp, Zea mays
  Clone ID: LIB3061-032-Q1-K1-C8
acttaaaccactctaagtgacatacattactcacggcctcacagcaatgtgtgccgcgataccatatatttattgcgctccttgcgctgcactgcgatcgcatcaaatcgtccttcattatctcacacagctaactctatcgaaggctcattattacactagacctttgcatcgaatccattcaatgggcatcttaacacccatgtagcacatcatataagctacagcaagcctttgccgctagcgtcagactgcaaccaatctagcagctgaaccacaatccttgcaacctctaacaatccacatcatcgtaacgcatcagctacaccaatctgtaccagcactgagccacctagccatggtcaacc

SEQ ID NO: 3260 - DNA, 430 bp, Zea mays
  Clone ID: LIB3061-032-Q1-K1-C9
caccagcgcggcggcggcgaccatggctgtcggaaagaacaagaggatctccaagggaaagaagggtggcaagagaaagaccgtcgaccctttctctaagaaggattggtatgacatcaaggcaccgtcggtgttcagtgtgcgcaacatcgggaagactctcgtatccaggacacagggtaccaggattgcttctgagggtctgaagcacagagtctttgaggtttgcctagctgatcttcagggcgacgaggatcaagcttacaggaaaatcaggctccgtgctgaagatgtgcagggcaggaatgtgctcacaaacttttggggtatgaattttaccactgataaactgagatccctagtgaagaagtggcagacattaatcgaagcccatgttgatgtcaagacaaccgacaactacatgttgcgt

SEQ ID NO: 3261 - DNA, 432 bp, Zea mays
  unsure (1)..(432): unsure at all n locations; Clone ID: LIB3061-032-Q1-K1-D1
cgcaaattgcaccaagaaatccatcgagaggccgtcgacaggggaattaatggcgtcgtcgtctagcagcagccaccgccgcctcatcctcgcagccgccgtcctgctctccgtgctcgcggctgccagcgccagcgccgggacctcctgcgtgccggggtgggccatcccgcacaacccgctcccgagctgccgctggtacgtgaccagccggacctgcggcatcgggccgcgcctcccgtggccggagctgaagaggagatgctgccgggagctggcggacatcccggcgtactgccggtgcacggcgctgagcatcctcatggacggcgcgatcccgccgggcccggacgcgcagctggagggccggctagaggacctgccgggctgcccgcgggaggtgcagaggggattcggcgncaccctcgtcac

SEQ ID NO: 3262 - DNA, 417 bp, Zea mays
  Clone ID: LIB3061-032-Q1-K1-D10
caacgccaaacatgccctgactggccagtctttcaaccgctccttcagcgggagcggggcatccatggacattgtggtgtccagtgtcagagcttacctgagcgccctgaacaagatctgcagtttcgctggcgccgtgaaagccagcagcgatgtagctgagaccgcaagcgtcccgagcacagaatgagctcccgtttggttcagagtgacatgttgttcaaaatttctgctggaaggatcgtcccttgagcttaggacaggcaggaagtcttgggacctatgtagtgtacaatttctgtgtgtcatataccgtgctcgttgccagtttgtactgtaccatatataaaccatagaatctgttgccatttagaagtctggccaaggtcagctgtaatgcttcacatgcttatagcc

SEQ ID NO: 3263 - DNA, 352 bp, Zea mays
  Clone ID: LIB3061-032-Q1-K1-D11
atgagcttatctactaacatcgcataatacccgatcgacactatgaagatgagctctttgaccttactgactgactatggatgcgagcgcacattcagcatacaacacgctgctgtgctgacatccaccgcctacgtttatctaccgcacggcgacgcatccatcacctacagcaacctgacaacttcggggtatcagcgaccaccggtccacctgtcgccgacggtccacctgacactgacgagccatgagccgtcgcactgacataatggcgtatactgatgcctgtagcttactcaaacgaacaggacttagtaccattcagagacatagctatggcctagtctacaga

SEQ ID NO: 3264 - DNA, 442 bp, Zea mays
  Clone ID: LIB3061-032-Q1-K1-D2
ggagcaacatagaaagcacaatagtgtaccaacaatggcagccaaaatattttgcctccttatgctccttgagctttgtgcaagtgctgctacggcgaccattttcccacaatgctcacaagctcctatagcttcccttcttcccccgtacctctcaccagcggtgtcttcggtatgtgaaaacccaattcttcaaccctataggatccaacaggcaatcgcagctggcatcttacctttatcacccttgttcctccaacaatcatcagccctattacagcagttacctttggtgcatttattggcacaaaacatcagggcacaacaactacaacaacttgtgctagcaaaccttgctgcctactctcagcaacaacagtttcttccattcaaccaactagcttcattgaactctgcttcttatttgcaaccacaacaacta

SEQ ID NO: 3265 - DNA, 434 bp, Zea mays
  Clone ID: LIB3061-032-Q1-K1-D3
gaccaactagcaacatagaaagcacaatagtgtaccaacaatggcagccaaaatatggtgcctgcttatgctccttggtctttctgcaagtgctgctacggcgaccattttcccgcaatgctcgcaagctcctatagcttcccttcttcccccgtacctctcaccagcggtgtcttcggtatgtgaaaacccaattcttcaaccctacaggatccaacaggcaatcacagctggcatcttacctttatcacccttgttcctgcaacaatcatcagccctattacatcagttacctttggtgcatttattggcacaaaacatcagggcacaacaactacaacaacttgtgctagcaaaccttgctgcctactctcagcaacagcagtttcttccattcaaccaactagctgcattgaactctgcttcttatttgc

SEQ ID NO: 3266 - DNA, 471 bp, Zea mays
  unsure (1)..(471): unsure at all n locations; Clone ID: LIB3061-032-Q1-K1-D4
gtccggattcccggggtagttgcaaaccagccacaacaacagctgcaacagtttctgccagcgctcagtcaactagccatggtgaacgctgccgcctacctacaacagcaacaactgctttcatctagcccgctcgctgtggccaatgcacctacatacctgcaacaacaattgttgcaacagattgtaccagctctgactcagctagttgtggcaaaccctgctgcctacttgcaacagctgcttccattcaaccaactgactatgtcgaactctgctgcgtacctacaacagcgacaacagttacttaatccactagcagtggctaacccattggtcgctgncttcctacagcagcaacaattgctgccatacaaccagttctctttgataaaccctgtcttgtcgaggcagcaacccatcgttggaggtgccatcttttagattacatatgagatgtactcgataatg

SEQ ID NO: 3267 - DNA, 367 bp, Zea mays
  Clone ID: LIB3061-032-Q1-K1-D5
ggcagccaaaatattttgcctcattatgctccttggtctttctgcaagtgctgctacggcgagcattttcccgcaatgctcacaagctcctatagcttcccttcttcccccatacctctcaccagcgatgtcttcagtatgtgaaaatccaattcttctaccctacaggatccaacaggcaatcgcagcaggcatcttacctttatcacccttgttcctccaacaatcatcagccctattacagcagttacctttggtgcatttattggcacaaaacatcagggcacaacaactacaacaactcgtgctagcaaaccttgctgcctactctcagcaacagcagttacctttggtgcatttgttggca

SEQ ID NO: 3268 - DNA, 427 bp, Zea mays
  Clone ID: LIB3061-032-Q1-K1-D6
agaaagcacaatagtgtaccaacaatggcagccaaaatattttgcctccttaggctgcttggtctttctgcaagtgctgctacggcgaccattttcccgcaatgctcgcaagctcctatagcttcccttcttcccccgtacctctcaccagcggtgtcttcggtatgtgaaaacccaattcttcaaccctacaggatccaacaggcaatcacagctggcatcttacctttatcacccttgttcctccaacaatcatcagccctattacatcagttacctttggtgcatttattggcacaaaacatcagggcacaacaactacaacaacttgtgctagcaaaccttgctgcctactctcagcaacagcagtttcttccattcaaccaactagctgcattgaactctgcttcttatttgcaacaaccac

SEQ ID NO: 3269 - DNA, 415 bp, Zea mays
  Clone ID: LIB3061-032-Q1-K1-D8
tgacaatccaacaacaacgaagaatgttgaagggttccaagttgacaatccttttagagatatgcatgaaatgatgccatctcatctggattttgaggaacagaagactgaagagggtagggctgttgggccagtcatggatgcttcctttaaagacaatgattttgaatacttgcagattataaagaatgaagaccttgaagagcttagagaacttggttcaggcacatttggaactgtataccatggaaaatggaggggcagtgatgtagccattaagagaataaagaaaagttgcttcacaggacggtcttcagagctagaaagactagcacacgaattctggcgagaagctgaaattctttcaaagcttcatcatccaaatgttgtggcattttatggtgttgtgaaagat

SEQ ID NO: 3270 - DNA, 412 bp, Zea mays
  Clone ID: LIB3061-032-Q1-K1-D9
cagaccattagctttatctactccagagcgcagaagaacccgatcgacaccatgagggtgttgctcgttgcccgcgctctcctggctctcgctgcgagcgccacctccacgcatacaagcggcggctgcggctgccagccaccgccgccggttcatctaccgccgccggtgcatctgccacctccggttcacctgccacctccggtgcatctcccaccgccggtccacctgccgccgccggtccacctgccaccgccggtccatgtgccgccgccggttcatctgccgccgccaccatgccactaccctactcaaccgccccggcctcagcctcatccccagccacacccatgcccgtgccaacagccgcatccaagcccgtgccagctgcagggaacctgcggcgtttgca

SEQ ID NO: 3271 - DNA, 417 bp, Zea mays
  Clone ID: LIB3061-032-Q1-K1-E1
cattgaactctgctgcttatttgcaacaacaattaccattcagccagctagttgctggctacccccagcaatttcttccattcaaccaactagcagcattgaactctgctgcttatttacagcagcaacaactactaccattcagccagctagctgatgtgagccctgctgccttcttgacacaacaacagttgttgccgttctacctgcacgctatgcctaacgctggcaccctcttacaactgcaacaattgctgccattcaaccaacttgctttgacaaactcaacagtgttctaccaacaacccatcattggtggtgccctcttttagattgcttatgagttatagttcaataatgaaattttttggatgatgtttgtggcgtcccagaaataagaaagtacatttctagatt

SEQ ID NO: 3272 - DNA, 423 bp, Zea mays
  Clone ID: LIB3061-032-Q1-K1-C5
cctctccttctctctcccataccacgacgagacgatcccatcggcgcccgcgcggggccttcgatccaagcaagcgtagtcccttgttcctagtataacctctaaatgattccatgggaactccaaacgaaatgatggcatactcttccctgtccaaaatggacaccagccagaaccacggagctgctctgtccaatgtagttgctggaaacaactatcctgttcaggattatctttatgagcaagcatccgaaccagacttcccagagtatgattcaagggatgacctgttcgctccaacacgagctagtccaaaagtcaatctaaatactgttctaggtggtctggtttcgattgttacaggtgtaaacaagagtgaggatgatgcatcgcagcatgaaagttttagcacagacatatcat

SEQ ID NO: 3273 - DNA, 385 bp, Zea mays
  Clone ID: LIB3061-032-Q1-K1-B2
ggtggccagaggcgcactgctgggcgatggggtggacttggcggcaaccttcgaacgatcgatcttggcgacgccgaggttgtcagggaggtctcaggaacatacggcatgtttgaaggcgccaccacgctgacctcgatcagaattctcaccagcagcagaacctgggggccatgggggatcgaggacgggacacgtttctgcatcaccgcgccgatcggcagcagcatcgtggggttctatggacgctcgaccagcaggctcgtcgctgcgatcggtgtttacctgcgtcaacaactctgatctggtcatctagctatcatcgtcgtccggtgctgtcgtatgtgtgttcatgtcaaataaataaaagtggtcttgtgtctaa

SEQ ID NO: 3274 - DNA, 408 bp, Zea mays
  Clone ID: LIB3061-032-Q1-K1-B3
tccttagggttttgtggaggggcgatggcggctgctgatgtggagtaccgttgcttcgtcggcgggcttgcctgggccaccagcaacgagtcgctggagaatgccttcgcctcctacggcgagatcctcgactccaaggtcatcaccgaccgggagacggggaggtctcgcggcttcggcttcgttaccttctcctccgagaactccatgctcgacgctatcgagaacatgaacggcaaggagctcgacggccgtaacatcaccgttaaccaggcccagtcccgtggcggtggcggtggctgcggtggctacggcggctgtcgcggcggcggcggctatggtggcaggcgccgtgacagcggttatggcggcggtggcggctacggcggtcggcgcgagggtggtggc

SEQ ID NO: 3275 - DNA, 402 bp, Zea mays
  unsure (1)..(402): unsure at all n locations; Clone ID: LIB3061-032-Q1-K1-B4
agtaaagaaatgaggggttgtgacttgtatattgtcaaggatcacttggatgtggtgaatgctatactggacactgatgatagctgcataaggattgtgcgaaaaaacgggaagacatccctacatactgctgcaaggattggataccatcgtattgtcaaggcactcatagagagggatccaggaattgttccgatcaaggataggaagggacaaactgcacttcacatggctgtgaaaggcaagaacacagatgtagtggaagagttactgatggctgatgtttccattctcaatgtgcgggacaagaagggaaatactgctttgcacatagctacatggaaatgggagaatttgggattatgaaacaccggagacgtggcttcgacgaaacggangcgt

SEQ ID NO: 3276 - DNA, 427 bp, Zea mays
  unsure (1)..(427): unsure at all n locations; Clone ID: LIB3061-032-Q1-K1-B5
cgcggtgggattctggatccgggagaccggtcaggccctcgatcgcctcggctgccgcctgcagggcaagtacttcttccacgagcagatttcaaggcatcgcaccatcatgaacatctttgacaaaaccccacatgttcatagggatgcatttgttgctccaagtgcatcccttattggtgatgttcaagtcgggcaaggagcttccatttggtatgggtgcgtcttaagaggggacgcaaacaacatacaaattggatctgggaccaatatacaagacaattctcttgtgcatgtggctaaatctaatctaagtgggaaagtctttccaacaatcattggcaataatgtcacaataggtcacagtgctgtgttacaaggatgcacggttgaagatgaagctnttgttggcatgggggccacccta

SEQ ID NO: 3277 - DNA, 429 bp, Zea mays
  Clone ID: LIB3061-032-Q1-K1-B6
gaccaactagcaacatagaaagcacaatagtgtaccaacaatggcagccaaaatatgttgcttccttatgctccttggtctttctgcaagtgctgctaccgcaaccattttcccacaatgctcacaagctcctatagcttcctttcttcccccatacctctcaccagcggtgtcttcagtatgtgaaaacccaattcttcaaccctacaggatccaacaggcaatcgcagcaggcatcttacctttatcacccttgttcctccaacaaccgtcagccctattacagcagttacctttggtgcatttgttggcacaaaacatcaaggcacaacaactacaacaacttgtgctaggaaaccttgctgcctactctcagcaacagcagtttcttccattcaaccaactggctgcattgaactctgctgctta

SEQ ID NO: 3278 - DNA, 432 bp, Zea mays
  Clone ID: LIB3061-032-Q1-K1-B7
gagcattcagaaacacacctagcgaatcgcactagcaacgacctaacaacaatggcttccaagacattatccctccttgcgcttcttgccctttttgtgagtgcaacaaatgcgttcattattccacaatgctcacttgctccgagtgccattattccacagttcctccctccagttacttcaatgggcttcgaacacccagctgtgcaagcctataggctacaacaagcgcttgcggcgagcgtcttagaacaaccaattgcccaattacaacaacaatccttagcacatctaaccatacaaaccatcgcaacgcagcagcaacaagcactgagccacctagccgtggtgaaccctatcgcctacttgcaacaacagctgcttgcatccaacccacttgctttggcaaacgtagctgcataccaacaacaa

SEQ ID NO: 3279 - DNA, 376 bp, Zea mays
  Clone ID: LIB3061-032-Q1-K1-B9
aactacacatagaaatcacatagtgtgaccccaatggcagccaagtatttttgcttccttatgctcgttgtctttctgcaagtgctgctaccgcaaccattttcccacaatgctcacaagctcctatagcttcctttcttcccccatacctctcaccagcggtgtcttcagtatgtgaaaacccaattcttcaaccctacaggatccaacaggcaatcgcagcaggcatcttacctttatcacccttgttcctccaacaaccgtcagccctattacagcagttacctttggtgcatttgttggcacacaacatcatggcgcaacaactacaacaacttctgctactaaaacccgttgcttactactatcaacaaca

SEQ ID NO: 3280 - DNA, 395 bp, Zea mays
  Clone ID: LIB3061-032-Q1-K1-C1
caactagcaacatagaaagcacaatagtgtaccaacaatggcagccaaaatattttgcgctccttatgctccttggtctttctgcaagtgctgctacggcgaccattttcccgcaatgctcgcaagctcctatagcttcccttcttcccccgtacctctcaccagcggtgtcttcggtatgtgaaaacccaattcttcaaccctacaggatccaacaggcaatcgcagctggcatcttacctttatcacccttgttcctccaacaatcatcagccctattacaacagttacctttggtgcatttattggcacaaaacatcagggcacaacaactacaacaacttgtgctagcaaaccttgctgcctactctcagcaacagcagtttcttccattc

SEQ ID NO: 3281 - DNA, 425 bp, Zea mays
  unsure (1)..(425): unsure at all n locations; Clone ID: LIB3061-032-Q1-K1-C10
ggagaagagaagcgcgcgcgatggcaccgggaagatctcttcgccctgcggggacggcggcggttctgtgggcggcgtcgctgctgctgctggcgacgtcgtgcgcgcgcgcaggtggcgcgtacgcggggccggggtgccggaagcacgtggcgagggtcacggagtacggcgcggtcggggacgggaggacgctcaacacggcggcgttcgccagggctgtggcggacctggcgcggcgcgcgcccgacggcggcgctgcgctggtggtgccgccggggaagtggctcacggggcccttcaacctcaccagctgcttcacgctctacctcgacgagggcgccgagatcctcgcgtnccaggacatgaagcattggcccctcatagctcccctgccgtcctacgggagaggaagggacgagcct

SEQ ID NO: 3282 - DNA, 373 bp, Zea mays
  Clone ID: LIB3061-032-Q1-K1-C12
gagagcgccatacatgatcaaccttacagcaccaatggccactaatagattgtacgggcttatgattcttgatgaagctgaatgtgccgataacgcaaccattgatcttcaatactgacaacgtggtattggtgctcttcttggcccatatcttccatcaccgaccgctacaggtcgagataaacgacgcctacaaccgtacaggctccaacaagtactcggaacacgacacttacgtgtactaccgctgatgttacaacaatcggcagcacctatcactggcacactaattggtacagaccatgagaccacaacagctggcacgactgacgctacctgctatcagccgactgacactgtcaaacttatctac

SEQ ID NO: 3283 - DNA, 394 bp, Zea mays
  Clone ID: LIB3061-032-Q1-K1-C2
caacaaccaattgcccaattgcaacaacaatccttgccacatctaacaatacaagccgtcaggacgcaacagcaacaacagttcctaccagcactgagccacctagccatggtgaaccctgccgcctacttgcaagagcagctgcttgcatccaacccacttgctctggcgaacgtagttgcaaaccagcaacaacaacagctacaacagtttctgccaacgctcagtcaactagccatggtgaaccctgccgcctacgtacaacaacaacaactgctttcatctagcccgctcgctgtgggcaatgcacctacatacctgcaacaacaattgttgcaacagattgtaccagctctgactcaactagctgtggcaaaacctgttgcctacttgc

SEQ ID NO: 3284 - DNA, 438 bp, Zea mays
  unsure (1)..(438): unsure at all n locations; Clone ID: LIB3061-032-Q1-K1-C3
tgctcacttgctcctagtgccattattccacagttcctcccaccagttacttcaatgggcttcgaacacctagctgtgcaagccaacatgcaacaacaagcgcttgcggcgagcgtcttacaacaaccaattgcccaattgcaacaacaatccttgccacatctaacaatacaagccatcacaacgcaacagcaacaacagttcctaccagcactgagccacctagccatggtgaaccctgccgcctacttgcaagagcagctgcttgcatccaacccacttgctctggcgaacgtagttgcaaaccagcaacaacaacagctacaacagtttctgccaacgctcagtcaactagccatggtgaaccctgccgnctacgtacaacaacaacaactgctttcatctagcccgctcgctgggggcaatgcacctacatac

SEQ ID NO: 3285 - DNA, 424 bp, Zea mays
  Clone ID: LIB3061-032-Q1-K1-C4
attcttcaaccctacaggatccaacaggcaatcacagctggcatcttacctttatcggccttgttcctccaacaatcatcagccctattacatcagttacctttggtgcatttattggcacaaaacatcagggcacaacaactacaacaacttgtgctagcaaaccttgctgcctactctcagcaacagcagtttcttccattcaaccaactaactgcattgaactctgcttcttatttgcaacaacaacaactaccattcagccagctacctgctgcctacccccagcaatttcttccattcaaccaactggcagcattgaactctcctgcttatttacagcagcaacaactactaccattcagccagctagctggtgtgagccctgctaccttcttgatacaaccacagttgttgccgttct

SEQ ID NO: 3286 - DNA, 389 bp, Zea mays
  unsure (1)..(389): unsure at all n locations; Clone ID: LIB3061-032-Q1-K1-B12
ccgattttcgtcacgttgaatcatttaagtgaaggaacttattctgacttcacatggaggttgctccaatctggtgcatctggagttgttacatccttagctggcatggaactcctcaatgacgatcttataaaaaaagacttcacaaaggtgggctcagctgaggaactcccacaagcgagttactcttctgctgngatgctggaagatgttaataatgtaatggtcctaactcgtgattgcgagaagactaaagttgctggatttacaaaattggatgaagaagtgataaagttgatagaaatagaaaagcctattctgaacgaagctatcactattatccgcaaggcagcaccaatggtgatcatcttacgttacacatttgatgg

SEQ ID NO: 3287 - DNA, 391 bp, Zea mays
  Clone ID: LIB3061-031-Q1-K1-H8
attcaaccaactggctgcattgaactctgctgcttatttgcaacaacaattaccattcagccagctagttgctgcctacccccagcaatttcttccattcaaccaactagcagcattgaactctgctgcttatttacagcagcaacaactactaccattcagccagctagctgatgtgagccctgctgccttcttgacacaacaacagttgttgccgttctacctgcacgctatgcctaacgctggcaccctcttacaactgcaacaattgctgccattcaaccaacttgctttgacaaactcaacagtgttctaccaacaacccatcattggtggtgccctcttttagattgcttatgagttatagttcaataatgaagttttttggatg

SEQ ID NO: 3288 - DNA, 141 bp, Zea mays
  Clone ID: LIB3061-031-Q1-K1-H9
ctgtgacaaacccaacagtgttctactaacaacccatcattggtggtgccctcttttgtattgcttatgagttatagttcaataatgaagttttttggatgatgtttgtggcgtcccagaaataagaaagtacatttctag

SEQ ID NO: 3289 - DNA, 426 bp, Zea mays
  Clone ID: LIB3061-032-Q1-K1-A1
cggacgcgtgggcaagctcctatagcttcccttcttcccccataccttccatcaatgatagcttcagtatgtgaaaacccagctcttcaaccctataggctccaacaagcaatcgcagcaagcaacatacctttatcacccttgtttcaacaatcgccagccctatctttggtgcagtcattggtacaaaccatcaaggcacagcagctgcagcaactcgtgctacctgtgatcaaccaagtagctctggcaaacctttctccctactatcagcaacaacaatttcttccattcaaccaactatctacactgaaccctgctgcttatttgcagcaacaactattaccattcagccagctagctactgcctactctcatcaacaacaacttcttccatttaaccaattggccgcactgaacctcgct

SEQ ID NO: 3290 - DNA, 434 bp, Zea mays
  unsure (1)..(434): unsure at all n locations; Clone ID: LIB3061-032-Q1-K1-A10
ccagaagaggtaggttttattctacgtgccatgggatttgacaatagaacacgcatttaccttgcctctggcgagctctttggagggaaacgtttcatgaagccattcaagaccatgtttccacgcttagagaaccacagcacagttggacctggaaagctggaagagaatacccaagggctagcaggatcagcagttgactacatggtttgcctcctgtctgacattttcatgcccacatatgatggcccaagcaactttgcaaacaacctcatgggccaccgtatgtactacggtttccggaccacaatcacgccgaacagaaaggctcttgccccgatactcatcgacaggatggaaggccgccacattggctttgagagaatcaggagggtgatgtccaacancccattttggtgcccccacaagcgcgt

SEQ ID NO: 3291 - DNA, 406 bp, Zea mays
  Clone ID: LIB3061-032-Q1-K1-A11
ccaagatattagccctccttgcgcttcttgccctttttgtgagcgcaacaaatgcggtcattattccacaatgctcacttgctcctagtgccattattccacagttcctcccaccagttacttcaatgggcttcgaacacctagctgtgcaagccaacatgcaacaacaagcgcttgcggcgagcgtcttacaacaaccaattgcccaattgcaacaacaatccttgccacatctaacaatacaagccatcacaacgcaacagcaacaacagttcctaccagcactgagccacctagccatggtgaaccctgccgcctacttgcaagagcagctgcttgcatccaacccacttgctctggcgaacgtagttgcaaaccagcaacaaccacagctacaaacagttct

SEQ ID NO: 3292 - DNA, 218 bp, Zea mays
  Clone ID: LIB3061-032-Q1-K1-A2
agataggacaacccatcactgagactataggatcacggcatagctacagacgtcgccttcctgtgctgcgtggcgtcgctgtacatgatgttgctgagcgcgacattctgatcctgaatgctcacatgctcctatagccgctcttctttgcgcacacgtaccagctaacgtagctgcagtctgtgaagacacgcgtcatcaactcatatgcgcgccaa

SEQ ID NO: 3293 - DNA, 406 bp, Zea mays
  Clone ID: LIB3061-032-Q1-K1-A3
caacaagcaacatagaaagtggaatccagtagcaacaatagagcaacaatggcgaccgggatactttccctccttatgctccttgctctttctgcatgtgttgctaacgcgacaattttccctcaatgctcacaagctcctatagcttcccttcttcccccataccttccatcaatgatagcttcagtatgtgaaaacccagctcttcaaccctataggctccaacaagcaatcgcagcaagcaacatacctttatcacccttgtttcaacaatcgccagccctatctttggtgcagtcattggtacaaaccatcaaggcacagcagctgcagcaactcgtgctacctgtgatcaaccaagtagctctggcaaacctttctccctactatcagcaacaacaatttc

SEQ ID NO: 3294 - DNA, 338 bp, Zea mays
  Clone ID: LIB3061-032-Q1-K1-A4
ctgactcagctagctgtggcaaaccctgctgcctacttgcaacagctgcttccattcaaccaactgactgtgtcgaactctgctgcgtacctacaacagcgacaacagttacttaatccactagcagtgcctaacccattggtcactgccttcctacagcagcaacaattgctaccatacagccagttctctttgatgaaccctgccttgtcgtggcagcaacccatcgttggaggtgccatcttttagattacatatgagatgtaatcgataatggtgccctcataccggcatgtgtttcctagaaataatcaatatattgattgacatttatctcg

SEQ ID NO: 3295 - DNA, 446 bp, Zea mays
  Clone ID: LIB3061-032-Q1-K1-A5
actagcaacatagaaagcacaatagtgtaccaacaatggcagccaaaatattttgcttccttatgcgcctgggtctttctgcaagtgttgctaccgcaaccattttcccacaatgctcacaagctcctatagcttcccttcttcccccatacctctcaccagcggtgtcttcaatgtgtgaaaccccaattgttcaaccctacaggatccaacaggcaatcgcaacaggcatcttaccattatcacccttgttcctccaacaaccgtcagccctattacagcagttacctttggtccatttggtggcacaaaacatcagggcacaacaactacaacaacttgtgctagcaaaccttgctgcatactctcagcaacatcagtttcttccattcaaccaactggctgcattgaactctgctgcttatattcaacaacaattaccattc

SEQ ID NO: 3296 - DNA, 416 bp, Zea mays
  Clone ID: LIB3061-032-Q1-K1-A6
atgatcattccttttcaatagattcattaaatcctaagaagttacgttcaagtgaagccaatgacacatctcaaattccagagtctggtggattttcagtatctcctaatgattggatggccccgaatcttagtgtccccttgtttcatcttgttgatgtggtctttcagctccaagatggaggctggataaggcgtcaagcattttgggtagcaaagcaaatactgcaattgggaatgggagacacgtttgatgactggcttgttgacaaaatccaattacttaggaaagggaggataattgcttttgctgttaagcgcattgaacaaattctctggcctgatggaattttcatgacaaaacatccaaagagaaattcggcttcaacttctcttggtgctcagagcaatggcatg

SEQ ID NO: 3297 - DNA, 380 bp, Zea mays
  Clone ID: LIB3061-032-Q1-K1-A7
gcgacatagaaagcacaatagtgtaccaacaatggcagccaaaatattttggctccgtatgctccttggtatttctgcaagtgctgctacggcgaccattttcccgcaatgctcacaagctcctatagcttcccttcttcccccgtacctctcaccagcggtgtcttcggtatgtgaaaacccaattcttcaaccctacaggatccaacaggcaatcgcagctggcatcttacctttatcacccttgttcctccaacaatcatcagccctattacagcagttacctttggtgcatttattggcacaaaacatcagggcacaacaactacaacaacttgtgctagcaaaccttgctgcctactctcagcaacagcagtttc

SEQ ID NO: 3298 - DNA, 420 bp, Zea mays
  Clone ID: LIB3061-032-Q1-K1-A8
gtggaatccagtagcaacaatagagcatcaatggcgaccaagatactttccctccttatgctccttgctctttctgcatgtgttgctaacgcgacaattttccctcaatgctcacaagctcctatagcttcccttcttcccccataccttccatcaatgatagcttcagtatgtgaaaacccagctcttcaaccctataggctccaacaagcaatcgcagcaagcaacatacctttatcacccttgtttcaacaatcgccagccctatctttggtgcagtcattggtacaaaccatcaaggcacagcagctgcagcaactcgtgctacctgtgatcaaccaagtagctctggcaaacctttctccctactatcagcaacaacaatttcttccattcaaccaactatctacacttaaccct

SEQ ID NO: 3299 - DNA, 423 bp, Zea mays
  Clone ID: LIB3061-032-Q1-K1-A9
ccagggaccacagcatctggattggctaaactgaaaccagtttttaaaaaggatgtgactacaactgcaggcaattgcagtcaagtgagtgatggtgctggagctgttcttctcatgaaaagatctgtggctctgaagaaagggctgcccattcttggtgttttcaggagctttgcggctgttggagtggatccagctgttatgggtgttggtcctgctgtggccattcctgctgctgtgaagtctgcaggccttgagattggcgacattgatctgtttgaactgaatgaggccttcgcctctcagtttgtctattgctgcaacaagttggggctggaccgttctaaagtaaatgtaaatggaagcgcgattgcccttggacaccctctgggtgcaacaggtgccccgtgtgtggctacttct

SEQ ID NO: 3300 - DNA, 423 bp, Zea mays
  Clone ID: LIB3061-032-Q1-K1-B1
cccacgcgtccgaacatagaaagcacaatagtgtaccaacaatggcagccaaaatatgttgggtccttatgctccttggtctttctgcaagtgctgctaccgcaaccattttcccacaatgctcacaagctcctatagcttcctttcttcccccatacctctcaccagcggtgtcttcagtatgtgaaaacccaattcttcaaccctacaggatccaacaggcaatcgcagcaggcatcttacctttatcacccttgttcctccaacaaccgtcagccctattacagcagttacctttggtgcatttgttggcacaaaacatcaaggcacaacaactacaacaacttgtgctaggaaaccttgctgcctactctcagcaacagcagtttcttccattcaaccaactggctgcattgaactctg

SEQ ID NO: 3301 - DNA, 371 bp, Zea mays
  unsure (1)..(371): unsure at all n locations; Clone ID: LIB3061-032-Q1-K1-B10
aatagtgtaccaacaatggcagccaaaatattttgcctccttatgctccttggtctgtctgcaagtgctgctacggcgaccattttcccacaatgctcacaagctcctatagcttcccttcttcccccgtacctctcaccagcggtgtcttcggtatgtgaaaacccaattcttcaaccctataggatccaacaggcaatcgcagctggcatcttacctttatcacccttgctcctccaacaatcatcagccctattacagcagttacctttggtgcatttattggcacanaacatcagggcacaacaactacaacaacttgtgctagcaaaccttgctgcctactctcagcaacaacagtttcttccatt

SEQ ID NO: 3302 - DNA, 421 bp, Zea mays
  Clone ID: LIB3061-032-Q1-K1-B11
caactagcaacatagaaagcacaatagtgtaccaacaatggcagccaaaatatttggcttccttatgctccttggtctttctgcaagtgctgctaccgcaaccattttcccacaatgctcacaagctcctatagcttcctttcttcccccatacctctcaccagcggtgtcttcagtatgtgaaaacccaattcttcaaccctacaggatccaacaggcaatcgcagcaggcatcttacctttatcacccttgttcctccaacaaccgtcagccctattacagcagttacctttggtgcatttgttggcacaaaacatcaaggcacaacaactacaacaacttgtgctaagaaaccttgctgcctactctcagcaacagcagtttcttccattcaaccaactggctgcattgaactctgct

SEQ ID NO: 3303 - DNA, 442 bp, Zea mays
  unsure (1)..(442): unsure at all n locations; Clone ID: LIB3061-031-Q1-K1-H7
ggaaaaagaagaccgcatcccccggaactcaggatccccgtgggctctccgtgcctgatgccgccattggcaaaaccctgaaagccctaaaccttccgagacaaccatggacgagctcgtgtcggtggcgctggaggaggtgtgcgcgcgcctcgcgccggggatccccgtcgtggacctatggccagcgctccgtggcacgctcgatgcgacggggctcccgctaggcccagcagtcaagcgcgccctgtgggctcgcatccttgcgctccgcgtcgtcaacctggtggagggggatggggacggngtgcccatctcttgccgagacccggcggagaaggacttcgaggaggccgaacggcggtgcatgcggctcgtggcaagcgcggngatcagggacaacttcctggggttatacgagcgcagattcgcgaagtcggag

SEQ ID NO: 3304 - DNA, 413 bp, Zea mays
  Clone ID: LIB3061-013-Q1-K1-D2
gttccggacccggggcagtcccatttcttgaatggagcttgcaagttttaacctattatgtggggtgggccttggttgtggaggatcccaaacctcctaaactacgcatggccaaactccagaagcggcatgactgttcagcgagaacaagcgggagtacaaccgctcaggacgggagatcgtggagcagagctggacagccgactagtgcataacgatgctcgtcgtgcccgatctgggcacaatatgaaagcgtgaaatgaagacctcacccactccttgagtttctgggtcgccaggcttgtcgaagcattgaagaaccacagtgattgcattgtagtctgacggcaccaatgtgaccccattgagagcacccgctgctcatgggagcagctggcgaaatggaacgggtg

SEQ ID NO: 3305 - DNA, 359 bp, Zea mays
  unsure (1)..(359): unsure at all n locations; Clone ID: LIB3061-013-Q1-K1-D3
cnacgcgtccgcccgaataaatttgaagcgcggaccaagccctagatccgacacgagcaccaccctcagccatggcgccagcggcggcggaggctggtcccggcgatgacgggcttaggaagctcgaatacctttccctggtctccaaagtttgctccgagctcgagacccacatcggcgtcggcgacaaggtgctggccgagttcatcaccgagctcggccgcgactccacaaccgtccccgagttcgacgccaagctcaaggagaagggcgccgacttccccgactacttcgtccatacaaacttgatgttgtctccgctggggaaaaacttcacaaagataaggaaagctatcact

SEQ ID NO: 3306 - DNA, 392 bp, Zea mays
  unsure (1)..(392): unsure at all n locations; Clone ID: LIB3061-013-Q1-K1-D4
cgcacgcgtccgcccgaataaattttaagcgcggaccaagccctagatccgacaggagcgccaccctcagccatggcgccagcggcggcggaggctggtcccggcgatgacgggcttaggaagctcgaatacctttccctggtctccaaagtttgctccgagctcgagacccacatcggcgtcggcgacaaggtgctggccgagttcatcaccgagctcggccgcgactccacaaccgtccccgagttcgacgccaagctcaaggagaagggcgccgacttccccgactacttcgtccatacaaacttgatgttgtctccgctgggaaaaacttcacaaagataaggaaagctatcactgcaggcttctttttccacgccgncaggaaggat

SEQ ID NO: 3307 - DNA, 300 bp, Zea mays
  Clone ID: LIB3061-013-Q1-K1-D5
cagcctagcaattagctcatcgactccagattggagaactcgacaccatgaaggtgctgatcgttgcccttgctctcctggcgctcgctgcgagcgccgcctccagtacaagcggcggctgtggctgccagacaccaccgtatcatctaccgcctgcgttctatatgccgcctccgttctatctgccgccgcagcagcagccgcagccatggcaataccccactcaaccaccgcagctaagcccgtgccagcagttcggatcctgcggcgtcggcagcgtcggcagaccgttcctgggcc

SEQ ID NO: 3308 - DNA, 409 bp, Zea mays
  Clone ID: LIB3061-013-Q1-K1-D8
cagcaagcaacatagaacgtagaatccattaccaacaatagagcaacaatggcgagcaagatattttccctccttatgctccttgctctttctacatgtgttgctaacgcgacaattttccctcaatgctcacaagctcctatagcttcccttcttcccccataccttccatcaattatagcttcagtatgtgaaaacccagctcttcaaccatataggcttcaacaagcaatcgcagcaagcaacatacctttatcgcccttgttgtttcaacaatcaccagccctatctttggtgcagtcattggtacaaaccatcagggcacaacagctgcagcaactcgtgctacctgtgatcaaccaagtagctctggcaaacctttctccctactctcagcaacaacaatttc

SEQ ID NO: 3309 - DNA, 413 bp, Zea mays
  Clone ID: LIB3061-013-Q1-K1-D9
gtcatcgttctcgtcgtgtgcctggctctgtcagctgccagcgcctctgcaatgcagatgccctgcccctgcgcggggctgcagggcttgtacggcgctggcgccggcctgacgacgatgatgggcgccggcgggctgtacccctacgcggagtacctgaggcagccgcagtgcagcccgctggcggcggcgccctactacgccgggtgtgggcagccgagcgccatgttccagccgctccggcaacagtgctgccagcagcagatgaggatgatggacgtgcagtccgtcgcgcagcagctgcagatgatgatgcagcttgagcgtgccgctgccgccagcagcagcctgtacgagccagctctgatgcagcagcagcagcagctgctggcagcccaaggtctcaaccccat

SEQ ID NO: 3310 - DNA, 348 bp, Zea mays
  Clone ID: LIB3061-013-Q1-K1-E1
ttcagaaacacaccaagcgaagcgcactagcaacgacctaacaacaatggctaccaagatgttagccctccttgcgcttcttgccctttttgtgagcgcaacaaatgcgttcattattccacaatgctcacttgctcctagtgccattattccacagttcctcccaccagttacttcaatgggcttcgaacacctagctgtgcaagccaacatgcaacaacaagcgcttgcggcgagcgtcttacaacaaccaattgcccaattgcaacaacaatccttgccacatctaacaatacaagccatcacaacgcaacagcaacaacagttcctaccagcactgagccacct

SEQ ID NO: 3311 - DNA, 413 bp, Zea mays
  Clone ID: LIB3061-013-Q1-K1-E10
cgacgttctgaacggattttcagcgtctacgatcaggtgtacctgaagttacaaccgtacgtacaatcatcagtcacaactcgggccaatcaaaagcttgctttttggttcttcggcccctacaaaattttacagcgcatcggcccagttgcttacaagcttcagttgcccgcttcctctcagattcaccccatttttcatgtatctcaactcaagtcggctgtcaaccgtccacaacacatcattccattactacctgagactaatgattcacttcaggtgcccatacaggttcttcaacgtcgattaatccggcgtggcggttctatggtgactcaagtcaaagttgcatggtctggaatggacaccgcaatggctacgtgggaagatgttgatgcactgaaggcgcgttt

SEQ ID NO: 3312 - DNA, 416 bp, Zea mays
  Clone ID: LIB3061-013-Q1-K1-E11
ctactatactatactctaggaagcaaggacaccaccgccatggcagccaagatgcttgcattgttcgctctcctagctctttgtgcaagctccactagtgcgacccatattccagggcacttgccaccagtcatgccattgggtaccatgaacccatgcatgcagtactgcatgatgcaacaggggcttgccagcttgatggcgtgtccgtccctgatgctgcagcaactgttggccttaccgcttcagacgatgccagtgatgatgccacagatgatgacgcctaacatgatgtcaccattgatgatgccgagcatgatgtcaccaatggtcttgccgagcatgatgtcgcaaatgatgatgccacaatgtcactgcgacgccgtctcgcagattatgctgcatcagcagttacc

SEQ ID NO: 3313 - DNA, 226 bp, Zea mays
  Clone ID: LIB3061-013-Q1-K1-E2
tcgggtaaaaaggtcagaccggatctttttcagggggctaccacattacttcactgtgggcggacagccgcaattggttgagtcctttagacctatgaagggatttcatgttaggacagaatcacaaactggcaactctaaaggatatgccttatgggtgtaccaagatcttaatgttaccgacattgccagcgctgctattaatggcatgcctatgggagacaag

SEQ ID NO: 3314 - DNA, 321 bp, Zea mays
  Clone ID: LIB3061-013-Q1-K1-E3
gtgctgacatgcgtctcctacccaaagtccgactgcgtcatccacacccacaaggaaggcgacctgtactagggctagggctttccaatttggcgagggacaaaaaatgctctcgagtggtgtgttgtcaagcaaagctcctccatctgcgccctaccccgttgtgcgaactgtttggcatcaaacttgtgtggttgctatcttctatgttctgctagttaatgttcggagtccgtgggaatatactagctaattaataaaaggaaaaactgatgtgatgccataatagtataatgtcatggcttttggttatgtttggag

SEQ ID NO: 3315 - DNA, 411 bp, Zea mays
  unsure (1)..(411): unsure at all n locations; Clone ID: LIB3061-013-Q1-K1-E4
gctttatctactccagagcgcagaagaacccgatcgacaccatgagggtgttgctcgttgccctcgctctgctggctctcgctgcgagcgccacctccacgcatacaagcggcggctgcggctgccagccaccgccgccggttcatctaccgccgccggtgcatctgccacctccggttcacctgccacctccggtgcatctcccaccgccggtccacctgccgccgccggtccacctgccaccgncggtccatgtgccgncgncggttcatctgccgncgncaccatgccactaccctactcaaccgccccggcctcagcctcatccccagccacacccatgcccgtgccaacagccgcatccaagcccgtgccagctgcagggaacctgncgcgttggcagcacccccg

SEQ ID NO: 3316 - DNA, 304 bp, Zea mays
  Clone ID: LIB3061-013-Q1-K1-E6
agataaacccgactcaacaccatgatttctactagaaccctcctcaggtgggttctctgccagcgccacctccataaaacaacgaggctgcagctgccaccaacccatcttcactaccagcatcgccattaccacctaccttcacctccactcgtacatcaccacccatccactcctcaccggacacctgcaccgacgtccatgtcccgcagccgcttcatctgccgctcccaccatgccactaccctactcaaccgcccacaactcagcctcatgcccatccacacccatacccgcgccaaca

SEQ ID NO: 3317 - DNA, 285 bp, Zea mays
  Clone ID: LIB3061-013-Q1-K1-E7
agcaaaccttgctgcctactctcagcaacagcagtttcttccattcaaccaactaggttcattgaactctgcttcttatttgcacaacaactacaacaacttgtgctagcaaaccttgctgcatactctcagcaacatcagtttcttccattcaaccaactggctgcattgaactctgctgcttatttgcaacaacaattaccattcaaccagctagttgctggctacccccaacaatttcttccattcaaccaactagcagcattgaactctggtgcttattta

SEQ ID NO: 3318 - DNA, 415 bp, Zea mays
  unsure (1)..(415): unsure at all n locations; Clone ID: LIB3061-013-Q1-K1-E8
ggctgctgcaatgtgcttaatgatagctgcgaagctactttatgttgaagataggctgataagcaattctgtttctgagaaagccactgaggcatttgaggaccctgggcttgttgggatgcctcaaattgttggtaccactgctttatctaatacacgaacttaggctggaggctttactatgggccaagttgttcaagaagcataacctttgttttctggtgcatatgaagggctttgtttgtgctcgtcaagactactttatctcatatgggagtttcctattatagtgattcgaagaccggctggtactaataaatgcaaggatggtgtaaatcgtttgtaggctttcagctgnggccatgaaaattcttgagagcaagattcattcactggaaacattntttagatctag

SEQ ID NO: 3319 - DNA, 418 bp, Zea mays
  Clone ID: LIB3061-013-Q1-K1-D12
tcggtcgcaaacatgtctaccgtgctccagcgcccgacccccggcacggtccattgcttgggccgcaagaagacggctgtggccgtcgcctacaccaagccggggcgcgggctgatcaaggtgaacggcgtcccgattgagctcatcaggccggagatgctccgcctcaaggccttcgagcccatcctgctggcggggcgctccaggttcaaggacatcgacatgaggatccgcgtccgaggcggcgggaagacgtcgcagatctacgccatccgccaggccgtcgccaaggggctcgtcgcctactaccagaagtacgtcgacgaggccgccaagaaggaggtcaaggacatcttcacccggtacgaccgcacccttctcgtcgccgaccccaggcgctgcgagccgaaggagttcg

SEQ ID NO: 3320 - DNA, 336 bp, Zea mays
  Clone ID: LIB3061-013-Q1-K1-B8
tgaaggtgctgatcgcagcccttgctctcctggcgctcgctagcagcgccggctggcaatcaagcgtgcggttgtggctgccacacaccaccgtcccatctaccgtctgcgcactatatgccgccatccggtctatctgtcgccgcggcaccatcacgcaccatggcaataccccactcaaccaccgcagctaagcccgtgccgatagttcagatcctgcggtgtagcaagcagaccgcagccacgatcctgggccagagcgtccaggtcctgaggcacaacagcaaccctagctgcgacgccctacggctcgccacaaagccagggcgctgcagc

SEQ ID NO: 3321 - DNA, 398 bp, Zea mays
  Clone ID: LIB3061-013-Q1-K1-B9
tcgccaaaccctaattgcgacctccgttcccccataaccctacggccatggacggcggaggcgggggtgtagggggaggcggagttggggcaggtgtcatggtgggcggcggagtcgggccgggcggcggcgttggcggcgacgtggagctcgtcagcaagacgctgcagttcgagcacaagctgttctacttcgatctgaaggagaacccgcgggggaggtacctcaagatctccgagaagacctcggccacgcgctccaccatcatcgtccccgtcgacggcgtggcctggttcctcgacctcttcgactactacatccgcaccgacgagcgcgacgccttcagcaaggagctgcgactccagaccaagggtgtctatttcgatatcggggagaac

SEQ ID NO: 3322 - DNA, 145 bp, Zea mays
  Clone ID: LIB3061-013-Q1-K1-C1
agcagcttctgcttgctctggggggaaggagagagagagagcgagagagagagagagatctagtagagaggctagtaggtggtcctcgaacgaagatgttggcggtgttcagcggccaggtggtggaggtgccggcggaactggt

SEQ ID NO: 3323 - DNA, 402 bp, Zea mays
  Clone ID: LIB3061-013-Q1-K1-C10
cggtttcccgctcgacccacgctccgacgcagagctgccatgaagcctcacattggcatgctatatatgttgcctaggtatgctcattgaactttctgcaagtgctgctactgcgaccattttcctccaacgctcgcaagctcctataactctcattaatgccccgtacctctcaccaacactagtcttaaatctgtgaaaacccacttcttgaaccatacatgatccatcacgcacacgcagacagcattttacttttaccacccttattcatacaacaatcatctgccctattacaacaaccacttctatatcatttattggaacaatacatcaaggctcaacatctacaacgactcctgcttgcaaaacgtgctgacgactctcatcaacagctatcac

SEQ ID NO: 3324 - DNA, 418 bp, Zea mays
  Clone ID: LIB3061-013-Q1-K1-C11
cgaactagcaacatacatagtgaagtacactagcaacatcttagcaccaatggcagccaagatttttgccatccttgccctccttgctctttcagcaagcgttgctaccgcgactattattccacaatgctcacaacaatacctctctccggtgacagccgcgagatttgaatacccaactatacaatcctacaggctacaagaggccatcgcagcaagcatcttacggtcgttagcattgaccgtccaacaaccatatgccctattgcaacaaccatccttaatgaatctatatctccaaagaatcgcagcacaacaactacaacaacagttgcttccaacaatcaatcaagtagttgcagcgaaccttgctgcttacctccagcatcaactatttcttccattcaatcaactagct

SEQ ID NO: 3325 - DNA, 420 bp, Zea mays
  Clone ID: LIB3061-013-Q1-K1-C12
cgcacgcgttcgattttgagcattcataaacacaccaagcgaagcacattagcaacagcctgaacaacaatggctaccaagatattatccctccttgcgcttcttgcgctttttgcgagcgcaacaaatgcgttcattattccacaatgctcacttgctccaagttccattattacacagtttctgccaccagttacttcaatgggcttcgaacacccagctgtgcaagcctataggctacaacaagcaattgcggcgagcgtcttacaacaaccaattttgcagttgcaacaacaatgcttggcacatctaacaatacaaaccatcgcaacgcaacagcaactacaattcctaccagcactgagccacctagccatggtgaaccctgccgactacttgcaacagcagttgcttgcatca

SEQ ID NO: 3326 - DNA, 410 bp, Zea mays
  Clone ID: LIB3061-013-Q1-K1-C2
atcgatgcgtgcaatggaggatgctcttattgctataaagggtggtcgcatacctgctgcaagcagcttggcaacatttgaggagatcaaaaatactcttggcttcaaccactattacgaagaagacaaacgatatgcggtgacaccagcccaatcattgtacgggactggctatgataattatacaagtgaaccgaacagtccgggagattccaggtccagggctgaaaaaacacaagaacctgttattgacatattgcctcagctctatgatattggttccagtgacagcagaggaccttcaactggaatgtggtctcgaactcttcgactaaagattaccgggaagagatgggattccagaaaatgatgccaggataactgctgggttcttagaagggatgacaaga

SEQ ID NO: 3327 - DNA, 381 bp, Zea mays
  Clone ID: LIB3061-013-Q1-K1-C3
gcaacatagaaagcacaatagtgtaccaacaatggcagccaaaatattttgcctcgttatgctccttggtctttctgcaagtgctgctacggcgaccattttcccgcaatgctcgcaagctcctatagcttcccttcttcccccgtacctctcaccagcggtgtcttcggtatgtgaaaacccaattcttcaaccctacaggatccaacaggcaatcgcagctggcatcttacctttatcacccttgttcctccaacaatcatcagccctattacaacagttacctttggtgcatttattggcacaaaacatcagggcacaacaactacaacaacttgtgctagcaaaccttgctgcctactctcagcaacagcagtttct

SEQ ID NO: 3328 - DNA, 416 bp, Zea mays
  Clone ID: LIB3061-013-Q1-K1-C4
ggaacttgcaatgttacttttataaggattgctgaaaagcatcgacggctgctcaacgtgttcattagacaaaacccaagcatactggagaagtcactttctatgatgttgaaagtgccaaggctgatagattttgacaacaaacgtgcttactttcggtcacgtatcagacagcagcatgatcagcaccttccagctcctctacacattagtgttcgcagggcttatgttttggatgactcatataatcagttgagattacgtcgtacccaggatctcaaaggtcgtttgactgtgcaatttcaaggggaagagggcatagatgcaggaggactaactagggagtggtatcaactgctctctagagttatttttgacaaaggaactcttcttttcactacaggtggaaacaatgc

SEQ ID NO: 3329 - DNA, 387 bp, Zea mays
  Clone ID: LIB3061-013-Q1-K1-C5
gaatacagtagcaaaaatagagcaacaatggcggccaagatattttccatccttatgctccttgctctttctgcatgtgttgctaacgcgaccatttttcctcaatactcacaagctcctatagctgcccttcttcccccataccttccatcaatgaccgctttagtatgtgaaaacccagcccttcaaccctacaggatccagcaagcaatcgcaacaagcaacttacctttatcacacctgttctttcaacaatcgccagccctatctttggtgcagtcattggtacaaaccatcaaggcagaacagttgcagcaactcgtgctaccagtgatcagcccagtagctctggcaaaactttccccctactttagcaacaacaatttc

SEQ ID NO: 3330 - DNA, 360 bp, Zea mays
  Clone ID: LIB3061-013-Q1-K1-C6
attttgagcattcagaaacacaccaagcgaagcgcactagcaacgacctaacaacaatggctaccaagatattagccctccttgcgcttcttgccctttttgtgagcgcaacaaatgcgtacattattccacaatgctcacttgctcctagtgccattattccacagttgctcccaccagttacttcaatgggcttcgaacacctagctgtgcaagccaacatgcaacaacaagcgcttgcggcgagcgtcttacaacaaccaattgcccaattgcaacaacaatccttgccacatctaacaatacaagccatcacaacgcaacagcaacaacagtttctaccagcactgagccacctag

SEQ ID NO: 3331 - DNA, 349 bp, Zea mays
  Clone ID: LIB3061-013-Q1-K1-C7
ccaactagcaacatagaaagcacaatagtgtaccaacaatggcagccaaaatattgtgcttccttatgctccttggtctttctgcaagtgctgctaccgcaaccattttcccacaatgctcacaagctcctatagcttcctttcttcccccatacctctcaccagcggtgtcttcagtatgtgaaaacccaattcttcaaccctacaggatccaacaggcaatcgcagcaggcatcttacctttatcacccttgttcctccaacaaccgtcagccctattacagcagttacctttggtgcatttgttggcacaaaacatcaaggcacaacaactacaacaacttgtgct

SEQ ID NO: 3332 - DNA, 350 bp, Zea mays
  Clone ID: LIB3061-013-Q1-K1-C8
ctaggtcattacttgctaatgtgcatctgattttgctgttgccaggatggaaatgttttttggcagctttctcagtgaatcagtatcaccgcataaccttttcggacacccggatgttgagaaatgcccattcctgaggaatatcaatggagctacaaccttttccctcgcttctgctttgccagtagctgctcaaggaggcaagggtccaatttttgaggaagggtcaggctttgagtctgcattcaagcttttccatggccgagatggaatagttcccctttcagaaagatcatatgtatctgatgaacaccacattgagagcattgatgtcaggactgaacctgctc

SEQ ID NO: 3333 - DNA, 411 bp, Zea mays
  Clone ID: LIB3061-013-Q1-K1-C9
agcaacatagaaagcacaatagtgtaccaacaatggcagccaaaatatgttgcctcgttatgctccttggtctttctgcaagtgctgctactgcgaccattttcccgcaatgctcgcaagctcctatagctctccttcttcccccgtacctctcaccagcggagtcttcggtatgtgaaaacccaattcttcaaccctacaggatccaacaggcactcgcagctggcatcttacctttatcacccttgttcctacaacaatcatcagccctattacaacagctacctttggtgcatttattggcacaatacatcagggcacaacatctacaacaacttgtgctagcaaaccttgctgactactctcagcaacagctgtctcttgcattcaaccaactaggttcatcgaact

SEQ ID NO: 3334 - DNA, 410 bp, Zea mays
  Clone ID: LIB3061-013-Q1-K1-D1
gcggaggagacggcctgctgcatgccgagagagcattcaggatcgcacagctggagctagcattcctcaacgactacttctacacaagataccccatcctgttctggcgtggcttcccgctcctctgtgcttggcaccccctgctcaccatcgctctcatcgcgtggcttgcaagggacatccacaagctctacgaacccagggaaggagagactgcccacgtcattaagggtgtcaatgttgacatcaccatcacatggatattcatgggcattatcgttctgaaggagctgtggaagatggtcacctacatcttgtcggactggaccaaggtgatgctgctgtgcgagtacacttcgcggaggagcatcggcccgtggtgtatgtggatcccattccacaacgtatgt

SEQ ID NO: 3335 - DNA, 415 bp, Zea mays
  Clone ID: LIB3061-013-Q1-K1-D11
cggaacaggtgacggcggcgcgctaccggcgacgggggatacggcggcatcgatctgtccttcatccccgtcgcggaggcgccagcatccgtcctgcaggctggttgaagagctcgccatttaatctcaatggaagccaagtttttccgtttactgaagctcgttggtgtcggcttcaaagcgaggtcagagagccaaggccgcgagttgttccttaaactgggcttcagccatgaggtgcagctcaccgatcctgcagctgtccatgtgttctgcttcaaacccaacataatctgctgcaccggcatcgataatgacagggtgcaccatttcggcgtcgccatccggagctacaaggctgcagaggtgtacaaggagaaggcgatcctgtacattgactaggttatcaagctga

SEQ ID NO: 3336 - DNA, 342 bp, Zea mays
  Clone ID: LIB3061-013-Q1-K1-B7
gcatcatagaaagcacaatactgtaccaacaatggcagccaaaatattatgcctggttatgctactcggtctgtctgcaagtgctgctacggcgaccattttaccgcaatgctcgcaagctactatagcttcccttcttcccccgtacctctcaccagcggtgtcttcggtatgtgaaaacccaattcttcaaccctacaggatccaacaggcaatcgcagctggcatcttacctttatcaccctagttcctccaacaatcatcagccctattacaacagttacctttggtgcatttattggcacaaaacatcacggcacagcaactacaacaacttgcgct

SEQ ID NO: 3337 - DNA, 407 bp, Zea mays
  Clone ID: LIB3061-013-Q1-K1-A11
aacgttgctgcctactatagacaccagcagttgcttccattcaaccaactagcgggatggaactctgcttcttatttgcaacaacaacaactaccattcagccagctacctgctgcctacccccagcaatttcttccattcaaccaactggcagcattgaactctcctgcttatttacagcagcaacaactactaccattcagccagctagctggtgtgagccctgctaccttcttgatacaaccacagttgttgccgttctaccagcacgctgcgcctaacgctggcaccctcttacaactgcaacaattgctgccattcaaccaacttgctttgacaaacccagcagcgttctaccaacaacccatcattggtggtgccctcttttagatctcttatgagtgata

SEQ ID NO: 3338 - DNA, 415 bp, Zea mays
  Clone ID: LIB3061-013-Q1-K1-A12
cctggttcctccaacaaccgtaagccttattacagcagttacctttggtgcattggggggcacaaaacatcaaggcacaacaactacaacaacttgtgctaggaaaccttgctgcctactctcagcaacagcagtttcttccattcaaccaactggctgcattgaactctgctgcttatttgcaacaacaactaccattcagtcagctagctgctgcctacccccagcaatttcttccattcaaccaactggcagcattgaactctgctgcttatttacaacagcaacagctaccaccattcagccagctagctgatgtgagccctgttgccttcttgacacaacaacagttgttgccgttctacctgcacgctgcgcctaacgctggcaccctcttacaactgcaacaattgct

SEQ ID NO: 3339 - DNA, 375 bp, Zea mays
  Clone ID: LIB3061-013-Q1-K1-A2
caccaagcgaagcacattagcatcagcctagctacaatggctaccacgatattatgcgtgcttgcgcttcttgcgctttttgcgagcgcaacaaatgcgttcattattccacaatgctcacttgctccaagttccattattacacagattctcccaccagttacttcaatgggcttcgaacacccagctgtgcaagcctataggctacaacaagcaattgctgcgagcgtattacaacaaccaattttccaggtgcaacaacaatccttggcacatgtaacaatacaaaccatcgcatcgcatcagcatcaacaattcctaccagcactgagccacctagccatggtgaaccctgccggctacttgcaacagcag

SEQ ID NO: 3340 - DNA, 366 bp, Zea mays
  Clone ID: LIB3061-013-Q1-K1-A3
gtaccggttcggagtttttgggcagtgcgtcagcacttgagtctcatcagaaggcaaagaagcatgaagcctagagcacgtgctatgccatctactcgttatcaaaatcagtggtcttatttttgaacttgaaaatgtccaagtttggaacttgcccagtagtcatctgattagtggtgttatttttctttgaacttgggaattgtctagtttgggacatacgcggtatgcctggttaagaacatgggaaatgtcaggttagaacaggtcctgctggcccagttttggtcgtcgtcgaatgttgctaatgttggaactgattattgtgacccgtaaggccgtaagggagaatctttgttatctggt

SEQ ID NO: 3341 - DNA, 391 bp, Zea mays
  Clone ID: LIB3061-013-Q1-K1-A4
ctcgcctactctccctagcctgcacgacgcaagggagagtgacggacagcgacgcggcgcgagcgaggagggccaaggggaagaggggaagcaccgcaccaggacccttgttcgccgacgccgcctctgatctccgcgaggttgtcaggattcaatatgtcgaccagcacattcgctacttcctgcacgctgttgggcaatgttagaacaacgcaggcctcccagacagcggtgaagagcccttcgtctctaagcttcttcagccaagttacgaaggttccaagcctgaagacctccaagaaactggatgtctccgccatggctggatacaaggtgaagcttgtcgggcctgaaggtgaagagcacgagtttgatgctccagacgacgcct

SEQ ID NO: 3342 - DNA, 280 bp, Zea mays
  Clone ID: LIB3061-013-Q1-K1-A5
gcgtacaaatgaacacgaaccttggtagaacgaagctgaagcatttcgtggtgaggctagtatggcaaacgcgcacaggatcctggccctaaggctgctgttagcgctgctgtgcgctgccgcacggaaccggtcgagcgcagaactgccgatgccagcctaacttctgctgcagcacgttcggctactgcggcacgaccgacgactactgctgctgactggtgccagtcgggcccgtgctgctcgggcggcggaggaggccgctgcggtggctgatgca

SEQ ID NO: 3343 - DNA, 298 bp, Zea mays
  Clone ID: LIB3061-013-Q1-K1-A6
gcgtcggctgtgttagccggtagccctccccccgtccgaggtccgagtccgaccgaaggagagaggcagcagccatggctaagggcgggctgagcaagctccggtgcatggtcaagaggaggtggcactcgtcgagccgcatcgtctcccgcgccccgtcgccaccggctcacgccgacgccgtcgccgtcgccgccacctccggccacgcgcgcggcgcgtcgtaccacggcgcggacgaggcgcccaagggcctgcacgcggtgtacgtcggcagggcgcgccgtcggtacctcgt

SEQ ID NO: 3344 - DNA, 333 bp, Zea mays
  Clone ID: LIB3061-013-Q1-K1-A7
aaagcacaatagtgtaccaacaatggcagccaaaatattttgcctccttatgctccttggtatttctgcaagtgctgctacggcgaccattttcccgcaatgctcacaagctcctatagcttcccttcttcccccgtacctctcaccagcggtgtcttcggtatgtgaaaacccaattcttcaaccctacaggatccaacaggcaatcgcagctggcatcttacctttatcacccttgttcctccaacaatcatcagccctattacagcagttacctttggtgcatttattggcacaaaacatcagggcacaacaactacaacaacttgggct

SEQ ID NO: 3345 - DNA, 327 bp, Zea mays
  Clone ID: LIB3061-013-Q1-K1-A8
ctcccaggaaagaggacggcgtccaggacaaccccggcgccaagaagagatcccggccggagtccagcgcgccacccggcaccaaggcttgccgtgagaagctccggcgagacaggctcaacgaaaggttcaacgagctctgtgccatcttggaacccggcaagccacccaaggccgacaaagtcgctatcctaagcgacgctgcccgtctcctgaaccagctgcagggcgaggcccagaagcttaagcaatcgaacgaatcgctccaggagtccatcaagagtcttaaggctgagaagtccgagctgcgagacgagaagacgaggc

SEQ ID NO: 3346 - DNA, 407 bp, Zea mays
  Clone ID: LIB3061-013-Q1-K1-A9
agtaccatcaatcatcattcatcttagtagtataggcaccaaatcaaatctgcaacgtcaattatctaactccaaaaaccatgaagctggtgcttgtggttcttgctttcattgctttagtatcaagtgtttcttgtacacagacaggcggctgcagctgtggtcaacaacaagccatgagcagcaacatcatccacaacaacatcatccacaaaaacaacaacatcaaccaccaccacaacatcaccagcagcagcaacaccaacaacatcaagttcacatgcaaccacaaaaacatcagcaacaacaagaagttcatgttcaacaacaacaacatcaaccgcagcaccaccaccatcaacaacaacaacagcaccaacatcaacatcaatgtgaaggccaacaac

SEQ ID NO: 3347 - DNA, 449 bp, Zea mays
  Clone ID: LIB3061-013-Q1-K1-B1
tcccgaattcgccggctagcaacatagaaagcacaatattgtaccaataatggcagccaaaatattttgcctcattatgctccttggtctttctgcaagtgctgctacggcgagcattttcccgcaatgctcacaagctcctatagcttcccttcttcccccatacctctcaccagcgatgtcttcagtatgtgaaaatccaattcttctaccctacaggatccaacaggcaatcgcagcaggcatcttacctttatcacccttgttcctccaacaatcatcagccctattacagcagttacctttggtgcatttattggcacaaaacatcagggcacaacaactacaacaactcgggctagcaaaccttgctgcctactctcagcaacagcagttacctttggtgcatttgttggcacaaaacatcaaggcacaacaactacaacaac

SEQ ID NO: 3348 - DNA, 415 bp, Zea mays
  Clone ID: LIB3061-013-Q1-K1-B10
ggcaaacaggcccctggtcatctccggtttcctcgtttcctttcctcttcgtcccagggacgtcagtacgtcacccatcggcacccgcgccgctgacccccgccaccgtgtcacgatcccgtccccgctcgcacgcctagcgcgatggcgcacccgatgtacggctccggaccgctccgatccaggaacgcggcgagctcggacgaaatccagctgcggatcgacccggtgcacggggacctcgacgaggagatcgacgggctgcactccagggtccgcatgctcaaaggggtggcccaggagataaattctgaagccaagttccagaatgattttcttcatgaactgcaaatgacccttgcaaaagctcaggctggagtgaagaacatcatgcggagatggaacaagagcatca

SEQ ID NO: 3349 - DNA, 370 bp, Zea mays
  Clone ID: LIB3061-013-Q1-K1-B12
gattacttctatcctctaggaaccaggcccaccgctggctgccaataggttgattgtcgcttactactcttaggcaagctccactagtgcgacccatattacaggcacttgcaccaatcagccattgggttccatgaaccctgcatgcaatactgatgatgcacacgtgcttgcagcttgatggcctgttcacgcctgatgctgcacaactgacgccttaccggttagagatgccagcgatgatgccacagatgatgactcctaacatgatgtaccatagatatgccgatcatgatgtgccatagtcttgcccacatgatgtcacaactgatgatgcccactgtcactggactccgctcgcaatcatgct

SEQ ID NO: 3350 - DNA, 421 bp, Zea mays
  Clone ID: LIB3061-013-Q1-K1-B2
ctagcaacatagaaagcacaatattgtaccaataatggcagccaaaatattttgcctcattatgctccttggggttgcgtgcaagtgctgctacggcgagcattttcccgcaatgctcacaagctcctatagcttcccttcttcccccatacctctcaccagcgatgtcttcagtatgtgaaaatccaattcttctaccctacaggatccaacaggcaatcgcagcaggcatcttacctttatcacccttgttcctccaacaatcatcagccctattacagcagttacctttggtgcatttattggcacaaaacatcagggcacaacaactacaacaactcgtgctagcaaaccttgctgcctactctcagcaacagcagttacccttttgtgcatttgttggcacaaaacatcagggcac

SEQ ID NO: 3351 - DNA, 390 bp, Zea mays
  unsure (1)..(390): unsure at all n locations; Clone ID: LIB3061-013-Q1-K1-B3
caaggattccatatcgttggctatggctgtaccacttgcattggaaactctggtgatctcgatgaatccgtatcaactgccattacagaaaatgatgttgttgctgctgctgttttgtcgggtaaccgtaacttcgagggtcgtgtgcaccctttaactcgggctaactatcttgcttcaccacctcttgttgttgcttatgcacttgccggaactgttgatattgattttgagaaagagcccattggatttggaaaggatggcaaggaagtctacttcagggatatatggccctcaacagaagaaattgcgcaggttgtccaatccagtgtgctgcctgacatgttcaagggcacctatgangctatcacaaaaggcaacccaatgtgg

SEQ ID NO: 3352 - DNA, 407 bp, Zea mays
  unsure (1)..(407): unsure at all n locations; Clone ID: LIB3061-013-Q1-K1-B6
aactagcaacatagaaagcacaatagtgtaccaacaatggcagccaaaatatttggcttccttatgctccttggtctttctgcaagtgctgctaccgcaaccattttcccacaatgctcacaagctcctatagcttcctttcttcccccatacctctcaccagcggtgtcttcagtatgtgaaaacccaattcttcaaccctacaggatccaacaggcaatcgcagcaggcatcttacctttatcacccttgatcctccaacaaccgtcagccctattacagcagttacctttggtgcatttgttggcacagaacatcaaggcacaacaactacaacaactngtgcctaggaacccttgctgcctactctcaagcacagcagtttcttccattcaaccaactggctg

SEQ ID NO: 3353 - DNA, 420 bp, Zea mays
  Clone ID: LIB3061-013-Q1-K1-A10
agctccgtgcacctaaaaggcccatatgtcccaccatgggcagccaaaaaattttgcctccttaggctccttggtctttctgcaagtgctgctacggcgaccattttcccgcaatgctcgcaagctcctatagcttcccttcttcccccgtacctctcaccagcggtgtcttcggtatgtgaaaacccaattcttcaaccctacaggatccaacaggcaatcgcagctggcatcttacctttatcacccttgttcctccaacaatcatcagccctattacaacagttacctttggtgcatttattggcacaaaacatcagggcacaacaactacaacaacttgtgctagcaaaccttgctgcctactctcagcaacagcagtttcttccattcaaccaactaggttcattgaactctgct

SEQ ID NO: 3354 - DNA, 443 bp, Zea mays
  Clone ID: LIB3061-031-Q1-K1-G4
ggaatacagtagcaacaatagagcaacaatggcggccaagatattttccatccttatgctcgttgctctttctgcatgtgttgctaacgcgaccatttttcctcaatactcacaagctcctatagctgcccttcttcccccataccttccatcaatgaccgcttcagtttgtgaaaacccagcccttcaaccctacaggctccaacaagcaatcgcaacaagcaacttacctttatcacccctgttctttcaacaatcgccagccctatctttggtgcagtcattggtacaaaccatcagggcacaacagctgcaacaactcgtgctaccagtgatcagccaagtagctctggcaaacctttctccctactctcagcaacaacaatttcttccattcaaccaactgtctacactgaaccctgctgcttatttacaacaacaac

SEQ ID NO: 3355 - DNA, 435 bp, Zea mays
  unsure (1)..(435): unsure at all n locations; Clone ID: LIB3061-031-Q1-K1-G5
ccgacgcactagaccgacccgcgaatcccccgcgcgcgcgccgtgcggtcaccgtccgaggccacggcaccgccggcccccgcccccgccccggccgccaagagcaaaggcaaggccgacgcttcctcctcgtcgtcctcctcctccactccaccgaggttgcgccgcgcgcttgccgtcgtgatggccgcgtcgctgctcgtgctcgccgtggcgttcttggttggctctggctccggggggatcgatgggggcgcagcggctcccgtcgaggtggagggcaccgaggtggcctacggtagtgtgatcaagctgatgcacgagaagacgaagcaccgtctgcactcgcacgatgtgccctacggctcaggcagcggtcagcagtctgtcaccgggtttcctgaaggcgatgactcanatagctactggatcata

SEQ ID NO: 3356 - DNA, 438 bp, Zea mays
  Clone ID: LIB3061-031-Q1-K1-G6
gttgcaagtaggcgacagcaggtgcttgcatccaacccacttgctctggcaaacgtggctgcataccaacaacaacaacaattgcaacagtttctgccagcgctcagtcaactagccatggtgaaccctgccgcctacctacaacagcaacaactgctttcatctagccctctcgttgtgggtaatgcacctacatacctgcaacaacaattgctgcaacagattgtaccagctctgactcagctagctgtggcaaaccctgctgcctacttgcaacagctgcttccattcaaccaactgactgtgtcgaactctgctgcgtacctacaacagcgacaacagttacttaatccactagcagtgcctaacccattggtcactgccttcctacagcagcaacaattgctaccatacagccagttctctttgatgaaccct

SEQ ID NO: 3357 - DNA, 446 bp, Zea mays
  unsure (1)..(446): unsure at all n locations; Clone ID: LIB3061-031-Q1-K1-G7
attcagaaacacaccaagcgaagcgcactagcaacaacctaacaacaatggctgccgagatattatccctgcttgcgcttcttgcgctttttgcgagcgcaacaaatgcgtccattattccacaatgctcacttgctcctagttccattattccacagttcctcccaccagttacttcaatggccttcgaacacccagctgtgcaagcctataggctacaacaagcgattgcggcgagcgtcttacaacaaccaattgcccaattgcaacaacaatccttggcacatctaacaatacaaaccatcgcaacgcaacagcaacaacagttcctaccagcactgagccacctagccatggtgaaccctgtcgcctacttgcaacagcagctgcttgcatccaacccacttgctctagcanacgtagttgcaaaccagcaacaacaacaa

SEQ ID NO: 3358 - DNA, 434 bp, Zea mays
  unsure (1)..(434): unsure at all n locations; Clone ID: LIB3061-031-Q1-K1-G8
gggtcttcagaccattagctttatctactccagagcgcagaagaacccgatcgacaccatgagggtgttgctcgttgccctcgctctcctggctctcgctgcgagcgccacctccacgcatacaagcggcggctgcggctgccagccaccgccgccggttcatctaccgccgccggtgcatctgccacctccggttcacctgccacctccggtgcatctcccaccgccggtccacctgccgccgccggtccacctgccaccgccggtccatgtgccgccgccggttcatctgccgccgccaccatgccactaccctactcaaccgccccggcctcagcctcatccccagccacacccatgcccgtgccaacagccgcatccaagcccgtgccagctgcagggaacctgcngcgttggcagcaccccgatcctgg

SEQ ID NO: 3359 - DNA, 409 bp, Zea mays
  Clone ID: LIB3061-031-Q1-K1-G9
caccagcggtgtcttcaatgtgtgaaatcccaattgttcaaccctacaggatccaacgggcaatcgcaacaggcatcttaccattatcacccttgttcctccaacaaccgtcagccctattacagcagttacctttggtccatttggtggcacaaaacatcagggcacaacaactacaacaacttgtgctagcaaaccttgctgcatactctcagcaacatcagtttcttccattcaaccaactggctgcattgaactctgctgcttatttgcaacaacaattaccattcagccagctagttgctgcctacccccagcaatttcttccattcaaccaactagcagcattgaactctgctgcttatttacagcagcaacaactactaccattcagccagctagctgatgt

SEQ ID NO: 3360 - DNA, 396 bp, Zea mays
  Clone ID: LIB3061-031-Q1-K1-H1
agcattcaaaaacacaccaagcgaagcgcactagcaacgacctaacaccaatggctggcaagatattagccctccttgcgcttcttgcccttttagtgagcgcaacaaatgcgttcattattccacagtgctcacttgctcctagtgccattattccacagttccttccaccagttacttcaatgggcttcgaacatccagccgtgcaagcctacaggctacaactagcgcttgcggcgagcgccttacaacaaccaattgcccaattgcaacaacaatccttggcacatctaaccctacaaaccattgcaacgcaacaacaacaacaacaacagtttctgccatcactgagccacctagccgtggtgaaccctgtcacctacttgcaacagtagc

SEQ ID NO: 3361 - DNA, 313 bp, Zea mays
  Clone ID: LIB3061-031-Q1-K1-H10
gaccggacggcgaacggaggcgccaggggactctgagcaggtgcggggcgcatggcgactgcgctggcgcggcggggcgccgcggccctggcgcgatggcgcgggatgtgctcgagctcggcttcggcgccgcggcgcgccgcggcgctgtcctcagaggagctcatgcggatggaacaagactgcagcgcgcataattaccatccaatccccatggtgttttccaaaggagaaggttcacacatagtggaccctgaaggcatcaaatacattgatattctctctgcttattctgcagtcaatcatggtcatt

SEQ ID NO: 3362 - DNA, 421 bp, Zea mays
  Clone ID: LIB3061-031-Q1-K1-H11
cttagcaccaatggcagccaagatttttgcgctccttgccctccttgctctttcagcgggtgttgctaccgcgactattattccacaatgctcacaacaatacctctctccagtgatagccgcgagatttgaatacccatctatacaatcctacaggctacaagaggccatcacagcaagcatcttacggtcgttagcattgaccgtccaacaaccatatgccctattgcaacaaccatccttagtgaatctgtatctccaaagaatcacagcacaacaactacaacaacggttgcttccaacaattaatcaagtagttgcagcgaaccttgctgcttaccttcagcaacaacaatttcttccattcaatcaactagctggggtgaaccctgctgcttacttgcaggcacaacagctacta

SEQ ID NO: 3363 - DNA, 385 bp, Zea mays
  Clone ID: LIB3061-031-Q1-K1-H12
tcgttttgtttctcaaagaatgccttttaccattactaacaattcatttgcttggcaagagagagtcttgtccaatgaagttcttctatgaagacaagatttgatactttgagaaaattaatttcatgaagagaagatgagagacatatatactggctggtacatgagaagataaaagagagtcaagtcaatttcaagtacttttgtgactttttcaaatgttggggaacttgaagccgacgatttttatgaagaatcctcttattaaggatcaaccttacgtaggttgtatacaggaaactttgtacactagagcctgggcatcttactggctttttgcaacactttgcttctcttctgatggaatgtttgtaagttggtgact

SEQ ID NO: 3364 - DNA, 334 bp, Zea mays
  Clone ID: LIB3061-031-Q1-K1-H2
aacaaatgcgttcattattccacaatgctcacttgctccgagtgccattattccacagttgctccctccagttacttcaatgggcttcgaacacccagctgtgcaagcctataggctacaacaagcgcttgcggcgagcgtcttagaacaaccaattgcccaattacaacaacaatccttggcacatctaaccatacaaaccatcgcaacgcagcagcaacaagcactgagccacctagccgtggtgaaccctatcgcctacttgcaacaacagctgcttgcatccaacccacttgctttggcaaacgtagctgcataccaacaacaacaacag

SEQ ID NO: 3365 - DNA, 446 bp, Zea mays
  Clone ID: LIB3061-031-Q1-K1-H3
caactagcaacatagaaagcacaatagtgtaccaacaatggcagccaaaatattttgggtccttatgctccttggtctttctgcaagtgctgctacggcgaccattttcccacaatgctcacaagctcctatagcttcccttcttcccccgtacctctcaccagcggtgtcttcggtatgtgaaaacccaattcttcaaccctatacgatccaacaggcaatcgcagctggcatcttacctttatcacccttgttcctccaacaatcatcagccctattacagcagttacctttggtgcatttattggcacaaaacatcagggcacaacaactacaacaacttgtgctagcaaaccttgctgcctactctcagcaacaacagtttcttccattcaaccaactagctgcattgaactctgcttcttatttgcaacaacaacaactac

SEQ ID NO: 3366 - DNA, 410 bp, Zea mays
  Clone ID: LIB3061-031-Q1-K1-H4
gaaagcacatagtgtaccaacaatggcagccaaaatattttgcctccttatgctccgtgggctttctgcaagtgctgctacggcgaccattttcccgcaatgctcgcaagctcctatagcttcccttcttcccccgtacctctcaccagcggtgtcttcggtatgtgaaaacccaattcttcaaccctacaggatccaacaggcaatcgcagctggcatcttacctttatcacccttgttcctccaacaatcatcagccctattacaacagttacctttggtgcatttattggcacaaaacatcagggcacaacaactacaacaacttgtgctagcaaaccttgctgcctactctcagcaacagcagtttcttccattcaaccaactaggttcattgaactctgcttctt

SEQ ID NO: 3367 - DNA, 432 bp, Zea mays
  Clone ID: LIB3061-031-Q1-K1-H5
ctggtctggaacacgccctcctgggttctgtagtgactgtagacaggtatgcagctgccgagggtttctataaactagctatggcctatgcacccgttccagatcttcacattatgtggttgcttcatctgtgtgatgcacaccaggagatgcaatcatgggctgaagcagcacaatgtgcagttgctgtagctggcgtgatcatgcaggcacttgttggaaggaatgatgctgtgtggagcaaggagcatgttgcttcgctgcgcaagatttgccctattgtcaacactgatgtgagtgcagaagcatctgcagctgaagtcgagggatatggtgcatcaaaattaacagtggactcagcggtcaaatatcttcaactagccaataaacttttcacacaagctgaactctaccatttttgtgcaagcattc

SEQ ID NO: 3368 - DNA, 432 bp, Zea mays
  Clone ID: LIB3061-031-Q1-K1-H6
cagcaacaagcactgagccacctagccgtggtgaaccctatcgcctacttgcgacaacagctgcttgcatccaacccacttgctttggcaaacgtagctgcataccaacaacaacaacagttgcaacagtttctaccagcgctcagtcaactagccatggtgaaccctatcgcctacctacaacagcaacaacttctttcatctagcccgctcgctatgggcaatgcacctacatacctgcaacaacagttgttgcaacaacagttgctgcaacaaattgtaccagctcttactcagctagctgtggcaaaccctgctgcctacttgcaacaactacttccattcaaccaactgactgtgtcgaactctgctgcgtacctacaacagcgacaacagttacttaatccactagcggtggctaacccattggtc

SEQ ID NO: 3369 - DNA, 424 bp, Zea mays
  Clone ID: LIB3061-031-Q1-K1-G3
cccgctctcctgctactctgctccgtgatctggtctggtgagatcggggatcggacggtcgactcggcgagacatggcggactggggccccgtggtggtgggcgtggtgctgttcgtgctgctctcgccgggcctgctctgcgagctgccgggcacccaccgccacgtcgacttcggcggcttccacaccaacggcaaggccatcttcgtccacaccctcgtcttcttcgccgccttcaccatcctcacgctcgcgctccacatccacatctacaccggctagctagctagtgcggagcatatgttgcgtcggtctggacttgcggaggtctcagatcagaaaggaacgccggccggcggcgcgtcctgtgttgctgctctggttcctctgcagttcgatcgattcgacgaagtgcttgtaact

SEQ ID NO: 3370 - DNA, 422 bp, Zea mays
  Clone ID: LIB3061-031-Q1-K1-F11
gattagagaggctttcagcagcatggacgacttttactccttcaggtctggcttttgggcgccgccaggccagacattttgttgcaggtcgatgctgttgctggtcgccgaacaaagcatgcaggggtagccatgtccaccggcccgaaagcacgcaggcccagccgtggatacatccaatgaggcaacgcgcttgagaggctttccagtttggtcgtgcatgtaattggcagtgtctgatgcctcaaccaccgtgagcagacgtctggataattggaggctagcacccggtctcctgctgctcagtggggtactggggttcatggtgcctaggggctgagctgcaagacgtgaagacgacggtgggaaaacgcgaggaaaagaaaaatcttgggccttctgccggcgtgggcttgtggtgg

SEQ ID NO: 3371 - DNA, 401 bp, Zea mays
  Clone ID: LIB3061-031-Q1-K1-F12
gccactaccctactcaaccgccccggcctcagcctcatccccagccacacccatgggcgtgccaacagccgcatccaagcccgtgccagctgcagggaacctgcggcgttggcagcaccccgatcctgggccagtgcgtcgagttcctgaggcatcagtgcagcccgacggcgacgccctactgctcgcctcagtgccagtcgttgcggcagcagtgttgccagcagctcaggcaggtggagccgcagcaccggtaccaggcgatcttcggcttggtcctccagtccatcctgcagcagcagccgcaaagcggccaggtcgcggggctgttggcggcgcagatagcgcagcaactgacggcgatgtgcggcctgcagcagccgacttcatgcccctacgct

SEQ ID NO: 3372 - DNA, 442 bp, Zea mays
  Clone ID: LIB3061-031-Q1-K1-F2
attgagaccaactagcaacatagaaagcacaatagtgtaccaacaatggcagccaaaatatgttgcctccttatgctccttggtctttctgcaagtgctgctacggcgaccattttcccgcaatgctcgcaagctcctatagcttcccttcttcccccgtacctctcaccagcggtgtcttcggtatgtgaaaacccaattcttcaaccctacaggatccaacaggcaatcgcagctggcatcttacctttatcacccttgttcctccaacaatcatcagccctattacaacagttacctttggtgcatttattggcacaaaacatcagggcacaacaactacaacaacttgtgctagcaaaccttgctgcctactctcagcaacagcagtttcttccattcaaccaactaggttcattgaactctgcttcttatttgcaac

SEQ ID NO: 3373 - DNA, 444 bp, Zea mays
  Clone ID: LIB3061-031-Q1-K1-F3
aactagcaacatagaaagcacaatagtgtaccaacaatggcagccaaaatattttgcgtccgtatgctccttggtctttctgcaagtgctgctacggcgaccattttcccgcaatgctcgcaagctcctatagcttcccttcttcccccgtacctctcaccagcggtgtcttcggtatgtgaaaacccaattcttcaaccctacaggatccaacaggcaatcgcagctggcatcttacctttatcacccttgttcctccaacaatcatcagccctattacaacagttacctttggtgcatttattggcacaaaacatcagggcacaacaactacaacaacttgtgctagcaaaccttgctgcctactctcagcaacagcagtttcttccattcaaccaactaggttcattgaactctgcttcttatttgcaacaacaacaacta

SEQ ID NO: 3374 - DNA, 397 bp, Zea mays
  Clone ID: LIB3061-031-Q1-K1-F4
cccacgcgtccgaagaagggcggcatccggttcaccatcaacggccactcctacttgagcctggtgctggtgaccaacgtgggcggcgccggcgacgtgcacgcggtggccgtgaagggcgaccgttccgcggggtggcaggccctgtcgcgcaactggggccagaactggcagagcaacacgctcctggacgggcaggccctctccttccgcgtcaccaccagcgacggccgctccgtggtctccagcaacgctgccccgcgcggctggggcttcggccagaccttcagcggggcccagttcaactgaacaccctccatcgttcccgcagcgtcgtctcgtccgtcgtcgacgcggtgccacaagtagtagttttccgttggtcgtggtagagtcg

SEQ ID NO: 3375 - DNA, 439 bp, Zea mays
  Clone ID: LIB3061-031-Q1-K1-F5
gccacataaaaagtgtaattaagtgcctacaacagagctactacgactaacacggtaggctccatcataatgctccttgctctttacgcatgtgctgctaacgccacaatactacctcaatgctcacaagctcctatagctttcataattacaacataccttgcatcaatgatagcttgattatgcgaaaacagagctcttcaaccatatacgcttcaacaagcaatcgcagcatgcaacataccattatcacccttgcagtttcaacaatcgccagccctatctttggtgcagtcattggtacaaaccatcatggcacagcagctgcagcaactcgtgctacctgtgatcaaccaagtagctctggcaaacctttctccctactctcagcaacatcaatttcttccattcaaccaactgtctacactgaaccctgctg

SEQ ID NO: 3376 - DNA, 441 bp, Zea mays
  unsure (1)..(441): unsure at all n locations; Clone ID: LIB3061-031-Q1-K1-F6
ggcaggcaggtcggcgaggagggcaggaagaccgaagaccgagccgtgcgggggctcgggacgggaacgggacaggaccccaaaatctcagatccttcctgcccgcccgcccgtgcccgtcgacgcgtcgttcttgccggccgcgcctcacctccgccctctcctcctccagggggatcggatacgccacaggctgcgcgatggtgctgtgggtcttcggctacggctccctcatctggaaccccggcttcgacttcgacgacaaaatcctcggcttcatcaagggctacaagcgcacctttaatctcgcttgcattgaccacagaggcacaccggagcatccggcgaggacctgcacgcttganaccgacgacgaggccatatgctggggaattgcatattgtgtcaagggtggtccagaaaaagagctaanagcaatgc

SEQ ID NO: 3377 - DNA, 441 bp, Zea mays
  Clone ID: LIB3061-031-Q1-K1-F7
aggcacaacaactacaacaacttgtgctaggaaaccttgctgcctactctcagcaacgagcagtttcttccattcaaccaactggctgcattgaactctgctgcttatttgcaacaacaactaccattcagtcagctagctgctgcctacccccagcaatttcttccattcaaccaactggcagcattgaactctgctgcttatttacaacagcaacagctaccaccattcagccagctagctgatgtgagccctgttgccttcttgacacaacaacagttgttgccgttctacctgcacgctgcgcctaacgctggcaccctcttacaactgcaacaattgctgccattcaaccaacttgctttgacaaacccaacaacgttctaccaacaacccatcattggcggtgccctcttttagattgcttatgagttatagttc

SEQ ID NO: 3378 - DNA, 426 bp, Zea mays
  Clone ID: LIB3061-031-Q1-K1-F8
cggacgcgtgggatctgcgtacacggtctccctcttcctgtcagtaatagagggagagtgaggcagcgagtaggagacaaggggaaatggggaagggagcgcaagggagcgatgcggcggcggcgggcggcgaggtggaggagaacatggcggcgtggctggttgccaagaacaccctcaagatcatgcccttcaagctcccgcccgtcggcccttatgatgtccgcgtgcgcatgaaagcagtggggatttgcggcagcgatgtgcactacctcagggagatgcgcatcgcgcacttcgtggtgaaggagccgatggtgatcgggcacgagtgcgcgggcgtggtcgaggaggtgggcgccggcgtgacgcacctgtccgtgggcgaccgcgtggcgctggagccgggcgtcagctgctggcgct

SEQ ID NO: 3379 - DNA, 446 bp, Zea mays
  Clone ID: LIB3061-031-Q1-K1-G1
caatttcttccattcaaccaactgtctacactgaaccctgctgcttatttgcagcaagaacgattaccatttagccagctagctactgcctactctcagcaacaacaacttcttccatttaaccaattggccgcactgaaccccgctgcttatttgcagcagcaaatactactaccatttagccagctagctgcagcaaaccgtgcttccttcttgacacagcaacagttgctgcctttctaccagcagtttgcggctaaccccgcaaccctcttacaactacaacaattgttgccctttgtccaacttgctttgacagacccagcggcctcctaccaacaacacatcattggtggtgccctcttttagattgcttattagttgtaattcaataataaagttttttggatgatgtatgtggccaaccagaaataagaagttacatt

SEQ ID NO: 3380 - DNA, 382 bp, Zea mays
  Clone ID: LIB3061-031-Q1-K1-G10
cggacgcgtgggcggcgctgatggcggcccaggtagcgcagcagctgacggcgatgtgcggcctgcagctgcagcagccaggtccctgcccttgcaacgcagctgccggcggtgtctactactgaggaaactatgtactgtagtaataatgtaatggagccgctgactagctacctagctcgctagtttactcatttagcggcgatgagtaacgtagtgtcacccatcaccatgggtggcagtgtgagcaatgacctgaatgaaccattgaaatggaaaggaataatatataaggaaaaaagatgattggaaaaaaacaaagaaaaaataaaaaaaaaataaaaaaacaaaaaaataaaaaaaaaatacaaaaaaaacaact

SEQ ID NO: 3381 - DNA, 391 bp, Zea mays
  unsure (1)..(391): unsure at all n locations; Clone ID: LIB3061-031-Q1-K1-G11
gaaacacaccaagcgaagcgcactagcaacgacctaacaacaatggctaccaagatgagtagccctccttgcgcttcttgccctttttgtgagcgcaacaaatgcgttcattattccacaatgctcacttgctcctagtgccattattccacagttcctcccaccagttacttcaatgggcttcgaacacctagctgtgcaagccaacatgcaacaacaagcgcttgcggcgagcgtcttacaacaaccaattgcccaattgcaacaacaatccttgccacatctaacaatacaagccatcacaacgcaacagcaacaacagttcctaccagcactgagccacctagccatggtgaaccctgccgnctacttgcaagagcagctgcttgca

SEQ ID NO: 3382 - DNA, 429 bp, Zea mays
  unsure (1)..(429): unsure at all n locations; Clone ID: LIB3061-031-Q1-K1-G12
cagaccattagctttatctactccagagcgcagaagaacccgatcgacaccatgagggtgttgctcgttgccctcgctctcctggctctcgctgcgagcgccacctccacgcatacaagcggcggctgcggctgccagccaccgccgccggttcatctaccgccgccggtgcatctgccacctccggttcacctgccacctccggtgcatctcccaccgccggtccacctgccgccgccggtccacctgccaccgccggtccatgtgccgncgncggttcatctgccgncgncaccatgccactaccctaactcaaccgcccggcctcagcctcatccccagccacacccatgcccgtgccaacagccgcatccaagcccgtgccagctgcagggaacctgccgcgttggcagcaccccgatcctgggc

SEQ ID NO: 3383 - DNA, 442 bp, Zea mays
  Clone ID: LIB3061-031-Q1-K1-G2
ctagcaacatagaaagcacaatagtgtaccaacaatggcagccaaaatattttgcctgcttatgctccttggtctttctgcaagtgctgctacggcgaccattttcccgcaatgctcgcaagctcctatagcttcccttcttcccccgtacctctcaccagcggtgtcttcggtatgtgaaaacccaattcttcaaccctacaggatccaacaggcaatcacagctggcatcttacctttatcacccttgttcctccaacaatcatcagccctattacatcagttacctttggtgcatttattggcacaaaacatcagggcacaacaactacaacaacttgtgctagcaaaccttgctgcctactctcagcaacagcagtttcttccattcaaccaactagctgcattgaactctgcttcttatttgcaacaacaacaacta

SEQ ID NO: 3384 - DNA, 425 bp, Zea mays
  unsure (1)..(425): unsure at all n locations; Clone ID: LIB3061-031-Q1-K1-F10
acgcagcctgccccagctgccagaccctccaagcccaacctaaatataaagatggtgggaaatacggagaaaaatgtgtcctcaccatcgaaacctgctcatgctactgttaatgccctaccgggcgataagggtgttcctaaaaacaaatcacctgatgagccagggtactcaatttttgttaagaatttaccttttgaagcaactgttgaaatggtcgaacaagagttcagcaagtttggtgctattaaatctggtggtgtacaagtcaaatgccagcctgatcagttttgctttggctttgtcgaatttgagtctcagcaatccatgctagcagcaatcgaggcttctagggtttatttcggcacangagaatcatatgttgaagagaaaagaaaccaaacacgagttgttgatggtgttat

SEQ ID NO: 3385 - DNA, 428 bp, Zea mays
  Clone ID: LIB3061-031-Q1-K1-D6
tgttttcaacaatcgccagccctatctttggtgcagtcattggtacaaaccatcagggcacagcagctgcagcaactcgtgctacctgtgatcaaccaagtagctctggcaaacctttctccctactctcagcaacaacaatttcttccattcaaccaactgtctacactgaaccctgctgcttatttgcagcaacaactattaccattcagccagctagctactgcctactctcagcaacaacaacttcttccatttaaccaattggccgcactgaaccccgctgcttatttgcagcagcaaatactactaccatttagccagctagctgcagcaaaccgtgcttccttcttgacacagcaacagttgctgcctttctaccagcagtttgcggctaaccccgcaaccctcttacaactacaacaatt

SEQ ID NO: 3386 - DNA, 440 bp, Zea mays
  Clone ID: LIB3061-031-Q1-K1-D7
cagcattcaaaaacacaccaagcgaagcgcactagcaacgacctaacaccaatggctgccaagatattagccctccttgcgcttcttgcccttttagtgagcgcaacaaatgcgttcattattccacagtgctcacttgctcctagtgccattattccacagttcctcccaccagttacttcaatgggcttcgaacatccagccgtgcaagcctacaggctacaactagcgcttgcggcgagcgccttacaacaaccaattgcccaattgcaacaacaatccttggcacatctaaccctacaaaccattgcaacgcaacaacaacaacaacaacagtttctgccatcactgagccacctagccgtggtgaaccctgtcacctacttgcaacagcagctgcttgcatccaacccacttgctctggcgaacgtagctgcata

SEQ ID NO: 3387 - DNA, 434 bp, Zea mays
  Clone ID: LIB3061-031-Q1-K1-D8
gaaaaatagacagagtgaagaccttgacgtgattgaaggccggaacattaaactgtgtgcattttgttccgatgaacctgattggattgaaatgtttgatgatctgcttcttcaaaccgagaagaaggccacagatctgcgagagctgatgcggaatgaagcttccaagaattctcaggtcacccagacgaaaggaccaagtggaccacggccacggggaaggaaaccaacaaagaaggatgtggtggaccttaggaccatcctcatccactgtgcacaggctgtggcagcagatgaccgcaggactgctaatgaattgttaaagcaaataaggcaccattccaagccaaatggtgatggaacccagaggttagcacattgctttgcagatggtcttgaggctcgattggcaggcacagggagtcagctttacc

SEQ ID NO: 3388 - DNA, 413 bp, Zea mays
  unsure (1)..(413): unsure at all n locations; Clone ID: LIB3061-031-Q1-K1-D9
cagctagcaacatacatagtgaagtacactagcaacatcttagcaccaatgggagcgaagatttttgccctccttgccctccttgctctttcagcaagcgctgctacctcgacttttattccacaatgctcacaacaatacctctctccggtgacagccgcgggatttcaatacccaactatacaatcctacatggtacaagaggccatccaagcaagcatcttacggtcattagcattaaccctccaacaaccatatgctctattgcaacagccatccttagtgcatctgtatctccaaagaatcgcggcacaacaactacaacaacagttgctaccaacaatcaatcaagtagttgcagcgaaccttgctgcttacctncagcaacaacagtttcttccattcaatcaact

SEQ ID NO: 3389 - DNA, 461 bp, Zea mays
  Clone ID: LIB3061-031-Q1-K1-E1
attgagaccaactagcaacatagaaagcacaatagtgtaccaacaatggcagccaaaatattttgcctccttaggcggcttggtctttctgcaagtgctgctacggcgaccattttcccacaatgctcacaagctcctatagcttcccttcttcccccgtacctctcaccagcggtgtcttcggtatgtgaaaacccaattcttcaaccctataggatccaacaggcaatcgcagctggcatcttacctttatcacccttgttcctccaacaatcatcagccctattacagcagttacctttggtgcatttattggcacaaaacatcagggcacaacaactacaacaacttgtgctagcaaaccttgctgcctactctcagcaacaacagtttcttccattcaaccaactagctgcattgaactctgcttcttatttgcaacaacaacaactaccattcag

SEQ ID NO: 3390 - DNA, 390 bp, Zea mays
  unsure (1)..(390): unsure at all n locations; Clone ID: LIB3061-031-Q1-K1-E10
gtggaggtgccggcggagctggtggcggcgggcagccggacgccgtcgcccaagacgaaggcgtcgcagctcgtggggcgcttcctggccgcgtccgagccggccgtgtccgtgcagctcggcgaccacggccacctcgcctactcccacaccaaccaggcgctcctccgccccaggtcgttcgcggccaaggacgaggtgttctgcctgttcgaaggggtgctggacaacctgngtcggctgagccagcagcacgggctgtcaagcaagggcgccaacgaggtgctcctcgtcatcgaggcctacaagacgctgcgcgaccgcgcgccctacccggccagcttcatgctcgcccagctcaccggctcctacgccttcgtcctcttcgac

SEQ ID NO: 3391 - DNA, 374 bp, Zea mays
  Clone ID: LIB3061-031-Q1-K1-E11
gcaacatagaaagcacaatagtgtaccaacaatggcagccaaaatattttgcctcctgatgctccttggtctttctgcaagtgctgctacggcgaccattttcccgcaatgctcgcaagctcctatagcttcccttcttcccccgtacctctcaccagcggtgtcttcggtatgtgaaaacccaattcttcaaccctacaggatccaacaggcaatcacagctggcatcttacctttatcacccttgttcctccaacaatcatcagccctattacatcagttacctttggtgcatttattggcacaaaacatcagggcacaacaactacaacaacttgtgctagcaaaccttgctgcctactctcagcaacagc

SEQ ID NO: 3392 - DNA, 365 bp, Zea mays
  Clone ID: LIB3061-031-Q1-K1-E3
ttatactcctatacctttctgcgaccggctttacaggaaccatgtccccgcaatgctcgcaagctactatagcttcccttcttcccccctacctctcaccacctgagtcttcggtatgttaaaacccaattcttcaaccctacaagatccaacaggcaatcacagctggcatcttacctttatcaccctttatccctacaacaatcatcaaccctattacatcacttaccttctatgcattaattgtcacaaaacattagcccacaacaactacaacaactttgtctaacataccttgctacctactctcagcaacaacactttctttcattcaaccaactagcttcatttaactctgcttctta

SEQ ID NO: 3393 - DNA, 363 bp, Zea mays
  Clone ID: LIB3061-031-Q1-K1-E4
aagaccatcaagcagcatatagagtgcaacccagtagctgcaatatagcaacaatggggacgaacatattttctctccttatgctccttgctattactacatgtgccgctaacgcaacaattgtccctcaatgctcacacgctcctattgctacccttcttgctccatacctttcatgaataatagcttcaacatgtgaaaacccaactcttcaaccatattggcttgaacaatcaatctcatcaggcaacatacctctatcgcactagctgatctaacaattaccagccctatctttggtgcagacatcgctacaaaccatcgagtctcaacagctagctcaactcgtgctacctctgatca

SEQ ID NO: 3394 - DNA, 434 bp, Zea mays
  Clone ID: LIB3061-031-Q1-K1-E5
caacaatggcagccaaaatattttgcctccttatgctccttggtctttctgcaagtgctgctacggcgaccattttcccgcaatgctcgcaagctcctatagcttcccttcttcccccgtacctctcaccagcggtgtcttcggtatgtgaaaacccaattcttcaaccctacaggatccaacaggcaatcacagctggcatcttacctttatcacccttgttcctccaacaatcatcagccctattacatcagttacctttggtgcatttattggcacaaaacatcagggcacaacaactacaacaacttgtgctagcaaaccttgctgcctactctcagcaacagcagtttcttccattcaaccaactagctgcattgaactctgcttcttatttgcaacaacaacaactaccattcagccagctacctgct

SEQ ID NO: 3395 - DNA, 441 bp, Zea mays
  unsure (1)..(441): unsure at all n locations; Clone ID: LIB3061-031-Q1-K1-E6
gtcatgttgcacgtctgtcaacgaagtcatttgccatggaattccagatgccaggagacttgaggatggtgacattgtaaatgttgatgtaactgtatactataaaggtgttcatggtgatttgaatgagacatattttgttggaaatgttgatgaagcttccaaacaccttgtacgttgtacctatgagtgcttggagaaagctattgcgatagttaaacctggagttcggttccgagaggtcggagaagtcataaacagacatgtttcgatgtcaggtttatctgtggtgaaatcttattgtggccatggcataggggaactgtttcactgtgccccanacattcctcattattcaagaaacaaggccgttggtatcatgaaagctgggcagacatttacaattgaaccaatggtcaatgcangggtttggaatgatcg

SEQ ID NO: 3396 - DNA, 440 bp, Zea mays
  unsure (1)..(440): unsure at all n locations; Clone ID: LIB3061-031-Q1-K1-E7
atgttggttgccggtgccccctgctagagggtttaggtgaatacatacatgagaccgacttgaagtgcctctcaacaaggaagtaatggaaagaaaggcaagctaaagaccagcttaacaatgatggtacacatgagaatgttctcttctgttcagaagttatttccaatacaagatatccagttcggagcaaagatagacgcctgtactgttcagaagttattccaataccaaatagcatgcttcagaagcacacaaaaactatggcattgttcttggtggtccctgtgcccgttcactaggagcgagatntggggatcttgagtaccattgcatggctgntgttaggctgttagcccatcgctatcgtgccgggnaattaactatggtgaggctaggagaaaatgaactgatgtggattggacacgcgcttttggaaa

SEQ ID NO: 3397 - DNA, 442 bp, Zea mays
  Clone ID: LIB3061-031-Q1-K1-E8
gcaacatagaaagcacaatagtgtaccaacaatggcagccaaaatattttgccgccgtatgctccttggtctttctgcaagtgctgctacggcgaccattttcccacaatgctcacaagctcctatagcttcccttcttcccccgtacctctcaccagcggtgtcttcggtatgtgaaaacccaattcttcaaccctataggatccaacaggcaatcgcagctggcatcttacctttatcacccttgttcctccaacaatcatcagccctattacagcagttacctttggtgcatttattggcacaaaacatcagggcacaacaactacaacaacttgtgctagcaaaccttgctgcctactctcagcaacaacagtttcttccattcaaccaactagctgcattgaactctgcttcttatttgcaacaacaacaactacca

SEQ ID NO: 3398 - DNA, 397 bp, Zea mays
  Clone ID: LIB3061-031-Q1-K1-E9
ggaaaataaactccgacattgcaattgagttgaatgagtccaagattgagaagttattattggagaaaagggaggtgcagatggaaagagaattactgctggaggaaagaaagaaaacggagactgacaaggcagatattagaagggatattgagagtctgcactcattgagcaagagtttgaaggaacgtcgagaggcatataacagggacaggagcagactcatcgaactatttgaaaagtacaaggcgtgcaaaaactgtgggatttctatttttgagggattggattctctgctgcttaaagacagtgctgaaattgagcatccaagtttggctgttgagggagatgatcatgccttgaccaccgatacatcaggtccagatacaggaaccct

SEQ ID NO: 3399 - DNA, 395 bp, Zea mays
  unsure (1)..(395): unsure at all n locations; Clone ID: LIB3061-031-Q1-K1-F1
ggattcccgccgagagtcgaagtgccaagccaacgcaggtgcagatggcggttgagcaccacctcccgccggagcacgcggagcacgactagnagcggcaggaagggggtccacgccgacgacctgaagccgctctggtggcgccgcagcccccggtacagctactactacggctgtggcgagggcagtggctcggtccgcgccctatgcttctccgacctcatactgatcctggccctggtgatcacccttctggttctctactatcattactgacacgtcacacccaaactatggcattacccttggtcgtcgttctggcccttcacatacgacccagattacgtgatcttgagcaccatcgcatgcctgttgctaggcatctagctcatcgc

SEQ ID NO: 3400 - DNA, 443 bp, Zea mays
  unsure (1)..(443): unsure at all n locations; Clone ID: LIB3061-031-Q1-K1-D5
gcacagcagagcccagataatccaaactggtttcagggtactgcagatgctgtaagggagtacttgtggttgtttgaggagcataatgtgatggaatttctaattcttgctggcgatcacctgtaccggatggactatgaaaagttcattcaggcacacagagaaacaaatgctgatattaccgttgctgccctaccgatggatgagaaacgtgcaactgcatttggcctcatgaaaattgatgaagaagggaggatcattgagtttgctgagaaaccgaaaggagagcagttgaaagcaatgatggttgacaccaccatacttggccttgatgacgtgagggcaaaggaaatgccttatattgctagcatgggtatctatgttttcagcaaagatgtaatgcttcagcttctncgtgaacaattttctgaagccaatgactt

SEQ ID NO: 3401 - DNA, 426 bp, Zea mays
  Clone ID: LIB3061-012-Q1-K1-G8
catacaaagcacaataatataccaacaattgcttccaaaacattctgcttccttatgcgactggatctttctgcaagtgtatgctacctgatccatgtacatacattgctcacacgctactatagcttccattcttacaccatacctttgaccacctgtgtcttcaatgcgtgaaaccccaattgagcaaccttacaggatccaacactctataacaacaggcattttaccatgatcacccttgttcctacaacaaccgatagccctattacatcaaacacttctgatccatatgtttgcacaaaacatcatggcacaacatctacaacaacatgctctagcaaatcttgctacatactctcatcaacatcattctcgtgcatgcaactaactactttcattgcactcagctgcttattttcaaca

SEQ ID NO: 3402 - DNA, 423 bp, Zea mays
  Clone ID: LIB3061-012-Q1-K1-G9
ccaacaagcaacatagaaagtgtaatccagtagcaacaatagagcaacaatggcgacgaagatactttccctccttatgctccttgctctttctgcatgtgttgctaacgcgacaattttccctcaatgctcacaagctcctatagcttcccttcttcccccataccttccatcaatgatagcttcagtatgtgaaaacccagctcttcaaccctataggctccaacaagcaatcgcagcaagcaacatacctttatcacccttgtttcaacaatcgccagccctatctttggtgcagtcattggtacaaaccatcaaggcacagcagctgcagcaactcgtgctacctgtgatcaaccaagtagctctggcaaacctttctccctactatcagcaacaacaatttcttccattcaaccaact

SEQ ID NO: 3403 - DNA, 346 bp, Zea mays
  Clone ID: LIB3061-012-Q1-K1-H1
cccacgcgtacggaaagcacaatagtgtaccaacaatggcagccaacatattttgccgcctgatgctccttggtctttctgcaagtgctgctacggcgaccattttcccgcactgctcgcaagctcctatagcttcccttcatcccccgtacctttcaccaacggtgtctatagtatgtgaaaacccaattcttcaaccctacaggatccaactggcagtcacagctggcatcttacctttatcacccttgttcctacaacaatcagcagccctattacatgagttacctttggtgcatttattggcacaaaacatcagggcacaacaactacaacaacttgtgct

SEQ ID NO: 3404 - DNA, 397 bp, Zea mays
  Clone ID: LIB3061-012-Q1-K1-H10
tcgagcacattgacagcgcaacactacgaagtaccatgcagtccgatagatctagcgacggggtcttccttgatattacagcaactgctgctacagtgactgttagcaccgcgctgctaacgctcgcatatatcgataatgattactcggtgcttatcaccagccaccgcaattaacaagagtaatccactattcctgctactgttcacattccagcaggcaaccacaactaggacagctacgacttgcggctcgtgcctaccaccatcatgaggactattatatgcaacaatactggtgaattcacaggcacaaaacattagggctgaaacagcagcaactccagctctagcagccatcactgcctaatctaaccaaggtcaatccagtcacatta

SEQ ID NO: 3405 - DNA, 405 bp, Zea mays
  Clone ID: LIB3061-012-Q1-K1-H11
tgagaacaagcctgtcacaaactgcctttacactcatgagatacacctagggcaaggtcttcatatgctcaagatatgtcaacgatcatgtcagcaaaacttccatcctcgacgactttgccttctatgagagccgccagaagttgatgcaagataagaggtccaaacagcagcatctccaaaatcaggtctggtacactaggacccccgtttctgtcaccggcgaactaccacaggaacctgctaatgggaagcccaatccgtccataccagatggtgtcaccgcagacgtgaatgccttgaacgctcccgcagagaacggaatcactgctcctgttgtttcctatgcagcataagtggcccatacagcaccagagaaacccgtcctctccaacggagtcgcca

SEQ ID NO: 3406 - DNA, 313 bp, Zea mays
  Clone ID: LIB3061-012-Q1-K1-H12
gatctacccacgcgtacgggctgaccagatcgtctcttgtttgaatgagtactttgacggcaaattgagtgcgtggacgatagttgatcctattcctgacgtcaacaatgagcctgttaaggtgcaatggctgctgaccacttccactatttcgtgtctcaaatctggctaagatgtccttactgtactctattacccgttacgcgaacacttcacgaagctcatgccactgttggacgaatcaaccaccactctaccaaacgacctatagactcagccttccttaatggacccaaatgtccatggacattcc

SEQ ID NO: 3407 - DNA, 399 bp, Zea mays
  Clone ID: LIB3061-012-Q1-K1-H2
catagaaagcacaatagtgtaccaacaatggctgccaaaatattttgcttccttatggtccgggatctttatgcaagtgttgctaccgcaaccattttcccacaatgctcacaagctcctatagcttcccttctttcctcatacctctcaccatccgcgtcttcaatgtgtgataccaccattctccaaccctacacgatccaatatgcaatcacaacatgcatattaccattatcacccttgatcctgcaacatccgtcaatcctattacagtaactacctctgctccatttatgtggcacaaaacatcaggtgcacaacatctacaacaacttgtgctagcacacctagctgcatactcataccaacatctacatcttccattcaaccaactggctg

SEQ ID NO: 3408 - DNA, 344 bp, Zea mays
  Clone ID: LIB3061-012-Q1-K1-H3
gctctgtgcgctcacacacgcgggttttcatcacccaactatacaatcctacatgcgtcaggatgatcatacaacaacatcatctaacattaactaactccttaacccaccaacacacctttaccttattgctccaaacctactacatccatctgtctttccacataatttacatcaatcatctccagaagctgatgtctaccaacatcaacaacagtattagcaccaacaataactgctactacaccacatccacacaacaacatcattgagtaagccaacttcaacataaccaactatcacaatgccatgtgcaacaacaccaacagttacatgaactacac

SEQ ID NO: 3409 - DNA, 385 bp, Zea mays
  Clone ID: LIB3061-012-Q1-K1-H4
cttgctcctagtgccattattcgacagttcctaccaacagttacttaaatggggttggtacacctacatatgcaggccaacatgcaccatcaagcgctcgctgctagcgtcttacatcaaccaattgcccaatctcatcatcaatcgcttccacatctaacatatacaagccatcacaacgcagcagcatcaacaattcgcactagcactgaaccacctagccatagtgaaccctgaacgatacttgcaagagcatctgcttgcattcgatccacttgctgtggccaacgtagttgcataaccacacagcaacatctacttacaacagtgcatgccaacgatcagtctactagccatggtgaaccatgtctactacgtacaacaa

SEQ ID NO: 3410 - DNA, 427 bp, Zea mays
  Clone ID: LIB3061-012-Q1-K1-H5
caagcaacataggaagtggaatccaccatcaacaacagagcaacaatggcgacgaagagatcttccctccttatgctccttgctctttctgcatgtgtagctaacgcgacaattttccctcaatgctcacaagctcctatagcttgccttcttcccccataccttccatcaatgatagcttcagtatgtgaaaacccagctcttcagccctataggctacaacaagcaatcgcagcatgcaacatacctttatcacccttgatgattcaacaatcgtcagccatatctttggcgcagtcattgctacaaaccatcagggcacagcagttgaagaaactcgcgctacctgtgatcaaccaagtagctatggcaaacctttctccctactctcagcatcaacaatttcttccattcaaccaactgtcta

SEQ ID NO: 3411 - DNA, 428 bp, Zea mays
  Clone ID: LIB3061-012-Q1-K1-H6
tctcggccgggccctcgcgaggccgccgtggaaggacccccagcgatgggcggcggggaggaggacacaggaggcggaggaggggcggtgcggcgcgcggtgctgaaggcgctcgtggttgtcggcggcgtcctgctgctccgccgcctgcgccgctccactacccgatgggaccacgcgcgagccgtcgccgacgcgctctccggagaaaagttctcgagggagcaggcgaggaaggatcctgacaacttcttcaatttgagaatgctcacatgtcctgcaaccgagatggtggatggttcaagggtgctctactttgagcaggcattttggagatctccagactagccttgtagacacagattctacatggtcaagccctgtccgaaggagatgaaatgcgatgttgagttgagttcatatgcaat

SEQ ID NO: 3412 - DNA, 432 bp, Zea mays
  unsure (1)..(432): unsure at all n locations; Clone ID: LIB3061-012-Q1-K1-H7
gcgctgtccggtcacagacgcgggatttcaacacccaactatacaatcctacatgcggcaggatgccatcgtagcaagcatcttacggtcattagcattaaccctccaacagccatatgccctattgcaacaaccatccttagtgcatctgtatctccaaagaatcgcgacacaacaactacaacaacagttgctaccaacaatcaatcaagtagttgcagcgaaccttgctgcttatctncagcaacaacaatctctttcattcaatcaactagctgcggtgaaccctgctgtctactggcaggcacaacaactcctacaatttaaccaacttgtcggaagccctaatgccttctaactgcaccaccagcttctgccattccatctgcaagctgtggaaaacattgcttctttcttgcgacaacaacaatt

SEQ ID NO: 3413 - DNA, 428 bp, Zea mays
  Clone ID: LIB3061-012-Q1-K1-H8
gcaaaccatggacatggctttggcgtctaaagcctcccctccgccatggaaggccagcgccgccgagcagccaattccaaagcgtgacaaagccgctgcaaatgattcaacatacctcaatcctcaagctcatgatagtgttcttggaatcattctgggaggtggtgctgggactagattgtaccccttgacaaagaagcgtgccaagcctgcagtgccattgggtgccaactatagactgattgatattcctgtcagcaattgtctcaacagcaacatatccaagatctatgtgctaacgcaatttaactctgcttccctcaaccgtcacctctcaagagcctacgggagcaacattggagggtacatgaatgaagggtctgttgaagtcttagctgcacagcatagcccagataatccaaactggt

SEQ ID NO: 3414 - DNA, 423 bp, Zea mays
  Clone ID: LIB3061-012-Q1-K1-H9
attgagaccaacaagcaacatataaagtggaatccagtagcaacaatagagcggcaagggcgaccaagatatttgccctccttatgctccttgctctttctacatgtgttgctaacgcgacaattttccctcaatgctcacaagctcctatagcttcccttcttcccccataccttccatcaattatagcttcaatatgtgaaaacccagctcttcaaccatataggcttcaacaagcaatcgcagcaagcaacatacctttatcgcccttgttgtttcaacaatcgccagccctatctttggtgcagtcattggtacaaaccatcagggcacaacagctgcagcaactcgtgctacctctgatcaaccaagtagctctggcaaacctttctccctactctcagcaacaacaatttcttccat

SEQ ID NO: 3415 - DNA, 375 bp, Zea mays
  Clone ID: LIB3061-013-Q1-K1-A1
aaaacatatcacatcaccaccctttgtctcgctcgaagtcaaggaactcttaggtgggcaaggtaaggtagccaaactttatgctagaccagtagagggcttgaggcaagagagccaaacatggcaaggtgatccataactaaataaacttacttaaacaatcatctatgtaaaatatagcatgtgtatggtttcaggtttgcacttgcattttatgggaatccaactcgaccacaactcatagcccttgttgctcaagaagaggttacttcgtctggtcgtcagtttgaaccgcctggcatgcacatgatctatcttccatactccgatgatattagatatcctgaagaagttcatgtgacttctgatgatgca

SEQ ID NO: 3416 - DNA, 425 bp, Zea mays
  unsure (1)..(425): unsure at all n locations; Clone ID: LIB3061-012-Q1-K1-G7
caacaagcaacatataaagcggaatccagtagcaacaatagagcaacaatggcgaccaggatattttccctgcttatgctccttgctctttctacatgtgttgctaacgcgacaattttccctcaatgctcacaagctcctatagcttcccttcttcccccataccttccatcaattatagcttcaatatgtgaaaacccagctcttcaaccatataggcttcaacaagcaatcgcagcaagcaacatacctttatcgcccttgctgtttcaacaatcgccagccctatctttggtgcagtcattggtacaaaccatcanggcacaacagctgcagcaactcgtgctacctctgatcaaccaagtagctctggcaaacctttctccctactctcagcaacaacaatttcttccattcaaccaact

SEQ ID NO: 3417 - DNA, 372 bp, Zea mays
  Clone ID: LIB3061-012-Q1-K1-F10
cagctagcatcatataaagcacaatcttgtaccaacaatggctgccaaaatattttgcctccttatgctccttggtatttctgcaagtgctgctacggcgaccattttcccgcaatgctcacaagctcctatagcttctcttcttaccccgtacctatcaccagcagtgtgttcagcatgctaaaacccaattcgttaaccatacaggatccaacatgcaatcgcacctggcatactacctttatcaccctagttcctgcaacaatcatcagcccttatacagcagttcacctatggtgcatttattgtcacaatacatcatggcacaacaactacaacaacttgtgctagcaaacctagctgtctactctc

SEQ ID NO: 3418 - DNA, 420 bp, Zea mays
  Clone ID: LIB3061-012-Q1-K1-F12
cttcagtatgtgaaaacccaattctttaaccctacaggatccaacaggcaagggcagcatgcatcttacctttatcacccttgttcctccaacaaccgtcagccctattacagcagttacctttggtgcatttgttggcacaaaacatcaaggcacaacaactacaacaacttgtgctaggaaaccttgctgcctactctcagcaacagcagtttcttccattcaaccaactggctgcattgaactctgctgcttatttgcaacaacaactaccattcagtcagctagctgctgcctacccccagcaatttcttccattcaaccaactggcagcattgaactctgctgcttatttacaacagcaacagctaccaccattcagccagctagctgatgtgagccctgttgccttcttgacac

SEQ ID NO: 3419 - DNA, 312 bp, Zea mays
  Clone ID: LIB3061-012-Q1-K1-F2
tcgactcaagccacgcgtcatttggtggcacgaaacataggatcacatcatctacagcaacttgtactagtaggcctggctgcctactctcagcacctacttcaaccttacatcacaaccaactgtctacatagaactctgcagccaattctcagcttcacctaccatttactcagctagcggctgattacctgactgaatctgcaacatataaccaactgtcaccagagcactctgctgctctattgacaacaacgtgagttatcaccattcacacagctagcatatatgatacctgttgacttattgaca

SEQ ID NO: 3420 - DNA, 282 bp, Zea mays
  Clone ID: LIB3061-012-Q1-K1-F4
cggtttctccagtctcgactcaagcgacccatcaggcgatcacaactgacatcttacctttttcaccctcgttccatgcaacactaagggaggggtattacatcagttacgtgtggtgcatctattgctactaatcatcatggctcaacaggttctaccgcttgcgctagcaaacctgtgtctctactgtcaccagcagtatacggtggcattcatctaagtcgactgctggaagtatgcttactagctgcaacgctaacatctaccatacagctacttact

SEQ ID NO: 3421 - DNA, 465 bp, Zea mays
  Clone ID: LIB3061-012-Q1-K1-F5
ccggatttgaattctcgactcaagccacccgttcgtgacaaggcctagcatacactgttgtctactcttaacaccaacatcaatttgcgttgaatcaactactctggacttgaacgtctgctaactatatttaacataacaccgactaccatacaaccagaaacctgctgcctacccccagcaattacttccattcaaccaactggcaacattgaactctactgcttatttacagcagcagcaactactaccattcagccagctagctgaagtaagccctgctaccttgttgatacaaccacagttgatgccgttctaccaacacgctgcgcctaacgctgtcaccatcttacaactgcaacaattgctgccattcaaccaactagctttgacaaacacagcagcgatctaccaacaacccatcattggtggtgccctctttgagatgtctcacgagttatagtt

SEQ ID NO: 3422 - DNA, 426 bp, Zea mays
  unsure (1)..(426): unsure at all n locations; Clone ID: LIB3061-012-Q1-K1-F6
ctggttggaagagagagaggatcagatgatgatgagctcaatgaagctgtgggggggaggtctgaaccgaaaaacctagttcaaccaaatgcatcggtacccttgacctcacaaggctttaaccaattattggatcaacccgggccttctgatccttctgttgtatacaaggacagtatctgcaaccgatgtgggaaagtagcaggagctggtagcgttctcaaatgttacaggtgcatgctaccttgccacatttcatgcattgaggctactggttcacccatttcaactggaaagtggtgttgtaaaaactgcagcgctggcactaaggaaccagttgaaggagacatggtcttagcccatggcaatccaaattgcttgcatgaaagttgtgtcgtctgcgacagacttgcggnctgcaggtct

SEQ ID NO: 3423 - DNA, 412 bp, Zea mays
  Clone ID: LIB3061-012-Q1-K1-F8
cagtagtcgaccaagcacaagctgcagtgccggccggaatatgtggacgatcgggagggtggcgacgccgcaggtggccgtcctcctgctgctcctcatcgtcgttgcgcaggaggcggcgccgttggcggaggcgcgcgtgtgccggcgccggagcgcgggcttcaagggggtctgcatgtccgaccacaactgcgcgcaggtgtgcttgcaggaaggctacggcggcggcaactgcgacggcatcatgcgccagtgcaagtgcatcagggagtgctagctagctagcagctataccggcctttaattaaattaataaggatcgacgtcgcggtcggtcgctaaatatgtactactatacgtctacactacatgcaataatgcaccacatgtacgcgtacgcgcgccgagc

SEQ ID NO: 3424 - DNA, 420 bp, Zea mays
  Clone ID: LIB3061-012-Q1-K1-F9
gcatcatagaaagtggaatacagtagcatcaatagagcaacaatggcggccgagatagtttccatccttatgctccttgctctttctgcatgtgttgctaacgcgaccatttttcctcaatactcacaagctcctatagctgcccttcttaccccataccttccatcaatgaccgcttcagtttgtgaaaacccagcccttcaaccctacaggctccaacaagcaatcgcaacaagcaacttacctttatcacccctgttctttcaacaatcgccagccctatctttggtgcagtcattggtacaaaccatcatggcacaacagctgcaacaactcgtgctaccagtgatcagccaagtagctctggcaaacctttctccctactctcagcaacaacaatttcttccattcaaccaactg

SEQ ID NO: 3425 - DNA, 410 bp, Zea mays
  Clone ID: LIB3061-012-Q1-K1-G1
ccaactagcaacatagaaagcacactagtgtaccaacaatggcagccaaaatattcaggcttgttatgctacttggtctcactgcaagtgctgctacggcgaccattgtcccgcaatgctcgcaagctcctatagcttcccttcttccctggtacctgtcaccagcggcgtcttcggtatgtgaaaacccaattcttcaaccctacaagatccaacaggcaatcacagctggcatcttacctttatcacccttgttcctccaacaatcatcagccctattacatcagttacctttggtgcatctattggcacaaaacatcagggcacaacaactacaacaacttgtgctagcataccttgctgcctactctcagcaacagcagtttcttgcattcaaccaactagctgca

SEQ ID NO: 3426 - DNA, 432 bp, Zea mays
  Clone ID: LIB3061-012-Q1-K1-G10
acgtaccgtccgcggcacgctcgcaagctcctattgcttcccttcttcccccgtacctctcacgagcggggtcttcggtatgtgaaaacccaattcttcaaccctacaggatccaacaggcaatcgcagctggcatcttacctttatcacccttgttcctccaacaatcatcagccctattacaacagttacctttggtgcatttattggcacaaaacatcagggcacaacaactacaacaacttgtgctagcaaaccttgctgcctactctcagcaacagcagtttcttccattcaaccaactaggttcattgaactctgcttcttatttgcaacaacaacaactaccattcagccagctacctgctgcctacccccagcaatttcttccattcaaccaactagcagcattgaactctcctgcttatttac

SEQ ID NO: 3427 - DNA, 275 bp, Zea mays
  Clone ID: LIB3061-012-Q1-K1-G11
gtgagccctgctaccttcttgatacaaccacagttgttgccgttctaccagcgggcggggcctaacgctgtcacggctgttacaactgcaacaattgctgccattcaaccaacttgctttgacaaacccagcagcgttctaccaacatcccatcattgttggtgcccttttttagattacttatgagtaatagtacaataatatagttgcttgtctgatgtatgaggctttccagaaatatgaaagtacatttgtagataatgctgaaataagga

SEQ ID NO: 3428 - DNA, 401 bp, Zea mays
  Clone ID: LIB3061-012-Q1-K1-G2
gcgaagtagaccaccaagcacaagctgcatatccggccggaatatgtggactatcggcagggtctctacaccgaatgtggccgttctcctgctgctccttatcgtcgatccccacgaagccgtgccttattccaaagcgctcatttgctggtaccggatcgcgggctcaaatggtgtcatcatgtcctaccacaactgcgcgcacgtgtgctgtgcatgaagtctacggtacgagcagctgctacggcatcatgctccatgcacgtgcatcacggattgctagctagctatcagctattccgcactttaattccattaatacggatcgacgtctccgtcggtcactacatatgtgctactatacgtgtacactacatgcagtatatgtccacatgtactcg

SEQ ID NO: 3429 - DNA, 310 bp, Zea mays
  Clone ID: LIB3061-012-Q1-K1-G3
gacacgacgcctgacatttagcgagtctcttgacgcaagtcgagcttccttcttgacacgtcaacagttgctgcctttgtacaagcagcttgctgctaaccccgcaaccgtcttacaactacaacaatgcttgcactctgctcaacttgctttgacaaacccatccgtctcataccaacaacacatcattggtggtgccctattttatatcgaatattagctgtaattcactattaaagctttcaggatgatgtatgcggccaaccagaaatacaaagctacattctcagattctaacgtgatattggtc

SEQ ID NO: 3430 - DNA, 408 bp, Zea mays
  Clone ID: LIB3061-012-Q1-K1-G4
cgaactgttcaaccctacaggatccaataggctttcgcagcaggcatcttaccttaggacggttgttcctacaacatccgtctgccctatcacagtacgcaccttgggagcatttgatgggacaaaacattagggcacagctactacaacaacttgtgctagcaaaccttgctgcatactctgagcaacatcagttccttccattcaaccaactggctagcattgaactctgctgcttatttgcaacaacaatgaccattcagccagctagttgctgtctaccaccagcaattgcttccattcaacctactagcagcattgaactctgctgctcatttacagctgcaacaactactaccattcagcctgctagctgatgtgagccctgctgacttcttgacacaacaa

SEQ ID NO: 3431 - DNA, 383 bp, Zea mays
  Clone ID: LIB3061-012-Q1-K1-G5
cggacgcgtgggtgagaccagcaggcatcatagagagtagaatccattagcggcaagggatcatcaatggcgaccaagatattgcccctacttatgctccttgctctttctacatgtgttgctaacgcgacaattttccctcaatgctcacaagctcctatagcttcccttctttccgcataccttccatcaattatagcttcagtatgtgaaaacccagctgttcaaccatataggctataacaagcaatcgtagcacgctacatacctctatcgcccttgttgtctcaacagtcaccagcgctatctttggtgcagtcattgctactaaccatcatggcacaacagctgcaggatctcgagctacctgtgatcaaccaagt

SEQ ID NO: 3432 - DNA, 404 bp, Zea mays
  Clone ID: LIB3061-012-Q1-K1-G6
attttgagcattcagaaacacaccaagcgaagcgcactagcaacaacctaacgacagtggctaccaagatattatccgtacttgcgcttcttgcgctttttgcgagcgcaacacatgcgtccattattccacaatgctcacttgctcctagttccattattccacagttactaccaccagttacttcaatggccttagaacacccagctgtgcaagcctataggctacaacatgcgattgccgccagcgtcttacaacaaccaattgcccaattgcaacaacaatccttggcacatctaacaatacagaccattgtaacgcatcagcaacaacaggtcctaccagcactgagccacctagccatggtgaaccctgtcgcctacttgcaacagcagctgcttgca

SEQ ID NO: 3433 - DNA, 412 bp, Zea mays
  Clone ID: LIB3061-012-Q1-K1-F1
gctgctgagaaggcaaaggttgaactttcgtctacttctcagacagaaatcaatcgggcatgcataacagctgatgcttcaggggcaaaacatttgaacatcacactgacaaggtcaaaatttgaatctcttgtacacaatctgattgagagaactagagatccatgcaagaactgtttgaaggatgccggaatatctactaaagaggtggatgaagtacttcttgttggtggaatgactagggttccaaaggtgcaggaggtagtctctgaaatctttgggaagaacccaagcaaaggagtcaatccagatgaagctgtggccatgggtgctgcacttcaaggtggcattctccgtggagatgttaaggagcttcttcttcttgatgttactgccctgtcactaggtattg

SEQ ID NO: 3434 - DNA, 418 bp, Zea mays
  unsure (1)..(418): unsure at all n locations; Clone ID: LIB3061-012-Q1-K1-D2
caccaacgcaaattgcaccaagaaatccatcgagaggccgtcgacaggggaattaagggcggcgtcgtctagcagcagccaccgccgcctcatcctcgcagccgccgtcctgctctccgtgctcgcggctgccagcgccagcgccgggacctcctgcgtgccggggtgggccatcccgcacaacccgctcccgagctgccgctggtacgtgaccagccggacctgcggcatcgggccgcgcctcccgtggccggagctgaagaggagatgctgccgggagctggcggacatcccggcgtactgccggtgcacggcgctgagcatcctcatggacggcgcgatcccgccgggcccggacgcgcagctggagggccgnctagaggccctgccgggctgcccgcgggaggtgcagagggga

SEQ ID NO: 3435 - DNA, 387 bp, Zea mays
  Clone ID: LIB3061-012-Q1-K1-D5
cggacgcgtgggttgcgcttcttgccctttttgtgagtgcaacaaatgcgttcattgttggacaatgctcacttgctccgagtgccattattccacagttcctccctccagttacttcaatgggcttcgaacacccagctgtgcaagcctataggctacaacaagcgcttgcggcgagcgtcttagaacaaccaattgcccaattacaacaacaatccttagcacatctaaccatacaaaccatcgcaacgcagcagcaacaagcactgagccacctagccgtggtgaaccctatcgcctacttgcaacaacagctgcttgcatccaacccacttgctttggcaaacgtagctgcataccaacaacaacaacagttgcaacagtttc

SEQ ID NO: 3436 - DNA, 364 bp, Zea mays
  Clone ID: LIB3061-012-Q1-K1-D7
acgccagcaagcaacatataacgtcagaatccattaccaacaatagagcaacaatggcgagcaagatgattttccctccttatgctccttgctctttctacatgtgttgctaacgcgacaattttccctcaatgctcacaagctcctatagcttcccttcttcccccataccttccatcaattatagcttcagtatgtgaaaacccagctcttcaaccatataggcttcaacaagcaatcgcagcaagcaacatacctttatcgcccttgttgtttcaacaatcaccagccctatctttggtgcactcattggtacaaaccatcaaggcacaacagctgcagcaactcgtgctacctgtgatca

SEQ ID NO: 3437 - DNA, 376 bp, Zea mays
  Clone ID: LIB3061-012-Q1-K1-D8
tcgcaagtgtcctttctccatctttctccttcactccactcccaagtccccaccaggccggacccagtctctccactgaggcgcacgcttcgcttccgctacgctcggctcgagcagaatataatgcaacgggcagtgcacgccgtcaggccacacggcaatgttcttaaatatgctgttctacatcacatcagcgctcacaagccagcaatgcttgctgctgactttactagtgtcatgtcagttacatctgctcgcctataggatcgaggataggcactggcactgtagcagatgtctcgaatcctaaagggaacatggctgatgactcttcgctctggtgcaccacaaacgttaccgtctatgacgctgtcaa

SEQ ID NO: 3438 - DNA, 430 bp, Zea mays
  Clone ID: LIB3061-012-Q1-K1-D9
tcggagcgagcgcagcaaatgcgatcattattacacagagctcacttgctcctagtgccaggatggcacagttcctaccaccagttacttcaatgggcttcgaacatccagccgtgcaagcctacaggctacaactagcgcttgcggcgagcgccttacaacaaccaattgcccaattgcaacaacaatccttggcacatctaaccctacaaaccattgcaacgcaacaacaacaacaacaacagtttctgccatcactgagccacctagccgtggtgaaccctgtcacctacttgcaacagcagctgcttgcatccaacccacttgctctggcgaacgtagctgcataccagcaacaacaacagctgcaacagtttatgccagtgctcagtcaactagccatggtgaaccctgccgtctacctacaact

SEQ ID NO: 3439 - DNA, 369 bp, Zea mays
  Clone ID: LIB3061-012-Q1-K1-E1
ccagcaagcaacatagaaagtagaatccattatcaacaatagagcaacaatggcgaggaaggtattttccctccttatgctccttgctctttctacatgtgttgctaacgcgacaattttccctcaatgctcacaagctcctatagcttcccttcttcccccataccttccatcaattatagcttcagtatgtgaaaacccagctcttcaaccatataggcttcaacaagcaatcgcagcaagcaacatacctttatcgcccttgttgtttcaacaatcaccagccctatctttggtgcagtcattggtacaaaccatcaaggcacaacagctgcagcaactcgtgctacctgtgatcaaccaagtagc

SEQ ID NO: 3440 - DNA, 111 bp, Zea mays
  Clone ID: LIB3061-012-Q1-K1-E10
cttttagattacatatgagatgtactcgacaatggtgccctcataccgacatgtgtgtgctagaaataatcaatatattgattgagatttatctcgatatatttctgaact

SEQ ID NO: 3441 - DNA, 288 bp, Zea mays
  Clone ID: LIB3061-012-Q1-K1-E12
atcacattgatgcgctcgtgagtctgatcgtgattactgcatagggccaaggtgtggaggttgaatcgccagcagttgcttcatccccaactccagatgatgctgaatcacacgccttatgtgctgaagaggactacatctattctgttgacctattactttaggagaccgcttatgtctataacgctgcttcagagcgtcctacaactgccaatgctattgactctaatatcgtatctgtgtactcatctactgtactcgtactggatcaatgagacgattatactg

SEQ ID NO: 3442 - DNA, 428 bp, Zea mays
  Clone ID: LIB3061-012-Q1-K1-E2
cttgcctgcccgtgactacctcgctgtcccctctcagtgtccaagcgacgacaccaggccggcgagatgtggatctcagattccgcctttgtggagccctcatcttcctccccatccgcctctgcctccccgccgccgagcccgccaccagcacgccttctccgccaacgcaaccgtcgccgacgccgcatcagccggaaacagggcagtgccagcgccgtcgacggcgtcgccgaccccgaggcggatgacgtgtggcgtggggcgcagtgtgaggcggcgtggccggcgaggcgggactcgaaacccgtcgtgctcgcggtcggagacgacgcggtggggcggtccaggagcctcacggacgacgacctcgaggagctcaagggatgcgccgacctgggcttcggcttcaactacgacgagatccc

SEQ ID NO: 3443 - DNA, 226 bp, Zea mays
  Clone ID: LIB3061-012-Q1-K1-E3
gcttcctcaagctcatcaagagtggactttgaagctggtgcatggcatcaatcacagggaccaacaatcacattcacgaacaatcacattcgcgacagcatacggcctgcacagcagtaactgggatctgccatgctacatctctgtcacatctatagagactggcgtattacctggacgctgaatccaacggtgcctgcttgtgacaagtggtacactggatgcc

SEQ ID NO: 3444 - DNA, 420 bp, Zea mays
  Clone ID: LIB3061-012-Q1-K1-E4
agaaagtagaatccattagcaacaatagagcatcaatggcgaccaagatattttccgtcggatgctccttgctctttctacatgtgttgctaacgcgacaattttccctcaatgctcacaagctcctatagcttcccttcttcccccataccttccatcaattatagcttcagtatgtgaaaacccagctcttcaaccatataggcttcaacaagcaatcgcagcaagcaacatacctttatcgcccttgttgtttcaacaatcaccagccctatctttggtgcagtcattggtacaaaccatcagggcacaacagctgcagcaactcgtgctacctgtgatcaaccaagtagctctggcaaacctttctccctactctcagcaacaacaatttcttccattcaaccaactgtctacact

SEQ ID NO: 3445 - DNA, 391 bp, Zea mays
  Clone ID: LIB3061-012-Q1-K1-E5
gcttcctgaagctcatcaagattggacattgtagctggtgcatggcatcaatcacagtcggcaacaatcacattcacgaacaatcacattcgcgacagaatacgggctggacagcagtaactgggatctgcgatcctacagctcgattccatcttttcagccgggcatattatcttgaggctgaatctaaaggcgcaagtctggtcctagtggtacctgggatgccattcacttatggttactgtacatactatcatcacacccaacagcgtccgaaactcgctctggggcatccttagatttggagacattaatcaagactagctcttgattgctgtctgctggcatgttctgatgttatattctggctgcatacatgaggcatcatacc

SEQ ID NO: 3446 - DNA, 402 bp, Zea mays
  unsure (1)..(402): unsure at all n locations; Clone ID: LIB3061-012-Q1-K1-E6
agatcaggcgctttggctcatggcctgtagcaatccatgttggaacgaagtgtgagggtagttttggaaggccctatttgcaaaggaaaccgagtcatgggatggcacacagtccagactgttcagaagaagagttcgactcgtcgattcccaattggcttctctgcatttgctttcaacagcacaatgttgtgggaccctcacagatggaaccgcccacctatggattctgatatggtccactcaggtggaagaggtggtttgcaggaatcacgatttatagaaaagctcgttaagaacgagcgccaggtacagggtcttccggacaattgcagtcgggttatggtctggaatttcaacctggaacctnctcgagtcaactaccccacaggctgggcacta

SEQ ID NO: 3447 - DNA, 358 bp, Zea mays
  Clone ID: LIB3061-012-Q1-K1-E7
ccggaatggaatgctcgacccaagcgacgcggttcgatgaaaacgcactacgctagaagtctacctctcaataatgagacacatttaacccagggagagataacaactgttgcgctaatttacagacattacaacttctaacatacaaggagataactggaatcagccgtgctacatttgagacacagccacagagattgacgcactacctgcacgctggatctaacgctgtctccttattacaactgtaacaatcgctgccattcaaccaaagagctgtgacaaacctgagcaggatgtaccatcagcccattcattggtagagcccatgcttaggagtctatatcagatatagctg

SEQ ID NO: 3448 - DNA, 372 bp, Zea mays
  Clone ID: LIB3061-012-Q1-K1-E8
tatcaacacacgctaccaacaatcaattaagctgctgcagcgaaccttgctgcgtacgtgcagcaacatctgttgcttccattcaatctactatctggcgtgaaccttgatatctacttgcaggcacaactgctactaccatataactaactcgactagagccctcatgccttcttactgctacaacagctgatgccatttcatctgcaaactgtggcacacattgacgcttacttgagacatcaacattcattgacctttcaccaacaagtagtgttaaacatttatgccttcatgcaacagctgcaattgctactattctacccactaaaatgtgacatacattgtaccactgcttacaacagctgccat

SEQ ID NO: 3449 - DNA, 421 bp, Zea mays
  Clone ID: LIB3061-012-Q1-K1-E9
tcgctacaaacctatgcaacgcaactccaacaccagcacccgccgctgctaacagggagggctctatcctctgtgaacgccgccagatactggcatcggcagataccatgtaccgaaccaccggcagccacctacgttgcctcatacataatgcagcttctacgctagccagtacaaccgttgctaagcaaacctgacgtggtcagctcagctggctacttacaggaacatcaatcgaactcgctcgccttgatgttcgactccaaggcattagcattccctcacctgtaccagattgtgtacagccatataagacaaaggtcactactcttccaaatggcattaagatcgcctcggagacatcatcgagcccagcagcatctgtcggtctgtacattgactgcggttccatttacgaaac

SEQ ID NO: 3450 - DNA, 407 bp, Zea mays
  Clone ID: LIB3061-012-Q1-K1-D12
gtgagagccaatggtatagactggctactttcgcagttcctaacgcttagagacgggatgaatcccttggtcgtcaatgatttcagggtagctgctcgaaatgcgattgaagctggatttgatggtgtcgaaatccatggagctcacggttacctgattgatcagtttctaaaggacggggtcaacgaccgcacagacaaatacggtggcagtctggagaaccgctgccggtttgcactggaagtaactcaagccgtggtcgacgaaattggagctgacaaggtctggataaggctgtcaccattcgctagctactcggaggcgccggactcagacccggaagctcttggcatgtacatggcgaacgcgctgaacgagttcgcgattctctactgccacatggttga

SEQ ID NO: 3451 - DNA, 371 bp, Zea mays
  Clone ID: LIB3061-031-Q1-K1-C10
cgtaatcatcattcatcttaatgctttcggcaccagatcaaatatgtatcatcactgatgtaactacagcgacgaagattctagtgctcgtggcactagctatgatagctggaaccataaacgcatgcatgccacactcaatcatgcaacactggcttgacaactagatcgattatccgtacctgattctacaacaactgcatgcattaccgcttcagcctataccagcaatactgcatcacatgatgacgcataccatcatgcaaccgttgacgttccaccacatgatcataacaatcatcttgacgatcatgatcatcaacaacgacgacgacacaatgaccatgagacacagcatcagcagattatgc

SEQ ID NO: 3452 - DNA, 446 bp, Zea mays
  Clone ID: LIB3061-031-Q1-K1-C11
caactagcaacatagaaagcacaatagtgtaccaacaatggcagccaaaatattttgcctccttatgctccttggtctttctgcaagtgctgctacggcgaccattttcccgcaatgctcgcaagctcctatagcttcccttcttcccccgtacctctcaccagcggtgtcttcggtatgtgaaaacccaattcttcaaccctacaggatccaacaggcaatcacagctggcatcttacctttatcacccttgttcctccaacaatcatcagccctattacatcagttacctttggtgcatttattggcacaaaacatcagggcacaacaactacaacaacttgtgctagcaaaccttgctgcctactctcagcaacagcagtttcttccattcaaccaactagctgcattgaactctgcttcttatttgcaacaacaacaactac

SEQ ID NO: 3453 - DNA, 413 bp, Zea mays
  Clone ID: LIB3061-031-Q1-K1-C12
attgagaccaacaagcaacatagaaagtggaatacagtagcaaaaatagagcaacaatggcggccaagatatggtccatccttatgctccttgctctttctgcatgtgttgctaacgcgaccatttttcctcaatactcacaagctcctatagctgcccttcttcccccataccttccatcaatgaccgctttagtatgtgaaaacccagcccttcaaccctacaggatccagcaagcaatcgcaacaagcaacttacctttatcacacctgttctttcaacaatcgccagccctatctttggtgcagtcattggtacaaaccatcagggcagaacagttgcagcaactcgtgctaccagtgatcagccaagtagctctggcaaacctttccccctactctcagcaacaacaa

SEQ ID NO: 3454 - DNA, 445 bp, Zea mays
  Clone ID: LIB3061-031-Q1-K1-C3
attttcagcattcaaaaacacaccaagcgaagcgcactagcaacgacctaacaccagtggcgaccaagatattagccctccttgcgcttcttgcccttttagtgagcgcaacaaatgcgttcattattccacagtgctcacttgctcctagtgccattattccacagttcctcccaccagttacttcaatgggcttcgaacatccagccgtgcaagcctacaggctacaactagcgcttgcggcgagcgccttacaacaaccaattgcccaattgcaacaacaatccttggcacatctaaccctacaaaccattgcaacgcaacaacaacaacaacaacagtttctgccatcactgagccacctagccgtggtgaaccctgtcacctacttgcaacagcagctgcttgcatccaacccacttgctctggcgaacgtagctgcata

SEQ ID NO: 3455 - DNA, 453 bp, Zea mays
  Clone ID: LIB3061-031-Q1-K1-C4
ctttgatgatcaagatactgactctgtttggggttctactgtactgaacactgaggctgaccaacgcggtgggacgcataactctttctttgggtcggaggcaggctcaccaagtggcgctagtgtatttggaaagaagaggaattcattcttcgatgattctgttccaagttctcctgcatacacatctgggttctctccaaaatttggcgaaagccgtgacgatagctcctcttataacttcgggaggtttgattccttcagatcccaagacactggatccttccctcaggaaagccgtttctccaggttcgactccattaccagctccaagggcgagaatgtatcaggatttgacacaggaaatagctcacgaaattttggccggtttgactcttttgatgacgccgacccattcggttcaagtggaccttttaaagcatcgggaagccg

SEQ ID NO: 3456 - DNA, 444 bp, Zea mays
  Clone ID: LIB3061-031-Q1-K1-C5
gaccaactagcaacatagaaagcacaatagtgtaccaacaatggcagccaaaagatgtggcttccttatgctccttggtctttctgcaagtgttgctaccgcaaccattttcccacaatgctcacaagctcctatagcttcccttcttcccccatacctctcaccagcggtgtcttcaatgtgtgaaaacccaattgttcaaccctacaggatccaacaggcaatcgcaacaggcatcttaccattatcacccttgttcctccaacaaccgtcagccctattacagcagttacctttggtccatttggtggcacaaaacatcagggcacaacaactacaacaacttgtgctagcaaaccttgctgcatactctcagcaacatcagtttcttccattcaaccaactggctgcattgaactctgctgcttatttgcaacaacaatt

SEQ ID NO: 3457 - DNA, 81 bp, Zea mays
  Clone ID: LIB3061-031-Q1-K1-C6
atgggttatagttcaataataaagttttttgtctgatgtttgtggcttcccagaaataagaaagtacatttctagattctt

SEQ ID NO: 3458 - DNA, 154 bp, Zea mays
  Clone ID: LIB3061-031-Q1-K1-C8
acccactcatcctcacaactaaccatttaacaactccggtatatctatatattctccttccttatcctcctgtctctctctacatgtatcactagcaccaacacttttccctaaacgctcacactcttctatatctcccattcttaccctatac

SEQ ID NO: 3459 - DNA, 411 bp, Zea mays
  Clone ID: LIB3061-031-Q1-K1-C9
aaaatagcaacgtaaaacgcaaagcttgcattgaacgctctcctagctctttgtgggagcgccactagtgcgagccatattccaaggcacttgccaccagtcatgccattgggtaccatgaacccatgcatgcagtactgcatgatgcaacaggggcttgccagcttgatggcgtgtccgtccctgatgctgcagcaactgttggccttaccgcttcagacgatgccagtgatgatgccacagatgatgacgcctaacatgatgtcaccattgatgatgccgagcatgatgtcaccaatggtcttgccgagcatgatgtcgcaaatgatgatgccacaatgtcactgcgacgccgtctcgcagattatgctgcaacagcagttaccattcatgttcaacccaatggccatg

SEQ ID NO: 3460 - DNA, 427 bp, Zea mays
  Clone ID: LIB3061-031-Q1-K1-D1
taccttcagcaacaacaattttttccattcaatcaactaactggggtgaacggctgggcttacttgcaggcacaacagctactaccattcaaccaacttgtcaggagccctgctgccttcttactgcagcaacagttgcttccattccatctacaagttgtggcaaacattgctgctttcttgcaacaacaacaacaattgctgccattttacccacaggttgtgggaaacattaacgccttcttgcaacagcaacagctgctaccattatacccacaggatgtggcaaacaatgtcgccttcttacaacaacaacaattgctgccatttaaccaacttgctttgacgaatcctaccaccttattgcagcagcccaccattggtggtgccatcttgtagatattgttatgctgtatactgtagtaat

SEQ ID NO: 3461 - DNA, 408 bp, Zea mays
  unsure (1)..(408): unsure at all n locations; Clone ID: LIB3061-031-Q1-K1-D10
ccgccgtcgaccacctcacctccctcgtctctcgcctccacggcctcaagcgcaagagggaggagggcgcacgagcggaggaactgcaggtgcagcggtgccgggcgcgtctggaccggctggcgactgccagcaccggcgacgatgccgaatgggaggacatgcggttgaagaggatcctggtcgattacatgcttcggatgtcctactacaattccgccaccaagctcgctgagacttctggtattcaggacctcgttgatattgatgtctttctcgatgcgaaaagagtaattgattctcttcagaataatgaagtttctcctgctttagctnggtgtgcagaanacaagtctcggctaaagaaatcgaagagtaagctnggagttttactgaggcttcaagagt

SEQ ID NO: 3462 - DNA, 388 bp, Zea mays
  Clone ID: LIB3061-031-Q1-K1-D11
cagaaacacaccaagcgaagcgcactatcaacgacctaacaccaatggctaccaagagattagccctccttgcgcttcttgcccttttagtgagcgcaacaaatgcgttcattattccacagtgctcacttgctcctagtgccagtattccacagttcctcccaccagttacttcaatgggcttcgaacatccagccgtgcaagcctacaggctacaactagcgcttgcggcgagcgccttacaacaaccaattgcccaattgcaacaacaatccttggcacatctaaccctacaaaccattgcaacgcaacaacaacaacaacagtttctgccatcactgagccacctagccgtggtgaaccctgtcacctacttgcaacagcagct

SEQ ID NO: 3463 - DNA, 156 bp, Zea mays
  Clone ID: LIB3061-031-Q1-K1-D12
gtccaacttgctttgacagacccagcggcctcctaccaacaacacatcattggtggtgccctcttttagattgcttattagttgtaattcaataataaagttttttggatgatgtatgtggccaaccagaaataagaagttacatttccagattct

SEQ ID NO: 3464 - DNA, 236 bp, Zea mays
  Clone ID: LIB3061-031-Q1-K1-D2
ataatagcctttaacgaatacggcgagctagagatgcgcgttccttatcctgggtgctctctgtacatgaatcactaacgcaacacttttcgttgagcgctcacacgcttctatagcttcgattgttagcctatacttacgatcattgatctgctaaggactggataacctatctgttcaatcatattggactcatcaatctatcgtagaatgcagcatacctatatcgtgcttga

SEQ ID NO: 3465 - DNA, 446 bp, Zea mays
  Clone ID: LIB3061-031-Q1-K1-D3
caactagcaacatagaaagcacaatagtgtaccaacaatggcagccaaaatattttggctcgttatgctccttggtctttctgcaagtgctgctacggcgaccattttcccacaatgctcacaagctcctatagcttcccttcttcccccgtacctctcaccagcggtgtcttcggtatgtgaaaacccaattcttcaaccctataggatccaacaggcaatcgcagctggcatcttacctttatcacccttgttcctccaacaatcatcagccctattacagcagttacctttggtgcatttattggcacaaaacatcagggcacaacaactacaacaacttgtgctagcaaaccttgctgcctactctcagcaacaacagtttcttccattcaaccaactagctgcattgaactctgcttcttatttgcaacaacaacaactac

SEQ ID NO: 3466 - DNA, 338 bp, Zea mays
  Clone ID: LIB3061-031-Q1-K1-D4
atcaattatagcttcagtatgtgaaaacccagctcttcaaccatataggcttcaacgagcagtcgcagcaagcaacatacctttatcgcccttgttgtttcaacaatcaccagccctatctttggtgcagtcattggtacaaaccatcagggcacaacagctgcagcaactcgtgctacctgtgatcaaccaacttgctttgacaaacccagcagcattctaccaacaacccatcattggtggtgccctcttttagatttcttatgagttatagttcaataataaagttttttgtctgatgtttgtggcttcccagaaataagaaagtacatttctag

SEQ ID NO: 3467 - DNA, 441 bp, Zea mays
  Clone ID: LIB3061-031-Q1-K1-C1
agctcatcgactccagattggagaactcgacaccatgaaggtgctgatcgttgcccgtgcgctcctggcgctcgctgcgagcgccgcctccagtacaagcggcggctgtggctgccagacaccaccgtttcatctaccgcctccgttctatatgccgcctccgttctatctgccgccgcagcagcagccgcagccatggcaataccccactcaaccaccgcagctaagcccgtgccagcagttcggatcctgcggcgtcggcagcgtcggcagcccgttcctgggccagtgcgtcgagttcctgaggcaccagtgcagcccggcggcgacgccctacggctcgccacagtgccaggcgctgcagcagcagtgctgccaccagatcaggcaggtggagccgctgcaccggtaccaggcgacatacggtgtggtcctgcagtc

SEQ ID NO: 3468 - DNA, 428 bp, Zea mays
  Clone ID: LIB3061-031-Q1-K1-A3
taccggttcggaagttccgacccacgcgttcggcgcaagctcgtggtgtgagcggtcactgtctcccatcccatggctccggcgctgagcggggctctgggcgcgtcgtcggtggcggcgctgcggccctgcgcggggaggagggcgccgtccgccgcgagctcggttgcgccgcgcgggagcggggtggtgaggtgctccagagggctcaggtgggacgcccacagaagcagggggaggttgctcagggtgaggtgcgatgcggccgtcgcggagaagcccgccgaggaggaggcggctggggagaagttcgagtaccaggcggaggtgagccgcttaatggacttgatcgtccatagtctgtacagtcataaggaggtatttctccgggagcttgttagcaatgcgagtgatgcgctggataagct

SEQ ID NO: 3469 - DNA, 413 bp, Zea mays
  Clone ID: LIB3061-031-Q1-K1-A6
caacaacttgtgctagcaaaccttgctgcctactctcagcaacagcagtttcgtccattcaaccaactagctgcattgaactctgcttcttatttgcaacaacaacaactaccattcagccagctacctgctgcctacccccagcaatttcttccattcaaccaactggcagcattgaactctcctgcttatttacagcagcaacaactactaccattcagccagctagctggtgtgagccctgctaccttcttgatacaaccacagatcgctgacgttctaccagcacgctgcgcctaacactggcaccctcttacaactgctacaattgctgccattcaaccaacttgctttgacaaacccagtatcgttataccaacaacccatcattggtgctgccctcttttagatac

SEQ ID NO: 3470 - DNA, 424 bp, Zea mays
  Clone ID: LIB3061-031-Q1-K1-A7
cagaagaggaagcaccaaagccaaagtcaaagaatcctcttgacttgctgccaccagagcaagatggtccttgatgactggaagaggctatactcaaacacaaagactaacttccgggaggttgccatcaaaggtttctgggacatgtacgacccagagggctactctttgtggttctgtgactacaagtacaatgatgagaacaccgtctcctttgtgaccctgaacaaggttggtggattcctgcagcggatggacctgtgccgcaagtacgcctttgggaagatgctcgtgataggctctgagccacccttcaagctgaagggcctttggctcttccgtggccaggatgttcccaagtttgtaatggacgaggtctatgacatggagctctacgagtggaccaaggtggacatctctgatg

SEQ ID NO: 3471 - DNA, 391 bp, Zea mays
  Clone ID: LIB3061-031-Q1-K1-A8
cagcaacaactaccattcagccagctatctgctgcctacccccagcaatttcgggcggtcaaccaactgacagctttgaactctcctgcttatttacagcagcaacaactactaccattcagccagctagctggtgtgagccctgctaccttcttgacacaaccacaattgttgccgttctaccagcacgctgcgcctaacgctggcaccctcttacaactgcaacaattgctgccattcaaccaacttgctttgacaaacccaacagcattctaccaacaacccatcattggtggtgccctcttttagatttcttatgagttatagttcaataataaagttttttgtctgatgtttgtggcttcccagaaataagaaagtacatttctag

SEQ ID NO: 3472 - DNA, 170 bp, Zea mays
  Clone ID: LIB3061-031-Q1-K1-A9
acgacccgggtaatttaacgccgaactatcctatgctacatgctacataacggccacctaccgagcatcttacagcgattatccatatgccttcgacagtcctattgcctatggcggcacctatgcctacggcatttgattttccgaagaaaccatgcccatcaactact

SEQ ID NO: 3473 - DNA, 364 bp, Zea mays
  unsure (1)..(364): unsure at all n locations; Clone ID: LIB3061-031-Q1-K1-B10
gctctgggcagcgtgcgtacgtggggtacctagctcgctctgctagcctaccatgggggatncaccaccggggtgcgacgggaggtggcgggggctacggcacctccacgcggnggcggcatgcacgggaggcgcagcagcagcagaagcagggcgccatgatgacggcgctcaaggccgcgacggccgcgaccttcggcgggtcgatgctggtgctgtccgggctgatcctggccggcaccgtgatcgcgctcacggtggccacccccgtgctggtgatcttcagcccggtgctggtgccggccgncatcgcgctggcgctcatggcggccgggttcgtcacctccggcggcctcggcgtcgc

SEQ ID NO: 3474 - DNA, 398 bp, Zea mays
  Clone ID: LIB3061-031-Q1-K1-B11
cacacagagaaaccaatgccggtattttcggtgcttgcctaaccatagattaaaaaggtgcaactgcatttgggctcatgaaaattgatgaagaagggaggatcattgagtttgctgagaaaccgaaaggagagcagttgaaagcaatgatggttgacaccaccatacttggccttgatgacgtgagggcaaaggaaatgccttatattgctagcatgggtatctatgttttcagcaaagatgtaatgcttcagctcctccgtgaacaatttcctgaagccaatgactttggaagtgaggttattccaggtgcaaccagcattggaaagagggttcaggcttatctgtatgatggttactgagaagatatcggtaccattgcggcattttataatgca

SEQ ID NO: 3475 - DNA, 385 bp, Zea mays
  Clone ID: LIB3061-031-Q1-K1-B12
cagaaacacaccaagcgaagcgcactagcaacaacctaacaacaatggctaccaagagattatccctccttgcgcttcttgcgctttttgcgagcgcaacaaatgcgtccattattccacaatgctcacttgctcctagttccattattccacagttcctcccaccagttacttcaatggccttcgaacacccagctgtgcaagcctataggctacaacaagcgattgcggcgagcgtcttacaacaaccaattgcccaattgcaacaacaatccttggcacatctaacaatacaaaccatcgcaacgcaacagcaacaacagttcctaccagcactgagccacctagccatggtgaaccctgtcgcctacttgcaacagcagct

SEQ ID NO: 3476 - DNA, 374 bp, Zea mays
  Clone ID: LIB3061-031-Q1-K1-B2
ccgacgcgtccgagcttcccttctttcctcgtacctctcaccagcggtgtcttcggtgtgtgaatacccagttcttcaaccctacatgatccaacaggcaatcgcagctggcatcttacctttatcacccttgttccttcaacaatcatcagccctattacagcagttacctttggtgcatttattggcacataacatcaggtcacaacaactacaacaacttttgctatcaaaccttgctgcctactctcatcaacatctgtttcttcattcaaccatctatcttcattgatctctactttttattttttacaacatcttcttccattctattcagctttctttttcttaccttctatcatttttttttattt

SEQ ID NO: 3477 - DNA, 399 bp, Zea mays
  Clone ID: LIB3061-031-Q1-K1-B3
gtccttcatcattgcaaaaacacgcataacttacattgtcatcttcgctcccgtgacgctacgtcgtcgtgtctcggcttggcttggcttcctcctccccgacgaccaccccgcgcttctcctctccccccgtcccaccttccgagaggctcgagccctgatcccacgctgagggcggcggtgttaggagtttagcgatggcgaggtggcggccggcggcgctgctggtagtggcgctgacagcggttctgtcggcggcgcggcgggcggatgcgctctcagtgacggtgaccgacaccgagtgtatccacgagttcgttccgtacgagggtgacaccgtgtccgggaacttcgttcgtgtcgaccacgacatcttctggagctccgatcacccaggca

SEQ ID NO: 3478 - DNA, 430 bp, Zea mays
  Clone ID: LIB3061-031-Q1-K1-B4
ctcgagagccacaactgggccctcgaatccgccgttcgctcctactacgactccgtggacggtgaagccgacgccgtcgcggccgatccagtgcccccaccaccagctgcaccagccggaggcggggaggataccgaggatgaggattgcgtggtcggcggtggcggtggcggcgacgacgacgaggatgatgaggactacgtcgatggcgacggcagcgatgatgaggacgctgcgctcgcggctgaggccgcggaggaagaggagaggaggaggcctttcaagaggctgaagagaacccacgacgcgcggggtgggagcggtagcagtgccaaggcgcgggggaatgtgaggacgctcgccgatctcgatagtggcaaggggaaccgcgggttccgacgagaactccgaagacgatgatgaatggaca

SEQ ID NO: 3479 - DNA, 470 bp, Zea mays
  Clone ID: LIB3061-031-Q1-K1-B6
cggttcggaatcccgctcgagccacgcagtccgaacatagaagcacaatagtgtaccatcaatggcagccaaaatattttgcttgcttaggctccttggtctgtctgcaagtgctgctaccgcaaccattttcccacaatgctcacaagctcctatagcttcctttcttcccccatacctctcaccagcggtgtcttcagtatgtgaaaacccaattcttcaaccctacaggatccaacaggcaatcgcagcatgcatcttacctttatcacccttgttcctccaacaaccgtcagacctattacagcagttacctttgatgcatttgctggcacaaaacatcaacgcacaacaactacaacaactcgtgctaagaaaccttgctgcctactctcagcaacagcagtttcttccattcaaccaactggctgcatcgaactctgctgcttatttgcaacaacaactaccat

SEQ ID NO: 3480 - DNA, 445 bp, Zea mays
  unsure (1)..(445): unsure at all n locations; Clone ID: LIB3061-031-Q1-K1-B7
cacaaacgccggcgcaaactctcgcccgagcccgacagatcttcaattccccattccgcccaccgatcgacctgcacgccagtctcggtctcttccgaaggcgtcgcgcgcggttgtttgagaggagaggaggaagatgagggagtgcatctccgtccacatcgggcaggccggcatccaagtcggcaacgcgtgctgggaactttactgcctcgagcacggcatccagcctgatggccaagtgcctggagataagaccgcgggacatcacgatgatgccttcagcaccttcttcagccagactggtgctgggaagcacgttccccgtgcaatcttcgttgatctagaacccactgtgatcgatgaggtgcgcactggcacgtaccgncagctcttccaccctgagcagctcatcagtggcaaggaggatgccgctaacaatttc

SEQ ID NO: 3481 - DNA, 239 bp, Zea mays
  Clone ID: LIB3061-031-Q1-K1-B9
accccaaaatctcagatccttcctgcccgcccgcccgtgcccgtcgacgcgtcgttcttgccggccgcgcctcacctccgccctctcctcctccagggggatcggatacgccacaggctgcgcgatggtgctgtgggtcttcggctacggctccctcatctggaaccccggcttcgacttcgacgacaaaatcctcggcttcatcaagggctacaagcgcacctttaatctcgcttgca

SEQ ID NO: 3482 - DNA, 446 bp, Zea mays
  Clone ID: LIB3061-031-Q1-K1-A2
accaactagcaacatagaaagcacaatagtgtaccaacaatggcagccaaaatatttggcctgcttatgctccttggtctttctgcaagtgctgctacggcgaccattttcccgcaatgctcgcaagctcctatagcttcccttcttcccccgtacctctcaccagcggtgtcttcggtatgtgaaaacccaattcttcaaccctacaggatccaacaggcaatcgcagctggcatcttacctttatcacccttgttcctccaacaatcatcagccctattacaacagttacctttggtgcatttattggcacaaaacatcagggcacaacaactacaacaacttgtgctagcaaaccttgctgcctactctcagcaacagcagtttcttccattcaaccaactaggttcattgaactctgcttcttatttgcaacaacaacaact

SEQ ID NO: 3483 - DNA, 419 bp, Zea mays
  Clone ID: LIB3061-030-Q1-K1-G9
aatcatcattcatcttagtagtataggcaccaaatcaaatctgcaacatcaatggtggaactccaaaaaccatgaagctggtgcttgtggttcttgctttcattgctttagtatcaagtgtttcttgtacacagacaggcggctgcagctgtggtcaacaacaaagccatgagcagcaacatcatccacaacaacatcatccacaaaaacaacaacatcaaccaccaccacaacatcaccagcagcagcaacaccaacaacaacaagttcacatgcaaccacaaaaacatcagcaacaacaagaagttcatgttcaacaacaacaacaacaaccgcagcaccaccaccaacaacaacaacaacagcaccaacatcaacatcaatgtgaaggccaacatcatcatcaccaacaatcacaa

SEQ ID NO: 3484 - DNA, 390 bp, Zea mays
  Clone ID: LIB3061-030-Q1-K1-H10
cccacgcgtccggcggaacacaacaccgcaccacactacccagcggaatccggccacccgcacccgcagcagaggagatatgtcgcaggggaagggaggagcggcgaggaaggaggaggtggtcaccagggagtacaccatcaacctccacaagcgcctccacggctgcacattcaagaagaaggcacccaacgccatcaaggagatcaggaagtttgcgcagaaagccatgggcaccacggacattaggatcgatgtgaagctcaacaagcacatctggagcagcgggatcaggagcgtgccgcggagggttcgtgtgaggatcgcccgcaagaggaacgacgaggaggatgccaaggaggagctctactcccttgtcaccgtcgcgga

SEQ ID NO: 3485 - DNA, 383 bp, Zea mays
  Clone ID: LIB3061-030-Q1-K1-H11
attgtagtagcaatctcttgtaaactgcgctcgcctttgcgtgttcgtggtccgttggcgctttctcgtccctctttctctcaatctctccttattcttctccttccacggcgaagccggcggctggtatggatcccaatggcctcaaaactggagcccttttgctcccgaccatcgagaggcggtgcacgtcgcctccatccgtcattgtcatcggcggtggcatctcgggcgttgcagctgcccgtgccctctccaattcttcatttaaggtgactgttttggaatcgagagatcgtattggcgggcgcattcatactgataactcgtttggatgcccaattgatatgggagcctcatggctacacggcgtgtgcaatgag

SEQ ID NO: 3486 - DNA, 141 bp, Zea mays
  Clone ID: LIB3061-030-Q1-K1-H12
gagcacctccgtccaatgtccgtactcttgcgtgcccgtacaacgacgggctgggcttctttcgccacgagtgggataagcacgtcacctgctcagcctacttcttcgacgagcacggctacttacatgcctcgctatgcc

SEQ ID NO: 3487 - DNA, 422 bp, Zea mays
  Clone ID: LIB3061-030-Q1-K1-H2
cttgtattcccactctgtcgcacagcgtcgcccgtcgccgctgagatcctaggaagaaatggagctctctcgcaagctcttcacggccgtcctcctcgtcatgctgctgctgctgtccgcagaggtcgggccggtggcggtggcggaggcgcggacgtgccagtcgcagagccacaggttccggggcccctgcctccgccggtccaactgcgccaacgtctgcaggaccgaggggttccccggcggcaggtgccgcggcttccgccgccgctgcttctgcaccacgcactgccactgattcgctcgcccagcggccggctggcgtcgccgtcgatcgcgtcgcgaccagtccatggctccatgcatgaataacaagggtgtgcgcggtttgtgatgccaaattgtatcgccgtcgtgtgttg

SEQ ID NO: 3488 - DNA, 426 bp, Zea mays
  Clone ID: LIB3061-030-Q1-K1-H3
gaccaactagcaacatagaaagcacaatagtgtaccaacaatggcagccaaaatatgttgcctccttatgctccttggtctttctgcaagtgctgctacggcgaccattttcccgcaatgctcgcaagctcctatagcttcccttcttcccccgtacctctcaccagcggtgtcttcggtatgtgaaaacccaattcttcaaccctacaggatccaacaggcaatcgcagctggcatcttacctttatcacccttgttcctccaacaatcatcagccctattacaacagttacctttggtgcatttattggcacaaaacatcaaggcacaacaactacaacaacttgtgctagcaaaccttgctgcctactctcagcaacagcagtttcttccattcaaccaactaggttcattgaactctgcttc

SEQ ID NO: 3489 - DNA, 430 bp, Zea mays
  Clone ID: LIB3061-030-Q1-K1-H4
ggaggttgacaggagattgcaagaatatgagcaaggaaggacagagtttgcaccagaagaggatgctcatgttgttggtgactgtgtaaaacatgttctccgggagcttccatcttctcctgttccagcttcctgctgtacagcattattggaagctttccgtctggacatcaaggaatctcggatcaaatctatgcgtgcagcaatatctgaaacatttcctgagcctaataggcggctgctacagagaattttgaaaatgatgcataccgttgcttctcatactgccgagaatagaatgactccatcagcagttgctgcatgtatggccccactcttgttgcgtccccttcttgctggtgaatgcgagctggaagatgattttgacatgagtgatgacagtgctgctcagcttattgctgctgcaaat

SEQ ID NO: 3490 - DNA, 325 bp, Zea mays
  Clone ID: LIB3061-030-Q1-K1-H5
ccgcacttcgccgagaacatcttcaaagggatcgacgcccggttcctgagcgaaggcctgggcgtcagcatgcacgtcgccgagaagctgcagagccggcgtgaccagcgaggcgagatcgtccgcgtggagccggagcacggctttcaccagctgaatccgtcgccgtcgtcgtcgtcgttttcgttcccatcgtcacaaggccagtaccaaacgtgccagcgcgacgtcgacaggcacaacgtctgcgccatggatgtgaggcacagcgtcgaacggctggaccaagccgacgcctacagccctggggctgggaggatcacac

SEQ ID NO: 3491 - DNA, 427 bp, Zea mays
  unsure (1)..(427): unsure at all n locations; Clone ID: LIB3061-030-Q1-K1-H6
atgggccaaaacacattgaggcaaccctctcgagagccaaattcgaggaactatgttcagaccttatagacaggcttaaaactcctgttaataatgccttaagagatgccaagttgtctgtcagtgatctagatgaagttattcttgtgggtggatccacccgaatccctgcagttcaagaacttgtgaggaagcttactgacaaagatcccaatgttacggtcaaccctgatgaggttgtttctcttggggcagctgtgcagggtggggttttggcaggagacgtgaaagatgtagttcttctggatgttactccattatctcttggtttggagacattgggaggagtgatgacaaagattatccccaggaataccacactgccaacctcanaatcggaagtattctcaacagctgcagatggaca

SEQ ID NO: 3492 - DNA, 428 bp, Zea mays
  Clone ID: LIB3061-030-Q1-K1-H7
ccagcaagcaacatagaaagtagaatccattagcaacaatagagcaacaatggcgacgaagatattttccctccttatgctccttgctctttctacatgtgttgctaacgcgacaattttccctcaatgctcacaagctcctatagcttcccttcttcccccataccttccatcaattatagcttcagtatgtgaaaacccagctcttcaaccatataggcttcaacaagcaatcgcagcaagcaacatacctttatcgcccttgttgtttcaacaatcaccagccctatctttggtgcagtcattggtacaaaccatcagggcacaacagctgcagcaactcgtgctacctgtgatcaaccaagtagctctggcaaacctttctccctactctcagcaacaacaatttcttccattcaaccaactgt

SEQ ID NO: 3493 - DNA, 344 bp, Zea mays
  Clone ID: LIB3061-030-Q1-K1-H8
gccacgcgtacgttcacacgtccggatttgtgagggtgatccgcgctgagaaaagatggctaagatcaggcatgtcactgcggcggcactgtgcttaacgaccctggtggccagctccatctgtcaagtctaggtctagctgcagaagcatcatgtacctgcagctgctccagtagactcaagagaatctcgtatgaaatttatgccagcagctatatctgaaacatatcctgagcctaataggcggctgctacagacaattttgaaaatgatgcataccgctgcttctgatactgccgagaatagaatgactccatcagcagttgctgcatgtatggccccac

SEQ ID NO: 3494 - DNA, 400 bp, Zea mays
  unsure (1)..(400): unsure at all n locations; Clone ID: LIB3061-030-Q1-K1-H9
catagtgaagtacactagcaacatcttagcaccaatgggagccaagatttttgccctccttgccctccttgctctttcagcaagcgctgctacctcgacttttattccacaatgctcacaacaatacctctctccggtgacagccgcgggatttcaatacccaactatacaatcctacatggtacaagaggccatccaagcaagcatcttacggtcattagcattaaccctccaacaaccatatgctctattgcaacagccatccttagtgcatctgtatctccaaagaatcgcggcacaacaactacaacaacagttgctaccaacaatcaatcaagtagttgcagcgaaccttgctgcttacctncagcaacaacagtttcttccattcaatcaacta

SEQ ID NO: 3495 - DNA, 439 bp, Zea mays
  Clone ID: LIB3061-031-Q1-K1-A1
gaccaacaagcaacatagaaagtggaatccagtagcaacaatagagcaacaatggcgaccaagatattttccctccttatgctccttgctctttctacatgtgttgctaacgcgacaattttccctcaatgctcacaagctcctatagcttcccttcttcccccataccttccatcaattatagcttcaatatgtgaaaacccagctcttcaaccatataggcttcaacaagcaatcgcagcaagcaacatacctttatcgcccttgttgtttcaacaatcgccagccctatctttggtgcagtcattggtacaaaccatcagggcacaacagctgcagcaactcgtgctacctctgatcaaccaagtagctctggcaaacctttctccctactctcagcaacaacaatttcttccattcaaccaactgtctacactga

SEQ ID NO: 3496 - DNA, 351 bp, Zea mays
  Clone ID: LIB3061-031-Q1-K1-A10
cccactcaacctatgtatcttacactactaccaaactcataacaacccaatccacaacattacccctacggacctttctaaatctctcctggctctcaaatccatctacacctactccccaaccatcaccaccctccctacacatccacacacacaccttaatcaaacaacccactatccaatactacctactactcaccacccacctaccctccatcttaacattattatccacacacctacaacacccaacctccctactaacaaccatatactccacccatttcactactccaaccactacctccatcacacctactacaacatctcttaccaacactcatacacaca

SEQ ID NO: 3497 - DNA, 342 bp, Zea mays
  Clone ID: LIB3061-031-Q1-K1-A11
cattcaaccaactagcagcattgaactttcctgcttatttacagcagcaacaactactaccattcagccagctagctggtgtgagccctgctaccttcttgacacaaccacagttgttgccgttctaccagcacgttgcgcctaacgctggcaccctcttacaactgcaacaattgctgccattcaaccaacttgctttgacaaacccagcagtgttctaccaacaacccatcattggtggtgccctcttttagatttcttatgagttatagttcaataataaagttttttatctgatgtttggggcttcccagaaattagaaagtacatttctagattctt

SEQ ID NO: 3498 - DNA, 357 bp, Zea mays
  Clone ID: LIB3061-031-Q1-K1-A12
ctttgattctacattccatgtaattagataatataacactcatttaccttgcctctagcgtactctttaaaagttaggtttccataaaaccattcaataccatatttacactcttatataaccacaccacaatttcacctttaaagctgcaatagaatacccaatatctatcattatcatcactttactacatatttttcctactatcttacattttcattcccacatatcatttcccaagcaacttttcatacaacctcatgatccaccatatgtactacagtttccttaccacaatcactccgaacataaatgctctttccccgatacttatcaacattatttaatgccttcaca

SEQ ID NO: 3499 - DNA, 425 bp, Zea mays
  Clone ID: LIB3061-030-Q1-K1-G8
gttgtttcaacaatcaccagccctatctttggtgcagtcattggtacaaaccatcagggcacaacagctgcagcaactcgtgctacctgtgatcaaccaagtagctctggcaaacctttctccctactctcagcaacaacaatttcttccattcaaccaactgtctacactgaaccctgctgcttatttgcagcaacaactattaccatttagccagctagctactgcctactctcagcaacaacaacttcttccatttaaccaattggccgcactgaaccccgctgcttatttgcagcagcaaatactactgccatttagcgagctagctgcagcaagtcgtgcttccttcttgacacagcaacagttgctgcctttctacaagcagtttgcggctaaccccgcaaccctcttacaactacaac

SEQ ID NO: 3500 - DNA, 204 bp, Zea mays
  Clone ID: LIB3061-012-Q1-K1-B6
ctcaagcaacacatccggcgacgcgcactcaccacgacctgacatctacggctaccacgatattaccccgacgggcgctaatagacctttcatcgatctcatcataggcgtttatgattccacagttctcactagcatctagtgccattactccacagctcctatcactagccactttaatgggctcctaacatccatgagcgc

SEQ ID NO: 3501 - DNA, 413 bp, Zea mays
  Clone ID: LIB3061-012-Q1-K1-B7
gcaacataaaaagaaaaatcacaatatcactaataaagcaacaatgacaaccaagagataggccctacttatgctccttgactctttctacatgtgttgctaacgcgacaattttccctcaatgctcacaagctcctatagcttcccttcttcccccataccttccatcaattatagcttcaatatgtgaaaacccagctcttcaaccatataggcttcaacaagcaatcgcagcaagcaacatacctttatcgcccttgttgtttcaacaatcgccagccctatctttggtgcactcattggtacaaaccatcagggcacaacagctgcagcaactcgtgctacctatgatcaaccaagtagctctggcaaacctttctccctactttcagctacaacaatttcttccattc

SEQ ID NO: 3502 - DNA, 290 bp, Zea mays
  Clone ID: LIB3061-012-Q1-K1-B8
ctactaccatctagctcgctccaggcgtccaatgcaactacctacctacaagagcaggtgctgcaacaaataggaccagctctgactcaactagctgtagcaaaccctgatccctacttacaacagttgcttccattcaaccaactgtctgcagtcaaactctgctgcgtacctacaacagctacatcagttacttaatacattgccagtggctaacccattggtcgctaccttactgcagcagctgcaacaattgctgacatacaaccagctctctctgatgaaccatg

SEQ ID NO: 3503 - DNA, 376 bp, Zea mays
  unsure (1)..(376): unsure at all n locations; Clone ID: LIB3061-012-Q1-K1-B9
cactactgctgcctaccccagcaattcttcattcaaccaactagcgcgtgaacttctgcttatttacagcacacaactactaccattcaccagctgctggtgtgagccctgctaccttcttgacacaccacagtgtgccgtctaccagcacgttgcgcctaacgctggcaccctcttacaactgcacaattgctgccattcaccaacttgctttgacaaacccacagtgttctaccaacaacccatcatttggtgtgccctcttttagattcttatgagttatagttcaataataaagttgcttatctgatgtttgtggcttcccaaaaataagaaagtacatttctagattaaaaaaaataaanaacaacaaaaa

SEQ ID NO: 3504 - DNA, 411 bp, Zea mays
  Clone ID: LIB3061-012-Q1-K1-C1
gcaaggaacaaaaactgtgccaaactacaatcaaaaactcaacaacaataagcacgggcagattttccatacttatgctccttgctctttctgcatctgttgctaacaccaccatttttcctcaatactcacaagctcctataactgcccttcttcccccataccttccatcaatgaccgctttagtatgtgacaacccaacccttcaaccctacaggatccaacaagcaatcgcaacaagcaacttacctttatcacacctgttctttcaacaatcgccagccctatctttggagcagtcattggtacaaaccatcaccgcagaacagatgcagcaactcgtgctaccaatgatcagccaaatagctctcgcaaacctttccccctactatgagcaacaacaatttcttc

SEQ ID NO: 3505 - DNA, 297 bp, Zea mays
  Clone ID: LIB3061-012-Q1-K1-C11
ccctttcgaccgacgcgtccgcgccagagattcgactgatccgtcaattacatcaccaataaatgaacaaacgtgtgaaacattcaaagagtgatgaaagcatgcatagagagttgtgtttcttccccggaagtgcttccgagaataaatttttcttatctgattgtctaaaacctataacgggtgtaatggtatcacagtggttggttgatcatcaagtgactcatattatgtcaagtctatgtgtcatcgttaaacttttaaccgacattatattacaaaagttatgcattttcc

SEQ ID NO: 3506 - DNA, 416 bp, Zea mays
  Clone ID: LIB3061-012-Q1-K1-C12
ccacaagcagcatagaaagtggaatacagtggcaacaatagagcaacaatggcgggggcgatatggtccatcctgtatgctccttgctctttctgcatgtgttgataacgcgaccatgcttccttaatactcacaagctcctatagctgcccttcttcccccatacctgccatcaatgaccgcttcagtttgcgaaaacccatcccttcaaccctacaagctccaacatgcaatcgcaacaagcagcttatctttatcacccctgttctatcaacaatcgccagtcctatgtatggagcagtcattggtacaaaccatcagggcacaacagctgcaacaactggtgctaccagtgatcagtctagtagctatcgcaaacctttattcatactattagctacatcgatctcttccat

SEQ ID NO: 3507 - DNA, 402 bp, Zea mays
  Clone ID: LIB3061-012-Q1-K1-C2
gtgcgagcattcagaaacacacgcagctaatctcactagcaacaacctagcaacaagggcggtaatatatcatacatccttgctcttcttgcgctaattgcgagcgcaacagatgcgtacattctaccacaatgctcactcgctcctatgtctattataccatatattatcccactagcatcttcaatgtccttacaacacacatctgcactagcctatacgctacaacatgcgattgtggcgagcgtcatacaacaactaatttcccaatagcaacatcaaatgttggcacatttaacactacaaaccatctgaacgcaacagcaatagcatggattaccatcactctaccaactagtcatcgtgaaccctgttgactacttgcaacatcagctgcttgca

SEQ ID NO: 3508 - DNA, 361 bp, Zea mays
  Clone ID: LIB3061-012-Q1-K1-C3
ctgggattccaaatgttaagtggtttggcgttgagggtgattacaatgttttggttatggacttactgggacggaggcttgaagatctttgctagcttttgcaacacgaagttgtccctcaaaactgatttgatgcttgctgatcaaatgatcaatctagttgagttttttcattccaagtcattcttgcatagagatatcaagcctgacaattgtctcatgggtctcgggaaaagagcaaaccaaggttatgttatcgatttaggacttgcaaagaagtacagacatacattatcacaccgacacattccatacacagagaacacgaacttgactggaacatgcagatatgcacgtgtta

SEQ ID NO: 3509 - DNA, 432 bp, Zea mays
  Clone ID: LIB3061-012-Q1-K1-C4
cgagaaaagcccgcccgtcagaccgcaccgcggtccagcctcgcgtcgtcgccccgggccgcgcgagccttcgccgatccgcgagcgcagatcgccgaagccaggcggcggagagggagctcgaggcggcggaggaaggcgttcgccacagtcgctgatttccctggggaagagatgggtctctcctttgggaagctgttcagccgcctcttcgccaagaaggagatgaggattctcatggtcgggctcgatgccgccggtaagaccaccatcctctacaagctcaagctcggcgagatcgtcaccaccatccccactatcggattcaatgttgaaactgttgagtataagaacattagcttcactgtttgggatgttggtggccaggacaagatcatgcccctgtggaggcactactttcagaacacacag

SEQ ID NO: 3510 - DNA, 214 bp, Zea mays
  Clone ID: LIB3061-012-Q1-K1-C6
attgagaccaactagcaacatataaagcacaatagtgtaccaacaatggcaggcaagatattttgcttccttatgctccttggtctttctgcaagtgctgctaccgcaaccattttcccacaatgctcacaagctcctatagcttcctttcttcccccatacctctcaccagcggtgtcttcagtatgtgaaaacccaattcttcaaccctaca

SEQ ID NO: 3511 - DNA, 389 bp, Zea mays
  Clone ID: LIB3061-012-Q1-K1-C7
actcgaaagccgcggctatggattccagccaggcagataagccactgactacgtatggcggcgtcaatcgaggagctcgtcgtcgaacacaagcagcatcccgcggagcccatggacgctggggcctcatagcgcgcctgctccaacatctccgtcctcttcagctgtctcggcatcgatatcaagttcgcggcgatggactacttcgtgaaggttgatgatctgacggaggcgatcaagtcaatttcaacattgccttctatggctgagcgacacattcacaccgacactgtcaagacaccaaggacccgtacatggcatctgcttaaagtgaagcgcgtgattgatctggctaaagtcctgtctgagcacattcttgtcacataggg

SEQ ID NO: 3512 - DNA, 165 bp, Zea mays
  Clone ID: LIB3061-012-Q1-K1-C8
aaaccggctcaacttcaaccctctttttttaccatatatctttcaaatcctacggccgttaccatttatcggcagcaatttacgccatacataccagccatcgaggtcctatgacaactcaatcgaccgagcaacgcgtccgcaacagaggtcaaaccctcttct

SEQ ID NO: 3513 - DNA, 405 bp, Zea mays
  Clone ID: LIB3061-012-Q1-K1-C9
cacagatctctctcggccccgtgcccagcgctccgaaaccctagcgccgccgcgggtgccaggccgtgagcgtcgccatgggcatcgtgtttacgcggctcttctcgtcggtcttcggtaaccgcgaggctcgcatcctcgtcctcggcctggacaatgctggcaagaccaccatactctatagactgcaaatgggagaggtcgactccacgatcccgacaattggattcaacgttgagacggtgcatttcaacaacatcaagttccaagtatgggatcttggtggtcaaacaagcatcaggccatactggctgtgctactttccaaacactcaggctatcatatatgttgatgattcaagcgatacagataggcttgtaacagcataagaagaattccatgcca

SEQ ID NO: 3514 - DNA, 419 bp, Zea mays
  Clone ID: LIB3061-012-Q1-K1-D10
atcccacgcgcccgctcctcgtcgccgtcctcttcctccatctcacccgtccgtcaggctcgttaatttttcgcccccatctttgaacgcagcggctcaacctccatcgttctctccctcctcctccccccgatcccgtccctataaattgcgcccccgccgccacagcggaccgcaagcacgcaatcacacagctcgctgctgctgccgtctccccgtgtcctgtcgttctcccgtcgccgggggcggaagagttcggcgggcggttggggattgctcgggagccccgtgatggcgaagctgtacgtgcaagcgttcccgcccgcggatctgaacaagaacaccgagtggtttatgtacccgggcgtctggacgacctacatcatcatcgtcttcttctcctggctcctcgtcctctc

SEQ ID NO: 3515 - DNA, 376 bp, Zea mays
  Clone ID: LIB3061-012-Q1-K1-D11
gcgcacgtttgatacaaccaagtagctgccaggtattgcagcaacaatgttgtcgggatcgtaggcagattgagccacaatacattcaccaagcaatctacaacatggttcaatccataatccaggaggagcaacaacaacaaccatgtgagttatgtggatctcaacaagctactcaaagtgcggtggcaatcttgacagcagcacaatacctaccatcaatgtgcggcttgtaccactcatactaccaaaataatccatgcagcagcaatgacattagtggtgtttgcaattgaagaattgtgtctacctagccgttatactcatataacggtgttaagcaataaagtaccatacattatgatgtttgtactac

SEQ ID NO: 3516 - DNA, 413 bp, Zea mays
  unsure (1)..(413): unsure at all n locations; Clone ID: LIB3061-012-Q1-K1-B3
caagcaacatagaaagtggaatccagtatcaacaatagagcaacaatggcgaccaagaggtggtccctccttatgctccttgctctttctacatgtgttgctaacgcgacaattttccctcaatgctcacaagctcctatagcttcccttcttcccccataccttccatcaattatagcttcaatatgtgaaaacccagctcttcaaccatataggcttcaacaagcaatcgcagcaagcaacatacctttatcgcccttgttgtttcaacaatcgccagccctatctttggtgcagtcattggtacaaaccatcagggcacaacagctgcagcaactcgtgctacctctgatcaaccaagtagctctggcaaacctttctncctactctcagcaacaacaatttcttccatt

SEQ ID NO: 3517 - DNA, 427 bp, Zea mays
  Clone ID: LIB3061-012-Q1-K1-A11
acgcgttcataactagcaacatagaacgcacaatattgtaccaacaatggcagccaaaatggtttggctccttatgctccttggtctttctgcaagtgctgctacagccaccattataccgccatgctcgcatgctcctatagcttctcttctttccccgcacctcttaccagcggggcacttcagcatgtgaaaacccaattacttaaccactacaggatccaacaggcaatctcagatggcatcttaactttatgaccctcgatcatccaacaatcatcaaccctattacaacagatacctttggtgcatttattggcacaaaacatcagagcacaactactacaacaacttgtgctagcaaaccttgctgcctactctcaacaacagcagtttcttccattcaaccaactaagttcattgaact

SEQ ID NO: 3518 - DNA, 412 bp, Zea mays
  Clone ID: LIB3061-012-Q1-K1-A12
gaaagcacaatagtgtaccaacaatggcagccaaaatattttgcctacttatgctccttggtctttctgcaagagctgctaccgcgaccattttaccgcaatgctcgcaagctcctatagcttcccttcgttccaccatacctatcaccagcggcgtcttctgtatgtgaaaacccaattcttcaaccctacaggatccaacatgcaatcacagctggcatcttacctttatcacccttgttcctacaacaatcatgatgcctattacatcaattacctatagagcatttattggcacaaaacatcagggcacaacaactacaacaactagcgctagcaaacctttgttgatactctcagcaacatcagattcatgcattcaaccaactagctgcattgaactctgcttctt

SEQ ID NO: 3519 - DNA, 417 bp, Zea mays
  Clone ID: LIB3061-012-Q1-K1-A2
agttacctttggtgcatttattggcacaaaacatcagggcacaacaactacaacaggtggggctagcaaaccttgctgcctactctcagcaacagcagtttcttccattcaaccaactagctgcattgaactctgcttcttatttgcaacaacaacaactaccattcagccagctacctgctgcctacccccagcaatttcttccattcaaccaactggcagcattgaactctcctgcttatttacagcagcaacaactactaccattcagccagctagctggtgtgagccctgctaccttcttgatacaaccacagttgttgccgttctaccagcacgctgcgcctaacgctggcaccctcttacaactgcaacaattgctgccattcaaccaacttgctttgacaaacccagcag

SEQ ID NO: 3520 - DNA, 392 bp, Zea mays
  Clone ID: LIB3061-012-Q1-K1-A3
cagaaacacacctagcgaagcgcactatcaacgacctaacaacaatggctaccaagatattgtgcctctttgcgcttcttgccctttttgtgagcgcaacagatgcgtgcattattccacaatgctcacttgctcctagtgccattattccacagttcctccctccagttacttcaatgggcttcgaacacccagctgtgcaagcctacaggctacaacaagcgcttgcggtgagcgtcttacaacaaccaattgcccaattacaacagctatccttggcacatctaaccatacaaaccatcgcaacgcaacagcaacagcaattgctaccagcactgagccaactagctgtggagaaccctgtcgactacttgcaacagcagctgcttgca

SEQ ID NO: 3521 - DNA, 447 bp, Zea mays
  Clone ID: LIB3061-012-Q1-K1-A4
ccgaaccgagccacgcatgcgcagcaacatttacgcacatattgcaccaacaatggcacctaaaacattttgccgcgttatgctaattggcctctctgcaagtgctgctacagcgaccattttaccacaatgctcacaagctcctatagcttcccttcttcccccgtacctctcaccaaccagcgtcttcggtatgtgaaaacccaattcttcaaccctacaggatccaacaggcaatcgcagctggcatcttacctttatcacccttgttgcttcaacaatcatcagccctattacagcagatacctttggtgcatttattggcacataacatcatgacacaacaactacaacaacttgtgctagcaaaccttgctgcctactctcagcaacagcagtttcttccattcaaccaactagctgcattgaactctgcttcttatttgc

SEQ ID NO: 3522 - DNA, 386 bp, Zea mays
  Clone ID: LIB3061-012-Q1-K1-A5
ttcgacctcaaccacccgtgcaactgacctatccatgtgaactaccgtctatctagcatctgtaaacccaatgagacagccctatatgatccaacatgcaatcgcagctagcatattacctgcatcacatcttgttcctacaacactcatgatccctattacagcagttacctttggcgcatttattgtaacaaaacatgatggcacaacaactacgacaacttgtgctagcaaaccttgctgcctactctcagcaacaacagtttattacattcaaccaactagctgcattgaactgtgcttcttattagcaacaccatcaactaccattcagccagctatctgctgcctaccctcagcaatctctttcatgcaaccaactgaca

SEQ ID NO: 3523 - DNA, 415 bp, Zea mays
  Clone ID: LIB3061-012-Q1-K1-A6
ctcgacccaagcgacgcattcacagcagcatcaaaagcagactcatgtcataacggcggcagcatcaaacatcagcgggggctatcctacctggccgccctgtaagagctgctacagcgaccattattcaaccatgctgacaagctgctataggtttcctatttgcaacagccatatcaacaacggagtctgctgcatgtgaaataccaatagttaaaccctacatgatacaacatgccatcatagatcgcatctgaccattatcagcatcagcaattacacacttataagcagtatgacagcatgaaccttggtagcatctatagacacacacaatcagggcacatctactacaacactttgcgttacgaaagcttgctgttaatctgagaaacaggatgtcattcaatcaaac

SEQ ID NO: 3524 - DNA, 424 bp, Zea mays
  Clone ID: LIB3061-012-Q1-K1-A7
gcgcgcacgcgtccgcacacgcgtccgctcacgcgtgcggaagcaagaagagcgagagcgagcgcgttacgctgcggtagaagcacaaggtgctgcgcaaggtgaaggagcaccaccgcaagacgcgcaaggaggtcaagacggagggcaaggccggccagctgaagaaggtcgagaaggaccccggcatccccaacgagtgggccttcaaggagcaagagctgatggcgctcaacgcccgacgcgcgcaagcgctccaggagctcgagctcatgatggaagctcgcacggagagggctcggaagacgaagctaggatagctcgaggatgaggaaatagctaatttggcatctgcagcttccgcgcatggcagtgagtttgcagcagatgatgcagcatacgataaagctgctttaacagtggc

SEQ ID NO: 3525 - DNA, 425 bp, Zea mays
  Clone ID: LIB3061-012-Q1-K1-A8
aaaccttgctgcctactctcagtaacttcagtttcttccattcaaccaactaggtgggttgaactctgcttcttatttgcaacaacaacaactaccattcagccagctacctgttgcctacccccaacaatttcttccattcaaccaactggcagcattgaactctcctgcttatttacagcagcaacaactactaccattcagccagctagctggtgtgagccctgctaccttcttgacacaaccacagttgttgccgttctaccatcacgctgcgcctaacgctggcaccctcttacaactgcaacaattgctgccattcaaccaacttgctttgacaaacctagcagtgttctaccaacatcccatcattggtggtgccctcttttagatttcttatgagttatagttcaataataaagttt

SEQ ID NO: 3526 - DNA, 393 bp, Zea mays
  Clone ID: LIB3061-012-Q1-K1-A9
gatctatgttatggggctctatgaggcatgtaattgctccttctgcctctcatagagggtaccattactatgagaagtgatcgtttcagttgtattttgtgacacgagagaaagtcaggagtataaagcagttacctgttaatgtaaaatccatcagggagagcccgaattctgggctctttcctttatcaaacctccatgtatagccaaaacatgctgccattgtcagaggatccatcattgatgatggcattctcaatggcacgtcgtgcagctgcggtgccgcttctattagtcaatggcacctataagtcaactgttagcacataccttgattctgctattctgcaacatcagctacagatgctaaatgagcacaattcactgaaagga

SEQ ID NO: 3527 - DNA, 393 bp, Zea mays
  unsure (1)..(393): unsure at all n locations; Clone ID: LIB3061-012-Q1-K1-B1
cctgggtcgtcagaccattagcttgatctactccagagcgcagaagaacccgatcgagaccgggagggtgttgctcgtggccctcgctctcctggctctcgctgcgagcgccacctccacgcatacaagcggcggctgcggctgccagccaccgccgccggttcatctaccgccgccggtgcatctgccacctccggttcacctgccacctgcggtgcatatcccaccgccggtccacctgccgccgccggtccacctgccaccgtcggtccatgtgccgncgccggttcatctgccgtcgncaccatgccactaccctactcaaccgtcccggactcagcctcatgcccagccacacccatgcccgtgccaacagacgcatccaaacccgtg

SEQ ID NO: 3528 - DNA, 388 bp, Zea mays
  Clone ID: LIB3061-012-Q1-K1-B10
aacacaccaagcgaagcgcactagcaacaacctaacaacaatggctaccaagatatggtccctccttgcgcttcttgcgctttttgcgagcgcaacaaatgcgtccattattccacaatgctcacttgctcctagttccattattccacagttcctcccaccagttacttcaatggccttcgaacacccagctgtgcaagcctataggctacaacaagcgattgcggcgagcgtcttacaacaaccaattgcccaattgcaacaacaatccttggcacatctaacaatacaaaccatcgcaacgcaacagcaacaacagttcctaccagcactgagccacctagccatggtgaaccctgtcgcctacttgcaacagcagctgcttgca

SEQ ID NO: 3529 - DNA, 275 bp, Zea mays
  Clone ID: LIB3061-012-Q1-K1-B11
aggctctgaatcaacccttgatagcctgatacatacgcacacagtagcgggaacgggtcgtctatgccatactgacgaccatgtgggcaaaagtatcttaaaacgaccacagactgaaacaagcaccagcgtctaaaacatgatcataggaccatacaagatgctttggtacagcgaacagactgaaatcctcatattatatggacctgtcaagattacaaactgcttacgatcttacccatgagatgactcatgcatatgtgcgtatcaaaaga

SEQ ID NO: 3530 - DNA, 445 bp, Zea mays
  Clone ID: LIB3061-012-Q1-K1-B12
gcgttgccatacaaccaactgggacagctatagatactatgaccgacgaattgtacatacatcgagcgagcgtacgcacctatctcgagcgcagctatgctgatctcgagcctctgattgccatgcttgacactgcagctgccggagacgatctacctatacactgcgtctaacgcatacaccgtcttacaactgtatgacgtggtagcattaaaccaactcgttgcgacacaccactcagcgacctaacatcaacccatgacagcaggtgccatcctgcagagtgctcatcagctatactccgataatgaaccagtgcgtataatgcctgaggcaccacagcaatccggaagtgaatccctacggctcgccacagtgccaggcgctgcagcagcagtgctgccaccagatcaggcaggtggagccgctgcagcggtaccaggcg

SEQ ID NO: 3531 - DNA, 354 bp, Zea mays
  Clone ID: LIB3061-012-Q1-K1-B2
catcggatggcatgctatcgacacccatgccgcgcgtggcgagcagaacacccccaaggggggaggactgagactgaccatgggagacgcctgcagcgacgctgcagctgcgggccagcagctgacgcaggacgaagatggcggacgacgagggcgtcacgcggagaaggagctcgtacgtgacccaataacccacgactacggatgatcgagcaagctgtactaggacctgccagcgacgccgatgatggcgctcaaccacatctctcgcctgtgcgaatccgtagacgcgtccgtccggttctacgtgaaggcgctcggctctgcgctcatccaggcgccgcaagcgctcga

SEQ ID NO: 3532 - DNA, 416 bp, Zea mays
  Clone ID: LIB3061-012-Q1-K1-A1
caagctgccccgcagcaacgaacacgaaccttggcagaacgaagctgaagtagttcggtgtgaacccagtatggcaaacgcgccgaggatcctggccctcggcctgctgctagcgctcctgtgcgctgccgccggcccggccgccgcgcagaactgcggctgccagcctaacttctgctgcagcaagttcggctactgcggcacgaccgacgactactgcggcgacgggtgccagtcgggcccgtgccgctcgggcggcggcggcggcggcggcggaggcggaggcagtggcggtgcgaacgtggctaacgtggtcagcgacgcgttcttcaacggcatcaagaaccaggccgggagcgggtgcgagggcaagaacttctacacccggagcgcgttcctgagcgccgtcaacaagt

SEQ ID NO: 3533 - DNA, 404 bp, Zea mays
  Clone ID: LIB3061-011-Q1-K1-G12
cgctctcctggctctcgctgcgagcgccacctccacgcatacaagcggcggctgcggctgccagccaccgccgccggttcatctaccgccgccggtgcatctgccacctccggttcacctgccacctccggtgcatctcccaccgccggtccacctgccgccgccggtccacctgccaccgccggtccatgtgccgccgccggttcatctgccgccgccaccatgccactaccctactcaaccgccccggcctcagcctcatccccagccacacccatgcccgtgccaacagccgcatccaagcccgtgccagctgcagggaacctgcggcgttggcagcaccccgatcctgggccagtgcgtcgagtttctgaggcatcagtgcagcccgacggcgacgccct

SEQ ID NO: 3534 - DNA, 395 bp, Zea mays
  Clone ID: LIB3061-011-Q1-K1-G2
aggcgatcattctgaataccatgaggcttgcactgtcgacgacctatctcctatgggggcccagagattatccctccttgcgcttcttgcccttttagtgagcgcaacaaatgcgttcattattccacagtgctcacttgctcctagtgccagtattccacagttcctcccaccagttacttcaatgggcttcgaacatccagccgtgcaagcctacaggctacaactagcgcttgcggcgagcgccttacaacaaccaattgcccaattgcaacaacaatccttggcacatctaaccctacaaaccattgcaacgcaacaacaacaacaacagtttctgccatcactgagccacctagccgtggtgaacccttgcacctacttgcaacagcagc

SEQ ID NO: 3535 - DNA, 422 bp, Zea mays
  Clone ID: LIB3061-011-Q1-K1-G3
attttcagcattcaaaaacacaccaagcgaagcgcactagcaacgacctaacaccaatggctaccaagatattagccctccttgcgcttcttgcccttttagtgagcgcaacaaatgcgttcattattccacagtgctcacttgctcctagtgccattattccacagttcctcccaccagttacttcaatgggcttcgaacatccagccgtgcaagcctacaggctacaactagcgcttgcggcgagcgccttacaacaaccaattgcccaattgcaacaacaatccttggcacatctaaccctacaaaccattgcaacgcaacaacaacaacaacaacagtttctgccatcactgagccacctagccgtggtgaaccctgtcacctacttgcaacagcagctgcttgcatccaacccactt

SEQ ID NO: 3536 - DNA, 157 bp, Zea mays
  Clone ID: LIB3061-011-Q1-K1-G4
ccatggaatgacacccacggctgccaagatattagccctccttgcgcttcttgcccttttagtgagcgcaacaaatgcgtgcattacttcacagggttgactttctcctagtgccataatgccaccgtagcttacactatttgcttgaaactgttac

SEQ ID NO: 3537 - DNA, 170 bp, Zea mays
  Clone ID: LIB3061-011-Q1-K1-G5
cgctctcctggcactcgatgcttagcgtttactaacacacatacttgcacacgggtgctgtagatatccacatcctacgtgtgatcaacgtccttctactaatctgccaaaattggttcacaattcaaataagctgcatcgctcatcgtgccattatctcacaactcctc

SEQ ID NO: 3538 - DNA, 164 bp, Zea mays
  Clone ID: LIB3061-011-Q1-K1-G6
cgacccacgcgtaccgatgcattattatgaagtaaatgaggctttgtctgttgttgctatagctaatcagaggcttcttggtatcccttccggaaagctaaacttaatgcgaggcgctgactgccagcatcatcctatacagagcacaaggcgcacagattata

SEQ ID NO: 3539 - DNA, 437 bp, Zea mays
  Clone ID: LIB3061-011-Q1-K1-G7
ttcagcattcaaaaacacaccaagcgaagcgcactagcaacgacctaacaccaatggctaccaagatattagccctccttgcgcttcttgcccttttagtgagcgcaacaaatgcgttcattattccacagtgctcacttgctcctagtgccagtattccacagttcctcccaccagttacttcaatgggcttcgaacatccagccgtgcaagcctacaggctacaactagcgcttgcggcgagcgccttacaacaaccaattgcccaattgcaacaacaatccttggcacatctaaccctacaaaccattgcaacgcaacaacaacaacaacagtttctgccatcactgagccacctagccgtggtgaaccctgtcacctacttgcaacagcagctgcttgcatccaacccacttgctctggcgaacgtagctgca

SEQ ID NO: 3540 - DNA, 413 bp, Zea mays
  Clone ID: LIB3061-011-Q1-K1-G9
ggaagttctgtgggtagaggactagagactgcagatcgagggtctggcagcgggccgtggcagttgggtgattacgacgaagagagatgggcctcctcgacaagctgtgggacgacaccgtcgcaggcccgcgcccggacaccgggctcggccgcctccgcaagcagcctgtgcgtcccgccgccgtcaagatcagtgatccggccggggacgctgcggcgttcgtgccgccctcgccggcttcgggtagcgaggagacgccggtgaaggtgacgcgcagcatcatgatcaagcgccccgcggggtacccgtcgtcgccgaggagcgcggcaagcacgccaccggcctcgccactggggactacggccgccatctcgccgtttgccggcgccggtggtcggttcaaaaggaaa

SEQ ID NO: 3541 - DNA, 386 bp, Zea mays
  Clone ID: LIB3061-011-Q1-K1-H10
caactagcaacatagaaagcacaatagtgtaccaacaatggcagccaaaatattttgcttcctgatgctccttggtctttctgcaagtgttgctaccgcaaccattttcccacaatgctcacaagctcctatagcttcccttcttcccccatacctctcaccagcggtgtcttcaatgtgtgaaaccccaattgttcaaccctacaggatccaacaggcaatcgcaacaggcatcttaccattatcacccttgttcctccaacaaccgtcagccctattacagcagttacctttggtccatttggtggcacaaaacatcagggcacaacaactacaacaacttgtgctagcaaaccttgctgcatactctcagcaacatcagtttc

SEQ ID NO: 3542 - DNA, 339 bp, Zea mays
  Clone ID: LIB3061-011-Q1-K1-H11
caggaagcaggggctagacgcggatcgtggagcatgatgggcggctgcgagagcgggatgatggtccatgaagagagggtgggccatgctgatatcccgaccagtttcggtcccgagctgcgcgcctgctctacgatgccgtcttgcaagacctagtaccgttcgggagaacggctgcgaaaactgcccgtttctagagatggacggagagcacgacaacgtcagctactgtactaccctcatcttcactggaactatctctctgatggaccccattacgagctgtgccttccgttggttgagaattggcaggatcattcctgggtgctatacacttgc

SEQ ID NO: 3543 - DNA, 428 bp, Zea mays
  Clone ID: LIB3061-011-Q1-K1-H12
agatattgatggcgatgttggtggacccacctgacatcaagagggagatgcagatggagatgcagcccgcaccaccaccatctgctgcggcgtcggcatcgcagacggcgtggccgctggattggccggtggacgggcgctcgctcaatcctccatcgctgcccactatatcagtccagtgtttggactggaatgcgcacagtctgttactttgatggcaaaacgtatgaattggttggacagagccgccaacgaagtaccatgggtaaggatgtgctggacaatgaaagcttttgtcttataacaataggatacaagaagcttgcaagtggttttgtgaaggcttttgtgaatcacttgaatcattagttcttttaagaatggttttgtatagcgttagcaaatatgtgtaaaacacattaagatgt

SEQ ID NO: 3544 - DNA, 265 bp, Zea mays
  Clone ID: LIB3061-011-Q1-K1-H2
attgagaccaacaagcaacatagaaagtggaatccagtagcaacaatagagcaacaatggcgaccaagatattttccctccttatgctccttgctctttctacatgtgttgctaacgcgacaattttccctcaatgctcacaagctcctatagcttcccttcttcccccataccttccatcaattatagcttcaatatgtgaaaacccagctcttcaaccatataggcttcaacaagcaatcgcagcaagcaacatacctttatc

SEQ ID NO: 3545 - DNA, 421 bp, Zea mays
  Clone ID: LIB3061-011-Q1-K1-H3
cgtgtctgcgattgagaaacgcgtagctgcttggacatttctcccggaagaaaacgccgaatcactccaggtcctgcgctacgaaaccggccagaagtatgacgcccacttcgactatttccacgacagaaacaacctgaagctcggcggccagcgagttgcgaccgtccttatgtacctcacagatgtcaagaaaggtggagagactgtatttccaaacgctgagggaagccatttacagtacaaggacgaaacttggtcggagtgttcaagatctggcctggcagtgaagccaaagaaaggagacgcgctactgttcttcaacctccacgtcaacgccacagccgatacaggcagtctccacgggagctgcccggtgatcgagggcgagaaatggtccgcgacgaaatggatccacgtc

SEQ ID NO: 3546 - DNA, 419 bp, Zea mays
  Clone ID: LIB3061-011-Q1-K1-H5
cccacgcgtccggggtcttcagaccattagctttatctactccagagcgcagaagaacccgatcgacaccatgagggtgttgctcgttgccctcgctctcctggctctcgctgcgagcgccacctccacgcatacaagcggcggctgcggctgccagccaccgccgccggttcatctaccgccgccggtgcatctgccacctgcggttcacctgccacctccggtgcatctcccaccgccggtccacctgccgccgccggtccacctgccaccgccggtccatgtgccgccgccggttcatctgccgacggcaccatgccactaccctactcaaccgacccggcctcagcctcatccccagccacacccatgcccgtgccaacagccgcatccaagcccgtgccagctgcagggaacct

SEQ ID NO: 3547 - DNA, 192 bp, Zea mays
  Clone ID: LIB3061-011-Q1-K1-H6
agggagaccaacaagcaacatagaatgtggaattcagcagcatcaatagaacaacggtgactgccaagatattatccctacttatgctccttgctctttctacatgcgttgctaacgcgacaattctacctcaatgctcacaagctgctatagcttcccttattcacccatacctttcaataattatagctt

SEQ ID NO: 3548 - DNA, 434 bp, Zea mays
  Clone ID: LIB3061-011-Q1-K1-H7
ctgggtcttcagaccattagctctatctactccagagcgcagaagaacccgatcgacaccatgagggtgttggtcggtgccctcgctctcctggctctcgctgcgagcgccacctacacgcatacaagcggcggctgcggctgccagccaccggcgacggttcatctaccgccgccggcgcatctgccacctgcggctcacctgccacctccggtgcatctgccaccgccggtccacctgccgccgccggtccacctgccaccgtcggtccatgtgccgccgtcggttcatctgccgacgacaccatgccactaccctactcaaccgacccggcctcagcctcatccccagccacacccatgcccgtgccaacagccgcatgcaagcccgtgccagctgcaaggaacctgcggcgatggcagcaccccgatcct

SEQ ID NO: 3549 - DNA, 415 bp, Zea mays
  Clone ID: LIB3061-011-Q1-K1-H8
caactagcaacatagaaagcacaatagtgtaccaacaatggcagccaaaatattttgcctccttatgctccttggtctttctgcaagtgctgctacggcgaccattttcccgcaatgctcgcaagctcctatagcttcccttcttcccccgtacctctcaccagcggtgtcttcggtatgtgaaaacccaattcttcaaccctacaggatccaacaggcaatcgcagctggcatcttacctttatcacccttgttcctccaacaatcatcagccctattacaacagttacctttggtgcattaattggcacaaaacatcagggcacaacaactacaacaacttgtgctagcaaaccttgctgcctactctcagcaacagcagtttcttccattcaaccaactaggttcattgaac

SEQ ID NO: 3550 - DNA, 410 bp, Zea mays
  Clone ID: LIB3061-011-Q1-K1-G11
cttcaacaagcaatcgcagcaagcaacatacctttatcgcccttgttgtttcaacaagcgccagccctatctttggtgcagtcattggtacaaaccatcagggcacaacagctgcagcaactcgtgctacctctgatcaaccaagtagctctggcaaacctttctccctactctcagcaacaacaatttcttccattcaaccaactgtctacactgaaccctgctgcttatttgcagcaacaactattaccatttagccagctagctactgcctactctcagcaacaacaacttcttccatttaaccaattggccgcactgaaccccgctgcttatttgcagcagcaaatactactaccatttagccagctagctgcagcaaaccgtgcttccttcttgacacagcaaca

SEQ ID NO: 3551 - DNA, 429 bp, Zea mays
  Clone ID: LIB3061-030-Q1-K1-F2
gggcacagcagctgcagcaactcgtgctacctgtgatcaaccaagtagctctggcagacctttctccctactctcagcaacaacaatttcttccattcaaccaactgtctacactgaaccctgctgcttatttgcagcaacaactattaccattcagccagctagctactgcctactctcagcaacaacaacttcttccatttaaccaattggccgcactgaaccccgctgcttatttgcagcagcaaatactactaccatttagccagctagctgcagcaaaccgtgcttccttcttgacacagcaacagttgctgcctttctaccagcagtttgcggctaaccccgcaaccctcttacaactacaacaattgttgccctttgtccaacttgctttgacagaccgagcggtcttctaccaacaacaca

SEQ ID NO: 3552 - DNA, 433 bp, Zea mays
  Clone ID: LIB3061-030-Q1-K1-F4
cacaatagtgtaccaacaatggcagccaaaatattttgcctccttatgctccttgggctttctgcaagtgctgctacggcgaccattttcccacaatgctcacaagctcctatagcttcccttcttcccccgtacctctcaccagcggtgtcttcggtatgtgaaaacccaattcttcaaccctataggatccaacaggcaatcgcagctggcatcttacctttatcacccttgttcctccaacaatcatcagccctattacagcagttacctttggtgcatttattggcacaaaacatcagggcacaacaactacaacaacttgtgctagcaaaccttgctgcctactctcagcaacaacagtttcttccattcaaccaactagctgcattgaactctgcttcttatttgcaacaacaacaactaccattca

SEQ ID NO: 3553 - DNA, 425 bp, Zea mays
  Clone ID: LIB3061-030-Q1-K1-F5
cccacgcgtccgcccacgcgtccggtaacgccgtcgccgccctacggctcagagctgggtcgtcatcttctccggcaacgagcacccaaagatggtggtccttcaaccagatcggttcctgagcgagctgacgagcatgtacgagcggagcacggagaagggctccgtctgggtcaccatgaagcgatcaactctcaagggcaaggcacagttgcggaagatggagaataaggggcaggaggtagagcacaggtgcctcgtccgcgccttcaatggcaagaagaacatctccacctcggtttctctaaaggagtacacaaagtttcaagcttcatacgcaacagttcttaaggcccatatgcatgctctgaagaaaagggagaggaaagacaagaagaagactgcagatgctgagaaggcaattg

SEQ ID NO: 3554 - DNA, 244 bp, Zea mays
  Clone ID: LIB3061-030-Q1-K1-F6
gcgctaacgtgcctccaacgcctagtttttgcgggaccagagggagacagaggggcggagttagagagagaggggatctgcgacgtgttttgctctgcggcggcatgtctgtgtatcccattgaggttatgtacacaattacaccgcggtcggtgggtgtctttttagttaattatcacaagtgacagtagaaaggaacagattgtgatgaggttgaatggatgaataaatcgctagtccgccc

SEQ ID NO: 3555 - DNA, 398 bp, Zea mays
  Clone ID: LIB3061-030-Q1-K1-F7
ctccccgcgtccgctagccctagccgccgtccgccgacttcatcgtcgccgtcgtcgagacctcttcacgcactggaaagcttaaagtccgacatcaatggcgaagcatcatcctgatctcatcatgtgccggaagcagcctggcatcgcgattggccgcctttgcgagaaatgtgatggcaagtgtgttgtctgcgactcgtacgtgcgcccatgtacgcttgtccgggtctgcgacgagtgcaattatggttccttccagggaaggtgtgtgatctgtggaggagtcggcatctcagacgcttactactgcaaggagtgcacccagcaggagaaggaccgggacggttgccccaagatcgtgaatctccgaagcgccaagacggatctcttctatg

SEQ ID NO: 3556 - DNA, 446 bp, Zea mays
  Clone ID: LIB3061-030-Q1-K1-F8
caaagctataagtaaccctcatatgtatttgcactcatgcatcacaaaacatccttctatcagtaccatcaggcatcattcatcttagtagtataggcaccaaatcaaatctgcaacatcaattatctaactccaaaaaccatgaagctggtgcttgtggttcttgctttcattgctttagtatcaagtgtttcttgtacacagacaggcggctgcagctgtggtcaacaacaaagccatgagcagcaacatcatccacaacaacatcatccacaaaaacaacaacatcaaccaccaccacaacatcaccagcagcagcaacaccaacaacaacaagttcacatgcaaccacaaaaacatcagcaacaacaagaagttcatgttcaacatcaacaacaacaaccgcagcaccaccaccaacaacaacaacaactgcaccaacaaca

SEQ ID NO: 3557 - DNA, 428 bp, Zea mays
  unsure (1)..(428): unsure at all n locations; Clone ID: LIB3061-030-Q1-K1-F9
ctcgcagtgaacaatatgaccaactcaaacgcatatcactaccctgccgtcgggggccacaacatcatacccgagccattcatgcagactcagaacatgccattcgctcctctggtgaattatgctgccctagtgaacctgtcttcagaccaaggcagcaactcgttcggttgctcggacttcagcctcgagaacgactccaggacccctgacataacttcggtgcctgcgcccgttgccaccttggccgccgttggcgagtctgtgttcgtccagaacaccgtcggccatgctgtggcgtctcctgcgacggngaacactggtgttgatctcgccgagttggagccgtatatgaatttcctgatggacggtggttcagacgactcgatcagcactctcttgagctgtgatggatcccaggacgtggt

SEQ ID NO: 3558 - DNA, 264 bp, Zea mays
  Clone ID: LIB3061-030-Q1-K1-G1
ctctcaccagcgtatgggggaagaattgaagctataggagcttgtgagcattgtgggaagatggttgcggtatcagcgcttccagaatgaccaacgagcatcagctagtatagcttcatttatcagccgatccatctccgagcacaggtcaccaccgtgcagcctagccaccgtctaacaccgagtcttctctgttcttctgcggcgaacaaagtcaatccatagccgtgttgctggtgctgattttttttttccaacaagatt

SEQ ID NO: 3559 - DNA, 387 bp, Zea mays
  Clone ID: LIB3061-030-Q1-K1-G10
gtaggggaccccatggagtacaatgccatactgaggaggaagctggaggaggacctcgaggccttcaaaatgtggagggcggcctccagtgttgtgacctcagatcaacgttctcaaggctcaaacaatcacactggaggtagcagcatcaggaataatccagtgcagaacaagctgatgaacggcgaagatccaatcaacaataaccacgctcaaaccgcaggccttggcgtgaggcttgctactagctcttcctcgagagatccttcaccatcagacgaagacatggacggagaagtagagattctggggttcaagatgcctaccgaggaaagagtgaggaaaagaaaggaatccaatagagaatcagccagacgctcgagatac

SEQ ID NO: 3560 - DNA, 441 bp, Zea mays
  Clone ID: LIB3061-030-Q1-K1-G2
gaaagagattatgaacatggtggatttaatagagaaattgactatcccatggaccgagatcgtgaaggagatgagagacgtcctagagaacatgatcgtacagcagaaatgcataatgtggattcagataatgacaaagataaggaacatgtatcaagaaaaaggttcagccgcccaaaaggtcgtgatagcagagatttatcaagttccagtgatggtcttcaaaatgatggaaaacatcagttggataaaactattcagatgcgcgaggaccttgaaaatgaggttaaccagattaaggataaaatatctgggaaagaacagcacattgcagatttgcagaagaaagctcagaaactagaggatgaactggttgccgcacggaaagtatcttcagaacgacagttggcggttacagacctgtacaaacatttcctccaa

SEQ ID NO: 3561 - DNA, 429 bp, Zea mays
  Clone ID: LIB3061-030-Q1-K1-G3
gtggcaggcacaggcgatggctagaggatccttgacaccatcaatgcagattgtatgagtatcctctagccattgagaggtggcaggcacaggcgatggaggctgataaagaattctacagtcggatacgcatacctgatgaagatgattcaagtagtcagaagcacacatgccgtagttctgcttcacagggtgccgatagcaaacctgcatctgagcggcaatcaagaggtgtggagcatataaaacagggtctcgtgaactttatagcctcgctgctgatgccattatatagaggaaaaaagatcgaccgagaggggtacaaaacaatcatgcgcaaatctgttaacaagatcattgatacatgctcagaaggagagaaatcaatgactactcttgagtttcttgatgataaaaggaaaattaaga

SEQ ID NO: 3562 - DNA, 431 bp, Zea mays
  Clone ID: LIB3061-030-Q1-K1-G4
gatttgttgatttgactatggaacatatgggggagatgaaggttgtggtcaggacggttgtttcactcaccaaggaggaggagaaagaactcaaggaaaccttgcaggatatccttggggaaaacaaaactattttggttgaacagaagattgactacagcatcatgggaggattagtgattgaattcgggcagaaggtgcttgatatctcaatcaggaacagggcgaagcaaatggaggcgttcttgaggcaaccacttgacttctaacagccttttggataaaagaagcatcatcggaatgcagaggctgtcctgttgaaggttttcctgtgtctgcaattttaatctggccttttgaataaaatgtttcctctaacaagtgaagggcactgtttttattgtctcgtgggccacagatgcctgctgaac

SEQ ID NO: 3563 - DNA, 428 bp, Zea mays
  Clone ID: LIB3061-030-Q1-K1-G5
ctctatacctctcgccctctgagtctcgcgcgatcaggctgcaggccatctgggctgcggcttccggcatccaccaggcgtcaatacggtgcagcgagcagcgagcagcaagtcaccgagcagccgagcgaccgccgagcacagggcaccaccgagcagccgagccaccgccgagcaccgagtcttctctgttcttctgcggcgaacaaggtcaatccagggccgtggtgcgggtgctggttttttttttccaacaagtttatgttggtcgctcgaccgctgcagcaatgaagatacagaaagcaaatgcaggtgtccttacaaacttcgaagtccttgacttcttgcggtcaagaggtgccaaaattgacccaatgggatgtttgggggctgttgctgtatcagagtgtaaggtgtatgagtatatc

SEQ ID NO: 3564 - DNA, 425 bp, Zea mays
  unsure (1)..(425): unsure at all n locations; Clone ID: LIB3061-030-Q1-K1-G6
cggaagcgttcggcggcacctcacagtggcggtggcggcggccccgccctcggcttggtcctcaccttcgtcgggaccgctctacccgacgcctccacccaccgagcaggaggtggagagggtcaagctcgagcaggttatgaggagactagagaaaacagcaaggtatttcaagaatttgggtaccctggggttctggtcccaattggtgtgcacaattatttctgctggaattttggcattctctacagttgtaacggggaaggtgacatcaccctttacattctatgcaactgctgctggtattgctgctgcttttatttcagtcttctggtcatttggttacatccgtctctctgaaaggcttagaaaaacatccaaagaacctgctaaggctcctncacgtgctgatgttgntaagagcc

SEQ ID NO: 3565 - DNA, 422 bp, Zea mays
  Clone ID: LIB3061-030-Q1-K1-G7
gctctacgaggccgactcgcgcagctttcacgacctcgccgagcacgacgtgagcgtgttcttcgccaacatcaccgcggggtccatgagcgcgccattgttcaacacccgttcgttcaagatcgcctacgtgcctaacggcaagggctacgccgagatcgtgtgctcgcaccgtcagtctcaagacggcgagagcgagcgcgagcgctacaagcgcaggtggagcgatgtagaacatgtagaatcggctgtcgagcactatatggcctcgctgctgatcgcacatctatcgagcgcggctgatcgaccgcacggcgtacgtggcgatcatgcgcaaatctgttgacaagatcattgatacatgctcagaatgagagatatcaatgactactcttgagtttcttggtgataaaaggaaaatt

SEQ ID NO: 3566 - DNA, 419 bp, Zea mays
  unsure (1)..(419): unsure at all n locations; Clone ID: LIB3061-030-Q1-K1-F12
gtccggcagcagagagcgggggtgcagagagatcgagatccggaggccgcgagtgggagcgccaccaccagcgactgcggcaatggcgggcacggtgacggtcccggggtcgtcgaccccctccacgccgctgctcaaggacgagctcgacatcgtgatcccgacgatccgcaacctcgacttcctggagatgtggcggcccttcttccagccctaccacctcatcatcgtgcaggacggcgacccgaccaagaccatcaaggtgcccgagggcttcgactacgagctctacaaccgcaacgacatcaaccgcatcctcgggcccaaggcctnctgcatctcattcaaggactccgcctgccgctgcttcggctacatggtctccaagaagaagtacatctacaccatcgacgacgact

SEQ ID NO: 3567 - DNA, 428 bp, Zea mays
  unsure (1)..(428): unsure at all n locations; Clone ID: LIB3061-030-Q1-K1-E1
gcggcgcgcggggtggcggtgctctcgcgatcctcgtgtcgattccagcggcgggggtgccattccctcccctggccgttgcccgcgcctcgcggtcgcgcaccggaaccggagccccgccgcgaatcgagggttgcctccgcctcgccccctcctcccgagactcctagcggcaggaattaggacgagggtaacaggcgacagaggctgcgaaggacgccccttcgtcaaatgcgccggcgaccgatccgtggaggagcagccggagcacgcaggaggtgaagtagcaaagttattttcagacgcgggccttgtatgtattgcaagtttgatatctccatataggagagaccgtgaatcttgccgtgcattgttatcggatggtagctntattgaagttttcttgaatatgtccttggaattatgtg

SEQ ID NO: 3568 - DNA, 382 bp, Zea mays
  Clone ID: LIB3061-030-Q1-K1-E10
gtcgtacgaggacaacatcaagaagatcatcgatttcagcacagtcgaatcgtgcggagtttgctactgccaccttgcgcgcccttcttccctgccgagcccacactgaccttcatctcttcaaggatggcatccgtcccctctgggaggatcctgcaaaccagaatggtggcacgtggataattagattcaaaaaggcagtttcaggtcgattttgggaggatacggtgctagtggtagtaggcgaccagcttgagtatagcgatgatgtctgtggtgtcgagcttagtgtccgttacaacgaagacattctgagcgtctggaaccggaacgcatcataccatcacgctgcgatggcatcgaaggatactatcaagaggca

SEQ ID NO: 3569 - DNA, 410 bp, Zea mays
  unsure (1)..(410): unsure at all n locations; Clone ID: LIB3061-030-Q1-K1-E11
gtttatgccagtgctcagtcaactagccatggtgaaccctgccgtctacctagaacggctttcatctagcccgctcgcggtgggcaatgcacctacgtacctacaacaacagttgctgcaacaaattgtaccagctctgactcagctagctgcggcaaaccctgctgcctacttacaacagttgctaccattcaaccaactggctgtgtcaaactctgctgcgtacctacaacagcgacaacagttacttaatccattgccagtggctaacccattggtcgctacctatctgcatcatcaacaacaattgctgccatacaaccaggtctntttgatgaaccctgccttagcacaacccatcgttggacgtgacatctactagatccatatgacatgtactcgacaatggt

SEQ ID NO: 3570 - DNA, 430 bp, Zea mays
  Clone ID: LIB3061-030-Q1-K1-E12
tccgacaggtgccattgggaagcaaataaatgatggaattcgtctaatgggccgagcaggagaagaaatcaaatggcctattcaccttgaggtgtcaagggcaactgcaagggccaaagctgccgtggaagctgctggtgggacagtaaggctggtgtactacaacaaacttggattacggacactcctgaaacctgagtggtttgagaagaagggccgactgttaccaaaagcagcaaggcctacacccaagcagcgagataaggtcgatagcattggccgtctgcccgtgccgacaaagccactccccttcacggcatacgagctggagtttgcagcccaacgtgaggctgcccgcgtgactgcattaagatgagaacacgttggcaacacctttatttttatgaaagcatgcgccactggatgtgta

SEQ ID NO: 3571 - DNA, 428 bp, Zea mays
  Clone ID: LIB3061-030-Q1-K1-E2
ggggactgatgcttggggtggaactcgttacggacagaaaggagaagacccctgccgggtgagaaaccattgaactgtttgagaagctcagagatctcggggtactagttggaaagggcggtctgcatggtaacgtcttcagaataaaaccaccgatgtgcttttcgaaggacgatgcagacttcttggtggactccatggactacgcaatgtcaaggctctgaaggaacatgctctgagttgacaatgtgtctgcgtggaaacaacacttcctgcaaccgcaagatgcatggcctgaaatgaaactgaaaggcagatgatttaatgggcatgctccccgggtggtatgttggtggtgttatggtgaagtttaatagtcccccttccccgaataaattgatgaaaggggacagaacgtcttgcccagc

SEQ ID NO: 3572 - DNA, 422 bp, Zea mays
  Clone ID: LIB3061-030-Q1-K1-E3
gcattcagaaacacaccaagcgaagcacattagcaacaacctaacaacaatggctagcaagatattatccctccttgcgcttcttgcgctttttgcgagcgcaacaaatgcgttcattattccacaatgctcacttgctccaagttccattattacacagttcctcccaccagttacttcaatgggcttcgaacacccagctgtgcaagcctataggctacaacaagcaattgcggcgagcgtcttacaacaaccaatttcccagttgcaacaacaatccttggcacatctaacaatacaaaccatcgcaacgcaacagcaacaacaattcctaccagcactgagccacctagccatggtgaaccctgccgtctacttgcaacagcagttgcttgcatcaaacccacttgctctggcaaacg

SEQ ID NO: 3573 - DNA, 423 bp, Zea mays
  Clone ID: LIB3061-030-Q1-K1-E4
ctagcaacatagaaagcacaatagtgtaccaacaatggcagccaaaatattttgccgcctgatgctccttggtctttctgcaagtgctgctacggcgaccattttcccacaatgctcacaagctcctatagcttcccttcttcccccgtacctctcaccagcggtgtcttcggtatgtgaaaacccaattcttcaaccctataggatccaacaggcaatcgcagctggcatcttacctttatcacccttgttcctccaacaatcatcagccctattacagcagttacctttggtgcatttattggcacaaaacatcagggcacaacaactacaacaacttgtgctagcaaaccttgctgcctactctcagcaacaacagtttcttccattcaaccaactagctgcattgaactctgcttctta

SEQ ID NO: 3574 - DNA, 423 bp, Zea mays
  Clone ID: LIB3061-030-Q1-K1-E5
caaagttgggcttttggacagctgtggtgtgcacggcagctctgtgacttgtgaggaggaagggaggaagaaagcggatccatggcgtcgaagcggatcctcaaggagctcaaggacctgcagaaggatcctcccacctcttgcagcgcaggccctgttgccgaagatatgttctactggcaggcgacgattatggggccatcagatagcccatacgctggtggcgtatttttggtcactattcactttccaccggactacccattcaaaccaccgaaggttgcattcaagacgaaggtttaccatccgaatatcaacagcaacgggagcatctgtcttgatatcttgaaggagcaatggagccctgcactgacagtttctaaggtcctcctctcaatttgttcccttctgacggacccaaac

SEQ ID NO: 3575 - DNA, 425 bp, Zea mays
  Clone ID: LIB3061-030-Q1-K1-E6
attgagaccaactagcaacatataaagcacaatagtgtaccaacaatggcaggcaagatattttgcttccttatgctccttggtctttctgcaagtgttgctaccgcaaccattttcccacaattctcacaagctcctatagcttaccttctacccgcatacctatcaccaacggagacttcaatgtgtgaaacctcaactgttcaaccctacaggatccaacaggcattctcatcatgcatcttaccattatcacccttgttccttcaacaaccgtcagccctattacagcagttacctttggtccatttggtggcacaaaacatcatgctacaacgactacaacaacttgtgctagcaaaccatgctgcatactctcatcaacatcaatttcttccattcaaccaactggctgcattgaactc

SEQ ID NO: 3576 - DNA, 425 bp, Zea mays
  Clone ID: LIB3061-030-Q1-K1-E7
gcaggcaggtcggcgaggagggcaggaagaccgaagaccgagccgtgcgggggctggggacgggaacgggacaggaccccaaaatctcagatccttcctgcccgcccgcccgtgcccgtcgacgcgtcgttcttgccggccgcgcctcacctccgccctctcctcctccagggggatcggatacgccacaggctgcgcgatggtgctgtgggtcttcggctacggctccctcatctggaaccccggcttcgacttcgacgacaaaatcctcggcttcatcaagggctacaagcgcacctataatctcgcttgcattgaccacagaggcacaccggagcatccggcgaggacctgcacgcttgaaaccgacgacgaggccatatgctggggaattgcatattgtgtcaggggtggtccagaaaaag

SEQ ID NO: 3577 - DNA, 390 bp, Zea mays
  Clone ID: LIB3061-030-Q1-K1-E8
tgaccacggaaccacacccccagagaaaccattctacatattctcatatacactcatgagcacatagcgctaggcgccataccaaccatgagcgacctgttatcctacatttccaaggtcatgtgcatcaaggcaagatcggaggcaacacaagccggcgaggacagcggctgcccagcggacgagtgccgcgtctgcctgtccaagattcggctcggcgaggctacccgccgactgccgtgtcgccatgtgttccaccgggactgcgtcgaccggtggctctcgtcctgcaagcgaacctgtccgctgtgccgagtttatgtggccgatgggaacaagcagccggtggcggcaaagcacaccagccgtgaagcacatgcactcgccgac

SEQ ID NO: 3578 - DNA, 430 bp, Zea mays
  Clone ID: LIB3061-030-Q1-K1-E9
cggacgcgtgggttcaaaaacacaccatagcgaagcgcactagcaacgacctagcgcgatggctaccaagatattagccctccttgcgcttcttgcccttttagtgagcgcaacaaatgcgttcattattccacagtgctcacaagctcctatagcttcccttcttcccccatacctctcaccagcggtgtcttcaatgtgtgaaaacccaattgttcaaccctacaggatccaacaggcaatcgcaacaggcatcttaccattatcacccttgttcctccaacaaccgtcagccctattacagcagttacctttggtccatttggtggcacaaaacatcagggcacaacaactacaacaacttgtgctagcaaaccttgctgcatactctcagcaacatcagtttcttccattcaaccaactggctgca

SEQ ID NO: 3579 - DNA, 431 bp, Zea mays
  Clone ID: LIB3061-030-Q1-K1-F1
agcaattagctcatcgactccagattggagaactcgacaccatgaaggtgctgatcgttgcccttgctctcctggcgctcgctgcgagcgccgcctccagtacaagcggcggctgtggctgccagacaccaccgtttcatctaccgcctccgttctatatgccgcctccgttctatctgccgccgcagcagcagccgcagccatggcaataccccactcaaccaccgcagctaagcccgtgccagcagttcggatcctgcggcgtcggcagcgtcggcagcccgttcctgggccagtgcgtcgagttcctgaggcaccagtgcagcccggcggcgacgccctacggctcgccacagtgccaggcgctgcagcagcagtgctgccaccagatcaggcaggtggagccgctgcaccggtaccaggcgacatac

SEQ ID NO: 3580 - DNA, 424 bp, Zea mays
  Clone ID: LIB3061-030-Q1-K1-F10
caagcaacatagaaagtggaatccagtagcaacaatagagcaacaatggcgaccaagatactttccctccttatgctccttgctctttctgcatgtgttgctaacgcgacaattttccctcaatgctcacaagctcctatagcttcccttcttcccccataccttccatcaatgatagcttcagtatgtgaaaacccagctcttcaaccctataggctccaacaagcaatcgcagcaagcaacatacctttatcacccttgtttcaacaatcgccagccctatctttggtgcagtcattggtacaaaccatcaaggcacagcagctgcagcaactcgtgctacctgtgatcaaccaagtagctctggcaaacctttctccctactatcagcaacaacaatttcttccattcaaccaactatcta

SEQ ID NO: 3581 - DNA, 401 bp, Zea mays
  Clone ID: LIB3061-030-Q1-K1-F11
ccagatcagcaaagcggcagtgcgtagagaggatcgtcgaacagaacagcatggggagggtcatcgttctcgtcgtgtgcctggctctgtcagctgccagcgcctctgcaatgcagatgccctgcccctgcgcggtgctgcagggcttgtacggcgctggcgccggcctgacgactatgatgggcgccggcgggctgtacccctacgcggagtacctgaggcagccgcagtgcagcccgctggctgcggcgccctactacgccgggtgtgggcagacgagcgccatgttccagccgctccggcaacagtgctgccagcagcagatgaggatgatggacgtgcagtccgtctcgcaacatctgcagatgatgatgcatcttgagcgtgccgctgccgccagc

SEQ ID NO: 3582 - DNA, 389 bp, Zea mays
  Clone ID: LIB3061-030-Q1-K1-D9
cccacgcgtccgatcaaagatgagaagcgcgtgctgaccggagaggagctgttcgtgaacaagacccacgggccgtacaagagcgcgaccgaggtgtgggaccacgaggactgagcggagctgccgtgccgccggatccctccactccacctgatgaaaccagaataaaggataccgacgcacctgtcagtcacctccctcccgtgccttgcgagagcggcagcctctcgcacagggaagatgctctgtgtctgagagcatgcagcctcgcacgagaaagatgcagaaggagtgtgtgtggcgcgcaatacactcctgtactgtacgatagactgaataataataaagaagaaaacgcagcagtttgccgttgcgttttcctttgtgct

SEQ ID NO: 3583 - DNA, 424 bp, Zea mays
  Clone ID: LIB3061-030-Q1-K1-C5
atgttcccgcaatgctcgcaagctcctatagcttcccttcttcccccgtaccgcgtcggcagcggtgtcttcggtatgtgaaaacccaattcttcaaccctacaggatccaacaggcaatcgcagctggcatcttacctttatcacccttgttcctccaacaatcatcagccctattacaacagttacctttggtgcatttattggcacaaaacatcagggcacaacaactacaacaacttgtgctagcaaaccttgctgcctactctcagcaacagcagtttcttccattcaaccaactaggttcattgaactctgcttcttatttgcaacaacaacaactaccattcagccagctacctgctgcctacccacagcaatttcttccattcaaccaactagcagcattgaactctcctgcttat

SEQ ID NO: 3584 - DNA, 421 bp, Zea mays
  unsure (1)..(421): unsure at all n locations; Clone ID: LIB3061-030-Q1-K1-C7
gcattcagaaacacacctagcgaagcgcactagcaacgacctaacaacaatggcttgcaagacattatccctccttgcgcttcttgccctttttgtgagtgcaacaaatgcgttcattattccacaatgctcacttgctccgagtgccattattccacagttcctccctccagttacttcaatgggcttcgaacacccagctgtgcaagcctataggctacaacaagcgcttgcggcgagcgtcttagaacaaccaattgcccaattacaacaacaatccttggcacatctaaccatacaaaccatcgcaacgcagcagcaacaagcactgaaccacctagccgtggtgaaccctatcgcctacttgcaacaacagctgcttgcatccaacccacttgctnntgcaaacgtagctgcatac

SEQ ID NO: 3585 - DNA, 425 bp, Zea mays
  Clone ID: LIB3061-030-Q1-K1-C8
ggcggagggcacgcggccaccggcatgcccgccggccacggcacgcgtcccggcgcgacaggcgtagctggaaccggcggcgcgttcccccatgcagctgagcacaagacgggcggcggcatccttcgccgctccggcagcagctccagctccagcagctcgtcatctgaagacgacggcatgggtgggcgccggaagaagggcctgaaggagaagatcaaggagaaaatgccaggaggccacagggaaggccagggccaggcgacggccaccggtgcgtacggcgggacagggtacgtggctgggccgacgaccggaggcccccacgagaagaagggtgtggtggagaagatcaaggagaagatcccaggcggccacaaggactacgaccagcatcagcacaccaccgcggcaaccggtggcgg

SEQ ID NO: 3586 - DNA, 430 bp, Zea mays
  Clone ID: LIB3061-030-Q1-K1-C9
caccaagcgaagcacattagcaacaacctaacaacaatggctaccaagatattgtcgctccttgcgcttcttgcgctttttgcgagcgcaacaaatgcgttcattattccacaatgctcacttgctccaagttccattattacacagttcctcccaccagttacttcaatgggcttcgaacacccagctgtgcaagcctataggctacaacaagcaattgcggcgagcgtcttacaacaaccaatttcccagttgcaacaacaatccttggcacatctaacaatacaaaccatcgcaacgcaacagcaacaacaattcctaccagcactgagccacctagccatggtgaaccctgccgcctacttgcaacagcagttgcttgcatcaaacccacttgctctggcaaacgtagttgcaaaccagccacaac

SEQ ID NO: 3587 - DNA, 425 bp, Zea mays
  Clone ID: LIB3061-030-Q1-K1-D1
ctcaaatactgatctcactgatccagtatggctatggcaaaggcaggcgcgccgagggtcgcggcggcccagctggtgactctcgggctatcactcctctgcgctgtcgccggcccggccgccgcgcagaactgcggctgccagccaaacgtatgctgcagcaagtttggctactgcggcacgaccgacgagtactgcggcgacgggtgccagtcgggcccgtgccgctcgggcggcggcggcagcagtggcggcggtggtgcgaacgtggctagcgtcgtcaccggctccttcttcaacggcatcaagagccaggccgggagcgggtgcgagggcaagaacttctacacccggagcgcgttcctgagcgccgtcaaggcgtacccaggcttcgcccatggcgggtcgcaggtgcagggcaagcg

SEQ ID NO: 3588 - DNA, 403 bp, Zea mays
  Clone ID: LIB3061-030-Q1-K1-D10
attttcagcattcaaaaacacaccaagcgaagcgcactagcaacgacctaacagcagtggctaccaagatattagccctccttgcgcttcttgcccttttagtgagcgcaacaaatgcgttcattattccacagtgctcacttgctcctagtgccattattccacagttccttccaccagttacttcaatgggcttcgaacatgcagccgtgcaagcctacaggctacaactagcgcttgcggctagcgccttacaacaaccaattgtccaattgcaacaacaatccttgacacatctaaccctacaaaccattgcaacgcagcatcatcgacaacaacagtttctgccatcactgagccacctagccgtggtgaaccctgtcacctacttgcaacagcagct

SEQ ID NO: 3589 - DNA, 428 bp, Zea mays
  Clone ID: LIB3061-030-Q1-K1-D11
caacaagcaacatagaaagtggaatccagtagcaacaacagagcaacaatggcgacgaagatattttccctccttatgctccttgctctttctgcatgtgttgctaacgcgacaattttccctcaatgctcacaagctcctatagcttcccttcttcccccataccttccatcaatgatagcttcagtatgtgaaaacccagctcttcagccctataggctccaacaagcaatcgcagcaagcaacatacctttatcacccttgttgtttcaacaatcgccagccctatctttggtgcagtcattggtacaaaccatcagggcacagcagctgcagcaactcgtgctacctgtgatcaaccaagtagctctggcaaacctttctccctactctcagcaacaacaatttcttccattcaaccaactgtc

SEQ ID NO: 3590 - DNA, 355 bp, Zea mays
  Clone ID: LIB3061-030-Q1-K1-D12
tggacgtcagcctagcaattagctcatcgactccagattggagaactcgacaccatgaaggtgctgatcgttgcccttgctctcctggcgctcgctgcgagcgccgcctccagtacaagcggcggctgtggctgccagacaccaccgtttcatctaccgcctccgttctatatgccgcctccgttctatctgccgccgcagcagcagccgcagccatggcaataccccactcaaccaccgcagctaagcccgtgccagcagttcggatcctgcggcgtcggcagcgtcggcagcccgttcctgggccagtgcgtcgagttcctgaggcaccagtgcaagccggcggcgacgccct

SEQ ID NO: 3591 - DNA, 432 bp, Zea mays
  Clone ID: LIB3061-030-Q1-K1-D2
gaccaactagcaacatagaaagcacaatagtgtaccaacaatggcagccaaaatatgtggggctccttatgctccttggtctttctgcaagtgctgctacggcgaccattttcccgcaatgctcgcaagctcctatagcttcccttcttcccccgtacctctcaccagcggtgtcttcggtatgtgaaaacccaattcttcaaccctacaggatccaacaggcaatcgcagctggcatcttacctttatcacccttgttcctccaacaatcatcagccctattacaacagttacctttggtgcatttattggcacaaaacatcagggcacaacaactacaacaacttgtgctagcaaaccttgctgcctactctcagcaacagcagtttcttccattcaaccaactaggttcattgaactctgcttcttatt

SEQ ID NO: 3592 - DNA, 428 bp, Zea mays
  Clone ID: LIB3061-030-Q1-K1-D3
atgttgcctccttatgctccttggtctttctgcaagtgctgctacggcgaccatttgcccgcaatgctcgcaagctcctatagcttcccttcttcccccgtacctctcaccagcggtgtcttcggtatgtgaaaacccaattcttcaaccctacaggatccaacaggcaatcacagctggcatcttacctttatcacccttgttcctccaacaatcatcagccctattacatcagttacctttggtgcatttattggcacaaaacatcagggcacaacaactacaacaacttgtgctagcaaaccttgctgcctactctcagcaacagcagtttcttccattcaaccaactagctgcattgaactctgcttcttatttgcaacaacaacaactaccattcagccagctacctgctgcctacccccagc

SEQ ID NO: 3593 - DNA, 432 bp, Zea mays
  unsure (1)..(432): unsure at all n locations; Clone ID: LIB3061-030-Q1-K1-D4
gagcaaccaagtagctctggcaaacctttctccctactctcagcaacaacaatttcgtccattcaaccaactgtctacactgaaccctgctgcttatttgcagcaacaactattaccattcagccagctagctactgcctactctcagcaacaacaacttcttccatttaaccaattggccgcactgaaccccgctgcttatttgcagcagcaaatactactaccatttagccagctagctgcagcaaaccgtgcttccttcttgacacagcaacagttgctgcctttctaccagcagtttgcggctaaccccgcaaccctcttacaactacaacaattgttgccctttgtccaacttgctttgacagaccgagcggcctnctaccaacaacacatcattggtggtgccctcttttagattgcttattagtt

SEQ ID NO: 3594 - DNA, 429 bp, Zea mays
  unsure (1)..(429): unsure at all n locations; Clone ID: LIB3061-030-Q1-K1-D6
gaaaccctagttcgaacgcgccgccgtcaccgtcgtcgctcgcgctctccgcccggatcggagcgagagtaggggcgtgtcggcggtgaaagcgactgcgtcagccatggcggacgaggagcattcggagaggagagaggaggcctccgagcttgcccccttcgacccgaccaagaagaagaaaaagaagaaggttgtcatccaagaaccttctgatgaagtggacaagcttgcagagaagacagaaacactggcagtcgcagaacccgctgaacttaacttcactggaatgaagaagaaaaagaagaagccggtggatcttgattcaactcttgatgagcttggagatggggaggacactcaagatgatcaagctgtagaggaacaaggngaaggcattgtgctgggaagtgtccctacatacccttg

SEQ ID NO: 3595 - DNA, 422 bp, Zea mays
  Clone ID: LIB3061-030-Q1-K1-D7
gcaacatagaaagcacaatagtgtaccaacaatggcagccaaaatattttgcttccgtatgctccttggtctttctgcaagtgttgctaccgcaaccattttcccacaatgctcacaagctcctatagcttcccttcttcccccatacctctcaccagcggtgtcttcaatgtgtgaaaccccaattgttcaaccctacaggatccaacaagcaatcgcaacaggcatcttaccattatcacccttgttcctgcaacaaccgtcagccctattacagcagttacctttggtccatttggtggcacaaaacatcaaggcacaacaactacaacaacttgggctagcaaaccctgctgcatactctcaacaacatcaagttcttccattcaaccaactggctgcattgaactctgcttgctatt

SEQ ID NO: 3596 - DNA, 372 bp, Zea mays
  Clone ID: LIB3061-030-Q1-K1-D8
gccacgcgtaggggcgccatggacgtctgcttgccctaccccgacctggactaggtgatcaagcacgccagggacatcgagacggccgcctccttctaccacgccgacttgggctacaccgagcggcgcctctaccagcgccacatgtacgcggagctggagcgcgtcgcgagcaccatgccatagacgccgcattaccatcggtagacggacgagctgacggatccggctcagctatctgactcatactacagccttaggagctccgtggatgtctgcttaggcaacgcatgcttgactcgtgaggcaagaccgccgaagacgtaaatgcaaccgcggagcactcgctacgagaagcgccatgtataacaa

SEQ ID NO: 3597 - DNA, 423 bp, Zea mays
  Clone ID: LIB3061-030-Q1-K1-C4
agaccaactagcaacatagaaagcacaatagtgtaccaacaatggcagccaaaatagttggcctccttatgctccttggtctttctgcaagtgctgctacggcgaccattttcccgcaatgctcgcaagctcctatagcttcccttcttcccccgtacctctcaccagcggtgtcttcggtatgtgaaaacccaattcttcaaccctacaggatccaacaggcaatcacagctggcatcttacctttatcacccttgttcctccaacaatcatcagccctattacatcagttacctttggtgcatttattggcacaaaacatcagggcacaacaactacaacaacttgtgctagcaaaccttgctgcctactctcagcaacagcagtttcttccattcaaccaactagctgcattgaactctg

SEQ ID NO: 3598 - DNA, 446 bp, Zea mays
  Clone ID: LIB3061-011-Q1-K1-E9
ggaattaccggccttagttctgtgctagaaccagaaggccaaagtgcatgaatttttcatttgcagacaacatagaggcaaggaaaacgagtcagacagccatatagctgacttgagaaggaattatggacaaggcacattgagacaaggatgccattacattgcaattaacatattcagtttgattattgtcctactgatgttttggtgtcttaaatggaccctgttagaagttcaaaaaaattccaactgcgaataactggcccttcggggccaggaagatatgtttgtggatgaacactcgcgaggccacatgactgttacttttgtttcttccccttttttttgtagaaaaaggtcaaggctatctaaatgttgtccggcaattgttggagttgatggaggttctgattcgtttggtcaatctggccagtcgatcgtgtact

SEQ ID NO: 3599 - DNA, 425 bp, Zea mays
  Clone ID: LIB3061-011-Q1-K1-F1
gcacaatcacgtaccgcgcatggcaggcaacatatcatgactgctcatgctcctcgggcattgggcctgtgctgcctcggtgagcattctgaggcactgctgacaacctcctatagcttactttgttcattgatccctactaccaatgatgcacaccgtctgctaacattcagtcatcttaccgtagagtacccaacgggctatcgcaagaggcatcatcccgctatcacgctcggtgctgcaacaatactgagtcctctcacactaccatccttcggggcatctattgtcacacaacatatcggcacgacacctccaccaacgctggctagccaaccttgcgttctacctttcgcagcagcagttacccatgtggcacaattcggcacattacatcagggcactgcagctacatcagctcgggc

SEQ ID NO: 3600 - DNA, 401 bp, Zea mays
  Clone ID: LIB3061-011-Q1-K1-F10
gtgcagcattggtacaaaccatcagggcacaacagctgcaacaactcgtgctaccagtgatcggccaagtagctctggcaaacctttctccctactctcacaacaacaatttcttccattcaaccaactgtctacactgaaccctgctgcttatttacaacaacaacaactactaccattcagccagctagctactgcctactctcagcagcaacaatttcttccatttaaccaattggccgcactgaacccctctgcttatttccagcagcaaatactactaccatttggccagctagctacaacaagccccacttcctttttgaaacaacaacaattgcttccgttctaccagcagtttgtggctaacctcgcaaccctcttacaactgcaacagttgc

SEQ ID NO: 3601 - DNA, 428 bp, Zea mays
  Clone ID: LIB3061-011-Q1-K1-F11
aaagcacaatagtgtaccaacaatggcagccaaaatattttgcctccttatgctccttggtctgtctgcaagtgctgctacggcgaccattttcccgcaatgctcgcaagctcctatagcttcccttcttcccccgtacctctcaccagcggtgtcttcggtatgtgaaaacccaattcttcaaccctacaggatccaacaggcaatcacagctggcatcttacctttatcacccttgttcctccaacaatcatcagccctattacatcagttacctttggtgcatttattggcacaaaacatcagggcacaacaactacaacaacttgtgctagcaaaccttgctgcctactctcagcaacagcagtttcttccattcaaccaactagctgcattgaactctgcttcttatttgcaacaacaacaac

SEQ ID NO: 3602 - DNA, 385 bp, Zea mays
  Clone ID: LIB3061-011-Q1-K1-F12
gcctagcaattagctcatcgactccagattggagaactcgacaccatgaaggtgctgatcgttgcccttgctctcctggcgctcgctgcgagcgccgcctccagtacaagcggcggctgtggctgccagacaccaccgtttcatctaccgcctccgttctatatgccgcctccgttctatctgccgccgcagcagcagccgcagccatggcaataccccactcaaccaccgcagctaagcccgtgccagcagttcggatcctgcggcgtcggcagcgtcggcagcccgttcctgggccagtgcgtcgagttcctgaggcaccagtgcagcccggcggcgacgccctacggctcgccacagtgccaggcgctgcagcagcagtgct

SEQ ID NO: 3603 - DNA, 313 bp, Zea mays
  Clone ID: LIB3061-011-Q1-K1-F2
aatattttgagcattcagaaacacaccaagcgaagctacctagcaacgacttaacaacaatggctaccaagatattagccctccttgcgcttcttgccctttttgtgagcgcaacaaatgcgttcattattccacaatgctcacttgctcctagtgccattataccacagttcctccgaccagttacttcaatgggcttcgaacacctagctgtgcaagcctacaggctacaacaagcgcttgcggcgagcgtcttacaacaaccaattaaccaattgcaacaacaatccttggcacatctaaccatacaaac

SEQ ID NO: 3604 - DNA, 424 bp, Zea mays
  Clone ID: LIB3061-011-Q1-K1-F3
ctcccccttggctggacgccccctccccctatggcagccatcatccattgcttcctgccccaagatctccccctacgcagcaaggatcgagaaaaggaggggcacgttgaattgaagaggaagagaggatcaaggagatgttcttccccatctcttcttgaagatttcttggggaaaccctaggtggctacactccagatcatgtctagtacatttcttcttcttcgatgaaggtgcttgttgctcatcaaggggagtgggaagtagcagcacatccaccttcactctcataaattgctgcccagacacagccatgatttaattagaaacttcttgtcaaaggatgtttgtttttaactagtcgtgcgcactgattaattcagttcattgttgttatggttgtcttcccattgctagcagatta

SEQ ID NO: 3605 - DNA, 401 bp, Zea mays
  Clone ID: LIB3061-011-Q1-K1-F4
cggacgcgtgggttttgcgagcgcaacaaatgcgttcattattccacaatgctcacttgctccaagttccattattacacagttcctcccaccagttacttcaatgggcttcgaacacccagctgtgcaagcctataggctacaacaagcaattgcggcgagcgtcttacaacaaccaatttcccagttgcaacaacaatccttggcacatctaacaatacaaaccatcgcaacgcaacagcaacaacaattcctaccagcactgagccacctagccatggtgaaccctgccgcctacttgcaacagcagttgcttgcatcaaacccacttgctctggcaaacgtagttgcaaaccagccacaacaacaggtggaacagtttctgccagcgctcaatcaac

SEQ ID NO: 3606 - DNA, 421 bp, Zea mays
  Clone ID: LIB3061-011-Q1-K1-F5
ggatggacgcgctgaagtgtaacaacagcgtcctgccggaggagaccgccgcggacgccgccggggcgttcgtggagaaagacggcttctcggtcgaggacctgcttgacctggaggagttcgccgagcctgacaaggacgtcgccgaacgcgaggatgacgacgcgccgccggcagccgccgcggccgaggagaggtcgaaagcggactcgcagccgtcgtcggtcgtgaagtacgacctccctccgctgctgccgccgccgccggagatggttgacctgccgtcgcacgacgtcgaggagctggagtgggtctcccgtatcatggacgactcgctctccgagctgcagccccaggcgcagccgaagccggccgctgctgtggtcgcgtcgtctgcagcgcggccccctctggcgcagca

SEQ ID NO: 3607 - DNA, 427 bp, Zea mays
  Clone ID: LIB3061-011-Q1-K1-F7
gccgatgtggaaaacgcagccattcgctatctcatcagtgcatcgactctacatatgacaagaggtccttgggagatcatcggtactcatatgctgaggaagaccttgtgcacgacatcgccactgatgggccgcacttaccagaagcatctacgtacctcatgcccttcaagctcaagtatccggagacgaagctggatatgaacaggaaaccctacaaggctggcggcgactctggctaacgcggcaacaagatcaacgaactaatcgagaagctgcactagaagcgcctacattgccttctacggctgacgatacgcatcggagcgatggatctgatattaccttgtcaggtttgtaatatcattagctgggtgtaccttcagctttgaaaccttacctgcgcttgggcgatcaagtcatgaaa

SEQ ID NO: 3608 - DNA, 456 bp, Zea mays
  Clone ID: LIB3061-011-Q1-K1-F8
tccgcattccggattcgagccacgcgtcaggcgtatgaataagcgcattcagaagcacacctatcgaagcgcactagcaacgacctatcaacagtggcttccaagacattatccctccttgcgcttcttgccctttttgtgagtgcaacaaatgcgttcattattccacaatgctcacttgctccgagtgccattattccacagttcctccctccagttacttcaatgggcttcgaacacccagctgtgcaagcctataggctacaacaagcgcttgcggcgagcgtcttagaacaaccaattgcccaattacaacaacaatccttggcacatctaaccatacaaaccatcgcaacgcagcagcaacaagcactgagccacctagccgtggtgaaccctatcgcctacttgcaacaacagctgcttgcatccaacccacttgctttggcaaacgta

SEQ ID NO: 3609 - DNA, 405 bp, Zea mays
  Clone ID: LIB3061-011-Q1-K1-F9
cttgccctttttgtgagcgcaacaaatgcgttcattattccacaatgctcacttgcgcctagtgccattattccacagttcctccctccagttacttcaatgggcttcgaacacccagctgtgcaagcctacaggctacaacaagcgcttgcggcgagcgtcttacaacaaccaattgcccaattacaacaacaatccttggcacatctaaccatacaaaccatcgcaacgcaacagcaacaacaatttctaccagcactgagccaactagctgtggtgaaccctgtcgcctacttgcaacagcagttgcttgcatccaacccacttgctctggcaaacatagttgcataccaacaacaacaacaattgcaacagtttctaccagcgctcagtcaactagccatg

SEQ ID NO: 3610 - DNA, 420 bp, Zea mays
  Clone ID: LIB3061-011-Q1-K1-G1
gtgggtttttcgacaaggagcctttccctcttaccagtaacgatctaattgagaaggctcttggagatcacggcatcatatgcttggaagacgttgtgcacgagatcgccacggttgggccgcacttccgagaagcatcgaggttcctcatgcccttcaggctcaagtgtccggagaggaggctgcagatgaagaggaaaccctacaaggatggcggcgactcgggcgaccgtggcgacaagatcaacgaactaatcgagaagctgaactagaagcgcagaccttgcctcctccggctgtcgttttgcgttggagcgatggatctgttattaccttgtcggttttgtaatagcattagctgggtgtaccttcggctttgaaaccttacctgcgcttgtgcgatcaggtcatgaaatagca

SEQ ID NO: 3611 - DNA, 343 bp, Zea mays
  Clone ID: LIB3061-011-Q1-K1-G10
gcagctcaagagagagtctggcatttggggccgggggcaagagagagagagagagccggggcggcggaccagcagccgcagctgcaggaggagatgaacgacgctgacggcggcggcctcaggctggctagagggttccgcttccacccgagcgacttagagattgtcagcttctacctcaccaacaaggtgctcaacacgcgcttcacctgcgccgccatcaccgaggccgacctaaacaagattgagccatgggaccttccgagcacggcgaagatgggcgagacagagtggtacttcttctaccagaaggacccgaagtacccgacggggctgacggcga

SEQ ID NO: 3612 - DNA, 403 bp, Zea mays
  Clone ID: LIB3061-011-Q1-K1-E8
tagacccacgcgtccgcaactagcaacatagaaagcacaatagtgtaccaacaatggcagccaaaatattttgcctccttatgctccttggtctttctgcaagtgctgctacggcgaccattttcccacaatgctcacaagctcctatagcttcccttcttcccccgtacctctcaccagcggtgtcttcggtatgtgaaaacccaattcttcaaccctataggatccaacaagcaatcccaacttgcattctaactttattaaccttggttcctccaccattcataagccttataccagcagtacccttgggtgcattaatggccccaaacattaagggcccaccacctccaccacctgggctaaccaaccttggttgcttattttaagaaccagaagttct

SEQ ID NO: 3613 - DNA, 414 bp, Zea mays
  Clone ID: LIB3061-011-Q1-K1-D2
cattagctttatctactccagagcgcagaagaacccgatcgacaccatgagggtgttgctcgttgccctcgctctcctggctctcgctgcgagcgccacctccacgcatacaagcggcggctgcggctgccagccaccgccgccggttcatctaccgccgccggtgcatctgccacctccggttcacctgccaactccggtgcatcttccaccggcggtccacctgccgccgccggccaactggcaacggcgggccatgggccggcgccgggtcatctggcggcggcaacatgccaataccctactcaacccgcccggcctcagcctcatccccaggcacacccatgcccgtgccaacagccgcatccaagcccgtgccagctgcaaggaacctgcagcgttggcagcaccccg

SEQ ID NO: 3614 - DNA, 424 bp, Zea mays
  Clone ID: LIB3061-011-Q1-K1-D3
gtgaaaacccagcccttcaaccctacaggatccagcaagcaatcgcaacaagcaactgacctttatcacacctgttctttcaacaatcgccagccctatctttggtgcagtcattggtacaaaccatcagggcagaacagttgcagcaactcgtgctaccagtgatcagccaagtagctctggcaaacctttccccctactctcagcaacaacaatttcttccattcaaccaactgtctatactgaaccctgctgcttatttgcagcaacaacaactactaccattcagccagctagctactgcctactctcagcagcaacaatttcttccatttaaccaattggccgcactgaacccctctgcttatttccagcagcaaatactactaccatttggccagctagctacaacaagcccggtttc

SEQ ID NO: 3615 - DNA, 361 bp, Zea mays
  Clone ID: LIB3061-011-Q1-K1-D4
gaccaactagcaacatagaaagcacaatagtgtaccaacaatggcagccaaaatatggtgcctccttatgctccttggtctttctgcaagtgctgctacggcgaccattttcccacaatgctcacaagctcctatagctttccttcttcccccgtacctctcaccagcggtgtcttcggtatgtgaaaacccaattctttaaccctataggatccaacaggcaatcgcagctggcatcttacctttatcacccttggtccttcaacaatcatcagccctattacagcagttacctttggtgcatttattggcacaaaacatcagggcacaacaactacaacaacttgtgctagcaaacctt

SEQ ID NO: 3616 - DNA, 415 bp, Zea mays
  Clone ID: LIB3061-011-Q1-K1-D6
cccaattcttcaaccctacaggatccaacaggcaatcgcagctggcatcttaccttgatcaccgttgttcctccaacaatcatcagccctattacaacagttacctttggtgcatttattggcacaaaacatcagggcacaacaactacaacaacttgtgctagcaaaccttgctgcctactctcagcaacagcagtttcttccattcaaccaactaggttcattgaactctgcttcttatttgcaacaacaacaactaccattcagccagctacctgctgcctacccccagcaatttcttccattcaaccaactagcagcattgaactctcctgcttatttacagcagcaacaactactaccattcagccagctagctggtgtgagccctgctaccttcttgacacaaccacag

SEQ ID NO: 3617 - DNA, 421 bp, Zea mays
  unsure (1)..(421): unsure at all n locations; Clone ID: LIB3061-011-Q1-K1-D7
agaccattagctttatctactccagagcgcagaagaacccgatcgacaccatgagggtgttgctcgttgccctcgctctcctggctctcgctgcgagcgccacctccacgcatacaagcggcggctgcggctgccagccaccgccgccggttcatctaccgccgccggtgcatctgccacctccggttcacctgccacctccggtgcatctcccaccgccggtccacctgccgccgccggtccacctgccaccgtcggtccatgtgccgccgtcggttcatctgccgccgccaccatgccactaccctactcaaccgncccggcctcagcctcatccccagccacacccatgcccgtgccaacagccgcatccaagcccgtgccagctgcagggaacctgcggcgttggcagcaccccgat

SEQ ID NO: 3618 - DNA, 175 bp, Zea mays
  Clone ID: LIB3061-011-Q1-K1-D8
gaactctcctgcttatttacagcagcttcaactactaccattcagccagctagctggagtaaggttggctatctaacaattataaccactattacaacagttactatcaggagcatttattgtaacataacatcactgttacaactactacaacaacttgcactacaaaaacttg

SEQ ID NO: 3619 - DNA, 421 bp, Zea mays
  Clone ID: LIB3061-011-Q1-K1-E1
gaccaactagcaacatagaaagcacaatagtgtaccaacaatggcagccaaaatatggtgcttccttatgctccttggtctttctgcaagtgctgctaccgcaaccattttcccacaatgctcacaagctcctatagcttcctttcttcccccatacctctcaccagcggtgtcttcagtatgtgaaaacccaattcttcaaccctacaggatccaacaggcaatcgcagcaggcatcttacctttatcacccttgttcctccaacaaccgtcagccctattacagcagttacctttggtgcatttgttggcacaaaacatcaaggcacaacaactacaacaacttgtgctaggaaaccttgctgcctactctcagcaacagcagtttcttccattcaaccaactggctgcattgaactct

SEQ ID NO: 3620 - DNA, 394 bp, Zea mays
  unsure (1)..(394): unsure at all n locations; Clone ID: LIB3061-011-Q1-K1-E10
gcaatttggcacccaacacagttgttgagaccgctcctgagtacgttcacgaggaagaagctcgacaaatagcacctgaagtacatgatgtggtcgaaaactatacttattctgagccacaacagcaagtagtgtcggacaactggggagaggagcctcttcctgaagaaccgccttctttctcaaatgaaatggcagtcgctcctgaggagccagtgcaagctccacctgtgccacttcctcacgtggatgagcctgtttgtgaaccagtaaagaagacttatgcttccatcctaaaaaccgcanaggctcctnctgcattcccagtagcccagcaagtacctgtgagtaagacttctcaccctacaacagagtcaaaccaaacccagcattc

SEQ ID NO: 3621 - DNA, 399 bp, Zea mays
  Clone ID: LIB3061-011-Q1-K1-E11
tcacagctagcaacatagagagcacatgattgctcctgcattgaccaccaagatagatggcgcaacttatgcttgaagcctaacaggccagcacttgttctgagccgcacatgctggactcctcacgaacatttaaagctacttttggaagcaggaatcatgtacgacagacgcgttcctgcagctatacgccgaagatgatacactgcatgatgcgcaactgcggatcgatatccataacagcaagcagaccgtctacccaagatcactgatcattattacaggtgaaggacctgataggacgaaatatgacgatcaaataaaaaggttgaagtctagacgtgttgccttgcggacaatgtggcttgcatcagaggactaccctttattgctcgggtc

SEQ ID NO: 3622 - DNA, 389 bp, Zea mays
  Clone ID: LIB3061-011-Q1-K1-E12
gggccaccatcggcgcctgcgcgccatcgcgccgtcgtcgcgctgctctccgcgggctccacgcgcggcaagaaggacgcgctcaccacgctctaccgcctctgctcgcgcgcagacaaggagcgcgccgcagcgccggcgccgcgtgccgtcgtgcacctcatcggcgagcgcggcacgggacgtgcgagaggccatggtggttctggggagcctcgcgggcatcgccgagggccgtgaagccgtggtggaggctggcgggatccccgccctggttgaggccatcgaggacggccctgccaaggagaaagagttcgccgtggtggcgctgctgcagatgtgctccgattccccgcataaccgtgcgcttcttgtacgcgagggcgcca

SEQ ID NO: 3623 - DNA, 312 bp, Zea mays
  Clone ID: LIB3061-011-Q1-K1-E2
gaactctcctgcttatttacagcagcaacaactactaccattcagccagctagctggtgtgagccctgctaccttcttgatacaaccacagttgttgccgttctaccagcacgctgcgcctaacgctggcaccctcttacaactgcaacaattgctgccattcaaccaacttgctttgacaaacccagcagcgttctaccaacaacccatcattggtggtgccctcttttagatttcttatgagttatagttcaataataaagttttttgtctgatgtttgtggcttcccagaaataagaaagtacatttct

SEQ ID NO: 3624 - DNA, 422 bp, Zea mays
  Clone ID: LIB3061-011-Q1-K1-E3
acaaatcacatcgaatcaccctctcgcccaccaccacaccacaccaccggcggcggcggcgacgcagtcgagaacacgaaggcgatggcgacagcgctgaaccgcgggctccgctccgggctccgcctcctcgccgccggcgccgaggcgtccaagccagcttctcgtggattccatgccaccggcgtgaagagaatgggagggcatggccatgatgagccatactacatccatgccaagcacatgtataacttgcacaggatgaagcatcagggtttgaaggtgacactctccgtgctgggagcggttggcatcggtgttggagtccctgtgtatgcagtcatattccagcagaagaagactgcctctggctgagatgatgcctctcgctgcctgcatatggagacttattttgagcgaca

SEQ ID NO: 3625 - DNA, 275 bp, Zea mays
  Clone ID: LIB3061-011-Q1-K1-E4
acggctgctcgtgcggtgtgctcgtgagctcttgattcgataacgctgatggtagctatcgttgggttctgatgactacctgtcataccgcgaacgcagacgacgacggccgtgttctgctgctgtgctcttgctacaccggctgcgagcttgactgcgacccttctaatggggccaagttcgtgtacagcagctccgtcggtccagaccactggggcgccctgagcgccagcttcaggcagtgcgccacatggacgaagcagtccacgatcgac

SEQ ID NO: 3626 - DNA, 420 bp, Zea mays
  Clone ID: LIB3061-011-Q1-K1-E5
gccgctgggtccgacccgaggtgtacccgctgttcgcggcgatgggagttgccgttggcatctgcgggtttcagctcttccggaacatcaccggcaacccggaagtcagggtaaacaaggcagggagggcagccggcgtgcttgagaaccatgaggaggggaggcgttacgccatgcatggcctcagaagctttgtgcacgacaagacccccgagatcatgccagctatcaacaagttctttactgaccccaagtgaagcaaagcagctttggttggccgctgatgacgatggttctgctactagttgcccttggggattgtgtaccctttttatggcaattcgatatgtgaatgagttcgacggtccctgtttgttcctcgtactcacctgtcatgtggatttgatgcacttcagtgat

SEQ ID NO: 3627 - DNA, 434 bp, Zea mays
  Clone ID: LIB3061-011-Q1-K1-E6
caaaaacacaccaagcgaagcgcactagcaacgacctaacaccaatggctaccaagatattagccctccttgcgcttcttgcccttttagtgagcgcaacaaatgcgttcattattccacagtgctcacttgctcctagtgccattattccacagttcctcccaccagttacttcaatgggcttcgaacatccagccgtgcaagcctacaggctacaactagcgcttgcggcgagcgccttacaacaaccaattgcccaattgcaacaacaatccttggcacatctaaccctacaaaccattgcaacgcaacaacaacaacaacaacagtttctgccatcactgagccacctagccgtggtgaaccctgtcacctacttgcaacagcagctgcttgcatccaacccacttgctctggcgaacgtagctgcatac

SEQ ID NO: 3628 - DNA, 418 bp, Zea mays
  Clone ID: LIB3061-011-Q1-K1-E7
ccagcaagcaacatagaaagtagaatccattagcaacaatagagcaacaatggcgacgaagatattttccctccttatgctccttgctctttctacatgtgttgctaacgcgacaattttccctcaatgctcacaagctcctatagcttcccttcttcccccataccttccatcaattatagcttcagtatgtgaaaacccagctcttcaaccatataggcttcaacaagcaatcgcagcaagcaacatacctttatcgcccttgttgtttcaacaatcaccagccctatctttggtgcagtcattggtacaaaccatcagggcacaacagctgcagcaactcgtgctacctgtgatcaaccaagtagctctggcaaacctttctccctactctcagcaacaacaatttcttccattc

SEQ ID NO: 3629 - DNA, 251 bp, Zea mays
  Clone ID: LIB3061-011-Q1-K1-D12
agcatgcacaggactgagcaacttagcaacccattataactttcctccatatgccactactatgtgccaatgagacagctaacactacgatttttgcgcattgatcacaatctcctaaaacgtatcttcttacacagtaactactaccatcatagagactagcttgaaaaaaccaaactctaaaatcctacaaaatccaactaacattcgcacatgcaatcttacatgcttcaactatcgaactccaacaa

SEQ ID NO: 3630 - DNA, 418 bp, Zea mays
  Clone ID: LIB3061-011-Q1-K1-B5
ctagcaacatagaaagcacaatagtgtaccaacaatggcagccaaaatattttgctggcttatgctccttggtctttctgcaagtgttgctaccgcaaccattttcccacaatgctcacaagctcctatagcttcccttcttcccccatacctctcaccagcggtgtcttcaatgtgtgaaaccccaattgttcaaccctacaggatccaacaggcaatcgcaacaggcatcttaccattatcacccttgttcctccaacaaccgtcagccctattacagcagttacctttggtccatttggtggcacaaaacatcagggcacaacaactacaacaacttgtgctagcaaaccttgctgcatactctcagcaacatcagtttcttccattcaaccaactggctgcattgaactctgct

SEQ ID NO: 3631 - DNA, 287 bp, Zea mays
  Clone ID: LIB3061-011-Q1-K1-B6
acgcgtagctgacatttagacctactatttacatttcaagcacagcattgatccaaccgggacggccaaactaaacagcttccttatgctcctcgatctaaccgcaactgctactactcaaaccattagtccactatgttcacaaaattctatagattgaattcttcctccatacctgtaacaagacaactatcatatatgcgaaatcctgattgctcaaccctacaagatcctacattcaatcgaatcacgcatattaacattatcacccatgttcctccaacaac

SEQ ID NO: 3632 - DNA, 383 bp, Zea mays
  Clone ID: LIB3061-011-Q1-K1-B7
attttgagcattcagaaacacaccaagcgaagcgcactagcaacaacctaacaacaggggctaccaagatattatacgtgcttgcgcttcttgcgctttttgcgagcgcatcaaatgcgttcattattccacaatgctcacttgctcctagttacattattccacagtttctcccaccagatacttcaatggccttcgaacacccagctgagcaagcctatacgctacaacatgcgattgctgcgagcgtcttacaacaaccaattgatcaattgcagcaacaatgcttggcacatctaacactacacaccatcgcaacgcagcagccacatcagttcctaccagcactgaggcacctagccatggtgaaccctgacgactac

SEQ ID NO: 3633 - DNA, 262 bp, Zea mays
  Clone ID: LIB3061-011-Q1-K1-B8
ccaactccatccacgcctcacgcgtcccgagccatataaagcacaattttctactttacaatcgcagtcaaaatattatccttcctgatgctccttgctctttctgtaaatgctgctaccctaaccattcttccacaatgctcacaaactcctatagcatcctttcttcctccatacctctcaacaacggtgactccactatgttcaaaaccaattctttaaccctacagcatccaacactcaataccagcaagcattttaa

SEQ ID NO: 3634 - DNA, 412 bp, Zea mays
  Clone ID: LIB3061-011-Q1-K1-B9
gcgacatagaaagcacaatagtgtaccaacaatggcagccaaaatatttggcttccggatgctggttggtctttctgcaagtgctgctaccgcaaccattttcccacaatgctcacaagctcctatagcttcctttcttcccccatacctctcaccagcggtgtcttcagtatgtgaaaacccaattcttcaaccctacaggatccaacaggcaatcgcagcaggcatcttacctttatcacccttgttcctccaacaaccgtcagccctattacagcagttacctttggtgcatttgttggcacaaaacatcaaggcacaacaactacaacaacttgtgctaggaaaccttgctgcctactctcagcaacagcagtttcttccattcaaccaactggctgcattgaactct

SEQ ID NO: 3635 - DNA, 425 bp, Zea mays
  unsure (1)..(425): unsure at all n locations; Clone ID: LIB3061-011-Q1-K1-C1
cgtccccttctgctccatcgaaggtccctcgcgatctcgcctcgagtagctagtgcctcgcgcgccgggggcgactgcgcgcgcggtcagtcagtcttcggcgtgcggggcgcgcgcgagatctcctcagaggtaggggagaaaatcggtgagggtcggcgggcctgatgggcggtgcggtctccggtggcgcggcggttggggatgcggcgggggcggcaacttacccggtggttctcaacgtgtacgacctgacgccggtcaacaactacctncactggggcgggcttggcatcttccactctgccgtcgaagttcatggatcggagtacagttttggagcacatgatcacccatcgagtggagtttttgaggtggaaccaaagagctgcccagggttcatatacagatgtacggttttcata

SEQ ID NO: 3636 - DNA, 425 bp, Zea mays
  Clone ID: LIB3061-011-Q1-K1-C10
aacaagcaacatagaaagtggaatccattagcaacaacagagcaacaatggcgaccaagatatgtgtccctccttatgctccttgctctttctgcatgtgttgctaacgcgacaattttccctcaatgctcacaagctcctatagcttcccttcttcccccataccttccatcaatgatagcttcagtatgtgaaaacccagctcttcagccctataggctccaacaagcaatcgcagcaagcaacatacctttatcacccttgttgtttcaacaatcgccagccctatctttggtgcagtcattggtacaaaccatcagggcacagcagctgcagcaactcgtgctacctgtgatcaaccaagtagctctggcaaacctttctccctactctcagcaacaacaatttcttccattcaaccaact

SEQ ID NO: 3637 - DNA, 306 bp, Zea mays
  unsure (1)..(306): unsure at all n locations; Clone ID: LIB3061-011-Q1-K1-C2
gcaacatagaaagcacaatagtgtaccaacaatggcagccaaaatattttgcttcctgatgctccttggtctttctgcaagtgctgctaccgcaaccattttcccacaatgctcacaagctcctatagcttcctttcttcccccataccttgttaccagcggtgtcttcagtatgtgaaaacccaattcttcaaccctacaggatccaacaggcaatcgcagcaggcatcttacctttatcacccttgttcctacaacaaccgtcagccctattacagcagntaccttnggtgcatttgttggcac

SEQ ID NO: 3638 - DNA, 427 bp, Zea mays
  Clone ID: LIB3061-011-Q1-K1-C3
attttgagcattcagaaacacacctagcgaagcgcactagcaacgacctaacaacaatggcttccaagacattatccctccttgcgcttcttgccctttttgtgagtgcaacaaatgcgttcattattccacaatgctcacttgctccgagtgccattattccacagttcctccctccagttacttcaatgggcttcgaacacccagctgtgcaagcctataggctacaacaagcgcttgcggcgagcgtcttagaacaaccaattgcccaattacaacaacaatccttggcacatctaaccatacaaaccatcgcaacgcagcagcaacaagcactgagccacctagccgtggtgaaccctatcgcctacttgcaacaacagctgcttgcatccaacccacttgctttggcaaacgtagctgcata

SEQ ID NO: 3639 - DNA, 386 bp, Zea mays
  Clone ID: LIB3061-011-Q1-K1-C4
accaccactgctgcaccggcgtaccatgtggccatggccggcgctgagatggatcagaatcagaacaacatccccttccccatgccgatgcaattttccatgctgcccgacttctgcttggacccggtgcccccctactacccgtaccccaacgctggcgcggggatgccgatgcttcctatggcagcagggataggtggtggcgccggtgggctccacctcaaccgcgccgccctgttcggcaatccgatggccgcgccccaacccatgaacttctaccaccagatgggcacggggactgcttgcgctggcggcttcgatgtttctgcgccggaaagtaagccgtcctcgatggtgtcgcagaaggacgaccaggctaatggcgc

SEQ ID NO: 3640 - DNA, 281 bp, Zea mays
  Clone ID: LIB3061-011-Q1-K1-C6
catgcccgcgcacctcatgcacgacggccgcgacatggacctgttcgagcacttcggcgtcgtggcccagcgcctcggcgtgtacaccgcccgggactacgcggacatcgtacagtgccttgtcaagcggaggaagctggagacactggaaagcgtgctactcagggagggccgaaatgtcaaagactaagtctgcagacttacacggaccatacggcaatccgaggagggatcttacgtctatcaccctatggactacaacaaccgggagacctattaca

SEQ ID NO: 3641 - DNA, 424 bp, Zea mays
  Clone ID: LIB3061-011-Q1-K1-C7
gcggcctcatccagctgcaggggatgcgatacggaacgccctgcgcctgcgcgtccaccggtggactcgtcgacaccatcatcgaaggcaagaccgggttccacatgggccgcctcagcgtcgactgtaacgtcgtggagccggcggacgtcaagaaggtggccaccacattgcagcgcgccatcaaggtggtcggcacgccggcgtacgaggagatggtgaggaactgcatgatccaggatctctcctggaagggccctgccaagaactgggagaacgtgctgctcagcctcggggtcgccggcggcgagccaggggtcgaaagcgaggagatcgcgccgctcgccaaggagaacgtggccgcgccctgaagagttcggcctgcagggcccctgatctcgcgcgtggtgcaaagatgttggga

SEQ ID NO: 3642 - DNA, 239 bp, Zea mays
  Clone ID: LIB3061-011-Q1-K1-C8
ggaacctgcggcgttggcagcaccccgatcctgggccagtgcgtcgagttcctgaggcatcagtgcagcccgacggcgacgccctactgctcgcctcagtgccagtcgttgcggcagcagtgttgccagcagctcaggcaggtggagccgcagcaccggtaccaggcgatcttcggcttggtccttcagtccatcctgcagcagcagccgcaaagcggccaggtcgcggggcttgtggc

SEQ ID NO: 3643 - DNA, 418 bp, Zea mays
  Clone ID: LIB3061-011-Q1-K1-D1
caactagcaacatagaaagcacaatagtgtaccaacaatggcagccaaaatattttgcctccttatgctccttggtctttctgcaagtgctgctacggcgaccattttcccgcaatgctcgcaagctcctatagcttcccttcttcccccgtacctctcaccagcggtgtcttcggtatgtgaaaacccaattcttcaaccctacaggatccaacaggcaatcgcagctggcatcttacctttatcacccttgttcctccaacaatcatcagccctattacaacagttacctttggtgcatttattggcacaaaacatcagggcacaacaactacaacaacttgtgctagcaaaccttgctgcctactctcagcaacagcagtttcttccattcaaccaactaggttcattgaactct

SEQ ID NO: 3644 - DNA, 170 bp, Zea mays
  Clone ID: LIB3061-011-Q1-K1-D10
gacaacgacgacgacgaggcctgatcaatgcaacgacacatcatgatctgctgctgcacttaattactatgttcgtatacaaataaatacacccggcgtacgcggtgttccttatatggtctaaaatgtagccagtaaattttaaactactttatttcttgaggctctat

SEQ ID NO: 3645 - DNA, 400 bp, Zea mays
  Clone ID: LIB3061-011-Q1-K1-D11
cagcattcaaaaacacaccaagcgaagcgcactagcaacgacctaacaccaatggctaccaagatattagccctccttgcgcttcttgcccttttagtgagcgcaacaaatgcgttcattattccacagtgctcacttgctcctagtgccattattccacagttcctcccaccagttacttcaatgggcttcgaacatccagccgtgcaagcctacaggctacaactagcgcttgcggcgagcgccttacaacaaccaattgcccaattgcaacaacaatccttggcacatctaaccctacaaaccattgcaacgcaacaacaacaacaacaacagtttctgccatcactgagccacctagccgtggtgaaccctgtcacctacttgcaacagcagctgc

SEQ ID NO: 3646 - DNA, 421 bp, Zea mays
  Clone ID: LIB3061-011-Q1-K1-B4
ctctcaccagcggtgagagcggtctgtgaaaacccaattcttcaaccctacaggatcgaacaggcaatcgcagctggcatcttacctttatcacccttgttcctccaacaatcatcagccctattacagcagttacctttggtgcatttattggcacaaaacatcagggcacaacaactacaacaacttgtgctagcaaaccttgctgcctactctcagcaacagcagtttcttccattcaaccaactagctgcattgaactctgcttcttatttgcaacaacaacaactaccattcagccagctacctgttgcctacccccaacaatttcttccattcaaccaactggcaacattgaactctcctgcttatttacagcagcaacaactactaccattcagccagctagctggtgtgagcc

SEQ ID NO: 3647 - DNA, 387 bp, Zea mays
  Clone ID: LIB3061-030-Q1-K1-B11
gtcgtctccttacccctcgccggccgtgtgatctgcctgccgcgcggacgccgcgggcgcgacgatgcacgacccgtcggagatccggaaccttatcatcgacatcgtctttggatcgcctccaggagtggctcgtggaccggaagcgagtgccgcacgactggcggaagcgcctcgacggtattcgcgcccgcatcgtgccagctttctcagccctgccgcggaacctgcacccatcactactcgacctcgatccagaagaaattggctaccttgaagcaaagaagatatacagcattctactagaatcgatcaccgagagtggtagcatatttggccgactgacgggatccgcgtgtgaatgggagtcaattattaaagctgacg

SEQ ID NO: 3648 - DNA, 384 bp, Zea mays
  Clone ID: LIB3061-030-Q1-K1-B12
cttttagattgcttatgagggcaccaccaaagatgccttcctcgcagaccccggtggcgctactatgcacgacccgtctgaaatccacaacctgctcatctacatcgactttgcccgcctccagcattggctcgttgaccgcaagcgactgccgcacgactgtcggaagcgcctcgacgatattagcgccctaatcgtgcccgctttctcacccctgccgctgaacctgcacccctcactcctacacctcgatccagaagaaattgtctaccttgaatcaaagaagatatacagcattctcctacaatccaacaccgacagtcgtaacatatttgaccaacttacggtatccccatttgaatgctagtcaattattaaagctta

SEQ ID NO: 3649 - DNA, 428 bp, Zea mays
  Clone ID: LIB3061-030-Q1-K1-B2
ctccctgctcgtcgcatccgaccccgagggcagggtgccgctcttctgggggatcaccgccgacggctgcgtcgccttctccgacgacatcgacatgctcaaaggctcatgcggcaagtcgctcgcgccgttcccgcaaggctgcttctactccaacgccctcggagggctcaagtgctacgagaaccccaagcacaaggtcaccgctgtccccgccgacgaagaagagatctgcggtgccactttcaaggtggtggaagggtctactgtcctgacggcgctgcactgatctatcatcatcaggcggaggcgatgcgatgatgatgcagaactttgtacatgcgttggtggatggtggtgtaacatagtggctgccaacaagtcatgctcatgcaaaccgatgaatctatctctgtatcatcgatctc

SEQ ID NO: 3650 - DNA, 428 bp, Zea mays
  Clone ID: LIB3061-030-Q1-K1-B3
cgacaagcaggggagttaggtctcacatgcatgcttcatcacattgttgactgcatgaacgaaacacatcgtcgtcggatcggagatgatgagttccgtcgtcgtggatgctgctgctaccagcagcagcgagaagaagacgtcgtggccggaggtggtgggcatgtccatcaaggaggcgacggagactattctcaaggacatgcccaacgcgtacatccaggtgctgcctgttgggtcgcccgtgacgctggaccttcgccccgaccgcgtccgtatcttcgttgacaccgtcgccatgactccgacagttgggtgatacataccaaatgcaataaacaaaccctactttttattttatgtttccagttaataataaaccaggccttagcttcttggttgtccttccttgggtggtgttagcttct

SEQ ID NO: 3651 - DNA, 390 bp, Zea mays
  Clone ID: LIB3061-030-Q1-K1-B5
ggctggtacgctgccttaactgctgctcttgatcgccgacggcggcggcgggggtgtgccgttccattcgtgctgctaatccaagcggtagaggttgtggtagatatcaacaaaaggaagaagaagaagagggggctttcggtttcccggcgtggggttcgtgtgtgtccgatccgatcattttgaggatcggatttgctgctagtcggtggacaagaacagattgttcttggctccttgctgcaaaattgccatatggtgatggcgattggagaataagaactgggcttgtttgtatatgcatctgatgtatcaaagattgatactgctgctagttcaactaatgtaaatacttcagtttggtgtgatgaattgcttcatgccttgtcc

SEQ ID NO: 3652 - DNA, 368 bp, Zea mays
  Clone ID: LIB3061-030-Q1-K1-B6
acatcctaccccgttggtttcgtgccgctcttatggtggatcagcgcgtacaaatgcatcgtctgctgcgacgacatctacatgctcaaaggctcatgctgcaagtcgctcgccccgttcccgcaaggctgcttctactccaacgccctactagggctcaagtgctacgagaaccccaagcacaaagtcaccgctgttcccgccgacgaagaatagatctgcggtgccactattaaggtggtggaagggtctactgttctgactgcgcttcactgatctatcatcatcaggcggaagcgattctatgataatgcaaaactttgtacatgctttgatcgaaggtagtgtaacatattggtaggcaacaa

SEQ ID NO: 3653 - DNA, 427 bp, Zea mays
  Clone ID: LIB3061-030-Q1-K1-B7
gaccaactagcaacatagaaagcacaatagtgtaccaacaatggcagccaaagtatggtgcctccttatgctccttggtctttctgcaagtgctgctacggcgaccattttcccgcaatgctcgcaagctcctatagcttcccttcttcccccgtacctctcaccagcggtgtcttcggtatgtgaaaacccaattcttcaaccctacaggatccaacaggcaatcgcagctggcatcttacctttatcacccttgttcctccaacaatcatcagccctattacaacagttacctttggtgcatttattggcacataacatcaaggcacaacaactacaacaacttgtgctagcaaaccttgctgcctactctcagcaacagcagcttcttccattcaaccaactaggttcattgaactctgcttct

SEQ ID NO: 3654 - DNA, 262 bp, Zea mays
  Clone ID: LIB3061-030-Q1-K1-B8
ccactcatccactgcaattatctcacaacatacaacttttctttacctaatcaacaaaacaacctaatgcggggatcaccacacactacccaacctccactcctaacccccttactaccactatctacccatccactccatcacataccaacatctcctacattccaaaatcatactaaaccaccaaacccatatgaaccctgccttctactttcaacactacttcattgaataatccatacttactttcatcaacatcatt

SEQ ID NO: 3655 - DNA, 431 bp, Zea mays
  unsure (1)..(431): unsure at all n locations; Clone ID: LIB3061-030-Q1-K1-B9
caactagcaacatagaaagcacaatattgtaccaataatggcagccaaaataggttgcctcattatgctccttggtctttctgcaagtgctgctacggcgagcattttcccgcaatgctcacaagctcctatagcttcccttcttcccccatacctctcaccagcgatgtcttcagtatgtgaaaatccaattcttctaccctacaggatccaacaggcaatcgcagcaggcatcttacctttatcacccttgttcctccaacaatcatcagccctattacagcagttacctttggtgcatttattggcacaaaacatcagggcacatcaactactacaactcgtgctagcaaaccttgctgcctactctcagcaacagcagttacctntggtgcatttgttggcacaaaacatcaaggcacaacaactac

SEQ ID NO: 3656 - DNA, 427 bp, Zea mays
  unsure (1)..(427): unsure at all n locations; Clone ID: LIB3061-030-Q1-K1-C1
ctctccggtgacagccgcgggatttcaatacccaactatacaatcctacatggtacgggaggccatccaagcaagcatcttacggtcattagcattaaccctccaacaaccatatgctctattgcaacagccatccttagtgcatctgtatctccaaagaatcgcggcacaacaactacaacaacagttgctaccaacaatcaatcaagtagttgcagcgaaccttgctgcttacctccagcaacaacagtttcttccattcaatcaactagctggggtgaaccctgctatctacttgcaggcacaacagctactaccatttaaccaacttgtcgggagcccttatgccttcttactgcaacaacagcttctgccattccatctgcaagctgtggcaaacattgntgctttcttgagacaacaacat

SEQ ID NO: 3657 - DNA, 426 bp, Zea mays
  unsure (1)..(426): unsure at all n locations; Clone ID: LIB3061-030-Q1-K1-C10
cttccaccttcagcgagtacaccgtcatgcatgtgggttgtgttgcaaagatgaacgctcangctccccttgataaagtttgcgtccttagctgtggtatttctaccggtcttggtgcatcaattaatgttgcaaaacctccgaagggttcgacagtggctgttttcggtttaggagccgttggtcttgccgctgcagaaggtgcaaggattgctggagcgtcaaggatcattggtgtcgacctgaaccccagcagattcgaagaagctaggaagttcggttgcactgaatttgtgaacccaaaagaccacaacaagccagtgcatgaggtacttgctgagatgaccaacggangggtcgaccgcagtgtggaatgcactggcaacattaatgctatgatccaagctttcgaatgtgttcatgatg

SEQ ID NO: 3658 - DNA, 429 bp, Zea mays
  Clone ID: LIB3061-030-Q1-K1-C11
cccacgcgtccgagaccaactagcaacatagaaagcacaatagtgtaccaacaatggcagccaaaatattttgcctccttatgctccttggtctttctgcaagtgctgctacggcgaccattttcccgcaatgctcgcaagctcctatagcttcccttcttcccccgtacctctcaccagcggtgtcttcggtatgtgaaaacccaattcttcaaccctacaggatccaacaggcaatcacagctggcatcttacctttatcacccttgttcctccaacaatcatcagccctattacatcagttacctttggtgcatttattggcacaaaacatcagggcacaacaactacaacaacttgtgctagcaaaccttgctgcctactctcagcaacagcagtttcttccattcaaccaactagctgcattga

SEQ ID NO: 3659 - DNA, 63 bp, Zea mays
  Clone ID: LIB3061-030-Q1-K1-C12
gttttttggatgatgtatgtggccaaccagaaataagaagttacatttccagattctaatgtg

SEQ ID NO: 3660 - DNA, 422 bp, Zea mays
  Clone ID: LIB3061-030-Q1-K1-C2
gtgaagtgctccgggaacacgcatctttgctgacctgatcgatacggcaagcatcgggatggggagcacctgatgattaccaagcggccacgtgtgagacccgtactagcactatctacacatcgacttcatcacctaccgccaggtcctacagttcataatcatactgaatcgcctaaccctgaggaaccgtggcttctacttgcaaaagttgttgatggcataagagatacttaatgtcatcaacgtcattaacgaccaggcactgcaacagctgcacatgaccgtgcaagaggtcaagtacctaggcatggcgaacacgtggcggctacctacaactacagcagctgccgtcatcgaggccgctacctcggtccaatgcacctacatagctgcagcaactactgctgcagcagattgta

SEQ ID NO: 3661 - DNA, 398 bp, Zea mays
  Clone ID: LIB3061-030-Q1-K1-B10
aatggcagccaaaatattttgcttccttatgctccttggtctttctgcaagtgttgctaccgcaaccattttcccacaatgctcacaagctcctatagcttcccttcttcccccatacctctcaccagcggtgtcttcaatgtgtgaaaccccaattgttcaaccctacaggatccaacaggcaatcgcaacaggcatcttaccattatcacccttgttcctccaacaaccgtcagccctattacagcagttacctttggtccatttggtggcacaaaacatcagggcacaacaactacaacaacttgtgctagcaaaccttgctgcatactctcagcaacatcagtttcttccattcaaccaactggctgcattgaactctgctgcttatttgcaac

SEQ ID NO: 3662 - DNA, 450 bp, Zea mays
  unsure (1)..(450): unsure at all n locations; Clone ID: LIB3061-029-Q1-K1-H7
cttgctgcttacctccagcaacaacagtttcttccattcaatcaactagctggggtgaaccctgctatctacttgcaggcacaacagctactaccatttaaccaacttgtcgggagcccttatgccttcttactgcaacaacagcttctgccattccatctgcaagctgtggcaaacattgttgctttcttgagacaacaacatttgttgccattttacccacaagttgtgggaaacattaatgccttcttgcaacagcaacaattgctaccattctacccacagaatgtggcaaacattggtgccttcttacaacaacaacaattgctaccatttagccaacatgctttgacgaatcctaccacctttatgcaaccgcccaccattgggggtgccatcttctagattttttatgattaatactgtnataattaagttctcatgctgata

SEQ ID NO: 3663 - DNA, 427 bp, Zea mays
  Clone ID: LIB3061-029-Q1-K1-H9
atggagaaccctccgagcatcctagtgactcccatggctccggccatgtcggcgcagttcacaagaatcaccttcagcaacctgtttgtccgtcgggctggcccaggcagcacggagctgaccgtggagggaaggccatccgaccagctgggcaggagaaacctcactgacagccccgtatttgacggccgtggccctgacgccagcctcgtggctcgcgtacagggagtcgctacccagatgggcgacgtgcgccagttgtacaccgtcgtgttccaggagaggccgctcaagggctccacgctcgtcaccgaaggcgcgatgacggaagggtcagacgagtgggcgatctacggcggaactggagtgttcgcgatggcgagaggcgtcataaggagaacgtttcttgccgacacgagcggcggga

SEQ ID NO: 3664 - DNA, 368 bp, Zea mays
  Clone ID: LIB3061-030-Q1-K1-A1
aaccaattggccgcactgaaccccgctgcttatttgcagcagcaaatactactgccatttagcgagctagctgcagcaagtcgtgcttccttcttgacacagcaacagttgctgcctttctacaagcagtttgcggctaaccccgcaaccctcttacaactacaacaattgttgccctttgtccaacttgctttgacaaacccagcagcctcctaccaacaacacatcattggtggtgccctcttttagattgattattagttgtaattcaataataaagttttttggatgatgtatgtggccaaccagaaataagaagttacatttccagattctaatgtgaaaaaaaatagatgaatactattatc

SEQ ID NO: 3665 - DNA, 414 bp, Zea mays
  Clone ID: LIB3061-030-Q1-K1-A11
ggcgcagcttccgctgccccgctacgacaacacctcagaggtcggcaacttggtgtgcttccagcggccgaaaggtgggaagcaggtgcccgtgccgaagctgatcttccacctggcgagcgcggacatggatttgccccgggagaactacatcccggaggacacggacagcggggtgatgtgcctgatgatcaacggcgcggaggtcgacatggtgctcataggcaacttccagcagcagaacatgcacatcgtctacgacgtggagaacagcaagctgctcttcgcatctgcgcagtgcgacaagatgtgacgaactcatcacttgctagcttgtgcgtacgtacgcgctgcacgtgtgcgtgtgtatgactgtatgcatgcttctacggctctacatatgttgttagtgct

SEQ ID NO: 3666 - DNA, 429 bp, Zea mays
  Clone ID: LIB3061-030-Q1-K1-A2
catcgcgtcgctgccgaagacccagagggagcccctctctttcttcggcagcgactgcgtaaccgccgccaagcaggagaaccagacgctgcgccctttcttcgacgagtggcccaagtcgagggactcgtggccggagctgggcgaggacagcagcctcggcttctcggccacccagctctccatctccattcccatggcgacctccgacttctccaacaccagctccagatcgccgggtggaataccgtcgagatgaacgagtaccgtgcatgtggatcccagcgtcttagggttgacgactcttcggtgctggcctcgtcgtatcatgctcctaaattttcgaacgatatatgccttatgtaacgctatttctctcattgttacaacaccctttacccgtttggaattgtgttgaagtggatggtc

SEQ ID NO: 3667 - DNA, 424 bp, Zea mays
  Clone ID: LIB3061-030-Q1-K1-A3
gcaacatcaattatctaactccaaataccatgaagctggtgcttgggttcttgggtggttgctttagtatcaagtgtttcttgacacagacaggcggctgcagctgtggtcaacaacaaagccatgagcagcaacatcatccacaacaacatcatccacaaaaacaacagcatcaaccaccaccacaacatcaccagcagcagcaacaccaacaacaacaagttcacatgcaaccacaaaaacatcagcaacaacaagaagttcatgttcaacaactacaacaacaaccgcagcaccaacaacaacaacaacatcaacagcaccaacaacaacatcaatgtgaaggccaacaacaacatcaccaacaatcacaaggccatgtgcaacaacacgaacagagccatgagcaacaccaaggacagag

SEQ ID NO: 3668 - DNA, 445 bp, Zea mays
  Clone ID: LIB3061-030-Q1-K1-A4
ccaacaagcaacatagaaagtggaatccagtagcaacaatagagcaacaatggcgaccaagatattttccctggttatgctccttgctctttctacatgtgttgctaacgcgacaattttccctcaatgctcacaagctcctatagcttcccttcttcccccataccttccatcaattatagcttcaatatgtgaaaacccagctcttcaaccatataggcttcaacaagcaatcgcagcaagcaacatacctttatcgcccttgttgtttcaacaatcgccagccctatctttggtgcagtcattggtacaaaccatcagggcacaacagctgcagcaactcgtgctacctctgatcaaccaagtagctctggcaaacctttctccctactctcagcaacaacaatttcttccattcaaccaactgtctacactgaaccctgct

SEQ ID NO: 3669 - DNA, 491 bp, Zea mays
  unsure (1)..(491): unsure at all n locations; Clone ID: LIB3061-030-Q1-K1-A5
cccgggtgtgagaccaactagcnaacatangaaagcacccaatagtgtacccaacaattgtgcagccaaaatanttttgcttcgcttatgccctccttggtctttctgcaagntgttgcttaccgcaaccattnttcccacaatgggctcacaagctcctatagncttcccttcttccncccataccctctcacnncagcggtgtcttcaatggtgtgaaanccccaatnntgttcaaccctacagngatccaacaggcnaatcgcaaccaggcattcttacncattatcancccttgtntcctccaaccaaccgtcagnccctattacagcagntntacctttggtccatttnggtggcaccaaaacatcaagggcacaacaactacaacaacttgtgctagcanaaccttgctgcatacctctcagcaacatcagtttcttccattcaaccaactggctgcattgaactctgctgcttatttgcaacaa

SEQ ID NO: 3670 - DNA, 422 bp, Zea mays
  Clone ID: LIB3061-030-Q1-K1-A6
gttcttgccactctacatgaagctggttttcatgttgatattgacgcgagtgacaggacaatacaaaagaaggtacgggaagctcaactggcccaattcaactacattcttgtcgtaggtgcacaagaggccgagactggaaatatatgcgttagggtaagagacaatgctgacctggtcacaacgagtgtagatggcttcatcacacgtttgagggacgaaatcgcagccttcaaatgattttgatgctgcataatttcctactactcgtttgtgatcttgacgagtttttagtgaccagcatcgagtttctcgggttactgttctttgtctgtatgaagctaaaaggttgtcttttatgttattaattacagatgcgaagttaaatactgccgctagtaaaaaaatatgcttgttgacta

SEQ ID NO: 3671 - DNA, 426 bp, Zea mays
  unsure (1)..(426): unsure at all n locations; Clone ID: LIB3061-030-Q1-K1-A7
gtctcgccgctctcgtcctccgcgaagatgccgaagaacaagggtaagggaggcaagaaccggaagcgaggaaagaacgaggctgacgacgacaagcgcgagctcgtcttcaaggaagacgggcaggagtacgcgcaggtgacccggatgctcggcaacgggcggtgcgaggccatctgcgtcgatggcacgcgccgcctctgccatatccggggtaagatgcacaagaaggtctggatcgcggctggggacatcgtcctcgtcggcctccgcgactaccaggacgacaaggccgacgttatcctcaagtacatgaacgacgaggcgcgcctgctcaaggcctacggngagcttcctgacacgctcaggctcaacgagggcgtcgacgtcgatgggcccgaggaaggcgaggagggcagcgactac

SEQ ID NO: 3672 - DNA, 423 bp, Zea mays
  unsure (1)..(423): unsure at all n locations; Clone ID: LIB3061-030-Q1-K1-A9
ctcaacatgagcattttactttcagtcaatgacctactggcatgctgcggttgtatgtgcggcgatgggtgtgatggaggctatcctatagaggcatggcgctactttgttcaaaatggtgttgttacggatgagtgtgatccatacttcgacccggtcggttgcaagcatcctggatgcgaacctgcttatcctacaccaaagtgtgaaaagaaatgcaaggagcagaaccaagtttggcaggaaaagaagcatttcagcattgatgcgtacagaataaattcagatccacatgacataatggcagaggtctacaaaaatggtcctgtagaagttgctttcacagtttacgaggatttcgcacactacanatctggagtgtacaagcacatcaccggtggcattatgggtggccatgccgtc

SEQ ID NO: 3673 - DNA, 363 bp, Zea mays
  Clone ID: LIB3061-030-Q1-K1-B1
ggcagggcggcgggccctcgtgcagtgtcatgtgaactagcatacccatgcatgcgtgtggggtggtgtcgctctcttgtcttgccattttccgtgctcgtgtttcgtctcgtggaaaataagcaatttaaacttagcttaatttcctgtatgtcatgtgttcgttttagtgtgtatgcctcctatatattatggtcgtatgtgtgtgtcgacatgcttgtgtctctcagtatgtgcgtgtgtctgtttgtatgtgtcagcatcagtgtatgtaagggtcggtttggtaagttctatcttattctgattcttcgtgagaattagttctatgacatataataactacagttagatttcttgaca

SEQ ID NO: 3674 - DNA, 468 bp, Zea mays
  Clone ID: LIB3061-029-Q1-K1-H6
cagcaagcaacatagaaagtagaatccattagcaacaatagagcatcaatggcgaccaagatattttccctccttatgctccttgctctttctacatgtgttgctaacgcgacaattttccctcaatgctcacaagctcctatagcttcccttcttcccccataccttccatcaattatagcttcagtatgtgaaaacccagctcttcaaccatataggcttcaacaagcaatcgcagcaagcaacatacctttatcgcccttgttgtttcaacaatcaccagccctatctttggtgcagtcattggtacaaaccatcagggcacaacagctgcagcaactcgtgctacctgtgatcaaccaagtagctctggcaaacctttctccctactctcagcaacaacaatttcttccattcaaccaactgtctacactgaaccctgctgcttatttgcagcaacaactatta

SEQ ID NO: 3675 - DNA, 454 bp, Zea mays
  Clone ID: LIB3061-029-Q1-K1-G12
atgctcacttgctcctagtgccattattccacagttcctcccaccagttacttcaatgggcttcgaacacctagctgtgcaagccaacatgcaacaacaagcgcttgcggcgagcgtcttacaacaaccaattgcccaattgcaacaacaatccttgccacatctaacaatacaagccatcacaacgcaacagcaacaacagttcctaccagcactgagccacctagccatggtgaaccctgccgcctacttgcaagagcagctgcttgcatccaacccacttgctctggcgaacgtagttgcaaaccagcaacaacaacagctacaacagtttctgccaacgctcagtcaactagccatggtgaaccctgccgcctacgtacaacaacaacaactgctttcatctagcccgctcgctgtgggcaatgcacctacatacctgcaacaacaattg

SEQ ID NO: 3676 - DNA, 444 bp, Zea mays
  unsure (1)..(444): unsure at all n locations; Clone ID: LIB3061-029-Q1-K1-G2
ncagtgccggacaaatctgctcccgtttacataacggtcggtgatggaggcaaccaggagggacttgcttcaaggttttataacccccagccggattactcagcgttcagggaggccagctatggtcactcagttttgcagctgaaaaacaggacccatgctatctaccagtggaatagaaacgatgatgggaatcctgttccagcagacaccgtgatgttccataaccagtattggacgagcagcacgcgccgcaggaggctgaagaagaaccatctccatctcgaggaccttgaggatttgatctccctattatagaaaaccgggttcgcaggacgcatgaactgtgtgtgggggaataatcgcaggttagcactgttgctagtgtgcccgcctctcttggaatggaagcagcagagccagctatcagactggcagtgacca

SEQ ID NO: 3677 - DNA, 349 bp, Zea mays
  Clone ID: LIB3061-029-Q1-K1-G3
attcagaaacacaccaagcgaagcacattagcaaccacctaacaacaatggctaccaaggatttatcccttcctgggcttcttgggctttttgccagcgcaacaaatgcgttcattattccacaatgctcacttgctccaagttccattattacacagttccttccaccagttacttcaatgggcttcgaacacccagctgtgcaagcctataggctacaacaagcaattgccgcgagcgtcttacaacaaccaatttcccagttgcaacaacaatccttggcacatctaacaatacaaaccatcgcaacgcaacagcaacaacaattcctaccagcactgagccacct

SEQ ID NO: 3678 - DNA, 457 bp, Zea mays
  Clone ID: LIB3061-029-Q1-K1-G4
cagcattcaaaaacacaccaagcgaagcgcactagcaacgacctaacaccaatggctaccaagatattagccctccttgcgcttcttgcccttttagtgagcgcaacaaatgcgttcattattccacagtgctcacttgctcctagtgccattattccacagttcctcccaccagttacttcaatgggcttcgaacatccagccgtgcaagcctacaggctacaactagcgcttgcggcgagcgccttacaacaaccaattgcccaattgcaacaacaatccttggcacatctaaccctacaaaccattgcaacgcaacaacaacaacaacaacagtttctgccatcactgagccacctagccgtggtgaaccctgtcacctacttgcaacagcagctgcttgcatccaacccacttgctctggcgaacgtagctgcataccagcaacaacaacagc

SEQ ID NO: 3679 - DNA, 434 bp, Zea mays
  Clone ID: LIB3061-029-Q1-K1-G5
caaaccttgctgcctactctcagcaacaacagtttcttccattcaaccaactagctgcattgaactctgcttcttatttgcaacaacaacaactaccattcagccagctatctgctgcctacccccagcaatttcttccattcaaccaactgacagctttgaactctcctgcttatttacagcagcaacaactactaccattcagccagctagctggtgtgagccctgctaccttcttgacacaaccacaattgttgccgttctaccagcacgctgcgcctaacgctggcaccctcttacaactgcaacaattgctgccattcaaccaacttgctttgacaaacccaacagcattctaccaacaacccatcattggtggtgccctcttttagatttcttatgagttatagttcaataataaaagtttttggctg

SEQ ID NO: 3680 - DNA, 453 bp, Zea mays
  Clone ID: LIB3061-029-Q1-K1-G6
caactagcaacatagaaagcacaatagtgtaccaacaatggcagccaaaatattttgcttccttatgctccttggtctttctgcaagtgctgctaccgcaaccattttcccacaatgctcacaagctcctatagcttcctttcttcccccatacctctcaccagcggtgtcttcagtatgtgaaaacccaattcttcaaccctacaggatccaacaggcaatcgcagcaggcatcttacctttatcacccttgttcctccaacaaccgtcagccctattacagcagttacctttggtgcatttgttggcacaaaacatcaaggcacaacaactacaacaacttgtgctaggaaaccttgctgcctactctcagcaacagcagtttcttccattcaaccaactggctgcattgaactctgctgcttatttgcaacaacaactaccattcagtca

SEQ ID NO: 3681 - DNA, 259 bp, Zea mays
  Clone ID: LIB3061-029-Q1-K1-G7
gtcgtcgtctagcagcagccaccgccgcctcatcctcgcagccgccgtcctgctctccgtgctcgcggctgccagcgccagcgccgggacctcctgcgtgccggggtgggccatcccgcacaacccgctcccgagctgccgctggtacgtgaccagccggacctgcggcatcgggccgcgccttccgtggccggagctgaagaggagatgctgccgggagctggcggacatcccggcgtactggcggtgcacggcgctg

SEQ ID NO: 3682 - DNA, 430 bp, Zea mays
  Clone ID: LIB3061-029-Q1-K1-G8
gaagaaaggaactctagtgcatcacacaccttgtgcttgacgaaatgtttgaatcagaatttatcatcgcatccgcaatttggtttaatcatgcactacggcatgattaatggagttactgaagaagggcacccaattcaattgcccccggttgctgatcggacatttcatttgctcaaacagaagttggtccaagctcctgttctaggtcttcctaacgacttcagcaagggtttcgtgctagaaacagctgtcttcatgcaatcgaagaatctcgtggcttatttgaataagcacctttgtccaagaaaccaagcttcatcgaggagtgtttggcaatctttatggcaattattgacgaatggcggccatacttgcagcaccgtcaaatcgtgattgtactccatcttactgagcagagggtgacctt

SEQ ID NO: 3683 - DNA, 57 bp, Zea mays
  Clone ID: LIB3061-029-Q1-K1-G9
gaataagaatactaattgtaattataatgctaatatcatagtacaaacgtcatacgg

SEQ ID NO: 3684 - DNA, 126 bp, Zea mays
  Clone ID: LIB3061-029-Q1-K1-H1
ggtaaatgggggagaatggagaactgtttataacttcacagccctgtgcatagggaatgccaaatacctttattctcatatcttgagtattatgtccccaaaaggctcttaaagctccaaatacat

SEQ ID NO: 3685 - DNA, 451 bp, Zea mays
  Clone ID: LIB3061-029-Q1-K1-H10
gaccaactagcaacatagaaagctcaatagtgtaccaacaatggcagccaaaatatttggcctccttatgctccttggtctttctgcaagtgctgctacggcgaccattttcccgcaatgctcgcaagctcctatagcttcccttcttcccccgtacctctcaccagcggtgtcttcggtatgtgaaaacccaattcttcaaccctacaggatccaacaggcaatcacagctggcatcttacctttatcacccttgttcctccaacaatcatcagccctattacatcagttacctttggtgcatttattggcacaaaacatcagggcacaacaactacaacaacttgtgctagcaaaccttgctgcctactctcagcaacagcagtttcttccattcaaccaactagctgcattgaactctgcttcttatttgcaacaacaacaactacca

SEQ ID NO: 3686 - DNA, 430 bp, Zea mays
  Clone ID: LIB3061-029-Q1-K1-H11
gagaccaactagcaacatagaaagcacaatagtgtaccaacaatggcagccaaaatattttgcctccttatgctccttggtctttctgcaagtgctgctacggcgaccattttcccgcaatgctcgcaagctcctatagcttcccttcttcccccgtacctctcaccagcggtgtcttcggtatgtgaaaacccaattcttcaaccctacaggatccaacaggcaatcacagctggcatcttacctttatcacccttgttcctccaacaatcatcagccctattacatcagttacctttggtgcatttattggcacaaaacatcagggcacaacaactacaacaacttgtgctagcaaaccttgctgcctactctcagcaacagcagtttcttccattcaaccaactagctgcattgaactctgcttctt

SEQ ID NO: 3687 - DNA, 450 bp, Zea mays
  unsure (1)..(450): unsure at all n locations; Clone ID: LIB3061-029-Q1-K1-H12
ccggagtgtagcttgccactctcaccaatcaagttttcatgtctgatctcgacattcagatcccaactgccttcgatcccttcgctgaggccaatgctggggactctggtgcggcagcagggtcaaaggactacgttcacgtgcgcatccagcagcgtaatggtcgcaagagcctgactaccgtccagggattgaagaaggagttcagctacagcaagatcctcaaagatctcaagaaagagttctgctgcaatggtacagtggtccaggacccagaacttggacaggtcattcagctccagggtgatcagaggaagaacgtctcgaatttcctcgtccaggccggcattgtgaagaaggagcacatcaagattcatggtttctgagcaaccgcncggtccatagcaaaccaaccctgcatgcanggccagcttattatatataatatct

SEQ ID NO: 3688 - DNA, 443 bp, Zea mays
  Clone ID: LIB3061-029-Q1-K1-H3
tgacaagaagactagaaccgaacctgaccatgtcgctgatccgccgcagcaacgtgttcgatcccttctccctcgacctctgggacccctttgagggcttccccttcggctccggcaacagcagcagtctcttcccctcgttcccgcggaccagctcggagaccgcggccttcgctggcgcgcggatcgactggaaggagactccagaggcgcacgtgttcaaggccgacgtaccggggctgaagaaggaggaggtcaaggtggaggtcgaggacggcaacgtccttcagatcagcggcgagcgcaacaaggagcaagaggagaagacggacacctggcaccgtgtggagcggagcagcgggaggttcctgcgcaggttccgactggccgagaacgccaagacggagcagatcacgggcggcatggagaacggcgtgcttaca

SEQ ID NO: 3689 - DNA, 451 bp, Zea mays
  Clone ID: LIB3061-029-Q1-K1-H4
gtgaccctgttttctctttctggttaacccgacttgctggtgaaggaaaaggtggtgaaattgggtttggtggaatggattctagtcactacaagggtgatcacccctatgtcccagtcactcagaagggatactggcagtttaatatgggtgatgtcctggttgatggaaagtccactgggttttgtgctggtggttgtgcagcaatagcagattctggaacttccttgcttgctggccccacagccattattactgaaatcaacgaaaagatcggtgctgctggtgtagtcagccaggagtgcaagactgttgtttctcaatacggacaacagatcctagatcttctgctagctgagacgcaaccagcgaagatctgttctcaggttggcctgtgcacttttgatggcactcacggtgttagcactggaattcgtagcgtaatggatga

SEQ ID NO: 3690 - DNA, 289 bp, Zea mays
  Clone ID: LIB3061-029-Q1-K1-H5
cagaggtgggctggcttctcctcccccttttaccaagtcctcctcgggttagggttccttagggttttgtggaggggcgatggcggcggctgatgtggagtaccgttgcttcgtcggcgggcttgcctgggccaccagcaacgagtcgctggagaatgccttcgcctcctacggcgagatcctcgactccaaggtcatcaccgaccgggagacggggaggtctcgcggcttcggcttcgttaccttcgccttcgagaactccatgctcgacgctatcgagaacatgaac

SEQ ID NO: 3691 - DNA, 444 bp, Zea mays
  Clone ID: LIB3061-029-Q1-K1-G10
gaaaattgcagacaaggaatcagagtgcgatatcagtatcctgaatatacaggttggccttatccgtaaagcatggaagcatccatctgctgacagccttttagttgaggagatagatttgggagatggtaatgtgcgtcaagttgttagtggtcttgcaaagtattgcagcccagatgatcttactaatcggcatgttgtcttgatcacgaatgtgaagcctggaaagctgcgagatgtaatgtctgctggattggtcctttgtgcttcaactgaagatcatgctgctgtggagcctttgattcctccagaaggagccaagattggagaacgcatttcatttgctgggtttgatgggaagcctgaagatgttctaaatccaaagaaaaagcagctggacaagattaccccgcatcttcgtaccgacgagaatggaattgcaat

SEQ ID NO: 3692 - DNA, 380 bp, Zea mays
  Clone ID: LIB3061-011-Q1-K1-A10
ggaatcccgggtagagcaggcattctaccgaaggacacatgaaacaccactcatcctaacacagaaccagaactaccatggttcacacttgacgtggcccaatatgacgcctttttacggcagcaccgaaagatgacagagacccaacatgctatgatcaacactaccaacattaagcagcatcgcaacgatgacgacgacgtttactcagagagcttatgctagatactgtaggaagaaactcactatacgagcacgcacgacatgcataaccatcaacgagagaagaactatagcacaagcacacagtatcatgagggcatccacgtgaggagcgacactgactcaaagtcttcgccacacttatgctaccactacga

SEQ ID NO: 3693 - DNA, 423 bp, Zea mays
  Clone ID: LIB3061-011-Q1-K1-A11
atctcagtgtacctacactcagttggaaaacttcaaccacactgcaacaaggtttataaaaggtactgttactattgttaaaattagtcattttagctatccgcttctatttcaccgtgcttgcaggtttgctatgaggaaaaacaaatttatgggctcaaacaaagtgtgatagtgaaagtcattttgcttccagcttaagaaccaagccaagaaaacagatatcaactgtgacgccacactcaaaagcttgtttggtgagagggataaggttgggatgctggagatctctaagcttttgagccgtggcttcccgaaaatctccaagcttttgtggtccatggagccagggatggctctttggtaaaagacttcgttgtggatggcctcttttatggtccatgttaagtcccaagtcccact

SEQ ID NO: 3694 - DNA, 425 bp, Zea mays
  Clone ID: LIB3061-011-Q1-K1-A2
cgcacatatctactatactatactctaggaagcaaggacaccaccgccatggcagccgaagatgcttgcattgttcgctctcctagctctttgtgcaagcgccactagtgcgacccatattccagggcacttgccaccagtcatgccattgggtaccatgaacccatgcatgcagtactgcatgatgcaacaggggcttgccagcttgatggcgtgtccgtccctgatgctgcagcaactgttggccttaccgcttcagacgatgccagtgatgatgccacagatgatgacgcctaacatgatgtcaccattgatgatgccgagcatgatgtcaccaatggtcttgccgagcatgatgtcgcaaatgatgatgccacaatgtcactgcgacgccgtctcgcagattatgctgcaacagcagttac

SEQ ID NO: 3695 - DNA, 419 bp, Zea mays
  Clone ID: LIB3061-011-Q1-K1-A3
ccaactagcaacatagaaagcacaatagtgtaccaacaatggcagccaaaatattttgcctccttatgctccttggtctttctgcaagtgctgctacggcgaccattttcccgcaatgctcgcaagctcctatagcttcccttcttcccccgtacctctcaccagcggtgtcttcggtatgtgaaaacccaattcttcaaccctacaggatccaacaggcaatcacagctggcatcttacctttatcacccttgttcctccaacaatcatcagccctattacatcagttacctttggtgcatttattggcacaaaacatcagggcacaacaactacaacaacttgtgctagcaaaccttgctgcctactctcagcaacagcagtttcttccattcaaccaactagctgcattgaactct

SEQ ID NO: 3696 - DNA, 421 bp, Zea mays
  Clone ID: LIB3061-011-Q1-K1-A4
gcagcttctgcttgctctggggggaaggagagagagagagcgagagagatctagtagagaggctagctaggtggtcctcgaacgaagatgttggcggtgttcagcgggcaggtggtggaggtgccggcggagctggtggcggcgggcagccggacgccgtcgcccaagacgaaggcgtcgcagctggtggggcgcttcctggccgcctccgagccggccgtgtccgtgcagctcggcgaccacggccacctcgcctactcccacaccaaccaggcgctcctccgccccaggtcgttcgcggcgaaggacgaggtgttctgcctgttcgagggggtgctggacaacctgggtcgtctgagccagcagcacgggctgtcaagcaagggcgccaacgaggtgctcctcgtcatcgaggcctaca

SEQ ID NO: 3697 - DNA, 379 bp, Zea mays
  Clone ID: LIB3061-011-Q1-K1-A5
atcaggcgtccggaactagcaacatagaaagcacaatcgtgtaccaacaatggcagccaaaatatttagcctacttatgctccttggtctttctgcaagtgctgctacggagaccattttcccacaatgctgacaagctcctatagctgtccttcttacaccgtacctctaaccagcggtgtcttcggtatgtgaaaacccaatacttcaaccctatgcgatccaacaggcaatcgcagctggcatcttacctttatcacccttgttcctccaacaatcatcagacctcttacagcagctaccttgggtgcatttattggcacaatacatgagggcacaacatctacaacaactggagctagcaaaccttgctgcctac

SEQ ID NO: 3698 - DNA, 425 bp, Zea mays
  Clone ID: LIB3061-011-Q1-K1-A7
cccacgcgtccggcacaatagtgtaccaacaatggcagccaaaatattttgcctccttatgctccttggtatttctgcaagtgctgctacggcgaccattttcccgcaatgctcacaagctcctatagcttcccttcttcccccgtacctctcaccagcggtgtcttcggtatgtgaaaacccaattcttcaaccctacaggatccaacaggcaatcgcagctggcatcttacctttatcacccttgttcctccaacaatcatcagccctattacagcagttacctttggtgcatttattggcacaaaacatcagggcacaacaactacaacaacttgtgctagcaaaccttgctgcctactctcagcaacagcagtttcttccattcaaccaactagctgcattgaactctgcttcttatttgc

SEQ ID NO: 3699 - DNA, 415 bp, Zea mays
  Clone ID: LIB3061-011-Q1-K1-A8
gagaccaacaagcaacatagaaagtggaatacagtagcaacaatagagcaacaatggctgccaagatattttccatccttatgctccttgctctttctgcatgtgttgctaacgcgaccatttttcctcaatactcacaagctcctatagctgcccttcttaccccataccttccatcaatgaccgcttcagtttgggaaaacccagcccttcaaccctacaggctccaacaagcaatcgcaacaagcaacttacctttatcacccctgttctttcaacaatcgacagccctatctttggtgcagtcattggtacaaaccatcaaggcacaacagctgcaacaactcgtgctaccagtgatcaaccaagtagctctggcaaacctttctccctactctcagcaacaacaatttct

SEQ ID NO: 3700 - DNA, 427 bp, Zea mays
  Clone ID: LIB3061-011-Q1-K1-A9
atcgatagcatgggtctgcgaattattgatagctaagaacacaacactggcagccaaggtattctgcttccttatgctccttggtctttctgcaagtgttgctaccgcaaccattttcccacaatgctcacaagctcctatagcttaccttctttccccatacctctcaccagcggagtcttcaatgtgtgaaaacccaattgttcaaccctacaggatccaacaggcaatcgcaacaggcatcttaccattatcacccttgatcctccaacaaccgtcagccctattacagcagttacctttggtccatttggtggcacaaaacatcagggcacaacaactacaacaacttgtgctagcaaaccttgctgcatactctcagcaacatcagtttcttccattcaaccaactggctgcattgaactct

SEQ ID NO: 3701 - DNA, 430 bp, Zea mays
  Clone ID: LIB3061-011-Q1-K1-B1
caacatcataaggcatcctcgcgtgcaatacatccaaggcaagggagaaggaacggtacctttgacgtaggtgcaagtgccgagtccgtcagcggacttgccgcccttgcccttgcccttgcccttgcctcccttgccgccgccgtcgtcgccgccagaggagccggccgcctgcttgcccttccccttggcgtccttcggcttcgagtccttgcccatcggagcaactgcgcaaggtcgatcggattacacaggccaaaaccctacttccaagtaagatttggctcagatactaccaccgacgacgacgagtcgacgacgacgggaggaccacgaccacaaagatagatatctggacgcgacgcacgagggccttgatgtagaaggccatatacggccgatgggcccggctcgtctagccagatacttt

SEQ ID NO: 3702 - DNA, 404 bp, Zea mays
  unsure (1)..(404): unsure at all n locations; Clone ID: LIB3061-011-Q1-K1-B10
gcaaagcggcagtgcgtagagaggatcgtcgaacagaacagcatgaagatggtcatcgttctcgtcgtgtgcctggctctgtcagctgccagcgcctctgcaatgcagatgccctgcccctgcgcggggctgcagggcttgtacggcgctggcgccggcctgacgacgatgatgggcgccggcgggctgtacccctacgcggagtacctgaggcagccgcagtgcagcccgctggcggcggcgccctactacgccgggtgtgggcagacgagcgccatgtaccagccgctccggcaacagtgctgccagcagcagatgaggatgatggacgtgcagtccgtcgcgcagcagctgcagatgatgatgcagcttgagcgtgccgctgccgncagcagcagcctgta

SEQ ID NO: 3703 - DNA, 429 bp, Zea mays
  Clone ID: LIB3061-011-Q1-K1-B11
gacaatttactggtagctggtgggtttcaaggagagctgatctgtaaacaccttgatcaggaaggtattagtgtttgctgtcgaacaacttatgatgataatgctattacaaatgcggttgagatatttaatacctctagtggcgccgttcacttcatggcatcaaataacgactctggtgtgagatactatgacatggagagattccagctattcaagcattttcagtttgaatggccagtgaatcatgcttcgttgagtcctgacagaaaggtggttgttattgtgggtgatgatcctgatggtctacttattgatgcaaactctggaaagacagttcattccataaaaggacatcgggactactcatttgcatcggcttggagccctgatgggcgaacatttgctaccggcaaccaagacaagaca

SEQ ID NO: 3704 - DNA, 409 bp, Zea mays
  Clone ID: LIB3061-011-Q1-K1-B12
cggacgcgtgggcttcatcgatcgaccctatgtcatgtaaaaaaggaccaaagtggtggttccttgaagatcatcagttcatcatcctatagtaagctgaatgatgaaagaaaacccctgtacattacatggaaggcagaccggctattggctccattgctccaatgtctgctttggctgccttgcctcgatggaccggatgcagtgaggaatccagccgaacgacagttttgaaggataggaaggggagctggaagcagtcacgcaggcagcctcgccgtgattcatatggaacaagctggagtcagtttctgctgtgccactcactgtttaccttaagattattacctgtgttgttgtcctttgctcgttagggctgataacataatgactcattagaaaatcatgc

SEQ ID NO: 3705 - DNA, 244 bp, Zea mays
  Clone ID: LIB3061-011-Q1-K1-B2
gcgacgcatactaatgagacctattagatgcattaaatgcacagtattgatcgacccgagggcatccagaatattcagctaccttatgctgcgcgggcttactgtaggtgtctgatctcagaaacattatctcacaatgttcacacgattatatggattgaattctgctcccatacctctcacaaaacgagtattatatgtgcgaaatcctgattgctacaccctacaagatccaacatgcaat

SEQ ID NO: 3706 - DNA, 403 bp, Zea mays
  Clone ID: LIB3061-011-Q1-K1-A1
cggacgcgtgggtggacgtcagcctagcaattagctcatcgactccagattggagaactcgacaccatgaaggtgctgatcgttgcccttgctctcctggcgctcgctgcgagcgccgcctccagtacaagcggcggctgtggctgccagacaccaccgtttcatctaccgcctccgttctatatgccgcctccgttctatctgccgccgcagcagcagccgcagccatggcaataccccactcaaccaccgcagctaagcccgtgccagcagttcggatcctgcggcgtcggcagcgtcggcagcccgttcctgggccagtgcgtcgagttcctgaggcaccagtgcagcccggcggcgacgccctacggctcgccacagtgccaggcgctgcagcagcagt

SEQ ID NO: 3707 - DNA, 425 bp, Zea mays
  Clone ID: LIB3061-010-Q1-K1-G9
gattcagcaaaaggctataatactcgtggaatggcatatgccatgcttggcgtatgggaggaagctgcttatgatctgcacacagtatctaacatggattacgacgaggagatcaatgctgtgctcaagaaggtggagcctaatgctcacaagatagtggaacatcgcaggaagtatgagaggttgagaaaagagagggaggaaaagagagcgcagcgtgatcggctttgtcaacgtgcagaggcgcaggctgcttacgacaaggccaagaggaaggagcaatcgtcaagtcgctcatcaggaggtgcatctcccagaggctttcctggagggatgcctggtggtggtttccctagagggatgcccgggggatgtttcctcgggggcggcatgcctgggggtttacctgggggttgcatgccttg

SEQ ID NO: 3708 - DNA, 294 bp, Zea mays
  Clone ID: LIB3061-010-Q1-K1-H10
gcaaaaagctgctacctcaaccattcttcccacaatgctacacaagcctactatagctatcctttcttcccccatacctctcaccagcgacgtcttcagtatgttaaaacccaattcttcaaccctacaggatccaacaagcaatcgcaacacgcatcttacctttatcacccttgttcctccaacaaccgtcagccctattacagcaattacctttgatgcatttgttgccacaaaacatcaaagcacaacaactacaacaacttgtgctaagaaaccttgctgcctactctc

SEQ ID NO: 3709 - DNA, 444 bp, Zea mays
  Clone ID: LIB3061-010-Q1-K1-H11
aaaaacacaccaagcgaagcgcactagcaacgacctaacaccaatggctacgaagatattagccctccttgcgcttcttgcccttttagtgagcgcaacaaatgcgttcattattccacagtgctcacttgctcctagtgccagtattccacagttcctcccaccagttacttcaatgggcttcgaacatccagccgtgcaagcctacaggctacaactagcgcttgcggcgagcgccttacaacaaccaattgcccaattgcaacaacaatccttggcacatctaaccctacaaaccattgcaacgcaacaacaacaacaacagtttctgccatcactgagccacctagccgtggtgaaccctgtcacctacttgcaacagcagctgcttgcatccaacccacttgctctggcgaacgtagctgcataccagcaacaacaaca

SEQ ID NO: 3710 - DNA, 299 bp, Zea mays
  unsure (1)..(299): unsure at all n locations; Clone ID: LIB3061-010-Q1-K1-H12
atgagctttatctactccagagcgcagtagaacccgatcgacaccatgagggtgttgcgcgttgccctcgctctcctggctctcgctgcgagcgccacctccacgcatacaagcggcggctgcggctgccagccaccgccgccggttcatctaccgccgccggtgcatctgccacctccggttcacctgccacctccggtgcatctcccaccgccggtccacctgccgccgccggtccacctgccaccgncggtccatgtgccgncgncggttcatctgccgncgncaccatgccacta

SEQ ID NO: 3711 - DNA, 455 bp, Zea mays
  Clone ID: LIB3061-010-Q1-K1-H9
attgatacgaactagcaacatacatagttaagtacactagcaacatcttaggaccaatggcagccaagatttttgccatgcttgccctccttgctctttcagcaagcgttgctaccgcgactattattccacaatgctcacaacaatacctctctccggtgacagccgcgagatttgaatacccaactatacaatcctacaggctacaagaggccatcgcagcaagcatcttacggtcgttagcattgaccgtccaacaaccatatgccctattgcaacaaccatccttaatgaatctatatctccaaagaatcgcagcacaacaactacaacaacagttgcttccaacaatcaatcaagtagttgcagcgaaccttgctgcttaccttcagcaacaacaatttcttccattcaatcaactagctggggtgaaccctgctgcttacttgcaggca

SEQ ID NO: 3712 - DNA, 445 bp, Zea mays
  unsure (1)..(445): unsure at all n locations; Clone ID: LIB3061-010-Q1-K1-E9
gcaacatagaaagcacaatagtgtaccaacaatggcagccaaaatattttggctccttgtgctccttggtctttctgcaagtgctgctacggcgaccattttcccgcaatgctcgcaagctcctatagcttcccttcttcccccgtacctctcaccagcggtgtcttcggtatgtgaaaacccaattcttcaaccctacaggatccaacaggcaatcacagctggcatcttacctttatcacccttgttcctccaacaatcatcagccctattacatcagttacctttggtgcatntattggcacanaacatcagggcacaacaactacaacaacttgtgctagcaaaccttgctgcctactctcagcaacagcagtttcttccattcaaccaactagctgcattgaactctgcttcttatttgcaacaacaacaactaccattc

SEQ ID NO: 3713 - DNA, 430 bp, Zea mays
  unsure (1)..(430): unsure at all n locations; Clone ID: LIB3061-010-Q1-K1-F10
gcgaagcgcactagcaacgacctaacaacaatggctaccaagatattagcgctccttgcgcttcttgccctttttgtgagcgcaacaaatgcgttcattattccacaatgctcacttgctcctagtgccattattccacagttcctcccaccagttacttcaatgggcttcgaacacctagctgtgcaagccaacatgcaacaacaagcgcttgcggcgagcgtcttacaacaaccaattgcccaattgcaacaacaatccttgccacatctaacaatacaagccatcacaacgcaacagcaacaacagttcctaccagcactgagccacctagccatggtgaaccctgccgnctacttgcaagagcagctgcttgcatccaacccacttgctctggcgaacgtagtttgcaaccagcaacaacaacagc

SEQ ID NO: 3714 - DNA, 445 bp, Zea mays
  Clone ID: LIB3061-010-Q1-K1-F11
gggaagctgcaccttgggatgccctttgcacaaggtgcctttgggaagctgtgacaggggaacatataatgggatggatgttgctattaagcttttggagcgacctgaggctgaccctgagaaagctcaactgttagagcagcagtttgtccaagaagttatgatgcttgcaacactgaggcacccgaatattgtcaagttcattggtgcatgcaggaagccattggtttggtgtattgtgacagagtatgcaaagggtggatctcttaagaatttcttgagcaagaagcagaacaggtctgttccgctgaagtggcagtcaagcaggcattggatgttgcacgcggcatggcctatgtccatggccttgggttcattcacagagatcttaagtcggacaacctcctgatttctggtgataagtccattaagattgccgactttg

SEQ ID NO: 3715 - DNA, 321 bp, Zea mays
  unsure (1)..(321): unsure at all n locations; Clone ID: LIB3061-010-Q1-K1-F12
agaaagcacaatagtgtaccaacaatggcagccaaaatattttgcttccttatgctccgtggtctttctgcaagtgttgctaccgcaaccattttcccacaatgctcacaagctcctatagcttcccttcttcccccatacctctcaccagcggtgtcttcaatgtgtgaaaccccaattgttcaaccctacaggatccaacaggcaatcgcaacaggcatcttaccattatcacccttgttcctccaacaaccgtcagccctattacagcangttacctttgtccatttggtggcacaaaacatcagggcacaacaacta

SEQ ID NO: 3716 - DNA, 367 bp, Zea mays
  unsure (1)..(367): unsure at all n locations; Clone ID: LIB3061-010-Q1-K1-G10
agaccaactagcaacatagaaagcacaatagtgtaccaacaatggcagccagaatattgtgcctccttatgctccttggtctttctgcaagtgctgctacggcgaccattttcccgcaatgctcgcaagctcctatagcttcccttcttcccccgtacctctcaccagcggtgtcttcggtatgtgaaaacccaattcttcaaccctacaggatccaacaggcaatcacagctggcatcttacctttatcacccttgttcctccaacaatcatcagccctattacatcagttacctttggtgcatttattggcacaaaacatcanggcacaacaactaccaccacctggtgctagcaaaccttgctg

SEQ ID NO: 3717 - DNA, 459 bp, Zea mays
  unsure (1)..(459): unsure at all n locations; Clone ID: LIB3061-010-Q1-K1-G11
gaccaactagcaacatagaaagcacaatagtgtaccaacaatggcagccaagatatttggcctccttatgctccttggtctttctgcaagtgctgctacggcgaccattttcccgcaatgctcgcaagctcctatagcttcccttcttcccccgtacctctcaccagcggtgtcttcggtatgtgaaaacccaattcttcaaccctacaggatccaacaggcaatcacagctggcatcttacctttatcacccttgttcctncaacaatcatcagccctattacatcaggtacccttgggtgcatnaattggcacaaaaacatcagggcccaccacctccaccaacttgtgctagcaaaccttgctgcctactttcagcaacagcagttctttccattcaaccaactagctgcattgaactctgcttcttatttgcaacaacaacaactaccattcagc

SEQ ID NO: 3718 - DNA, 394 bp, Zea mays
  Clone ID: LIB3061-010-Q1-K1-G12
cggacgcgtgggttcagaaacacaccattcgaagcacattatcaacaaccgaacaacgatggctaccaagatattatccctccttgcgcttcttgcgctttttgcgagcgcaacaaatgcgttcattattccacaatgctcacttgctccaagttccattattacacagttccttccaccagttacttcaatgggctttgaacacccagctgtgcaagcctataggctacaacaagcaattgctgctagcgtcttacaacaaccaatttatcagttgcaacaactatccttggcacatctaacaatacaaaccatctgaacgcagcatcaacaacaatacttaccactactgaaccacctatccatggtgaaccttgacgccttgcaacagtag

SEQ ID NO: 3719 - DNA, 344 bp, Zea mays
  Clone ID: LIB3061-029-Q1-K1-E6
gctgtaccggtctcggattcccgggccggcggaggtggcctggcggcgctgagggcggcgcgcgccgtgaaggagacgacggggatcgtcggccttgaggtggcgcccaacgcgcgggaggttctcatcgggctctacacgcgtacgctcaaggagatcgaggccgtccccaaagacgagggctaccgcaaggccgttgagtccttcaccaatcaccgcctccagatctgccaggaggaggacgactggaagcgcatcgaggaccgaatcggatgcgggcaagtcgaggagctcatcgaggaggccgaggacgagctcaagctcatcgccaaaatgattgaatg

SEQ ID NO: 3720 - DNA, 199 bp, Zea mays
  Clone ID: LIB3061-029-Q1-K1-E7
gatcaaacagtagcgtcagcttttacattatatagcgagagtgatccggcgctgagaagagatggctaaacaccgccgaggttctcatcgctctctacacgcgtacgctcaaggagatcgaggccgtccccaaagaccatggctacctaatagtccgttatttccttcaccaatctccgactgcatatctaccatgagg

SEQ ID NO: 3721 - DNA, 451 bp, Zea mays
  Clone ID: LIB3061-029-Q1-K1-E8
atacctctcaccagcggtgtcttcaatgtgtgaaaccccaattgttcaaccctacaggatccaacaggcaatcgcaacaggcatcttaccattatcacccttgttcctccaacaaccgtcagccctattacagcagttacctttggtccatttggtggcacaaaacatcagggcacaacaactacaacaacttgtgctagcaaaccttgctgcatactctcagcaacatcagtttcttccattcaaccaactggctgcattgaactctgctgcttatttgcaacaacaattaccattcagccagctaggtgcttgctacccccaacaatttctttcattcaaccaactagccacattgaactcttgtgcttatttacagcagcaacaactactaccattcagccagctagctgatgtgagccctgctgccttcttgacacaacaacagttg

SEQ ID NO: 3722 - DNA, 447 bp, Zea mays
  Clone ID: LIB3061-029-Q1-K1-E9
aattatctaactccaaaaaccatgaagctggtgcttgtggttcttgctttcattgctttagtatcaagtgtttcttgtacacagacaggcggctgcagctgtggtcaacaacaaagccatgagcagcaacatcatccacaacaacatcatccacaaaaacaacaacatcaaccaccaccacaacatcaccagcagcagcaacaccaacaacaacaagttcacatgcaaccacaaaaacatcagcaacaacaagaagttcatgttcaacaacaacaacaacaaccgcagcaccaacaacaacaacaacaacaacagcaccaacaacaacatcaatgtgaaggccaacaacaacatcaccaacaatcacaaggccatgtgcaacaacacgaacagagccatgagcaacaccaaagacagaaccatgagcaacaacattaacaacaattt

SEQ ID NO: 3723 - DNA, 288 bp, Zea mays
  Clone ID: LIB3061-029-Q1-K1-F1
ctactaccatttagccagctagctgcagcaaaccgtgcttccttcttgacacagcaacagttgctgcctttctaccagcagtttgcggctaaccccgcaaccctcttacaactacaacaattgttgccctttgtccaacttgctttgacagaccgagcggcctcctaccaacaacacatcattggtggtgccctcttttagattgcttattagttgtaattcaataataaagttttttggatgatgtatgtggccaaccagaaataagaagttacatttccagatttt

SEQ ID NO: 3724 - DNA, 450 bp, Zea mays
  unsure (1)..(450): unsure at all n locations; Clone ID: LIB3061-029-Q1-K1-F10
cccacgcgtccggagaccaacaagcaacatagaaagtggaatacagtagcaacaatagagcaacaatggcggccaagatattttccatccttatgctccttgctctttctgcatgtgttgctaacgcgaccatttttcctcaatactcacaagctcctatagctgcccttcttcccccataccttccatcaatgaccgcttcagtttgtgaaaacccagcccttcaaccctacaggctccaacaagcaatcgcaacaagcaacttacctttatcacccctgttctttcaacaatcgccagccctatctntggtgcagtcattggtacaaaccatcagggcacaacagctgcaacaactcgtgctaccagtgatcagccaagtagctctggcaaacctttctccctactctcaagcacaacaatttcttccattcaaccaactgtctacac

SEQ ID NO: 3725 - DNA, 456 bp, Zea mays
  Clone ID: LIB3061-029-Q1-K1-F11
ctcgctccacggccatggtgaggatgaagcaggtaaagatctcggtaaagaaggacgtggattcgtacacaatccgcggcaccaacaaggtcgtccatgtgggcgactgcgtgctgatgcgggcgtcggactcggacaagcagccgtatgtggcgcgggtggagaagatggaggccgacggacgcggcagcgtgcgggtgcaggtgcgctggtactaccgccccgaggaatccaagggcggtcgccggcagttccacggcgccaaggagcttttcctttccgatcatttcgacctacagagcgcccacaccatcgaggggaaatgtgttgtccactctttcaagaactacaccaagcttgataatgtcgggcctgaggactacttctcccgatttgagtacaaggcggccaccggttcgttcacccctgaccgcgtggcagtgtattgcaaatgtg

SEQ ID NO: 3726 - DNA, 438 bp, Zea mays
  Clone ID: LIB3061-029-Q1-K1-F12
ttctgcaagtgctgctacggcgaccattttcccgcaatgctcacaagctcctatagctgcccttcttcccccgtacctctcaccagcggtgtcttcggtatgtgaaaacccaattcttcaaccctacaggatccaacaggcaatcgcagctggcatcttacctttatcacccttgttcctccaacaatcatcagccctattacagcagttacctttggtgcatttattggcacaaaacatcagggcacaacaactacaacaacttgtgctagcaaaccttgctgcctactctcagcaacagcagtttcttccattcaaccaactagctgcattgaactctgcttcttatttgcaacaacaacaactaccattcagccagctacctgttgcctacccccaacaatttcttccattcaaccaactggcagcattgaactc

SEQ ID NO: 3727 - DNA, 415 bp, Zea mays
  Clone ID: LIB3061-029-Q1-K1-F2
caaccctacaggatccaacaggcaatcgcaacaggcatcttaccattatcacccttgttgctgcaacaaccgtcagccctattacagcagttacctttggtccatttggtggcacaaaacatcagggcacaacaactacaacaacttgtgctagcaaaccttgctgcatactctcagcaacatcagtttcttccattcaaccaactggctgcattgaactctgctgcttatttgcaacaacaattaccattcagccagctagttgctgcctacccccagcaatttcttccattcaaccaactagcagcattgaactctgctgcttatttacagcagcaacaactactaccattcaacccagtagcttatgtgagccctggtggctttttgacacaacaacaggtggtggcggtct

SEQ ID NO: 3728 - DNA, 454 bp, Zea mays
  Clone ID: LIB3061-029-Q1-K1-F3
caaaaacacaccaagcgaagcgcactagcaacgacctaacaccaatggctaccaagatattagccctccttgcgcttcttgcccttttagtgagcgcaacaaatgcgttcattattccacagtgctcacttgctcctagtgccagtattccacagttcctcccaccagttacttcaatgggcttcgaacatccagccgtgcaagcctacaggctacaactagcgcttgcggcgagcgccttacaacaaccaattgcccaattgcaacaacaatccttggcacatctaaccctacaaaccattgcaacgcaacaacaacaacaacagtttctgccatcactgagccacctagccgtggtgaaccctgtcacctacttgcaacagcagctgcttgcatccaacccacttgctctggcgaacgtagctgcataccagcaacaacaacagctgcaaca

SEQ ID NO: 3729 - DNA, 451 bp, Zea mays
  unsure (1)..(451): unsure at all n locations; Clone ID: LIB3061-029-Q1-K1-F4
cccttgttcttccaccacccgcaagccttataccagcagtaaccttgggtccattggggggcccaaaccatcagggcccaccactacaacaacttgtgctagcanaccttgctgcatactctcagcaacatcagtttcttccattcaaccaactggctgcattgaactctgctgcttatttgcaacaacaattaccattcagccagctagttgctgcctacccccagcaatttcttccattcaaccaactagcagcattgaactctgctgcttatttacagcagcaacaactactaccattcagccagctagctgatgtgagccctgctgccttcttgacacaacaacagttgttgccgttctacctgcacgctatgcctaacgctggcaccctcttacaactgcaacaattgctgccattcaaccaacttgctttgacaaacccaacagt

SEQ ID NO: 3730 - DNA, 465 bp, Zea mays
  Clone ID: LIB3061-029-Q1-K1-F6
attgagaccaacaagcaacatagaaagtggaatacagtagcaaaaatagagcaacaatggcggccaagatattttccatccttatgctccttgctctttctgcatgtgttgctaacgcgaccatttttcctcaatactcacaagctcctatagctgcccttcttcccccataccttccatcaatgaccgctttagtatgtgaaaacccagcccttcaaccctacaggatccagcaagcaatcgcaacaagcaacttacctttatcacacctgttctttcaacaatcgccagccctatctttggtgcagtcattggtacaaaccatcagggcagaacagttgcagcaactcgtgctaccagtgatcagccaagtagctctggcaaacctttccccctactctcagcaacaacaatttcttccattcaaccaactgtctatactgaaccctgctgcttatttgcagc

SEQ ID NO: 3731 - DNA, 420 bp, Zea mays
  unsure (1)..(420): unsure at all n locations; Clone ID: LIB3061-029-Q1-K1-F7
atggagaaccctccgagcatcctagtgactcccatggctccggccatgtcggcgcagttcacaagaatcaccttcagcaacctgtttgtccgtcgggctggcccaggcagcacggagctgaccgtggagggaaggccatccgaccagctgggcaggagaaacctcactgacagccccgtatttgacggccgtggccctgacgccagcctcgtggctcgcgtacagggagtcgctacccagatgggcgacgtgcgccagttgtacaccgtcgtgttccaggagaggccgctcaagggctccacgctcgtcnaccgaagcgcgatgacggaagggtcagacgagtgggcgatctacggcggaactggaatgttcgcgatggcgagaggcgtcattaggagaacgtttcttgccgacacgagc

SEQ ID NO: 3732 - DNA, 366 bp, Zea mays
  Clone ID: LIB3061-029-Q1-K1-F8
aacagattgtaccagctctgactcaactagctgtggcaaaccctgttgcctacttgcaacagctgcttccattcaaccaactgactctgtcgaactctgctgcgtacctacaacagcgacaacagttacttaatccattggtagtggctaacccattggtcgccgccttcctacagcagcaacaattgctgccatacaaccagttctctttgatgaatcctgtcttgtcgaggcagcaacccatcgttggaggtgccatcttttagattacatatgagatgtactcgataatggtgccctcataccgacgtgtgtttcctagaaataatcaatatattgattgagatttatctcgatatatttctg

SEQ ID NO: 3733 - DNA, 450 bp, Zea mays
  Clone ID: LIB3061-029-Q1-K1-F9
agaaagcacaatagtgtaccaacaatggcagccaaaatattttgcttccttatgctccttggtctttctgcaagtgttgctaccgcaaccattttcccacaatgctcacaagctcctatagcttcccttcttcccccatacctctcaccagcggtgtcttcaatgtgtgaaaccccaattgttcaaccctacaggatccaacaggcaatcgcaacaggcatcttaccattatcacccttgttcctccaacaaccgtcagccctattacagcagttacctttggtccatttggtggcacaaaacatcagggcacaacaactacaacaacttgtgctagcaaaccttgctgcatactctcagcaacatcagtttcttccattcaaccaactggctgcattgaactctgctgcttatttgcaacaacaattaccattcaaccagctagttgct

SEQ ID NO: 3734 - DNA, 109 bp, Zea mays
  Clone ID: LIB3061-029-Q1-K1-G1
gtaccatcattggcggtgccctcttttagattgcttatgagttatagttcaataatgaagttttttggatgatgtttgtggcttcccagaaataagaaagtacatttct

SEQ ID NO: 3735 - DNA, 406 bp, Zea mays
  Clone ID: LIB3061-029-Q1-K1-E5
ccgctcgctgtgggcaatgcacctacatacctgcaacaacaattgttgcaacagattgtaccagctctgactcaactagctgtggcaaaccctgttgcctacttgcaacagctgcttccattcaaccaactgactctgtcgaactctgctgcgtacctacaacagcgacaacagttacttaatccattggtagtggctaacccattggtcgccgccttcctacagcagcaacaattgctgccatacaaccagttctctttgatgaatcctgtcttgtcgaggcagcaacccatcgttggaggtgccatcttttagattacatatgagatgtactcgataatggtgccctcataccgacgtgtgtttcctagaaataatcaatatattgattgagatttatctcgat

SEQ ID NO: 3736 - DNA, 448 bp, Zea mays
  Clone ID: LIB3061-029-Q1-K1-D12
cggacgccaaaacctagctcctgaactctcctcggctcctcgcccacctctcgctagccgttcccgctctgcagtctccgtggccggacgccgcggcgacatggcatcgacctgtttccgcgccgccgcccgcgtggcctccgccgccggccgctcggcggcggccacccgatcggctccctccgcggcccgtgccgccgacgccgcccaccgcgcctcgtccttctccaggatgccggtggagctcgggtgctgcgcgggattgtcgctgctgccgctgcacagcgcggtggcggcggccaggctgacgtcgcggctgagcacggcgtcgagctgccgggctctctctcagggtatcctctggtgcacctatcccgggctttaacatcagatgggtctatccggtcgaaggtgataaaaccctgggagacttgctcatggcatgctg

SEQ ID NO: 3737 - DNA, 454 bp, Zea mays
  unsure (1)..(454): unsure at all n locations; Clone ID: LIB3061-029-Q1-K1-D2
ctttatcgcccttgttgtttcaacaatcaccagccctatctttggtgcagtcattggtacaaaccatcagggcacaacagctgcagcaactcgtgctacctgtgatcaaccaagtagctctggcaaacctttctccctactctcagcaacaacaatttcttccattcaaccaactgtctacactgaaccctgctgcttatttgcagcaacaactattaccatttagccagctagctactgcctactctcagcaacaacaacttcttccatttaaccaattggccgcactgaaccccgctgcttatttgcagcagcaaatactactgccatttaacgagctagctgcagcaagtcgtgcttncttcttgacacagcaacagttgctgcctttctacaagcagtttgcggctaaccccgcaacccttttacaactaccacaattggtggcctttgg

SEQ ID NO: 3738 - DNA, 455 bp, Zea mays
  Clone ID: LIB3061-029-Q1-K1-D3
attttgagcattcagaaacacacctagcgaagcgcactagcaacgacctaacaacaatggctaccaagatattatccctctttgcgcttcttgccctttttgtgagcgcaacaaatgcgttcattattccacaatgctcacttgctcctagtgccattattccacagttcctccctccagttacttcaatgggcttcgaacacccagctgtgcaagcctacaggctacaacaagcgcttgcggcgagcgtcttacaacaaccaattgcccaattacaacaacaatccttggcacatctaaccatacaaaccatcgcaacgcaacagcaacaacaatttctaccagcactgagccaactagctgtggtgaaccctgtcgcctacttgcaacagcagttgcttgcatccaacccacttgctctggcaaacatagttgcataccaacaacaacaacca

SEQ ID NO: 3739 - DNA, 363 bp, Zea mays
  Clone ID: LIB3061-029-Q1-K1-D4
gccacctagccgtggtgaaccctgtcactctacttgcaacagcagctgcttgcatccaacccacttgctctggcgaacgtagctgcataccagcaacaacaacagctgcaacagtttatgccagtgctcagtcaactagccatggtgaaccctgccgtctacctacaactactttcatctagcccgctcgcggtgggcaatgcacctacgtacctacaacaacagttgctgcaacaaattgtaccagctctgactcagctagctgtggcaaaccctgctgcctacttacaacagttgcttccattcaaccaactggctgtgtcaaactctgctgcgtacctacaacagcgacaacagttactt

SEQ ID NO: 3740 - DNA, 455 bp, Zea mays
  Clone ID: LIB3061-029-Q1-K1-D5
caacatccccttccccatgccgatgcaattttccatgctgcccgacttctccttggacccggtgcccccctactacccgtaccccaacgctggcgcggggatgccgatgcttcctatggcagcaggtataggtggtggcgccggtgggctccacctcaacggcgccgccctgttcggcaatccgatggccgcgccccagcccatgagcttctaccaccagatgggcacggggactgcttgcgctggcggcttcgatgtttctgcgccggagagtaggccgtcctcgatggtgtcgcagaaggacgaccaggctaatggcgctgagatctcgtcgatgatgtccgtggccggcccagggcctgcgaccaccaccaccatagagatggatggcgtgtggaagtactgaaaacgtggaaggtggagggcaaagacatgaattcgcataaattaaatat

SEQ ID NO: 3741 - DNA, 448 bp, Zea mays
  Clone ID: LIB3061-029-Q1-K1-D6
tgagcattcagaaacacacctagcgaagcgcactagcaacgacctaacaacaatggctaccaagatattatccctctttgcgcttcttgccctttttgtgagcgcaacaaatgcgttcattattccacaatgctcacttgctcctagtgccattattccacagttcctccctccagttacttcaatgggcttcgaacacccagctgtgcaagcctacaggctacaacaagcgcttgcggcgagcgtcttacaacaaccaattgcccaattacaacaacaatccttggcacatctaaccatacaaaccatcgcaacgcaacagcaacaacaatttctaccagcactgagccaactagctgtggtgaaccctgtcgcctacttgcaacagcagttgcttgcatccaacccacttgctctggcaaacatagttgcataccaacaacaacaa

SEQ ID NO: 3742 - DNA, 211 bp, Zea mays
  Clone ID: LIB3061-029-Q1-K1-D7
ctgccattcaaccaacttgctttgacaatcctagcagtgttctaccaacaacccatcattggtggtgccctcttttagatttcttatgagttatagttcaataataaagttttttgtctgatgtttgtggctaaaaaaaaaaactaaagcaaaaaaaagaaaaataaaaagtaaaaaaacaaaaataataataaaaactacaagctacaaa

SEQ ID NO: 3743 - DNA, 141 bp, Zea mays
  Clone ID: LIB3061-029-Q1-K1-D8
tcgcagctagcaacatagaaagcacattagtttaccaacaatggcagccaaaatattgggcgggcttatgctccttggtcttgtgtgcatatgctgatacagcgaccattttcccacaatgctcgcaagctcctatagctt

SEQ ID NO: 3744 - DNA, 362 bp, Zea mays
  Clone ID: LIB3061-029-Q1-K1-D9
cgatcgacaccatgagggtgttgctcgttgccctcgctctcctggctctcgctgcgagcgccacctccacgcatacaagcggcggctgcggctgccagccaccgccgtcggttcatctaccgccgccggtgcatctgccacctccggttcacctgccacctccggtgcatctcccacccccggtccacctgccgccgccggtccacctgccaccgccggtccatgtgccgccgccggttcatctgccgtcgccaccatgccactaccctactcaaccgacccggcctcagcctcatccccagccacacccatgcccgtgccaacagccggatccaagcccgtgccagcttcagggaacctgc

SEQ ID NO: 3745 - DNA, 382 bp, Zea mays
  Clone ID: LIB3061-029-Q1-K1-E1
cttggcttcgtcactgtctatgatcagctcatgtaagggtaccccagcaatgaggacagggattccatcttcaaggcatatataacagcattaaatgaagatcctgatcaatacagagctgatgcactaaagatggaagagtgggcacgttcccagaacggtagttccttagttgatttttcttccagagatggagaaatcgaggctattctgaaagatatatcagaaagggccaagggtaagggaaacttcagctacagccgattctttgcagtaggcttgttccgtttgcttgagctctcaaatgcaacggagccaacaatactagacaagctttgcgctgcactaaacgtcagttaaagaagtgtggatagggaccttg

SEQ ID NO: 3746 - DNA, 441 bp, Zea mays
  Clone ID: LIB3061-029-Q1-K1-E10
cccacgcgtccggtttatacagtgtgcttgataaatcatttgatttacgcgatgcaaactcgcttgtcctttttggtgaaattgtgctggcccagaagattatgtatgaaagatttggggaggaattcattatgaactttgtagctaaaggtcttcctgaagttcactgcccaccggacctagctgaacagtactaccagaagttaaagggaaatgatatcaaggcattcaggtcattttatcaatcacttgttgagaagataagaccacaaggaaatgggagtcttgttttcagatagcatcattctttgattttcaatatgtcttccaccaaaagactcctcaactgtgttattcaattataggctagttgtgccatcaatgtacatagagctataatttctgagattggaagacgtattactgcggcattatctttac

SEQ ID NO: 3747 - DNA, 426 bp, Zea mays
  Clone ID: LIB3061-029-Q1-K1-E11
cgggcgtcgtccccccggacgcgcccgtgctcttcgcttcgagggcgcctagaccatcgctcaagtacctggagctgctcctcccagcggaaatcggctccgaccacatcgaactaccgaccgctgccgccgcggggcacatcgtcgcccaagtcaccggcaacaacatggtgtccgtggcatagggccaactccggtgcgccctcgtcctcacgcataacttcctgtcaggccaccactaggccgtcagcaaggagtgggacgtggtcgccttcgcgcacccagtgtgcaacctggaggaaaagacggtggacaccatctacactggatagatcgagcacctgctgcagcagtacctcaagccttcacctaccttgattggtgccaagctgtttgtggggctgcagcactgccatgagcagggca

SEQ ID NO: 3748 - DNA, 450 bp, Zea mays
  Clone ID: LIB3061-029-Q1-K1-E12
ccaccaccgacgaccctgtcatccgccgcctcgctgaggaggacaaagccacggtgttcgcgactgatgccatcctcgccgctctcatgtgcacgccccgcagcatcctgtcgtgggacattgtcgtgcagcgtgtgggcaacaagctgttccttgacaagcgtgatggctcccagctcgacctgctcactgtcaatgagactgcgcaggagcagcttcctgagaacaaggatgacatcaactccgcacactcgctcgctgttgaggccacctacatcaaccagaacttctctcagcaggtgctgcaccgcaatggtgagaaggttaactttgacgagcccaacccatttgcttctgaaggtggagaggcttcatctggtggctaccgctaccgccgtttggagttgaatgatgagatcaggcttgttgctcgctgtgaagtgcatgctg

SEQ ID NO: 3749 - DNA, 280 bp, Zea mays
  unsure (1)..(280): unsure at all n locations; Clone ID: LIB3061-029-Q1-K1-E2
cgactccagattggagaactcgacaccatgaaggtgctgatcgttgcccttgctctcctggcgctcgctgcgagcgccgnctccagtacaagcggcggctgtggctgccagacaccaccgtttcatctaccggctacgttctatatgccgcctacgttctatctgccgtcgcagcagcagccgcagacatggcaataccccactcaaccaccgcagctaaacccgtgccagcagttcggatcctgcggcgtcggcagcgtcggcaagccgttcctggggc

SEQ ID NO: 3750 - DNA, 455 bp, Zea mays
  Clone ID: LIB3061-029-Q1-K1-E3
agcaagcaacatacctttatcgcccttgttgtttcaacaatcaccagccctatctttggtgcagtcattggtacaaaccatcagggcacaacagctgcagcaactcgtgctacctgtgatcaaccaagtagctctggcaaacctttctccctactctcagcaacaacaatttcttccattcaaccaactgtctacactgaaccctgctgcttatttgcagcaacaactattaccatttagccagctagctactgcctactctcagcaacaacaacttcttccatttaaccaattggccgcactgaaccccgctgcttatttgcagcagcaaatactactgccatttagcgagctagctgcagcaagtcgtgcttccttcttgacacagcaacagttgctgcctttctacaagcagtttgcggctaaccccgcaaccctcttacaactacaacaat

SEQ ID NO: 3751 - DNA, 331 bp, Zea mays
  unsure (1)..(331): unsure at all n locations; Clone ID: LIB3061-029-Q1-K1-E4
gttcgcagccctaggatttgggggtctgtaggggtttgatcgtttctcgccgtgaatctgctntggtgtaaaccaacggatctcggatcgtagtcttcagaagatcccggattttgcgcttctgcataagaacaacaaatcaaaagcgtgatcagctcggtgccaacaaaacctcaacaaccaagtttcatgtctgatctcgacgtccagcttccatctgcctttgatccgtttgctgaggcaaatgctgaggactctggtgctggtcctgtaacgaaggattatgtgcatgtgcgcatncagcagcgcaacggcagaaagagtctgacta

SEQ ID NO: 3752 - DNA, 395 bp, Zea mays
  Clone ID: LIB3061-029-Q1-K1-D11
gttgcaacaactgttgttgcagcaacagttgctgcaacaaattgtaccagctctgactgagctagctgtggcaaaccctgctgcctacttgcaacaactacttccattcaaccaactgactgtgtcgaactctgctgcgtacctacaacagcgacaacagttacttaatccactagcggtggctaacccattggtcgctgccttcctacagcagcaacaattgctgccatacaaccagttctctttgatgaaccctgccttgtcgtggcaagcaacccatcgttggtggtgccatcttttagattacatatgagatgtactcgataatggtgccctcatagcggcatgtgtttcctaaaaataatcaatatattgattgagatttatctcgataa

SEQ ID NO: 3753 - DNA, 447 bp, Zea mays
  Clone ID: LIB3061-029-Q1-K1-B8
ctcagctgcaaatggaacaactacagcttcagacaccacattcagggcctcaagttccagttcctaatccacttccgaatccttggggtccaaatgctggatctgcccagggagcagcaggatcccttcctgttaccaacattaggagtcctacagcaggtggccaagaaggtttgggttcagcaaatttggaaagcactctgtgggcacagggtggtggtctcaacgctactctttggactcatgttttgcaaaaccaatctatgacgcatatgatccagaactttatgtataatcctaagtccgtgattcatctgctaaatgtgaatccaagtgcacgtcacatgatggaatccaatactcatatgagagatgtgattcatactccagaatttcttcgccagttgacgtcttctgaaacattgcagcaattaatttcattccagc

SEQ ID NO: 3754 - DNA, 431 bp, Zea mays
  Clone ID: LIB3061-029-Q1-K1-B9
tcagaccattagctttatctactccagatcgcacaagaacccgatcgacaccatgagggtgttgctcgttgccctcgctctcctggctctcgctgcgagcgccacctccacgcatacaagcggcggctgcggctgccagccaccgccgccggttcatctaccgccgccggtgcatctgccacctccggttcacctgccacctgcggtgcatcttccaccgccggtccacctgcccccgccggtccacctgccaccgccggtccatgtgccgacgccggttcatctgccgacgccaccatgccactaccctactcaaccgccccggcctcagcctcatccccagccacacccatgcccgtgccaacagccgcatccaagcccaggccagctgcagggaacctgctgcgttggcagcacccctatcctgggcc

SEQ ID NO: 3755 - DNA, 441 bp, Zea mays
  Clone ID: LIB3061-029-Q1-K1-C1
cccacgcgtccgcgaacacctagctgtgcaagcctacaagctacaacaagcgcttgcggcgagcgtcttacaacaaccaattaaccaattgcaacaacaatccttggcacatctaaccatacaaaccatcgcaacacaacagcaacaacagttcctaccagcactgagccaactagatgtggtgaaccctgtcgcctacttgcaacagcaggtgcttgcatccaacccacttgctctggcaaacgtagctgcataccaacaacaacaacaattgcaacagtttctgccagcgctcagtcaactagccatggtgaaccctgccgcctacctacaacagcaacaactgctttcatctagccctctcgttgtgggtaatgcacctacatacctgcaacaacaattgctgcaacagattgtaccagctctgactcagctagctgt

SEQ ID NO: 3756 - DNA, 403 bp, Zea mays
  Clone ID: LIB3061-029-Q1-K1-C10
gcagaccacagcaagaagcgtagtcgtctccggaaggaaaggcgcggagcaagatgtcgtggcaggcgtacgtcgatgagcacctgatgtgcgagatcgaaggacaacatctcagcgccgccgccatcgtcggtcacgacggcagcgcttgggcgcagtccgagagcttccccgagttaaagcctgaggaggttgctggtatcataaaggactttgatgaacctggtactcttgcaccaactggtcttttcgttggaggtacaaagtgcatggtgatccaaggtgaacctggagttgtcatccgaggaaagaagggcactgggggcattactatcaagaaaaccggcatgttcctgattataggtgtctacgactagccaatgactccaaggcaatgcaacat

SEQ ID NO: 3757 - DNA, 303 bp, Zea mays
  Clone ID: LIB3061-029-Q1-K1-C11
gacgaggcgcatgatctgcacactctggtcccaacgccgcatccgatcgacactgggctgatgatgcggaagggacccaccgacgagatggtgctggagaggaggcaccgccgtgtgatcaagaccatatagtctgccttcatgccgcgtgccaggaagcaggcgtacataatggatctggaagctgagtggtaaaccttacgaccacatcaggcagtgccaaataagctcgtagcaatgctacacaagcacctggatcaagtactggacctattacaccagctacatggaccacatgcattg

SEQ ID NO: 3758 - DNA, 391 bp, Zea mays
  Clone ID: LIB3061-029-Q1-K1-C12
gtcgtcgtcgtcgttttcgttcccatcgtcacaaggccagtaccaaacgtgccagcgcgacgtcgacaggcacaacgtctgcgccatggaggtgaggcacagcgtcgaacggctggaccaggccgacgcctacagccctggggctgggaggatcacacgcctcaccagccacaagttccccgtcctcaacctcgtacagatgagcgcggtgcgggtagacctgtaccaggacgccatcatgtcgccgttctggaacttcaacgcccacagcgccatgtacggcatcaggggcagtgcaagggtccaggtcgccagcgacaacgggaccacggtgttcgacgacgtgctccgtgcggggcagctgctcatcgtaccccagggctacctcgtc

SEQ ID NO: 3759 - DNA, 346 bp, Zea mays
  Clone ID: LIB3061-029-Q1-K1-C2
ggtcggcgaggagggcaggaagaccgaataccgagccgtgcgggggctcgggacgggaacgggacaggaccccaaaatctcagatccttgctgcccgcccgcccgtgcccgtcgacgcgtcgttcttgccggccgcgcctcacctacgacctcttctcctccatggggatcggatacgccacaggctgcgcgatggtgctgcgggtcttcggctacggctccctcatatggaaccccggcttcgacttcgacgacaaaatcctaggcttcattaagggctacaagcgcacctttaatctcgcttgcattggccacagaggcacaccggagcatccggcgaggacct

SEQ ID NO: 3760 - DNA, 445 bp, Zea mays
  unsure (1)..(445): unsure at all n locations; Clone ID: LIB3061-029-Q1-K1-C3
cagcaaagcggcagtgcgtagagaggatcgtcgaacagaacagcatgaagatggtcatcgttctcgtcgtgtgcctggctctgtcagctgccagcgcctctgcaatgcagatgccctgcccctgcgcggggctgcagggcttgtacggcgctggcgccggcctgacgacgatgatgggcgccggcgggctgtacccctacgcggagtacctgaggcagccgcagtgcagcccgctggcggcggcgccctactacgccgggtgtgggcagccgagcgccatgttccagccgctccggcaacagtgctgccagcagcagatgaggatgatggacgtgcagtccgtcgcgcagcagctgcagatgatgatgcagcttgagcgtgccgctgccgncagcagcagcctgtacgagccagctctgatgcagcagcagcagcagctgctggc

SEQ ID NO: 3761 - DNA, 383 bp, Zea mays
  unsure (1)..(383): unsure at all n locations; Clone ID: LIB3061-029-Q1-K1-C4
agaagcgcctgcccgaccggngtccgttcccgcggtcacgctccgtcgtttcgagctcggcgacgtcgacgcgatgctggagtgggcgtcggaccccgaggtgacggcgttcatggcgtgggacgcctgcacgtcccgggacgccctcctggcgttcctgcgcgacgcggtgctgccgcacccgtggttccgcgccgtctgcctcggcggcggcggacactgccgccccgtgggcgcggtgtccgtgacgcccaccgacgacgcctgccgcgccgagctccgcgtcgtgctggcgcgcgcgcaccgggggaagggtgtggccacagcggcggcgaagcgcgcggtctccgcggcgttcggcgacctcnccggcgtggagcgcg

SEQ ID NO: 3762 - DNA, 439 bp, Zea mays
  Clone ID: LIB3061-029-Q1-K1-C5
ccctactcaaccgccccggcctcagcctcatccccagccacacccatgcccgtgccaacagccgcatccaagcccgtgccagctgcagggaacctgcggcgttggcagcaccccgatcctgggccagtgcgtcgagtttctgaggcatcagtgcagcccgacggcgacgccctactgctcgcctcagtgccagtcgttgcggcagcagtgttgccagcagctcaggcaggtggagccgcagcaccggtaccaggcgatcttcggcttggtcctccagtccatcctgcagcagcagccgcaaagcggccaggtcgcggggctgttggcggcgcagatagcgcagcaactgacggcgatgtgcggcctgcagcagccgactccatgcccctacgctgctgccggcggtgtcccccactgaagaaactatgtgctgtagtat

SEQ ID NO: 3763 - DNA, 348 bp, Zea mays
  Clone ID: LIB3061-029-Q1-K1-C6
ctccatttctcgagatatgtgtggcagatttgcatgatacgtttgtttgtttccatcggacctgaagtcttcttggggataggctcccccctttgtatgttgtggctccaatccatgtgcgagcacgctgtgtctgtcgtgacacctggttcgtgagatgggttgtcaaacttgattggtttgttgtgcgtggctggaagagctgatagttatatatttggcttggactgtgccgcttgtatgtatctgaattctgaaagcgttgtaatctgagcatccgtgcaaagtatgaatggcccttttatatgggctggattttccggtttctatacaatttggtgtttgtcg

SEQ ID NO: 3764 - DNA, 437 bp, Zea mays
  unsure (1)..(437): unsure at all n locations; Clone ID: LIB3061-029-Q1-K1-C7
gtggaggcgggtgatctgtcgtcgctgtcgccggtgccgtatccgttcgacactgcgctgaggatgcggaagggacccaccgtcgagaaggtggtggagaggaggcagcgccgcatgatcaagaacagggagtcggccgccaggtcgcgtgcgaggaagcaggcgtacataatggagctggaagctgaggtggcaaaactcaaggaccagaatgaggagttgcagaaaaagcaggttgaaatgctaaagaagcaaaaggatgaggtcctggagcgtatcaacagccaacatggaccaaaggcaaagaagctttgcctgcgccgcaccctgactggcccatggtagcctgctgaagcttgcacanaattgaccgaagtcaagatcgtcgggctagatgtgcccgtgtgtatatatcagatgaagtcaagagtactgag

SEQ ID NO: 3765 - DNA, 428 bp, Zea mays
  Clone ID: LIB3061-029-Q1-K1-C9
cccggacaagctcgccgacaagctgtgctgcaaggcgtgcaagatcatcaagcagatcgagatcgtcgagcccccgcccccgccgccgcccaagcccaaggaggagccgaagaaggaggagcaagccccgccgccgccggagaagaaggaggaggccgccccgcccccgccggcgaaggtggagccgcccaaggaggagccacccaaggagaagcccccgccacccaaggaggagccgcccaaggagaagccacccccgcccaaggaggagaagcccgccccggcaccgcccaaggaggagaagcccgccccgccgccgcccaaggtggtggaggtcccctacccgtggccgtacccgtacccgtaccctgcgtggccgtccgactgctgctgccaccacggccactgcgggtgccactgctgctcct

SEQ ID NO: 3766 - DNA, 358 bp, Zea mays
  Clone ID: LIB3061-029-Q1-K1-D1
agaccaacaagcaacatagaaagtggaatccagtagcaacaatagagcaacaatggcgaccaagatactttccctccttatgctccttgctctttctgcatgtgttgctaacgcgacaattttccctcaatgctcacaagctcctatagcttcccttcttcccccataccttccatcaatgatagcttcagtatgtgaaaacccagctcttcaaccctataggctccaacaagcaatcgcagcaagcaacatacctttatcacccttgtttcaacaatcgccagccctatctttggtgcagtcattggtacaaaccatcaaggcacagcagctgcagcaactcgtgctacctgtgatc

SEQ ID NO: 3767 - DNA, 325 bp, Zea mays
  unsure (1)..(325): unsure at all n locations; Clone ID: LIB3061-029-Q1-K1-D10
gccagtacccacagtcctacgagcagtctcacgcaagtgtcaagagacaaaacggtcgacatggctcgcacgcaatctgccgtagcggtcgccgtggtggccgcggtgctgctgctggcagcggcggcgacgacctcggaggccgccatcacctgcgggcaggtgagctccgccatcgcgccctgcctctcctacgcccgcggcacggggtccggcccctccgcgtcctgctgtagcggcgtcaggaacctcaagagcgccggcagcaccggcggtcgacaggcggcgccgntctgcaactgcctcaagaacgccgacaggggcg

SEQ ID NO: 3768 - DNA, 459 bp, Zea mays
  Clone ID: LIB3061-029-Q1-K1-B7
caacaagcaacatagaaagtggaatccagtagcaacaacagagcaacaatggcgaccaagatattttccctccttatgctccttgctctttctgcatgtgttgctaacgcgacaattttccctcaatgctcacaagctcctatagcttcccttcttcccccataccttccatcaatgatagcttcagtatgtgaaaacccagctcttcagccctataggctccaacaagcaatcgcagcaagcaacatacctttatcacccttgttgtttcaacaatcgccagccctatctttggtgcagtcattggtacaaaccatcagggcacagcagctgcagcaactcgtgctacctgtgatcaaccaagtagctctggcaaacctttctccctactctcagcaacaaacaatttcttccattcaaccaactgtctacactgaaccctgctgctaatttgcagca

SEQ ID NO: 3769 - DNA, 414 bp, Zea mays
  Clone ID: LIB3061-010-Q1-K1-D12
gcagctcccatcctctcgctcgccaggagaagcagccgccgttgctgctggggcgtccgcagaatggggggtttcgtgaagactcataagaccaatgcgtatttcaaacgtttccaagtgaaattcaagagaaggcgggctggcaagacagactacagggccaggataaggctgattaaccaagacaaaaacaagtacaacacacccaaatacagatttgttgtgcgatttaccaacaaggacatcactgcccaaatcatatctgctagtatagcgggtgatatggttcttgcttctgcctactcgcatgagttgccacgatatggtcttgaagttggtctgaccaactatgcagctgcctactgcactggccttctgttggctcgccgtgtgctcaagatccgtggtttggat

SEQ ID NO: 3770 - DNA, 327 bp, Zea mays
  Clone ID: LIB3061-010-Q1-K1-E10
ccaactagcaacatagaaagcacaatagtgtaccaacaatggcagccaaaagattttggttccttatgctccttggtctttctgcaagtgctgctaccgcaaccattttcccacaatgctcacaagctcctatagcttcctttcttcccccatacctctcaccagcggtgtcttcagtatgtgaaaacccaattcttcaaccctacaggatccaacaggcaatcgcagcaagcatcttacctttatcacccttgttccttcaacaacccgtcagccctattacagcagttacctttggtgcatttgttggcacaaaacatcaaggca

SEQ ID NO: 3771 - DNA, 323 bp, Zea mays
  Clone ID: LIB3061-010-Q1-K1-E11
gtgatattatggatccatccctgaactgccgaagtatcccaacaaacaactgtgaaaggagaactctggtagagaagtcagaacattgtccggatgattataatttggaaatgaagaggaaaagaaacgatggtacaaaaggtacagttgttctaaatagcggttctaaagtagagggattgttatgtcttttggaacaggccattcacagtggcagggcacttgttctgagtgaagatgagcttgctgattcagatctggtctatgaaaagtctgttgcttttacaaagtcaattccgcgaagactggtttttgagaatact

SEQ ID NO: 3772 - DNA, 436 bp, Zea mays
  Clone ID: LIB3061-010-Q1-K1-E12
agcaaaccttgctgcctactctcagcatcaacagtttcttccattcaaccagctagctgcattgaactctgcttcttatttgcaacaacaacaactaccattcagccagctatctgctgcctacccccagcaatttcttccattcaaccaactgacagctttgaactctcctgcttatttacagcagcaacaactactaccattcagccagctagctggtgtgagccctgctaccttcttgacacaaccacaattgttgccgttctaccagcacgctgcgcctaacgctggcaccctcttacaactgcaacaattgctgccattcaaccaacttgctttgacaaacccaacagcattctaccaacaacccatcattggtggtgccctcttttagatttcttatgagttatagttcaataataaaagtttttggctg

SEQ ID NO: 3773 - DNA, 459 bp, Zea mays
  Clone ID: LIB3061-010-Q1-K1-D11
gcacaatagtgtaccaacaatggcagctaaaatattttgcctccttatgctgcttggtgtttctgcaagtgctgctacggcgaccattttcccacaatgctcacaagctcctatagcttcccttcttcccccgtacctctcaccaacggtgtcttcggtatgtgaaaacccaattcttcaaccctacaggatccaacaggcaatcgcagctggcatcttacctttatcacccttgttcctccaacaatcatcagccctattacagcagttacctttggtgcatttattggcacaaaacatcagggcacaacaactacaacaacttgtgctagcaaaccttgctgcctactctcagcaacagcagtttcttccattcaaccaactagctgcattgaactctgcttcttatttgcaacaacaacaactaccattcagccagctatctgctgcctaccccca

SEQ ID NO: 3774 - DNA, 422 bp, Zea mays
  Clone ID: LIB3061-010-Q1-K1-B9
gtgcccgattcatggatagatgcaagctaaaatctctggcagataagagacgagctgccttgcccagatgaactgatagccttcgaaaaagttatctgtaacgtctcaaccattttgacagagaagactagcataggtagtgaccagaaggaagttgagggaaaatattgtttgattgcgaaagatgtagtaaagcttagaagatgtggaaacggatggcacatgactgaagatgatgaaagtagctgtgcatgttttgaggatgagcactgtttggtacctgttctgaacccaggcttttcatggattgaggtctactatgccaggccatactctttgagatgtttacaaaaaggaagaaattctgtatcatcacatactgcaaatagtaactttggacagagtccttgtgaaggatcttt

SEQ ID NO: 3775 - DNA, 448 bp, Zea mays
  unsure (1)..(448): unsure at all n locations; Clone ID: LIB3061-010-Q1-K1-C10
aacacaccaagcgaagcgcactagcaacgacctaacaacaatggctaccaagatattagccctccttgcgcttcgggccctttttgtgagcgcaacaaatgcgttcattattccacaatgctcacttgctcctagtgccattattccacagttcctcccaccagttacttcaatgggcttcgaacacctagctgtgcaagccaacatgcaacaacaagcgcttgcggcgagcgtcttacaacaaccaattgcccaattgcaacaacaatccttgccacatctaacaatacaagccatcacaacgcaacagcaacaacagttcctaccagcactgagccacctagccatggtgaaccctgccgnctacttgcaagagcagctgcttgcatccaacccacttgctctggcgaacgtagttgcaaaccagcaacaacaacagctacaacag

SEQ ID NO: 3776 - DNA, 436 bp, Zea mays
  Clone ID: LIB3061-010-Q1-K1-C11
gcaacatagaaagcacaatagtgtaccaacaatggcagccaaaatattttgcctccttgaggctccttggtctttctgcaagtgctgctacggcgaccattttcccgcaatgctcgcaagctcctatagcttcccttcttcccccgtacctctcaccagcggtgtcttcggtatgtgaaaacccaattcttcaaccctacaggatccaacaggcaatcacagctggcatcttacctttatcacccttgttcctccaacaatcatcagccctattacatcagttacctttggtgcatttattggcacaaaacatcatggcacaacaactacaacaacttgtgctagcaaaccttgctgcctactctcagcaacagcagtttcttccattcaaccaactagctgcattgaactctgcttcttatttgcaacaacaaca

SEQ ID NO: 3777 - DNA, 275 bp, Zea mays
  Clone ID: LIB3061-010-Q1-K1-C12
gccgccggttcatctgccgccgccaccatgccactaccctactcaaccgcggcggcctgggcctcatccccagccacacccatgcccgtgccaacagccgcatccaagcccgtgccagctgcagggaacctgcggcgttggcagcaccccgatcctgggccagtgcgtcgagttcctgaggcatcagtgcagcccgacggcgacgccctactgctcgcctcagtgccagtcgttgcggcagcagtgttgccagcagctcaggcaggtggagccgc

SEQ ID NO: 3778 - DNA, 428 bp, Zea mays
  Clone ID: LIB3061-010-Q1-K1-C9
gccaggagaagcagccgccgttgctgctgccgcgtccacagaatggggggggtcgtgagagacccataagaccaatgcgtatttcaaacgtttccaagtgaaattcaagagaaggcgggctggcaagacagactacagggccaggataaggctgattaaccaagacaaaaacaagtacaacacacccaaatacagatttgttgtgcgatttaccaacaaggacatcactgcacaaatcatatctgctagtatagcgggtgatatggttcttgcttctgcctactctcatgagttgccacgatatggtcttgaagttggtctgaccaactatgcagctgcctactgcactggacttctgttggctcgccgtgtgctaaagatccgtggtttggataaggagtatgaaggcaatgttgaggccactggtg

SEQ ID NO: 3779 - DNA, 413 bp, Zea mays
  Clone ID: LIB3061-010-Q1-K1-A10
ctccaggtccaggctccagctagctgcaagctcatccgtctctgtcgatcagcaagaggccggggtcagaggaatggcggcgacgtcgcggctggcgctggccctcctgctggccgccttggtggcggcgtggcagctgccggcggcggcggtggcggccaactacacggtgggcgacgagaaggggtggaacccggacgtggactacacggcgtgggtgaagaagcacaagccgttctacaagggagactggctcatcttcgagtaccagaacgggcggtcggacgtggtgcaggtggacgaggtcggctacgacaactgcgacaaggccaacgcgctgagcagctacagcaagggccacacctacgccttccagctcaaggacgccaaggactactacttcatctgcagct

SEQ ID NO: 3780 - DNA, 390 bp, Zea mays
  Clone ID: LIB3061-010-Q1-K1-A9
gaccaactagcaacatagaaagcacaatagtgtaccaacaatggcagccaagatattgggcttccttatgctgcttggtctttctgcaagtgttgctaccgcaaccattttcccacaatgctcacaagctcctatagcttcccttcttcccccatacctctcaccagcggtgtcttcaatgtgtgaaaccccaattgttcaaccctacaggatccaacaggcaatcgcaacaggcatcttaccattatcacccttgttcctccaacaaccgtcagccctattacagcagttacctttggtccatttggtggcacaaaacatcagggcacaacaactacaacaacttgtgctagcaaaccttgctgcatactctcagcaacatcagtttct

SEQ ID NO: 3781 - DNA, 444 bp, Zea mays
  unsure (1)..(444): unsure at all n locations; Clone ID: LIB3061-010-Q1-K1-B10
cccacgcgtccgagaaagcacaatagtgtaccaacaatggcagccaaaatattttgcggccttatgctccttggtctttctgcaagtgctgctacggcgaccattttcccgcaatgctcgcaagctcctatagcttcccttcttcccccgtacctctcaccagcggtgtcttcggtatgtgaaaacccaattcttcaaccctacaggatccaacaggcaatcacagctggcatcttacctttatcacccttgttccncaacaatcatcagccctataacatcagttacctttggtgcatttatgggcccaaaccatcagggcacaacaactacaccaacttgtgctagcaaaccttgctgnctactctcagcaacagcagtttcttccattcaaccaactagctgcattgaactctgcttcttatttgcaaacacaacaactac

SEQ ID NO: 3782 - DNA, 412 bp, Zea mays
  Clone ID: LIB3061-010-Q1-K1-B12
gaaccctgctgcttatttgcaacaacaacaactaccattcagccagctacctgctgcgcgacccccagcaatttcttccattcaaccaactagcagcattgaactctcctgcttatttacagcagcaacaactactaccattcagccagctagctggtgtgagccctgctaccttcttgacacaaccacagttgttgccgttctaccagcacgttgcgcctaacgctggcaccctcttacaactgcaacaattgctgccattcaaccaacttgctttgacaaacccagcagtgttctaccaacaacccatcattggtggtgccctcttttagatttcttatgagttatagttcaataataaagttttttatctgatgtttgtggcttcccagaaataagaaagtacatttct

SEQ ID NO: 3783 - DNA, 385 bp, Zea mays
  Clone ID: LIB3061-009-Q1-K1-H9
atggagaccaactagcaacatacaaagttcaatagtgtaccaacaatggcagccaaaggatttcggctccttatgctccttgctatgactgcaagtgctgctacggcgaccatttttccgcaatgctcacaagctcctatagcttcccttcttgccccgtacctctcaccagcggtgtcttcggtatgtgaaaacccaattcttgaaccctacaggatccaacaagcaatcgcagctggcatcttacctttatcacccttgttcctacaacaatcatcagccctattacagcagttacctttggtgcatttattggcacaaaacatcaaggcgcaacaactacaacaacttgagctagcaaaccttgctgcctactctcagcaac

SEQ ID NO: 3784 - DNA, 313 bp, Zea mays
  Clone ID: LIB3061-029-Q1-K1-A11
gttgcaaaccatggacatggctttggcgtctaaagcctcccctccgccatggaatgccaccgccgccgagcagccaattccaaagcgtgacaaagccgctgcaaatgattcaacatacctcaatcctcaagctcatgatagtgttcttggaatcattctgggaggtggtgctgggactagattgtaccccttgacaaagaagcgtgccaagcctgcagtgccattgggtgccaactatagactgattgatattcctgtcagcaattgtctcaacagcaacatatccaagatctatgtgctaacgcaatttaac

SEQ ID NO: 3785 - DNA, 450 bp, Zea mays
  Clone ID: LIB3061-029-Q1-K1-A12
accaactagcaacatagaaagcacaatagtgtaccaacaatggcagccaaaatattttgcttccttatgctccttggtctttctgcaagtgttgctaccgcaaccattttcccacaatgctcacaagctcctatagcttcccttcttcccccatacctctcaccagcggtgtcttcaatgtgtgaaaccccaattgttcaaccctacaggatccaacaggcaatcgcaacaggcatcttaccattatcacccttgttcctccaacaaccgtcagccctattacagcagttacctttggtccatttggtggcacaaaacatcagggcacaacaactacaacaacttgtgctagcaaaccttgctgcatactctcagcaacatcagtttcttccattcaaccaactggctgcattgaactctgctgcttatttgcaacaacaattaccattc

SEQ ID NO: 3786 - DNA, 203 bp, Zea mays
  Clone ID: LIB3061-029-Q1-K1-A3
tgcccccgcccccgtctcctcccgcccgtcctacggaaaccccgtcgcgatttcatccgcgaacctccgcgagaaccgtccgccgcgaacctcaccgcaaacccagccgcgatcctcaagcccgcaaatccctccacaaatagcgccgcgaccgtctcgccggctcgccggcactaaccagcaaagagttgtccagcgcccac

SEQ ID NO: 3787 - DNA, 404 bp, Zea mays
  unsure (1)..(404): unsure at all n locations; Clone ID: LIB3061-029-Q1-K1-A4
cccacgcgtccgattgagaccaactagcatcatagaaagcacaatagtgtaccaacaatggcagccaaaatattttgcctccttatgctccttggtctttctgcaagtgctgctacggcgaccattttcccgcaatgctcgcaagctcctatagcttcccttcttcccccgtacctctcaccagcggtgtcttcggtatgtgaaaacccaattcttcaaccctacaggatccaacaggcaatcacagctggcatcttacctttatcacccttgttcctccaacaatcatcagccctattacatcagttacctttggtgcatttattggcacanaacatcanggcacaacaactacaacaacttgtgctagcaaaccttgctgcctactctcagcaacagcagtt

SEQ ID NO: 3788 - DNA, 450 bp, Zea mays
  Clone ID: LIB3061-029-Q1-K1-A6
cccacgcgtccggtttcagtcacaccagcattgctgggcaaggatgaggcacaagagaaaccaccagaaatggcggtaggcgcgtcatgatcaccaaagcacctagcggtgtccacgtcacctgtatatatgtcaacatccagcatgcagtggcttcattagttcggatcaacgggcccttgtggctggatgataaaaatggttcgcatggccacacagcttggcgggacctcggcctaaactccctccactgctggcctacagaggcgcctgtgttgccatcatcagaacatgattcggtagccattcaccacattattaatgaatgaacctgggaagcagaattgcctgtagacgagctgctctgatgtgtaaacgagtagcgctgttcggataggacaggcatttagtccaatccctgtatatattaaccagattcattcaatccat

SEQ ID NO: 3789 - DNA, 389 bp, Zea mays
  Clone ID: LIB3061-029-Q1-K1-A7
gcggctgccagccaccgccgccggttcatctaccgccgccggtgcatctgccacctccggttcacctgccacctccggtgcatctcccaccgccggtccacctgccgccgccggtccacctgccaccgccggtccatgtgccgccgccggttcatctgccgccgccaccatgccactaccctactcaaccgccccggcctcagcctcatccccagccacacccatgcccgtgccaacagccgcatccaagcccgtgccagctgcagggaacctgcagcgttggcagcaccccgatcctgggccagtgcgtcgagttcctgaagcatcaatgcagcccgacggcgacgccctactgctcgcctcagtgccagtcgttgcggcagcagtgt

SEQ ID NO: 3790 - DNA, 450 bp, Zea mays
  Clone ID: LIB3061-029-Q1-K1-A8
ccaactagcaacatagaaagcacaatagtgtaccaacaatggcagccaaaatattttgcctccttatgctccttggtctttctgcaagtgctgctacggcgaccattttcccgcaatgctcgcaagctcctatagcttcccttcttcccccgtacctctcaccagcggtgtcttcggtatgtgaaaacccaattcttcaaccctacaggatccaacaggcaatcacagctggcatcttacctttatcacccttgttcctccaacaatcatcagccctattacatcagttacctttggtgcatttattggcacaaaacatcagggcacaacaactacaacaacttgtgctagcaaaccttgctgcctactctcagcaacagcagtttcttccattcaaccaactagctgcattgaactctgcttcttatttgcaacaacaacaactaccat

SEQ ID NO: 3791 - DNA, 400 bp, Zea mays
  Clone ID: LIB3061-029-Q1-K1-A9
cccggacaagctcgccgacaagctgtgctgcaaggcgtgcaagatcatcaagcagatcgagatcgtcgagcccccgcccccgccgccgcccaagcccaaggaggagccgaagaaggaggagcaagccccgccgccgccggagaagaaggaggaggccgccccgcccccgccggcgaaggtggagccgcccaaggaggagccacccaaggagaagcccccgccacccaaggaggagccgcccaaggagaagccacccccgcccaaggaggagaagcccgccccggcaccgcccaaggaggagaagcccgccccgccgccgcccaaggtggtggaggtcccctacccgtggccgtacccgtacccgtaccctgcgtggccgtccgactgctgctgccaccac

SEQ ID NO: 3792 - DNA, 386 bp, Zea mays
  Clone ID: LIB3061-029-Q1-K1-B1
gatcagcaaagcggcagtgcgtagagaggatcgtcgaacagaacagcatgaagatggtcatcgttctcgtcgtgtgcctggctctgtcagctgccagcgcctctgcaatgcagatgccctgcccctgcgcggggctgcagggcttgtacggcgctggcgccggcctgacgacgatgatgggcgccggcgggctgtacccctacgcggagtacctgaggcagccgcagtgcagcccgctggcggcggcgccctactacgccgggtgtggggcagacgagcgcccatgtacccagccgttccgcaacagtgctgccagcaacaaatgaagatgatggacgtgcagtccgtcgcgcatcagctgcagatgatgatgcagcttgagcgtg

SEQ ID NO: 3793 - DNA, 445 bp, Zea mays
  Clone ID: LIB3061-029-Q1-K1-B10
gtagaggataggaggagaaccaaggttgcgtctcgaaggttcttgcctcgttgggaagggatggcgtcggaggtggaggacgaggcggcgacgccgctgctcgccaacggtgcagccgacgtccgccggaggagggaccaggcgaaggcaattctgtccacgcaggccgtcaggatcgccaccaaggccgagcagcatgagcgcttcatctttaaggtcacacacttgctgggtgttcttggatttgggggattttgctatctcttgggtgccagaccacaggatgtgccatatgtgtactgcctgttctatgtcatatttgttccgctccgctggatttactaccgctacaagaaatggcattactaccttctggacttctgctactatgccaacacctttctccttgtaatgattctcttctacccagaggatgaaaaacttt

SEQ ID NO: 3794 - DNA, 441 bp, Zea mays
  Clone ID: LIB3061-029-Q1-K1-B11
tgcaatgctgcataagatcgcaggcaaagtgtccagccagctgaagaaggaggagggcgctgaggtggtcgcggagcaggcgtgctacctgccgtgcaccgccgacgggctgccggtcatcggggagataccaggcgtgaaagggtgctatgtggccacgggccacagctgctggggtatcctcaatggtccggccaccggcgcagccctcgccgagctcatcctggacggcaagtccaagatcgttgatctcgagcctttcagcccggcaaggtttctcaagagaaggagcaggcgtggagtctgaccgtgtgaatgttcagattcaagctcgctactgaataaaacactcttggttctcccgtttgcatgactgatgagtgttgcaaaacatgtatgtgcgaataaatcatggatatatagtacttgatgttctgtatt

SEQ ID NO: 3795 - DNA, 54 bp, Zea mays
  Clone ID: LIB3061-029-Q1-K1-B2
ccagctagcaacatatatagcacaatagtgtactaacaatggcagccaaaatat

SEQ ID NO: 3796 - DNA, 421 bp, Zea mays
  Clone ID: LIB3061-029-Q1-K1-B3
cccacgcgtccgcccacgcgtccgcaatggctaccaagatattatccctccttgcgcttcttgcgctttttgcgagcgcaacaaatgcgttcattattccacaatgctcacttgctccaagttccattattacacagttcctcccaccagttacttcaatgggcttcgaacacccagctgtgcaagcctataggctacaacaagcaattgcggcgagcgtcttacaacaaccaatttcccagttgcaacaacaatccttggcacatctaacaatacaaaccatcgcaacgcaacagcaacaacaattcctaccagcacttgaccacctagccatggtgaacccttgcgtctacttgcaacagcagttgcttgcatcaaaaccacttgctcttggcaacgtagttgcaaaccaaccacaaca

SEQ ID NO: 3797 - DNA, 415 bp, Zea mays
  Clone ID: LIB3061-029-Q1-K1-B4
ctggcaagactatcaccttggaggtggagagctctgacaccattgacaatgtgaaggccaagatccaggacaaggagggcattcccccagaccagcagcgtctgatctttgcgggcaagcagctggaggatggccgcactctcgcggactacaacatccagaaggagagcacccttcaccttgttctccgcctcaggggtggtatgcagatctttgtgaagaccctgactggaaaaaccataaccctggaggttgagagctcggacaccatcgacaatgtgaaggcgaagatccaggacaaggagggcatccccccggaccagcagcgtctgatcttcgccggcaaacagctggaggatggccgcaccctagcagactacaacatccaaaaggagagcaccctacatcttgtgct

SEQ ID NO: 3798 - DNA, 197 bp, Zea mays
  Clone ID: LIB3061-029-Q1-K1-B5
attggtggtgccctcttttagattgcttatgagttatagttcaataatgatgggttgtggatgaagcacggggcattccagaaataagaaagtacatttctacataaataaaaaaaacaaaaaaaagacaaacacaaaaaaacataaacaacaaaaaacataaaacacaaaaaaaaaacaagcataaaaaagaccaa

SEQ ID NO: 3799 - DNA, 431 bp, Zea mays
  Clone ID: LIB3061-029-Q1-K1-B6
gcaacatagaaagtggaatacagtagcaacaatagagcaacaatggcggccaagatattgtccatccttatgctccttgctctttctgcatgtgttgctaacgcgaccatttttcctcaatactcacaagctcctatagctgcccttcttcccccataccttccatcaatgaccgcttcagtttgtgaaaacccagcccttcaaccctacaggctccaacaagcaatcgcaacaagcaacttacctttatcacccctgttctttcaacaatcgccagccctatctttggtgcagtcattggtacaaaccatcagggcacaacagctgcaacaactcgtgctaccagtgatcagccaagtagctctggcaaacctttctccctactctcagcaacaacaaattcttccattcaaccactgtctacactgaac

SEQ ID NO: 3800 - DNA, 445 bp, Zea mays
  Clone ID: LIB3061-029-Q1-K1-A10
tctcttcccaactgccatgtaactcttttatcgccaattgcctccccttccaaaccgtgtcataatgaatttcacatttatatttttcttccaaccttttctgcagctccttcggacccatgttagactccttgaggagatggataacctttgatgctacccaagcgctagtaggggtcgtggttttccttctagcactggaagtacaagtgtgttcctcaattaagacaattacctgcaataataaacctcagttagtaacaacatagatggcaagggcacaacatagattagtaataacaagtctataccataacactattcccagattattgcctacgtcccacaatatgccaagggcaaccttctccattgcaattaccaataaatcgacttggatcatttttatatatttctagctcaaactcttcattgatcgcaaact

SEQ ID NO: 3801 - DNA, 435 bp, Zea mays
  unsure (1)..(435): unsure at all n locations; Clone ID: LIB3061-028-Q1-K1-G6
cccacgcgtccgcgcttcagtgtcttcacgggccgccggcggagatgcggttcacggcgtctccggtggtggagcttccggtcagcggcgcggtgttgactttcgaacaggacaacgactccttcgaggtgggcacctctgtgtggccctcgtccctggtcctcgtcaagttcgtcgagcgctgcatccgcgacccggccctcccctttgccgacgtgctccgcttcccgggaacccgggccgtggagctcgggtccgggtgcggaccggcaggacttggcctctcccgcctcggcctcaccgatctcgtcctcaccgacatcgccgtcgtgctcccggcgctccgtcgcaacctgcggcgcaaccgagttcacctcgcgcgcgcgcnccgcctcgcccagctccactggaactgccccgcgcatctcgcgacgc

SEQ ID NO: 3802 - DNA, 441 bp, Zea mays
  Clone ID: LIB3061-028-Q1-K1-G7
cccgacgcgcaagccagtgccgcacccataccagatctccgcgacatatcagtcgttcgtccagctaactgcactgcactgcactgcacgcaatggccaccacggcgaccgaggcggccaaggctgcaccggcgcaggagcagcaggccaacggcaacggcaacggcgagcagaagacgcgccactccgaggtcggccacaagagcctgctcaagagcgacgacctgtaccagtacatcctggacacgagcgtgtacccgcgggagccggagagcatgaaggagctgcgcgagatcaccgccaagcacccatggaacctgatgaccacctccgccgacgagggccagttcctcaacatgctcatcaagctcatcggcgccaagaagaccatggagatcggcgtctacaccggctactcgctcctcgtcaccgcgctcgcac

SEQ ID NO: 3803 - DNA, 443 bp, Zea mays
  Clone ID: LIB3061-028-Q1-K1-G8
attgagaccaacaagcaacatagaaagtggaatacagtagcaacaatagagcaacaatggcggccaagatattttccatccttatgctccttgctctttctgcatgtgttgctaacgcgaccatttttcctcaatactcacaagctcctatagctgcccttcttcccccataccttccatcaatgaccgcttcagtttgtgaaaacccagcccttcaaccctacaggctccaacaagcaatcgcaacaagcaacttacctttatcacccctgttctttcaacaatcgccagccctatctttggtgcagtcattggtacaaaccatcagggcacaacagctgcaacaactcgtgctaccagtgatcagccaagtagctctggcaaacctttctccctactctcagcaacaacaatttcttccattcaaccaactgtctacactg

SEQ ID NO: 3804 - DNA, 431 bp, Zea mays
  Clone ID: LIB3061-028-Q1-K1-G9
attcagaaacacaccaagcgaagctacctagcaacgacttaacaacaatggctaccaagatattagccctccttgcgcttcttgccctttttgtgagcgcaacaaatgcgttcattattccacaatgctcacttgctcctagtgccattataccacagttcctccgaccagttacttcaatgggcttcgaacacctagctgtgcaagcctacaggctacaacaagcgcttgcggcgagcgtcttacaacaaccaattaaccaattgcaacaacaatccttggcacatctaaccatacaaaccatcgcatcacaacagcaacaacagttcctaccagcactgagccaactagatgtggtgaaccctgtcgcctacttgcaacagcaggtgcttgcatccaacccacttgctctggcaaacgtagctgcatac

SEQ ID NO: 3805 - DNA, 195 bp, Zea mays
  Clone ID: LIB3061-028-Q1-K1-H10
gggttctactccgctcacgctccagctttctctggcccgatcgatgctccatgccctcgggaagcttgttatctttcttcgtgctccttgggctacccaacccatcgacgagccctatctcgcagtacctcctccatattcgtccagctctctcgactctgaggactgacagagaaagagaggatgagatgggac

SEQ ID NO: 3806 - DNA, 413 bp, Zea mays
  Clone ID: LIB3061-028-Q1-K1-H11
ggagatacccaaccctgagtactttgagcttgacaggcctgattttgatccaattgctgctattgggattgagatctggacaatgcaggatggcatcctgttcgacaatatctcgattactgatgatgagaaagttgccacctgcattctcgagaagacctggaagcccaagtatgatgttgagaaggaaaaggagaaggctgaggatgctgctgctggtgcagatggtctttctgacttccagaagaagatttttgacgttctgtacaagattgctgatattccgttcttggcaccctactataccaacattattgatgctatcgagaaggcagagaaacagcccaacatcactattggcattttggtctccgttgtcatcgtgttcgttaccgttctcttcaagctcctgt

SEQ ID NO: 3807 - DNA, 301 bp, Zea mays
  Clone ID: LIB3061-028-Q1-K1-H12
ttatgaaccttggtgttccaactacggtcttcactatcacaggagtgaccatgggtgcatttgttggctcaaaacatgatcgctgcaactacatcaacttgtgctaggaaacctcgatgcctactctgatgaacagcggcatcttccattcagcgaactggctgcatcgaaatctggtgcttatttgctacaagaactaccatgcagtcacctatgtgatggctactggaagaaatgtcttccattaaaacaactgagacctttgaactctgatggctatttaccacatcttgagatacta

SEQ ID NO: 3808 - DNA, 404 bp, Zea mays
  Clone ID: LIB3061-028-Q1-K1-H2
gcaacatagaaagtagaatccattagcatcaatagagcaacaatggcgaccaagatattttccctccttatgctccttgctctttctacatgtgttgctaacgcgacaattttccctcaatgctcacaagctcctatagcttcccttcttcccccataccttccatcaattatagcttcagtatgtgaaaacccagctcttcaaccatataggcttcaacaagcaatcgcagcaagcaacatacctttatcgcccttgttgtttcaacaatcaccagccctatctttggtgcagtcattggtacaaaccatcagggcacaacagctgcagcaactcgtgctacctgtgatcaaccaagtagctctggcaaacctttctccctactctcagcaacaacaatttct

SEQ ID NO: 3809 - DNA, 414 bp, Zea mays
  Clone ID: LIB3061-028-Q1-K1-H3
gtgaaaccccaagtgttcaaccctacaggatccaacaggcaatcgcatcaggcatcttaccattatcacccttgttcctccaacaactcgtagccctattacagcagttacctttggtacatttggcggcacaaaacatcagggctcatcaactactacaacttgtgctagcaaaccttgctgcatactctcagcaacatcagattatttcattcaaccaactggctgcattgaactctgatgcttatttgcaacatcaattaccattcagccagctagttgctgcctacgcacagcaatttactacattcaaccaactagcagcattgaactctgctgcttatttacagcagccacatctactaccattcagccagctagctgatgtgagccctgctgcctttttgacacaac

SEQ ID NO: 3810 - DNA, 275 bp, Zea mays
  Clone ID: LIB3061-028-Q1-K1-H4
gtcggatacaagaggtccaagtcgaaccattacgagaccacgtcgcttgtgcagatcgagggggtgaacaccaaggaggacgtcgcgtggtacgctggtaagcgcatggcgtacatttacagggccaagaccaagagcagtgagacccgctacaggtgcatctggtgcaaggtcacccgaccgcacggtaactccggcgttgtccgatccaagttcaagtaaaacctgccggctgagtctatggggctctaggtcagagtgttcaagtaccctag

SEQ ID NO: 3811 - DNA, 309 bp, Zea mays
  Clone ID: LIB3061-028-Q1-K1-H5
cctattcgcctctcggatccggcggccatggcgaggaaccccggctgcaccgtcttcataggtaacttggatgacaaggttcctgagagggttctatatgaaattcttattcacgtaggtcgtgttgtagacctacacataccttgtgacaaggaaactagccgaccaaaaggttatgctcttgctgagtatgaaacagatgacattgcccagtatgccattaagctattttctggccttgttcgacttcataatacaacacttagatttgcgatctgtgggcaagacaaaccctcattaaatggcact

SEQ ID NO: 3812 - DNA, 398 bp, Zea mays
  Clone ID: LIB3061-028-Q1-K1-H6
gggcacacgattctcgcggcatgcaagctctacatggcgggtaatgatattgggtcagtggtgccagaggaggaggaggaggaggaggaagagtcatcagaacacaagagcggtgatgctggagcatcgggtagtgcaccagagctaggagtgatcaaggcaatccctacgaagagacgcagctcattcaatccgagcttgaaggtgctgtacgaagatctgctgatggaattcaatgtgaagggtgccgacacatggaaattcatcgatgagaagttgaagaagaacaaacctgcagccgcctgaggaacatgcttgcaggcatagcttttgtaggtataactggtcttggtggtgatatctaggacctggaacttgcttgctcacatgtagtagag

SEQ ID NO: 3813 - DNA, 385 bp, Zea mays
  Clone ID: LIB3061-028-Q1-K1-H7
gtcttcctctgctgtggactatgcgaagtttggatttgattttatacaacagagcaaccaaattggcccactcttccataacattgccctgcaacaatacatcctactttgttctcaggtactagagggaggcttgagggataagcctggaaagaacagagatcactatcattcatgctactgcctcagtggcctcgcagttagccagtacagtgccatgactgatactggttcgtgcccattacctcagcatgtgcttggaccgtactctaatttgctggagccaatccattcactctacaatgttgtcctagataagtaccatacagcctatgagttcttctcagaagagtgatctaatgttagaacctaagaacaattggct

SEQ ID NO: 3814 - DNA, 373 bp, Zea mays
  Clone ID: LIB3061-028-Q1-K1-H8
agaaagcacaatagtgtaccaacaatggcagccaaaatattttgcttccttatgctccttggtctttctgcaagtgttgctaccgcaaccattttcccacaatgctcacaagctcctatagcttcccttcttcccccatacctctcaccagcggtgtcttcaatgtgtgaaaccccaattgttcaaccctacaggatccaacaggcaatcgcaacaggcatcttaccattatcacccttgttcctccaacaaccgtcagccctattacagcagttacctttggtccatttggtggcacataacatcagggcacatcaactacaacaacttgtgctagcaaaccttgctgcatactctcagcaacatcagtttc

SEQ ID NO: 3815 - DNA, 433 bp, Zea mays
  Clone ID: LIB3061-028-Q1-K1-H9
caacatagaaagtggaatacagtagcaacaatagagcaacaatggcggccaagatattttgcatccttatgctccttgctctttctgcatgtgttgctaacgcgaccatttttcctcaatactcacaagctcctatagctgcccttattaccccataccttccatcaatgaccgcttcagtttgtgaaaacccagcccttcaaccctacaggctccaacatgcaatcgcaacaagcaacttacctttatcacccctgttctttcaacaatcgccagccctatctttggtgcagtcattggtacataccatcagggcacatcagctgcaacaactcgtgctaccagtgatcagccaagtagctctggcaaacctttctccctactctcatcaacaacaatttcttccattcaaccaactgtctacactgaaccc

SEQ ID NO: 3816 - DNA, 358 bp, Zea mays
  Clone ID: LIB3061-029-Q1-K1-A1
caaagatacccatggtaatcgtgctgaaggaaaacatggtaacaagcatggcaattctctgtctcctgaccttgtttgcaagagcaaaaggattcctaagaaaagaacacttgacgaagattctgatgatggagatggtgaaatacgctatctacaaaaactcaaaggggcaaaagttgcaccagatcctgtgaacactggccataaagcttatgatttcgttgatgacgcactcaaaaaaaaggagctaaccaagctttctaaaattaaaaccttcccatatgaagtggacaagaactcaaaatggcttgggcttgccaggattgtaagaagaatttaagggattaccatgaagtta

SEQ ID NO: 3817 - DNA, 443 bp, Zea mays
  Clone ID: LIB3061-028-Q1-K1-G5
tcgattgaaccagcaagcacatagaagtttaaccattatcacaatagagcaacaatggcgaccaagatattttccctccttatgctccttgctctttctacatgtgttgctaacgcgacaattttccctcaatgctcacaagctcctatagcttcccttcttcccccataccttccatcaattatagcttcagtatgtgaaaacccagctcttcaaccatataggcttcaacaagcaatcgcagctagcaacatacctttatcgcccttgttgtttcaacaatcaccagccctatctttggtgcagtcattggtacaaaccatcagggcacaacagctgcagcaactcgtgctacctgtgatcaaccaagtagctctggcaaacctttctccctactctcagcaacaacaatttcttccattcaaccaactgtctacactgaa

SEQ ID NO: 3818 - DNA, 433 bp, Zea mays
  Clone ID: LIB3061-028-Q1-K1-F12
agaaagcacaatagtgtaccaacaatggcagccaaaatattttgcctccttatgctccttggtctttctgcaagtgctgctacggcgaccattttcccacaatgctcacaagctcctatagcttcccttcttcccccgtacctctcaccagcggtgtcttcggtatgtgaaaacccaattcttcaaccctataggatccaacaggcaatcgcagctggcatcttacctttatcacccttgttcctccaacaatcatcagccctattacagcagttacctttggtgcatttattggcacaaaacatcagggcacaacaactacaacaacttgtgctagcaaaccttgctgcctactctcagcaacaacagtttcttccattcaaccaactagctgcattgaactctgcttcttatttgcaacaacaacaactac

SEQ ID NO: 3819 - DNA, 420 bp, Zea mays
  Clone ID: LIB3061-028-Q1-K1-F2
gcttccactcttcccccgtgaaacttttctcacgcgcacccattccacccaccacccaccttcctttcctctctctctgtctgactgtctccctccgtccctcgaagcttctctggtttcagacgcaaccccgcgggtcgcgggatcaaggagccagagagcgggacgcagcgagcgttccgccagagatcgagaccgtagctagggcttgaggcgccgggctgcggtggacgagatgtcgacgccggcgaggaagcggctgatgcgggacttcaggcgcctgcagcaggacccgtccgtcgggatcagcggcgcgccgcacgacaacaacatcatgctctggaacgccgtcatattcgggccggatgatacgccgtgggacggtggcacgttcaagcttaccttgcagtttacagaaga

SEQ ID NO: 3820 - DNA, 447 bp, Zea mays
  Clone ID: LIB3061-028-Q1-K1-F3
atagaaagcacaatagtgtaccaacaatggcagccaaaatattttgcctccttatgctccttggtctttctgcaagtgctgctacggcgaccattttcccgcaatgctcgcaagctcctatagcttcccttcttcccccgtacctctcaccagcggtgtcttcggtatgtgaaaacccaattcttcaaccctacaggatccaacaggcaatcacagctggcatcttacctttatcacccttgttcctccaacaatcatcagccctattacatcagttacctttggtgcatttattggcacaaaacatcagggcacaacaactacaacaacttgtgctagcaaaccttgctgcctactctcagcaacagcagtttcttccattcaaccaactagctgcattgaactctgcttcttatttgcaacaacaacaactaccattcagccagc

SEQ ID NO: 3821 - DNA, 427 bp, Zea mays
  Clone ID: LIB3061-028-Q1-K1-F4
cttctgcacagtggcaagctgtgcaagagttctaccaactaacagtgaagaaaacggggaggtctacttggctggacaatcctttaatcaaaccaccgttgttccttgccactcgcaaacttgttgcctttgatgatagcgcatttgtgatggtctcagaatcagacctcgaagggtataatgcagatgcactggcacttaatatgggcagtagattgtgggagataagcttgatataccgtgtccagtttgcgagcaagacagcatttgctgggttttcgtatctgtggcttcgatgtcgtgcctgcaaggaggctctacctgagaatctggggagagatagctgttctcttgaggttgaccagctaacaactggtcatccctgtctactgcaaagtgtcgtggttaatccatgactgctgagtct

SEQ ID NO: 3822 - DNA, 446 bp, Zea mays
  Clone ID: LIB3061-028-Q1-K1-F5
cccacgcgtccggaactagcaacatacatagtgaagtacactagcaacatcttagcaccaatggcagccaagatttttgccatccttgccctccttgctctttcagcaagcgttgctaccgcgactattattccacaatgctcacaacaatacctctctccggtgacagccgcgagatttgaatacccaactatacaatcctacaggctacaagaggccatcgcagcaagcatcttacggtcgttagcattgaccgtccaacaaccatatgccctattgcaacaaccatccttaatgaatctatatctccaaagaatcgcagcacaacaactacaacaacagttgcttccaacaatcaatcaagtagttgcagcgaaccttgctgcttaccttcagcaacaacaatttcttccattcaatcaactagctggggtgaaccctgctgc

SEQ ID NO: 3823 - DNA, 441 bp, Zea mays
  Clone ID: LIB3061-028-Q1-K1-F6
ctcagctctcatctcgcagccgcagctagttacagttcagagagaagaaagagaccgagatctcgccgatagctagcatcatggcgtccaaggcgctcctcgtgctaacgctcctgctcgccgccaccttcctcgccgcctccgctaacgagcaagccaaggcggccaaagaggagaagaaggtggaggtccaagactggcacggcggcggcggctacccgggtcacggcggcggcggcggcggcggctacccgcactgccggtggggctgctgcaaccgcgggtaccatggcggctgccggtgctgctcgcaccctgatcagataccagagcccatgtaccgtcctgagctcgtcgaggtccacaactaaatagtatacgggtacgtatgccccgatgggaatgaatgggaagcaagagcacacgcgtagtacgctcgtc

SEQ ID NO: 3824 - DNA, 445 bp, Zea mays
  Clone ID: LIB3061-028-Q1-K1-F7
gtagcaacaatagagcaacaatggcgaccaagatattttccctccttatgctccttgctctttctacatgtgttgctaacgcgacaattttccctcaatgctcacaagctcctatagcttcccttcttcccccataccttccatcaattatagcttcaatatgtgaaaacccagctcttcaaccatataggcttcaacaagcaatcgcagcaagcaacatacctttatcgcccttgttgtttcaacaatcgccagccctatctttggtgcagtcattggtacaaaccatcagggcacaacagctgcagcaactcgtgctacctctgatcaaccaagtagctctggcaaacctttctccctactctcagcaacaacaatttcttccattcaaccaactgtctacactgaaccctgctgcttatttgcagcatcaactattaccatt

SEQ ID NO: 3825 - DNA, 187 bp, Zea mays
  Clone ID: LIB3061-028-Q1-K1-F8
tgatgtatgtggccaaccagattatcatatgatacatattcacatcaaaatctggacatgctatctacaagagatgctatcacgacaacaccgcgtcaacgtttaactaactcaatagctgcctttaatgatagataacttacaacggtcatagaatcaaaacctgaaaacgataatgcacatgcac

SEQ ID NO: 3826 - DNA, 369 bp, Zea mays
  Clone ID: LIB3061-028-Q1-K1-F9
ctatgaatatctgtaggaccttttgagtttatagatgcctctgtcttaagctagcactgggggcctactatgctgctcacgataatgcagatgggaagttctgccttgcccgaagtcttctcttctaaggtaaaaaaaaactaactcgacaactgttttgtatctcgaattaataagtgctgcaagtagaatacccaagattacctgtagctcaccttcagctgggatggttgcaatgcaacaacgaatacaaaagcgcaagcttgggagtaacagcatgtgcacatgaagggtgaacaagccaaaaccatgaaaggccaacaagacagctatataaattgactgcaatattctaatatatttgctagc

SEQ ID NO: 3827 - DNA, 444 bp, Zea mays
  Clone ID: LIB3061-028-Q1-K1-G1
ctccttgctctttctacatgtgttgctaacgcgacaattttccctcaatgctcacaagctcctatagcttcccttcttcccccataccttccatcaattatagcttcagtatgtgaaaacccagctcttcaaccatataggcttcaacaagcaatcgcagcaagcaacatacctttatcgcccttgttgtttcaacaatcaccagccctatctttggtgcagtcattggtacaaaccatcagggcacaacagctgcagcaactcgtgctacctgtgatcaaccaagtagctctggcaaacctttctccctactctcagcaacaacaatttcttccattcaaccaactgtctacactgaaccctgctgcttatttgcagcaacaactattaccatttagccagctagctactgcctactctcagcaacaacaacttcttccattt

SEQ ID NO: 3828 - DNA, 433 bp, Zea mays
  Clone ID: LIB3061-028-Q1-K1-G11
cctggctctcgctgcgagcgccacctgcacgcatacaagcggcggctgcggctgccagccaccgccgccggttcatctaccgccgccggtgcatctgccacctccggttcacctgccacctccggtgcatctcccaccgccggtccacctgccgccgccggtccacctgccaccgtcggtccatgtgccgccgccggttcatctgccgccgccaccatgccactaccctactcaaccgccccggcctcagcctcatccccagccacacccatgcccgtgccaacagccgcatccaagcccgtgccagctgcagggaacctgcggcgttggcagcaccccgatcctgggccagtgcgtcgagtttctgaggcatcagtgcagcccgacggcgacgccctactgctcgcctcagtgccagtcgttgcggcagcag

SEQ ID NO: 3829 - DNA, 430 bp, Zea mays
  Clone ID: LIB3061-028-Q1-K1-G12
gcaattagctcatcgactccagattggagaactcgacaccatgaaggtgctgatcgttgcccttgctctcctggcgctcgctgcgagcgccgcctccagtacaagcggcggctgtggctgccagacaccaccgtttcatctaccgcctccgttctatatgccgcctccgttctatctgccgccgcagcagcagccgcagccatggcaataccccactcaaccaccgcagctaagcccgtgccagcagttcggatcctgcggcgtcggcagcgtcggcagcccgttcctgggccagtgcgtcgagttcctgaggcaccagtgcagcccggcggcgacgccctacggctcgccacagtgccaggcgctgcagcagcagtgctgccaccagatcaggcaagtggagccgctgcaccggtaccaggcgacatac

SEQ ID NO: 3830 - DNA, 438 bp, Zea mays
  Clone ID: LIB3061-028-Q1-K1-G2
ccaactagcaacatagaaagcacaatagtgtaccaacaatggcagccaaaatattttgcctccttatgctccttggtctttctgcaagtgctgctacggcgaccattttcccgcaatgctcgcaagctcctatagcttcccttcttcccccgtacctctcaccagcggtgtcttcggtatgtgaaaacccaattcttcaaccctacaggatccaacaggcaatcgcagctggcatcttacctttatcacccttgttcctccaacaatcatcagccctattacaacagttacctttggtgcatttattggcacaaaacatcagggcacaacaactacaacaacttgtgctagcaaaccttgctgcctactctcagcaacagcagtttcttccattcaaccaactaagttcattgaactctgcttcttatttgcaacaac

SEQ ID NO: 3831 - DNA, 446 bp, Zea mays
  Clone ID: LIB3061-028-Q1-K1-G3
ggcaatcacagctggcatcttacctttatcacccttgttcctccaacaatcatcagccctattacatcagttacctttggtgcatttattggcacaaaacatcagggcacaacaactacaacaacttgtgctagcaaaccttgctgcctactctcagcaacagcagtttcttccattcaaccaactagctgcattgaactctgcttcttatttgcaacaacaacaactaccattcagccagctacctgctgcctacccccagcaatttcttccattcaaccaactggcagcattgaactctcctgcttatttacagcagcaacaactactaccattcagccagctagctggtgtgagccctgctaccttcttgatacaaccacagttgttgccgttctaccagcacgctgcgcctaacgctggcaccctcttacaactgcaacaat

SEQ ID NO: 3832 - DNA, 437 bp, Zea mays
  Clone ID: LIB3061-028-Q1-K1-G4
gcaatcacagctggcatcttacctttatcacccttgttcctccaacaatcatcagccctattacatcagttacctttggtgcatttattggcacaaaacatcagggcacaacaactacaacaacttgtgctagcaaaccttgctgcctactctcagcaacagcagtttcttccattcaaccaactagctgcattgaactctgcttcttatttgcaacaacaacaactaccattcagccagctacctgctgcctacccccagcaatttcttccattcaaccaactggcagcattgaactctcctgcttatttacagcagcaacaactactaccattcagccagctagctggtgtgagccctgctaccttcttgatacaaccacagttgttgccgttctaccagcacgctgcgcctaacgctggcaccctcttacaact

SEQ ID NO: 3833 - DNA, 434 bp, Zea mays
  Clone ID: LIB3061-028-Q1-K1-F11
agaccattagctttatctactccagagcgcagaagaacccgatcgacaccatgagggtgttgctcgttgccctcgctctcctggctctcgctgcgagcgccacctccacgcatacaagcggcggctgcggctgccagccaccgccgccggttcatctaccgccgccggtgcatctgccacctccggttcacctgccacctccggtgcatctcccaccgccggtccacctgccgccgccggtccacctgccaccgccggtccatgtgccgccgccggttcatctgccgccgccaccatgccactaccctactcaaccgccccggcctcagcctcatccccagccacacccatgcccgtgccaacagccgcatccaagcccgtgccagctgcagggaacctgcggcgttggcagcaccccgatcctgggccagtgc

SEQ ID NO: 3834 - DNA, 438 bp, Zea mays
  unsure (1)..(438): unsure at all n locations; Clone ID: LIB3061-009-Q1-K1-G4
atgttgagcattcagaaacacaccaagcgaatcgcactagcaacgacctaacaacagtgggtaccaagatattagccctccttgcgcttcttgccctttttgtgagcgcaacaaatgcgttcattattccacaatgctcacttgctcctagtgccattattccacagttcctcccaccagttacttcaatgggcttcgaacacctagctgtgcaagccaacatgcaacaacaagcgcttgcggcgagcgtcttacaacaaccaattgcccaattgcaacaacaatccttgccacatctaacaatacaagccatcacaacgcaacagcaacaacagttcctaccagcactgagccacctagccatggtgaaccctgccgnctacttgcaagagcagctgcttgcatccaacccacttgctctggcgaacgtagttgcaa

SEQ ID NO: 3835 - DNA, 298 bp, Zea mays
  Clone ID: LIB3061-009-Q1-K1-G5
ccccttttcatgcgcgaggaggggccgtggggaccaccaccagcacctccatgcgcgcgcatctcgcggtggtgctcctcctcctcctccccctgctcccggggcgggcgctctcctgttcctcctcctcctgctgctggtgccagggccgggagggcggcgcggatgtggcgctcatggggctcgcccgggacggatccgcggacaccggcaacctcagtactagtgaaaatggtcggttcagctatggagctgccagttcttcccggacaagagcattgctggacgacttttatga

SEQ ID NO: 3836 - DNA, 430 bp, Zea mays
  unsure (1)..(430): unsure at all n locations; Clone ID: LIB3061-009-Q1-K1-G6
gcgccaaaaaccagatctcatcagctaaatctgtacaagatccgcccttgatttgggtagcacgagctaacgtgtggtgggccgtcgagtgaaacaagattcgccatgcggcggaacaggaaggattccggctatccgacggcggctctaggggaggaggatgaggcggaggaactgactgaggagggcgacgaggaagaggaggaacagacggaggagggatgtggtgaggaggacgaagttgaagcggagacaccggcgcaggaagctgtggagccgccgaagctggctgagggctacttcgagatcgaggccatccgncgncgncgcctccgcaagggtcagctccagtacctcgtcaagtggcgtgggtggccagagagtgctaacacatgggaaccccttgaaaacctgaaggcctgttctgaca

SEQ ID NO: 3837 - DNA, 269 bp, Zea mays
  Clone ID: LIB3061-009-Q1-K1-G7
aaagcacaatagtgtaccaacaatggcagccaaaatattttgcctccttatgctcctgggtctttctgcaagtgctgctacggcgaccattttcccgcaatgctcgcaagctcctatagcttcccttcttcccccgtacctctcaccagcggtgtcttcggtatgtgaaaacccaattcttcaaccctacaggatccaacaggcaatcacagctggcatcttacctttatcacccttgttcctacaacaatcatcagccctattacatc

SEQ ID NO: 3838 - DNA, 317 bp, Zea mays
  Clone ID: LIB3061-009-Q1-K1-G8
cgaggcccagtcccgcggcggccgtggaggcggcggcggcggcgggtacgggggtggccgtggaggcggcggctacggcggtggcgggcgccgtgatggcggcggcggctacggcggtggcggcggctacggtggtggcggcggcggctacggtggtggtggcggcggctacggcggtggcaaccgtggcggcggctacggcaactccgacgggaactggaggaactgagcggtggggcccgcgcggccaagttatcctgttcgctaccgtgtctgttaccctagtccagagtgtttatcttcgttcgtctcgtgtt

SEQ ID NO: 3839 - DNA, 407 bp, Zea mays
  Clone ID: LIB3061-009-Q1-K1-G9
ccagtcacccataatattttgagcattcataaacacacctagcgaagcgcactagcaacgacctaacaacaatggcttccaagacattatccctccttgcgcttcttgccctttttgtgagtgcaacaaatgcgttcattattccacaatgctcacttgctccgagtgccattattccacagttcctccctccagttacttcaatgggcttcgaacacccagctgtgcaagcctataggctacaacaagcgcttgcggcgagcgtcttagaacaaccaattgcccaattacaacaacaatccttggcacatctaaccatacaaaccatcgcaacgcagcagcaacaagcactgagccacctagccgtggtgaaccctatcgcctacttgcaacaacagctgcttgca

SEQ ID NO: 3840 - DNA, 429 bp, Zea mays
  Clone ID: LIB3061-009-Q1-K1-H1
gcgggaactccgacgagcttgccgtggaggttctctgcccggtgttccgcccggcggggtttggctcatcgtcgtcacagccagcagcaaaggacatcagctccaccgtcgtcgtcaccaaggtcggagtgtggggtggagagggagggtcggcgcaggacatcgcgacgacggagccgccgaggcgtctgcagagcctgaccgtccgcgccggcgttgccgtggactccatcgagttcacctacagtaccgacacaggtggtcagacgcgcaccgatgggcgatggggtggacttggcggcaacgtccggaagctcgatcttggcgacgctgaatacgtcaaggaagtttctggaacgtacggcgcattcgaaggtgcgactacccttacctcggtcaggattgtcaccagcaccgtcagagcttggg

SEQ ID NO: 3841 - DNA, 442 bp, Zea mays
  Clone ID: LIB3061-009-Q1-K1-H11
ctagcaacatagaaagcacaatagtgtaccaacaatggcagccaaaatattttgcctcgttatgctccttggtctttctgcaagtgctgctacggcgaccattttcccacaatgctcacaagctcctatagcttcccttcttcccccgtacctctcaccagcggtgtcttcggtatgtgaaaacccaattcttcaaccctataggatccaacaggcaatcgcagctggcatcttacctttatcacccttgttcctccaacaatcatcagccctattacagcagttacctttggtgcatttattggcacaaaacatcaaggcacaacaactacaacaacttgtgctagcaaaccttgcttgctactctcagcaacaacagtttcttccattcaaccaactagctgcattgaactctgctttctatttgcaacaacaacaacta

SEQ ID NO: 3842 - DNA, 419 bp, Zea mays
  unsure (1)..(419): unsure at all n locations; Clone ID: LIB3061-009-Q1-K1-H2
gaagagcccgttgttttctcaattcataaaggacttgtcagttccaaaagcgaccagggtgaaggctatagccgaaatatttgctgacgctgggttttcagatgttacaaagaatttcttggctgtcctggcggacaatggcaggctgaaatatattgaacgcattgcggagagatttgttgatttgactatggaacataagggggagatgaaggttgtggtcaggacagttatttcactcaccaaggaggaggagaaagaactcaaggaaaccttgcaggatatccttggggaaaacaaaactattttggttgaacagaagattgactacagcatcatgggaggattagtgattgaattcgggcagaaagtgcttgatatctcaatcaggaacagggcgaagcanatggaggcgttct

SEQ ID NO: 3843 - DNA, 457 bp, Zea mays
  Clone ID: LIB3061-009-Q1-K1-H3
tcggattcccgggattttcagcattcaaaaacacaccaagcgaagcgcactagcaacgacctaacaccaatggctaccaagatattggcgcgtccttgcgcttcttgcccttttagtgagcgcaacaaatgcgttcattattccacagtgctcacttgctcctagtgccattattccacagttcctcccaccagctacttcaatgggcttcgaacatccagccgtgcaagcctacaggctacaactagcgcttgcagcgagcgccttacaacaaccaattgcccaattgcaacaacaatccttggcacatctaaccctacaaaccattgcaacgcaacaacgacaacaacaacagtttctgccatcactgagccacctagccgtggtgaaccctgtcacctacttgcaacagcagctgcttgcattcaacccacttgctctggcgaacgtagctgca

SEQ ID NO: 3844 - DNA, 287 bp, Zea mays
  Clone ID: LIB3061-009-Q1-K1-H5
cagctagcaacatagaaagcacaatagtgtaccaacaatggcagccaaaatattttgggtccttatgctccttggtctttctgcaagtgctgctaccgcaaccattttcccacaatgctcacaagctcctatagcttcctttcttcccccatacctctcaccagcggtgtcttcagtatgtgaaaacccaattcttcaaccctacaggatccaacaggcaatcgcagcaggcatcttacctttatcacccttgttcctccaacaaccgtcagccctattacagcagt

SEQ ID NO: 3845 - DNA, 298 bp, Zea mays
  Clone ID: LIB3061-009-Q1-K1-H6
ctcaattcattaattactcgtcagttccaaaagcgaccaggctgaatctatagccgaaatatttgctgacgctgggttttcagatgttacaaagaatttcttggctgtcctggccgacaatggcaagctgaaatatattgaacgcattgccgagagatttgttgatttgactatggaacataatggggaaatgaaggctgtggtcaggacagctatttcactcaccaaggacgaggagaaagaactcaaggaaaccttgcaggatatcctttgggaaaacaaaactattttgggttaa

SEQ ID NO: 3846 - DNA, 250 bp, Zea mays
  Clone ID: LIB3061-009-Q1-K1-H7
caagaacaccctcaagatcatgcccttcaagctcccgcccgtcggcccttatgatgtgcgcgtgcgcatgaaagcagtggggatttgcggcagcgatgtgcactacctcagggagatgcgcatcgcgcacttcgtggtgaaggagccgatggtgatcgggcacgagtgcgcgggcgtggtcgaagaggtgggcgccggcgtgacgcacctgtccgtgggcgaccgcgtggcgctggagccgggcgtcagc

SEQ ID NO: 3847 - DNA, 385 bp, Zea mays
  Clone ID: LIB3061-009-Q1-K1-H8
gacccacgcgtccgtgcttatttgcagcaacaacaactactaccattcagccagctagctgctgcctaccgccggcaatttcttccattcaaccaactggcagcattgaactctcatgcttatgtacaacaacaacaactactaccattcagccagctagctgctgtgagccctgctgccttcttgacacagcaacatttgttgccgttctacctgcacactgcgcctaacgttggcaccctcttacaactgcaacaattgctgccattcgaccaacttgctttgacaaacccagcagtgttctaccaacaacccatcattggtggtgccctcttttagattgcttatgagttatagttcaataataaagttttttttgctgatt

SEQ ID NO: 3848 - DNA, 420 bp, Zea mays
  Clone ID: LIB3061-009-Q1-K1-G3
atgggctggcccctggtaaatctgtcatgctaaggtatgcgttccccataaaatgtagagaggttatctatggtgatactcctgatgatatcgttgaaattcgagcagaatatgatcctttgaagacttctaaacttaagggtgttctgcactgggttgctgagccagcacctggtgtcgaaccattgaaggtggaagtaagactattcgagaaattgttcatgtcagagaatcctgctgaattggaggattggcttggtgatcttaacccgcactcgaaagaggtgataaaggacgcttatgctgtaccatcgcttgccactgcagttcttggcgacaagttccagtttgagcggcttggttacttagccgtggacacggactccactactgagaagctcgtgttcaacagaactggca

SEQ ID NO: 3849 - DNA, 240 bp, Zea mays
  Clone ID: LIB3061-009-Q1-K1-F1
caacaatttctaacataatatggctacgttcttatgctccttatctctatctacaattcttcctaccatatctcattatcccacaattctcacaaccttctatatctccacttactaccacatacttctcaacaccttaatcaacaatatcacaaacctcaatttcacaaccatacattatccaacatacacatcacatcaaacaatcttacctttatcaccctttttactccaacaacc

SEQ ID NO: 3850 - DNA, 256 bp, Zea mays
  Clone ID: LIB3061-009-Q1-K1-F10
gctcacttgctcctagttccattatgaataatggatcaggagctgtgacatatcgtaattgctagttaaatggtcagggcctcagaacgtacagcattcatactttatttattctagccatagcgttatcgcattcaacaactaatgcttaaaactataataattattacacatctaacactactaaccatcataacgcatacataacatcagttcttatcatacttgaccaattacaattgttgaactttaccat

SEQ ID NO: 3851 - DNA, 423 bp, Zea mays
  Clone ID: LIB3061-009-Q1-K1-F11
cgtcgagtttctgaggcatcagtgcagtccgacggtgacgccctactgctcgcctcagggccagtggttgcggcagcagtgttgccagcagctcaggcaggtggagccgcagcaccggtaccaggcgatcttcggcttggtcctccagtccatcctgcagcagcagccgcaaagcggccaggtcgcggggctgttggcggcgcagatagcgcagcaactgacggcgatgtgcggcctgcagcagccgactccatgcccctacgctgctgccggcggtgtcccccactgaagaaactatgtgctgtagtatagccgctggctagctagctagttgagtcatttagcggcgatgattgagtaataatgtgtcacgcatcaccatgggtggcagtgtcagtgtgagcaatgacctgaatgaacaat

SEQ ID NO: 3852 - DNA, 431 bp, Zea mays
  Clone ID: LIB3061-009-Q1-K1-F2
ctacaggatccaacaggcaatcgcagtatgcatcttacctttatcacccttgttcctgcaagaatcatcagccctattacagcagttacctttggtgcatttattggcacaaaacatcagggcacaacaactacaacaactcgtgctagcaaaccttgctgcctactctcagcaacagcagttacctttggtgcatttgttggcacaaaacatcagggcacaacaactacaacaactcgtgctagcaaaccttgctgcctactctcagcaacaacagtttctgccattcaaccaactagctgcattgaactctgctgcttatttgcagcaacaacaactactaccattcagccagctagctgctgcctacccccggcaatttcttccattcaaccaactggcagcattgaactctcatgcttatgtacaac

SEQ ID NO: 3853 - DNA, 428 bp, Zea mays
  Clone ID: LIB3061-009-Q1-K1-F3
gcggtcagcgtctaggctcttctacgattcctagctgggcacggtgggttctcggaggtggggtttacacgctcgtgccgttctacaacagagttaggcatctcgaagacgagacggtgggattcgtggagaatgctgtggaggttgtggagcatttagctgaagtaacagagaagctagctgcgaatgtggctaagcaacttcctgaagatgggtctctgcagaaagcagtggaagaggttgaacacattgctgaggtagtggatgatgatgcggagaatgttgaagcagtcactgaaaagatcgacaaggtcagtgatgagattgatgctgctgtggagccggtcatcgcggaacttgaataggaactcgatcagagcacaacctcagacgatggagttgacacatagaattgatcaactgcatgt

SEQ ID NO: 3854 - DNA, 286 bp, Zea mays
  Clone ID: LIB3061-009-Q1-K1-F4
actcggtctcggaattcccggctcagcattcaaaaacacaccaagcgatatgtggccaaccagaaataagaagttacatttccagattcgaaaaaaaaaaaaaaaaaaaaaaaaaaaaaaaaaaaaaaaaaaaaaaaaaaaaaaaaaaaaaaaaaaaaaaaaaaaaaaaaaaaaaaaaaaaaaaaaaaaaaaaaaaaaaactaaaaaaaaaaataaaactaacaataaaaacacctattacaactgaaacaatagactgacaataaaccaacttaaaataaactaa

SEQ ID NO: 3855 - DNA, 423 bp, Zea mays
  Clone ID: LIB3061-009-Q1-K1-F5
aactagcaacatacaaagcacaatactgtaccaacaatggcagccaaaatattgtgcgtacttatgctccttggtctttctgcatgtgttgctaccgcaactcattttcctacaatgctcacaagctcatatagcttcccttcttcccccatacctctcaccagcgccgtcttcaatgtctcaaaccccaattgttcaaccttacaagatccaacaggcaatcgcaacacgcatcttaccattatcacccttgttcctccaacaactcgcacccctattacagcagctacctctggtccatttgatggcacaaaacatcagggcacagcaactacaacaactcgtgctagcaaaccttgttgcatactctcatgaacatcagtgtcttccattcaaccaaatggctgcattgaactctgctgc

SEQ ID NO: 3856 - DNA, 369 bp, Zea mays
  Clone ID: LIB3061-009-Q1-K1-F6
gcagcaggtagctggctacccccagcaatttcttccattcaaccaactggcagcatggaactctcctgcttatttacagcagcaacaactactaccattcagccagctagctggtgtgagccctgctaccttcttgatacaaccacagttgttgccgttctaccagcacgctgcgcctaacgctggcaccctcttacaactgcaacaattgctgccattcaaccaacttgctttgacaaacccagcagcgttctaccaacaacccatcattggtggtgccctcttttagatttcttatgagttataggtcaataataaagttttttgtctgatgtttgtggcttcccagaaataagaaagtacatttct

SEQ ID NO: 3857 - DNA, 404 bp, Zea mays
  Clone ID: LIB3061-009-Q1-K1-F7
ccggcaatcgcactggcatcttacctttattacccttgttcctccaacaatgatgggcggtattacacagttacctttggtgcatttattgcacaaaacataggcacacaactacaacaacttgagctatcaaaccttgctgctacttcacacagcacattcttccattcaaccaatactgtatgaactctgctcttatttgcaacacaacaactaccattagcagctatctgctgcctaccccagcaattattccattaagcactgacacattgaactatctgcttattacagctgcacagctactaccattcaccagctaactggtgtgagcacctgctaccttatgacacaaccacagttgacgacgttctaccaacacgctgtgcttaacgctggcaccc

SEQ ID NO: 3858 - DNA, 445 bp, Zea mays
  Clone ID: LIB3061-009-Q1-K1-F9
cagctagcaacatagaaagcacaatagtgtaccaacaatggcagccaaaatattttgcgtccttatgctccttggtctttctgcaagtgctgctacggcgaccattttcccgcaatgctcgcaagctcctatagcttcccttcttcccccgtacctctcaccagcggtgtcttcggtatgtgaaaacccaattcttcaaccctacaggatccaacaggcaatcacagctggcatcttacctttatcacccttgttcctccaacaatcatcagccctattacatcagttacctttggtgcatttattggcacaaaacatcagggcacaacaactacaacaacttgtgctagcaaaccttgctgcctactctcagcaacagcagtttcttccatccaaccaactagctgcattgaactctgcttcttatttgcaacaacaacaacta

SEQ ID NO: 3859 - DNA, 433 bp, Zea mays
  Clone ID: LIB3061-009-Q1-K1-G1
attgtcagcattcaaaaacacaccaagctaagcgcactagcaacgacctaacaccaatggcggccaagatattagccctccttgcgcttcttgcccttttagtgagcgcaacaaatgcgttcattattccacagtgctcacttgctcctagtgccagtattccacagttcctcccaccagttacttcaatgggcttcgaacatccagccgtgcaagcctacaggctacaactagcgcttgcggcgagcgccttacaacaaccaattgcccaattgcaacaacaatccttggcacatctaaccctacaaaccattgcaacgcaacaacaacaacaacagtttctgccatcactgagccacctagccgtggtgaaccctgtcacctacttgcaacagcagctgcttgcatccaacccacttgctctggcgaacgt

SEQ ID NO: 3860 - DNA, 375 bp, Zea mays
  Clone ID: LIB3061-009-Q1-K1-G10
cagagcaaaagccaaactggcagccagcacagcagagcgccactcgactcgactcatcgtttcgggtcccctcccccctccgcgttccacaaccctcgagaagcttccaccctcccctcctgcgtcgccgccagagccgcggaaaccctacccaccccggccgctcacgcaccgggcgcccgcagccgccggtcgcgtgcctgccgccgacgccgcccaaagcgattggatctcgagatcgtcaggagccacgatggaggactgggattctgaagaattccagccagttgtgcctgttgtgaaagccgagccacttaaaaatcagtgggctgatgaagatgttgaagaagatgatgtaaaagaatcatgggaaga

SEQ ID NO: 3861 - DNA, 446 bp, Zea mays
  Clone ID: LIB3061-009-Q1-K1-G11
caactagcaacatagaaagcacaatagtgtaccaacaatggcagccaaaatattttgcgtccttatgctccttggtctttctgcaagtgctgctaccgcaaccattttcccacaatgctcacaagctcctatagcttcctttcttcccccatacctctcaccagcggtgtcttcagtatgtgaaaacccaattcttcaaccctacaggatccaacaggcaatcgcagcaggcatcttacctttatcacccttgttcctccaacaaccgtcagccctattacagcagttacctttggtgcatttgttggcacaaaacatcaaagcacaacaactacaacaacttgtgctaggaaaccttgctgcctactctcagcaacagcagtttcttccattcaaccaactggctgcattgaactctgctgcttatttgcaacaacaactaccat

SEQ ID NO: 3862 - DNA, 384 bp, Zea mays
  Clone ID: LIB3061-009-Q1-K1-G12
gcgtccaccaacggccggggcccctccatctgggattcattcgcgcacgtcccaggaaggattgcagggaatcaaaatggagacgttgcagtggatcaataccatcgctacaaggaagacgtcgatctcatgaaaagtttgaactttgatgcctaccggttctcaatctcatggtccaggatcttcccggatggcgaagggaaagtcaatccagaaggtgtagcgtattacaataatttgataaactatctgcttcagcaaggcatgactccttacatcaacctttaccactatgatcttcctcttgcgcttgagaagaaatatggagggtggttaagcgcgaagatggcggacttgtttacagactatgctgacttctggttt

SEQ ID NO: 3863 - DNA, 434 bp, Zea mays
  Clone ID: LIB3061-009-Q1-K1-G2
cagctagcaacatagaaagcacaatagtgtaccaacaatggcagccaaaatattttggctgcttatgctccttggtctttctgcaagtgctgctacggcgaccattttcccgcaatgctcgcaagctcctatagcttcccttcttcccccgtacctctcaccagcggtgtcttcggtatgtgaaaacccaattcttcaaccctacaggatccaacaggcaatcacagctggcatcttacctttatcacccttgttcctccaacaatcatcagccctattacatcagttacctttggtgcatttattggcacaaaacatcagggcacaacaactacaacaacttgtgctagcaaaccttgctgcctactctcagcaacagcagtttcttccattcaaccaactagctgcattgaactctgcttcttatttgcaac

SEQ ID NO: 3864 - DNA, 452 bp, Zea mays
  Clone ID: LIB3061-009-Q1-K1-E9
attgagaccaactagcaacatagaaagcacaatagtgtaccaacaatggcagccaaaagattttgcgctccttatgctccttggtctttctgcaagtgctgctacggcgaccattttcccgcaatgctcgcaagctcctatagcttcccttcttcccccgtacctctcaccagcggtgtcttcggtatgtgaaaacccaattcttcaaccctacaggatccaacaggcaatcacagctggcatcttacctttatcacccttgttcctccaacaatcatcagccctattacatcagttacctttggtgcatttattggcacaaaacatcagggcacaacaactacaacaacttgtgctagcaaaccttgctgcctactctcagcaacagcagtttcttccattcaaccaactagctgcattgaactctgcttcttatttgcaacaaccaccac

SEQ ID NO: 3865 - DNA, 297 bp, Zea mays
  Clone ID: LIB3061-009-Q1-K1-D5
aagcaacatataaagcacaatagtgtaccaacaatggcagtcaaaatattttgcgcgtggtatgctccttggactttctgcaagcgctgatacagcgaccattctcccgcaatgctcgcaagctcctataactgaccttcttccaccgtacctctcaccagcggtgtcttcggtatgtgaaaacccaattcttcaaccctacaggatccaacatgcaatcacagctggcatcttacctttatcacccttgctcctacaacaatcatcagccctattacatcatatacctaaggagca

SEQ ID NO: 3866 - DNA, 346 bp, Zea mays
  Clone ID: LIB3061-009-Q1-K1-D6
gcggtttccttccaactttcagaactgaaccttgattggaggggggaaactcgcgcgtgtgtcccgctgagtgaacaggaagaccttattgtgtggatgaggacatacgctctccccaaatttcgaaagctctatggtgtgattgaagacgacctgcatgccgatgagaccataaatattttcgtaggaaacaattacaacacctacacttttggtggaaagaagagcatagtcctgacgactgcgtcctggctaggcggctagaacgacttacttggacacgctcatattgtcactggctcgatgagcatcatcatatcgatactcttagctctgatccatgtga

SEQ ID NO: 3867 - DNA, 427 bp, Zea mays
  Clone ID: LIB3061-009-Q1-K1-D7
gtcttaaggctgagaagtccgagctgcgagacgagaagacgaggctcacgggtgagggggagaggttggagcagatgctcaagggcgtcgtcagccacgccgcggcggctgctccggggcccttcgtcccgcaccctgctgcggtcgctccatctttccaccaccacccggcggcgtttgctcaggctggaaagttcgtcccgtaccccagctacccgccgacggctgcgttctggcagtggataccgccgacgtccctcgacacgaccaaggaccccgcacactggccgccggtcgcctagccgacctaccacctcaccgtggcatcatttatcggtgatgcgttgccgtgtgtactgaatttgatcgaagcatgcctgaaaaaagaaaccttggctgctgctcgtgtcaaggacgtgatgtgctg

SEQ ID NO: 3868 - DNA, 309 bp, Zea mays
  Clone ID: LIB3061-009-Q1-K1-D8
ggaattgccggcccgactcgacccacgcgtgcgcagctagcaacatagaaagcacaatagtgtaccaacaatggcagccaaaatatgttggttccttatgctccttggtctttctgcaagtgttgctaccgcaaccattttcccacaatgctcacaagctcctatagcttcccttcttcccccatacctctcaccagcggtgtcttcaatgtgtgaaaccccaattgttcaaccctacaggatccaacaggcaatcgcaacaggcatcttaccattatcacccttgttccttcaacaaccgtcagccct

SEQ ID NO: 3869 - DNA, 364 bp, Zea mays
  Clone ID: LIB3061-009-Q1-K1-D9
gccgcagggcgagctcgcggctgctgctgcaggaaggactgcaggagcagccgcagggcgagctcgcggcgctgatggcggcccaggtagcgcagcagctgacggcgatgtgcggcctgcagctgcagcagccaggtccctgcccttgcaacgcagctgccggcggtgtctactactgaggaaactatgtactgtagtaataatgtaatggagccgctgactagctacctagctcgctagtttactcatttagcggcgatgagtaacgtagtgtcacccatcaccatgggtggcagtgtgagcaatgacctgaatgaaccattgaaatggaaaggaataatatataaggaaaaaagatgattgg

SEQ ID NO: 3870 - DNA, 418 bp, Zea mays
  Clone ID: LIB3061-009-Q1-K1-E1
aagggcttacgagtgcatcaaggatatcatcaaggtgaaacttcttagtggccagaggggggatcacaactcaaccgccgactaccgagcgagattatctgtcaatagggacacatctgaagttgcctacagtcaaatcggacacaccgatgggtgctacatctataccaccacagtcacctgagagaacaaaggcattatggactagattaatgagaagctgtatggacagtactgaactgaggctatacatggctgagctggtctgtgatgtcgcttgacttgcgaaatgttcagtggaggatagatgataacatccacccatgagttggtgcccataccctggatcatgtgacaaggacacggacagttacctgctgtacaatttttttgggaagataattgtcttgcttggtct

SEQ ID NO: 3871 - DNA, 256 bp, Zea mays
  Clone ID: LIB3061-009-Q1-K1-E10
gtgagccctgctaccttcttgatacaaccacagttgttgccgttctaccagcacgctgggcctaaggctggcaccctcttacaactgcaacaattgctgccattcaaccaacttgctttgacaaacccagcagcgttctaccaacaacccatcattggtggtgccctcttttagatttcttatgagttatagttcaataataaagttttttgtctgatgtttgtggcttcccagaaataagaaagtacatttctag

SEQ ID NO: 3872 - DNA, 396 bp, Zea mays
  Clone ID: LIB3061-009-Q1-K1-E11
aggatccaacaggcaatcgcagcaggcatcttacctttatcacccttgttcctccaacagccgtcggccctattacagcagttacctttggtgcatttgttggcacaaaacatcaaggcacaacaactacaacaacttgtgctaggaaaccttgctgcctactctcagcaacagcagtttcttccattcaaccaactggctgcattgaactctgctgcttatttgcaacaacaactaccattcagtcagctagctgctgcctacccccagcaatttcttccattcaaccaactggcagcattgaactctgctgcttatttacaacagcaacagctaccaccattcagccagctagctgatgtgagccctgttgccttcttgacacaacaacagttg

SEQ ID NO: 3873 - DNA, 436 bp, Zea mays
  Clone ID: LIB3061-009-Q1-K1-E2
cagcattcaaaaacacaccaagcgaagcgcactagcaacgacctaacaccaatggctgccaggatattagccctccttgcgcttcttgcccttttagtgagcgcaacaaatgcgttcattattccacagtgctcacttgctcctagtgccagtattccacagttcctcccaccagttacttcaatgggcttcgaacatccagccgtgcaagcctacaggctacaactagcgcttgcggcgagcgccttacaacaaccaattgcccaattgcaacaacaatccttggcacatctaaccctacaaaccattgcaacgcaacaacaacaacaacagtttctgccatcactgagccacctagccgtggtgaaccctgtcacctacttgcaacagcagctgcttgcatccaacccacttgctctggcgaacgtagctgcat

SEQ ID NO: 3874 - DNA, 384 bp, Zea mays
  Clone ID: LIB3061-009-Q1-K1-E3
tgcatcgaccaactcacatacccctactcctctaccaacgacctaccacccttaactgctaggttctatcctatcttccccttctagctctctaattgagccattcaactgcgatcattatttcataatgcttacttcattactaatgcctggcattccacagtttcaccaaccatctacttcaacaatctatatacattcaacctatctaacctacaagctacaactaacgcttgcatttagcgccttacaacaaccaattgcccaatccctacaacaatacttgtcacatctaaccctacaaaccatttcaactcaacaacaacaacaacagtctctcccatcaatcaaccacctatccacggtcaaccctctcacctactt

SEQ ID NO: 3875 - DNA, 433 bp, Zea mays
  Clone ID: LIB3061-009-Q1-K1-E4
aacacacctagcgaagcgcactagcaacgacctaacaacaatggcttccaagacatggtcgcgtccttgcgcttcttgccctttttgtgagtgcaacaaatgcgttcattattccacaatgctcacttgctccgagtgccattattccacagttcctccctccagttacttcaatgggcttcgaacacccagctgtgcaagcctataggctacaacaagcgcttgcggcgagcgtcttataacaaccaattgcccaattacaacaacaatccttggcacatctaaccatacaaaccatctcaacgcagcagcaagcactgagccacctagccgtggtgaaccctatcgcctacttgcaacaacagctgcttgcatccaacccacttgctttggcaaacgtagctgcataccaacaacaacaacagttgcaaca

SEQ ID NO: 3876 - DNA, 390 bp, Zea mays
  Clone ID: LIB3061-009-Q1-K1-E5
gcagccgactccatgcccctactctgctgccggcggcgtcccccactgaagagactagatgctgtagtatagccgatggctagctagctagttgagtcatttagcggcgatgattgagtaataatgtgtcacgcattaccatgggtggcagtgtcagtgtgagcaatgacctgaatgaacaattgagatgaaatgaacaaaattaatgagaagctgtatcgacagcactgaactgaggctatacatggctgaacttggatgagacctcgcttgaaatgcgaaatgctccgaggtggatacatattaacatccacccataaataaggggcccctatcttgtgatcatgtgactacggatagaggcagtttacctgctgaacaatttttttt

SEQ ID NO: 3877 - DNA, 328 bp, Zea mays
  Clone ID: LIB3061-009-Q1-K1-E6
gtgctagatcgcgagcggccgtcctttttttttctttttttttttttaatcaggttgttcacacgaattattaattattttgcagggcactccgtcacaatcaccatcattattgacccgagcaccaatctccatgcaatcgctactactagtggtggatcatcgacaacacctgtgacccggagattaaacacatggcaatcgcaggatggccacatgcagctgcacgcacactgattctgatttgcgtttagatggcggagcctacagctcactcccagatgccgacctccatgaacccgtcctcggtggcgcagccccggaacat

SEQ ID NO: 3878 - DNA, 412 bp, Zea mays
  Clone ID: LIB3061-009-Q1-K1-E7
ggttggcttctcctccccctccggttcgggttcgggttcgtgaggttctccggggtgcggtttcgtgggtgagcggatcgagatggcggcgtcggatgttgagtaccgctgcttcgtcggcggcctcgcctgggccacggacgaccactccctccacaacgccttcagcacctacggcgaggtcctcgagtccaagatcatcctcgatcgggagacgcagaggtcccgcggcttcggcttcgtcaccttctccacggaggaggcgatgcggaacgccatcgagggcatgaacggcaaggagctggacggccgcaacatcaccgtcaacgaggcccagtcccgcggcggccgtggaggcggcggcggcggcgggtacggtggtggccgtggaggcggcggctacggcggtggc

SEQ ID NO: 3879 - DNA, 441 bp, Zea mays
  unsure (1)..(441): unsure at all n locations; Clone ID: LIB3061-009-Q1-K1-E8
cttcagaccattagctttatctactccagagcgcagaagaacccgatcgacaccatgagggtgttgctcgttgccctcgctctcctggctctcgctgcgagcgccacctccacgcatacaagcggcggctgcggctgccagccaccgccgccggttcatctaccgccgccggtgcatctgccacctccggttcacctgccacctccggtgcatctcccaccgccggtccacctgccgccgccggtccacctgccaccgncggtccatgtgccgacgacggttcatctgccgtcgacaccatgccactaccctaactaaccagcccggcctcagcctcatccccagccacacccatgcccgtgccaacagccgcattcaagcccgtgccagctgcagggaacctgcggcgttggcagcaccccgatccctggccagtgcgtc

SEQ ID NO: 3880 - DNA, 432 bp, Zea mays
  Clone ID: LIB3061-009-Q1-K1-D4
ctgccgaaagtgccttttggggttcttgtaatcttgttacattaggattcatttttgatgacttcatcaagaagcaagagcaagagcagaagtaggagccgcagtcgcagcaggagcaggagccgcagtcctcggcgaagagatagattgcgcagtgaacgtgcaccccaccgcagtcgcagccggagccgcagcccataccgtcgcagagaacggcgtggtcacagggattttgcatgcaagaactgccggagacctgggcacttcgctaaggagtgtccatctgcgcctatgtgcaataactgtaaccttccaggccactttgcagcagaatgcaccttacaaactgtttgctggaactgcaaagagtctgggcacattgccagtgagtgcaagaacgaggccctatgccacgcctgcaacaagacaggt

SEQ ID NO: 3881 - DNA, 431 bp, Zea mays
  Clone ID: LIB3061-028-Q1-K1-D7
caactagcaacatagaaagcacaatagtgtaccaacaatggcagccaaaatattttgcctccttatgctccttggtctttctgcaagtgctgctacggcgaccattttcccgcaatgctcgcaagctcctatagcttcccttcttcccccgtacctctcaccagcggtgtcttcggtatgtgaaaacccaattcttcaaccctacaggatccaacaggcaatcacagctggcatcttacctttatcacccttgttcctccaacaatcatcagccctattacatcagttacctttggtgcatttattggcacaaaacatcagggcacaacaactacaacaacttgtgctagcaaaccttgctgcctactctcagcaacagcagtttcttccattcaaccaactagctgcattgaactctgcttcttatttgc

SEQ ID NO: 3882 - DNA, 327 bp, Zea mays
  Clone ID: LIB3061-028-Q1-K1-D8
tcgcccactcgttcgggccgcccttttttttttttttttaaaaaaggctcacatggattgaccacaggatcaaatgtgcggatgcccaaccatgtaggagtataaccaacataattactgaactatgacagttggtaaattactttacagatttatgccggatagtatattcacgacattcctctcaaccatgacgatgcacaagcaagcacacagttacaagcaagccagtattatggaagcacgatagcatggcatttcaatcatctttctgatgtaaagcacgagctagactattaccattcagtgcggcatggtacactcgct

SEQ ID NO: 3883 - DNA, 426 bp, Zea mays
  Clone ID: LIB3061-028-Q1-K1-D9
ctcagacgactgggccgccgccgcttggtgctgaggctttcgttggtctcttcggcggcgacgagcacccaccagttctgtagaaatggctgatggtgaagaccttcaaccctttggtttgcaacattggcaccggattggccaaggctggttttgctggggacgatgcaccaagggcggttttccttagcattgttggccgtcctggccacactggtgtcatggtagggatgggacagaaggatgcatatgttgccaatgaggcacagtccaggaaaggtattctaacgctcaagtacccgattgagcacggtattgtgagcaactgggatgacatggagaaaatctggcatcatactttatacaacgagcttcgtgttgcaccagaggagcaccctgtgtcgctcactgaggctcctttgaacc

SEQ ID NO: 3884 - DNA, 441 bp, Zea mays
  Clone ID: LIB3061-028-Q1-K1-E1
gtggaatacagtagcaaaaatagagcatcaatggcggccaagatattttccatccttatgctccttgctctttctgcatgtgttgctaacgcgaccatttttcctcaatactcacaagctcctatagctgcccttcttcccccataccttccatcaatgaccgctttagtatgtgaaaacccagcccttcaaccctacaggatccagcaagcaatcgcaacaagcaacttacctttatcacacctgttctttcaacaatcgccagccctatctttggtgcagtcattggtacaaaccatcagggcagaacagttgcagcaactcgtgctaccagtgatcagccaagtagctctggcaaacctttccccctactctcaacaactactaccattcagccagctagctgatgtgagccctgctgccttcttgacacaacaacag

SEQ ID NO: 3885 - DNA, 330 bp, Zea mays
  Clone ID: LIB3061-028-Q1-K1-E10
caactagccatggtgaaccctgtcttcctacgtacaacaacatcaactgctttcatctagcccgctcgctgcgggcaatgcacctacatacctgctacaacaattgttgcaacacattgtaccatctctgactcaactagctgtggcaaaccctgtctcctacttgcaacagctgcttgcattcaaccaactgactttgtcgaagtctgctgcgtacttacaacagctacatcagtcacttaatccattgttagtggctataccactgattggctgaataccactgcgtcaactattgctgccatacaagcagttctctatgatgaattc

SEQ ID NO: 3886 - DNA, 427 bp, Zea mays
  Clone ID: LIB3061-028-Q1-K1-E11
gaccaactagcaacatagaaagcacaatattgtaccaacaatggcagctaaaatattttgcctccttatgctccttggtctttctgcaagtgctgctacggcgaccattttcccacaatgctcacaagctcctatagcttcccttcttcccccgtacctctcaccaacggtgtcttcggtatgtgaaaacccaattcttcaaccctacaggatccaacaggcaatcgcagctggcatcttacctttatcacccttgttcctccaacaatcatcagccctattacagcaggtacctttggtgcatttattggcacaaaacatcagggcacaacaactacaacaacttgtgctagcaaaccttgctgcctactctcagcaacagcagtttcttccattcaaccaactagctgcattgaactctgcttct

SEQ ID NO: 3887 - DNA, 426 bp, Zea mays
  Clone ID: LIB3061-028-Q1-K1-E12
gttgtgagagagaggggaagggatcgagagcgcggcggaggcgatggcgagcggagggaagggactcaacgcgactggggagttcttccggcggagggacgagtggaggaggcaccctatggcggggaaccagctgcgccacgccacacccgggctcggcatcgccatcgtcgccttcgggatctacctcgtcggcgaggccgcctacaaccgcctctaccgcccctccggcgacaaccaccactagatcgccggcaggatccgtgactcggtcaagaagctggagccaactttaccaagcactggtgctggtgatgtttttacagttttgagctcataaggtcagccatgaccatattgtaatctgtgaccaggtagacttgcccactggtccgtccaactattgtcttgggaccctgtgttaat

SEQ ID NO: 3888 - DNA, 447 bp, Zea mays
  Clone ID: LIB3061-028-Q1-K1-E2
aaaaatcagtatgtaacaccagaaaaggcttcggcaccctcagcaacactcgagtcagatccattacctctcgtatggggaaaacaacgagatcacccgttaagtgtcgaagagtggacatctttcttagatcgtgaaggtaggattatggattcaaaggcactgaggaaaaaggttttctatgggggagttgatcatgctttgagaaaagaggtctggaaattcttgttggggtatcatgaatatgattcaacatatgctgagagggaataccttgctgtcatgaaacgagcagaatatgaagtcataaaatctcagtggaagagtatctcagccacccaagctaaaagattcaccaagtttagggaaagaaaaggcctaattgacaaagatgtggtgagaacagataggtccattccctattatgaaggagatgacaatcagaat

SEQ ID NO: 3889 - DNA, 442 bp, Zea mays
  Clone ID: LIB3061-028-Q1-K1-E4
agcaattagctcatcgactccagattggagaactcgacaccatgaaggtgctgatcgttgcccttgctctcctggcgctcgctgcgagcgccgcctccagtacaagcggcggctgtggctgccagacaccaccgtttcatctaccgcctccgttctatatgccgcctccgttctatctgccgccgcagcagcagccgcagccatggcaataccccactcaaccaccgcagctaagcccgtgccagcagttcggatcctgcggcgtcggcagcgtcggcagcccgttcctgggccagtgcgtcgagttcctgaggcaccagtgcagcccggcggcgacgccctacggctcgccacagtgccaggcgctgcagcagcagtgctgccaccagatcaggcaagtggagccgctgcaccggtaccaggcgacatacggtgtggtcct

SEQ ID NO: 3890 - DNA, 415 bp, Zea mays
  Clone ID: LIB3061-028-Q1-K1-E6
agcaccaccaccagtgatccggccaaggtccgtaccgaccaaagacggccggggaggagatggccgcctccgggaccgggaacaacaggttcgcccatacatgcgctcgcgtgcggcagttcatgatggagcagaacaggcaggtgcggatggatgacctcatcggctcctcctcgtccccgaggccactgcaactgacgccagtccctgtagcgactgggccgccgccggcggctgcctgggagaccgacgccggcgctaggactttgccgctgttccccgtccgcaatagcagtagcacggagatcatcaggccagagcatgaggccaaggccaccctaaccatcttctaccatggccaggtggcaacgttccacaacttcccggcagacagagccaaagaccttatacaaat

SEQ ID NO: 3891 - DNA, 440 bp, Zea mays
  Clone ID: LIB3061-028-Q1-K1-E7
ggaggaacaagggtgataaaggtaagatgccagctgtgattgcctgttggatcctgtagggttgaagaatcatcagccctattacatcagttacctttggtgcatttattggcacaaaacatcagggcacaacaactacaacaacttgtgctagcaaaccttgctgcctactctcagcaacagcagtttcttccattcaaccaactagctgcattgaactctgcttcttatttgcaacaacaacaactaccattcagccagctacctgctgcctacccccagcaatttcttccattcaaccaactggcagcattgaactctcctgcttatttacagcagcaacaactactaccattcagccagctagctggtgtgagccctgctaccttcttgatacaaccacagttgttgccgttctaccagcacgctgcgcctaacgc

SEQ ID NO: 3892 - DNA, 435 bp, Zea mays
  Clone ID: LIB3061-028-Q1-K1-E8
gtcgctgccagcagtcagcaacagcagtttcttccattcaaccaactagctgcattgaactctgcttcttattcgcaacaacaacaactaccattcagccagctacctgttgcctacccccaacaatttcttccattcaaccaactggcagcattgaactctcctgcttatttacagcagcaacaactactaccattcagccagctagctggtgtgagccctgctaccttcttgacacaaccacagttgatgccgttctaccagcacgctgcgcctaacgctggcaccctcttacaactgcaacaattgctgccattcaaccaacttgctttgacaaacctagcagtgttctaccaacaacccatcattggtggtgccctcttttagatttcttatgagttatagttcaataataaagtttaacgtctgatgttt

SEQ ID NO: 3893 - DNA, 433 bp, Zea mays
  Clone ID: LIB3061-028-Q1-K1-E9
gcaattagctcatcgactccagattggagaactcgacaccatgaaggtgctgatcgttgcccttgctctcctggcgctcgctgcgagcgccgcctccagtacaagcggcggctgtggctgccagacaccaccgtttcatctaccgcctccgttctatatgccgcctccgttctatctgccgccgcagcagcagccgcagccatggcaataccccactcaaccaccgcagctaagcccgtgccagcagttcggatcctgcggcgtcggcagcgtcggcagcccgttcctgggccagtgcgtcgagttcctgaggcaccagtgcagcccggcggcgacgccctacggctcgccacagtgccaggcgctgcagcagcagtgctgccaccagatcaggcaggtggagccgctgcaccggtaccaggcgacatacggt

SEQ ID NO: 3894 - DNA, 440 bp, Zea mays
  Clone ID: LIB3061-028-Q1-K1-F1
cccacgcgtccgtgagcattcagaaacacaccaagcgaagcgcactagcaacaacctaacaacaatggctaccaagatattatccctccttgcgcttcttgcgctttttgcgagcgcaacaaatgcgtccattattccacaatgctcacttgctcctagttccattattccacagttcctcccaccagttacttcaatggccttcgaacacccagctgtgcaagcctataggctacaacaagcgattgcggcgagcgtcttacaacaaccaattgcccaattgcaacaacaatccttggcacatctaacaatacaaaccatcgcaacgcaacagcaacaacagttcctaccagcactgagccacctagccatggtgaaccctgtcgcctacttgcaacagcagctgcttgcatccaacccacttgctctagcaaacgtag

SEQ ID NO: 3895 - DNA, 431 bp, Zea mays
  Clone ID: LIB3061-028-Q1-K1-F10
tgagcattcagaaacacacctagcgaagcgcactagcaacgacctaacaacaatggcttccaagacattatccctccttgcgcttcttgccctttttgtgagtgcaacaaatgcgttcattattccacaatgctcacttgctccgagtgccattattccacagttcctccctccagttacttcaatgggcttcgaacacccagctgtgcaagcctataggctacaacaagcgcttgcggcgagcgtcttagaacaaccaattgcccaattacaacaacaatccttggcacatctaaccatacaaaccatcgcaacgcagcagcaacaagcactgagccacctagccgtggtgaaccctatcgcctacttgcaacaacagctgcttgcattcaacccactagctttggcaaacgtaactgcataccaacaac

SEQ ID NO: 3896 - DNA, 436 bp, Zea mays
  Clone ID: LIB3061-028-Q1-K1-D6
catcaagcttcattgaaagtgtaatccattagctacaatagagcaacaatggcgaccaagatatttaccctgcttatgctcctgtgctctgtctacatgtgttgctaacgcgacaattttccctcaatgctcacaagctcctatagctttcatatttgccccataccttccatcaattatagctgcaatatgagaaaacccagctattcaaccatataggcttaaacaagcaatctcagcaagctacatacctttatcgtccttgttgtttcaacaatcgccagccctatctttgatgcagtcattggtacaaaccatcagggctcaacagctgctgcaactggtgctacctctgatcaaccaagtagctctggctaacctttctccctactcttagcaacaacaatttcttacattcaaccaactgtctacactg

SEQ ID NO: 3897 - DNA, 265 bp, Zea mays
  Clone ID: LIB3061-028-Q1-K1-C10
gctggtgtgagccctgctaccttcttgacacaaccacagttgttgccgttctaccagcacgctgcgcctaacgctggcaccctcttacaactgcaacaattgctgccattcaaccaacttgctttgacaaacccagcagcattctaccaacaacccatcattggtggtgccctcttttagatttcttatgagttatagttcaataataaagttttttgtctgatgtttgtggcttcccagaaataagaaagtacatttctagatt

SEQ ID NO: 3898 - DNA, 427 bp, Zea mays
  Clone ID: LIB3061-028-Q1-K1-C12
gtggcacaaaacatcagggcacaacaactacaacaacttgtgctagcaaaccttgctgcatactctcagcaacatcagtttcttccattcaaccaactggctgcattgaactctgctgcttatttgcaacaacaattaccattcagccagctagttgctgcctacccccagcaatttcttacattcaaccaactagcagcattgaactctgctgcttatttacagcagcaacaactactaccattcagccagctagctgatgtgagccctgctgccttcttgacacaacaacagttgttgccgttctacctgcacgctatgcctaacgctggcaccctcttacaactgcaacaattgctgccattcaaccaacttgctttgacaaactcaacagtgttctaccaacaacccatcattggtggtgccc

SEQ ID NO: 3899 - DNA, 438 bp, Zea mays
  Clone ID: LIB3061-028-Q1-K1-C2
cggacgcgtgggttcgaggtgaaggccactgcgggcgacactcaccttggcggcgaggacttcgacaatcgcatggtgaaccacttcgtccaagagttcaagcgcaagaataagaaggacataagcggcaacccccgtgcactgcgccggctgcgcacggcgtgcgagcgcgccaagcgcacgctgtcatcgactgcccagacgaccattgagatcgactccctgttcgagggcatcgatttctactccacgatcaccagggctcgcttcgaggagctcaatatggacttgttccggaagtgcatggaacctgtggagaagtgcttgcgcgacgccaagatggacaagagcagcgtgcacgacgtcgtgctcgtcggtggctccacccgcattcccaaggtgcagcagctgctgcaggacttcttcaacggaaggaat

SEQ ID NO: 3900 - DNA, 447 bp, Zea mays
  Clone ID: LIB3061-028-Q1-K1-C3
gtggaatccagtagcaacaatacagcaacaatggcgaccaagatattttccctccttatgctccttgctctttctacatgtgttgctaacgcgacaattttccctcaatgctcacaagctcctatagcttcccttcttcccccataccttccatcaattatagcttcaatatgtgaaaacccagctcttcaaccatataggcttcaacaagcaatcgcagcaagcaacatacctttatcgcccttgttgtttcaacaatcgccagccctatctttggtgcagtcattggtacaaaccatcagggcacaacagctgcagcaactcgtgctacctctgatcaaccaagtagctctggcaaacctttctccctactctcagcaacaacaatttcttccattcaaccaactgtctacactgaaccctgctgcttatttgcagcaacaacta

SEQ ID NO: 3901 - DNA, 410 bp, Zea mays
  Clone ID: LIB3061-028-Q1-K1-C5
caacaacaatttctaccagcactgagccaactagctgtggtgaaccctgtcgcctacttgcaacagcagttgcttgcatccaacccacttgctctggcaaacatagttgcataccaacaacaacaacaattgcaacagtttctaccagcgctcagtcaactagccatggtgaaccctgccgcctacctacaacagcaacaactgatttcatctagccctctcgctgtggttaatgcacctacatacctgcaacaacagttgctgcaacagattgtaccagctctgactcagctagctgtggcaaaccctgctgcctacttgcaacagctgcttccattcaaccaactgactgtgtcgaactctgctgcgtacctacaacagcgacaacagttacttaatccactagcggt

SEQ ID NO: 3902 - DNA, 461 bp, Zea mays
  Clone ID: LIB3061-028-Q1-K1-C6
ctctttcagcaagtgttgctaccgcgactattattccacaatgctcacaacaatacctctctccagtgatagccgcgagatttgaatacccatctatacaatcctacaggctacaagaggccatcacagcaagcatcttacggtcgttagcattgaccgtccaacaaccatatgccctattgcaacaaccatccttagtgaatctgtatctccaaagaatcacagcacaacaactacaacaacggttgcttccaacaattaatcaagtagttgcagcgaaccttgctgcttaccttcagcaacaacaatttcttccattcaatcaactagctggggtgaaccctgctgcttacttgcaggcacaacagctactaccattcaaccaacttgtcgggagccctgctgccatcttattgcagcaacagttgctgccattccgtctacaagttgttgcaaacatt

SEQ ID NO: 3903 - DNA, 356 bp, Zea mays
  Clone ID: LIB3061-028-Q1-K1-C7
gctggtcgtcctctcctcccatggcagcccctatccacggcttcctcctccctctagatctacccccgtgcagcaaggatcgagaagaggaggagcacattgagttgaaggggaagagaggatcaaggagatgttcttgcccatatcttattgcagaatttcttggggaaaccctaggtggctacactccagatcatacctagtacatttttcttcttcgatgaaggtgcttgttgctcatcaagggaagtgggaagtagcagcacatgcaccttcactctcataataacgctgcttaggcgcagtcatgattcaattagaaacttcttgtcaaacgatgttgctcctaactagct

SEQ ID NO: 3904 - DNA, 442 bp, Zea mays
  Clone ID: LIB3061-028-Q1-K1-C8
cacaaaacatcagggcacaacaactacaacaacttgtgctagcaaaccttgctgcatactctcagcaacatcagtttcttccattcaaccaactggctgcattgaactctgctgcttatttgcaacaacaattaccattcagccagctagttgctgcctacccccagcaatttcttccattcaaccaactagcagcattgaactctgctgcttatttacagcagcaacaactactaccattcagccagctagctgatgtgagccctgctgccttcttgacacatcaacagttgttgccgttctacctgcacgctatgcctaacgctggcaccctcttacaactgcaacaattgctgccattcaaccaacttgctttgacaaactcaacagtgttctaccaacaacccatcattggtggtgccctcttttagattgcttatga

SEQ ID NO: 3905 - DNA, 395 bp, Zea mays
  Clone ID: LIB3061-028-Q1-K1-C9
attgagaccaactagcaacatagaaagcacaatagtgtaccaacaatggcagccaaaatattttgcctccttatgctccttggtctttctgcaagtgctgctacggcgaccattttcccgcaatgctcgcaagctcctatagcttcccttcttcccccgtacctctcaccagcggtgtcttcggtatgtgaaaacccaattcttcaaccctacaggatccaacaggcaatcgcagctggcatcttacctttatcacccttgttcctccaacaatcatcagccctattacaacagttacctttggtgcatttattggcacaaaacatcagggcacaacaactacaacaacttgtgctagcaaaccttgctgcctactctcagcaacaacaagtttc

SEQ ID NO: 3906 - DNA, 442 bp, Zea mays
  Clone ID: LIB3061-028-Q1-K1-D1
aactagcaacatagaaagcacaatagtgttccaacaatggcagccaaaatattttgcctccttatgctccttggtctttctgcaagtgctgctacggcgaccattttcccgcaatgctcgcaagctcctatagcttcccttcttcccccgtacctctcaccagcggtgtcttcggtatgtgaaaacccaattcttcaaccctacaggatccaacaggcaatcgcagctggcatcttacctttatcacccttgttcctacaacaatcatcagccctattacaacagttacctttggtgcatttattggcacaaaacatcaaggcacaacaactacaacaacttgtgctagcaaaccttgctgcctactctcagcaacagcagattcttgcattcaaccaactaggttcattgaactctgcttcttaattgcaacaacaacaac

SEQ ID NO: 3907 - DNA, 432 bp, Zea mays
  Clone ID: LIB3061-028-Q1-K1-D10
cccactcgtccgctgcctcattgcataattagcatcgaatatcgatgcgcatccgcggaatggagcgcggaggatgaggaataaggaggggtcgaggccaaatccggctgagagaagtggagctatggctaggctggcggtaccagcgaggtcgtcatcagatgagggctgcggacagggagtgtcaatagctcacggcgcgtccctgcggatcggcgctctgttcctgcgggatctgctgcgaggaagcggaggagaggcaagagctgatacgtaccgaggtgcagggttacatggccgagctccagaatgtgagccaggagcactcgcgctggcgcgtcagagctctgcatgctcgagttaccgaacagagcactatacactgacgtgcagcatgaatgacggatacacaaggctctctcgaccttctga

SEQ ID NO: 3908 - DNA, 127 bp, Zea mays
  Clone ID: LIB3061-028-Q1-K1-D12
ggggagtcggtgaaccaccatcctgattacgagttcttcctgtctcgttgcgcctaggctaagcggttgtgatatgaaggaagaggggcttttctgcttctagctcctgaatgtagtagtgaccatg

SEQ ID NO: 3909 - DNA, 397 bp, Zea mays
  Clone ID: LIB3061-028-Q1-K1-D2
ggagaaccctacgagcatcctagtgactcccatggctccggccatgtcggcgcaggtcacaagaataaccttgagcaacctgtttgtccgtctggctggaccatgcagcacggatgtgaccgtggagggaaggccatccgaccagctgggcaggagaaacctcactgacagccccgtatttgacggccgtggccctgacgccagcctcgtggctcgcgtacagggagtcgctacccagatgggcgacgtgcgccagttgtacaccgtcgtgttccatgagaggccgatcaagggctccacgctcgtcaccgaacgcgcgatgacagaagggtcagacgagtgtgcgatctacggtggaactggagtgttcgcgatggcgagaggcgtcataaggaga

SEQ ID NO: 3910 - DNA, 450 bp, Zea mays
  Clone ID: LIB3061-028-Q1-K1-D3
attgatacgaactagcatcatacatagtgaagtacactagcaacatcttagcaccaatggcagccaagatttttgccatccttgccctccttgctctttcagcaagcgttgctaccgcgactattattccacaatgctcacaacaatacctctctccggtgacagccgcgagatttgaatacccaactatacaatcctacaggctacaagaggccatcgcagcaagcatcttacggtcgttagcattgaccgtccaacaaccatatgccctattgcaacaaccatccttaatgaatctatatctccaaagaatcgcagcacaacaactacaacaacagttgcttccaacaatcaatcaaatagttgcagcgaaccttgctgcttacctccagcaacaacaatttcttgcattcaatcaactagctggcgtgaaccctgctgcttacttgc

SEQ ID NO: 3911 - DNA, 322 bp, Zea mays
  Clone ID: LIB3061-028-Q1-K1-D4
atagctacatacaaagcacattcgtggtccaacactgtctgaccaaatattcagccttggtatgctcctatggtcgttatgcaagcgctgctaccgctaccattatgccgcaatgctggcacgcttatataactatgcttataacaatgtacctctcaccagacgtgtgttagatatgtgtaaacccctttactatactacacgcgatacaacaggctatcacagatggtatcacagctgtatgaaccgtgctgctaccacacttatgagctatagtacatgagatacctaaggagcatatatcggcacagaacatcagggc

SEQ ID NO: 3912 - DNA, 442 bp, Zea mays
  Clone ID: LIB3061-028-Q1-K1-D5
ctcagcacttatataatagatttcacaaatcagtatagttgcagccaaggatctattcattttcttatcctgctgtgatcctgcccgctggcccgacttcgtccctgggtgcaggtgattcatgaatatcctgcctgtctgttcagttcatctccggacgagacacgaattgctgagtgcaggtctgttcatgccaaaatcgtacaagaatgagagggtagagctgataagcataatacatgtacggatttatgctctggatgtggagacaagtagaaagtggtttgtggagcattaagttgtcttcatgagattcagcctattcaggtcatgtactcatgtggcacagcctagaggaccaactgaccaataatactaaagcacataggatgtttagttttctgattttaattttggaattctatccaaatatagactcttt

SEQ ID NO: 3913 - DNA, 435 bp, Zea mays
  Clone ID: LIB3061-028-Q1-K1-B9
cccacgcgtccggatggatcttagcttggtaactgatccgctgtggaggcgattctaccagcgagaattcggtcaggagcatacgagcaaagtcatcgcaaggctgaaggagcttgggcaaaaaacgccgtacacatggagggagctcttcgcggcgaaaaaagagaaacagaaggaagttgaggataagatgcttgacaaattcacaaagaagtttcaggcagagagagctgagaaacaaagcaagcaaatcaaactatgtacaaaggtgcctccaagcagcaaaaggagtttctttggaggaagtggacctagcagtgtatccagttccagctacaagagccctatactgaagaaggctaggatagaggttaacagtcgagcaagattgcagtctgctatgcaaaagaatacttttgcgaggtcatctcagcc

SEQ ID NO: 3914 - DNA, 432 bp, Zea mays
  Clone ID: LIB3061-028-Q1-K1-A12
caagcaacatagaaagtggaatccagtagcaacaatagagcaacaatggcgaccaagatactttccctccttatgctccttgctctttctgcatgtgttgctaacgcgacaattttccctcaatgctcacaagctcctatagcttcccttcttcccccataccttccatcaatgatagcttcagtatgtgaaaacccagctcttcaaccctataggctccaacaagcaatcgcagcaagcaacatacctttatcacccttgtttcaacaatcgccagccctatctttggtgcagtcattggtacaaaccatcaaggcacagcagctgcagcaactcgtgctacctgtgatcaaccaagtagctctggcaaacctttctccctactatcagcaacaacaatttcttccattcaaccaactatctacactgaac

SEQ ID NO: 3915 - DNA, 318 bp, Zea mays
  Clone ID: LIB3061-028-Q1-K1-A2
ttcccggttttcctattcttttttttagaaatgtactttaccatgcgaggctttccatcaacatcatacaaccaaactgctatggtagaactataactcacttgcacatctagaccagggcaccaccgacgcagaggcgttggtagtatgcatggtgctatcgtgctactagtgctatgtttcgcagcatgctgcaaccatttacttaaattgactctcttcatccaaccgtgctagccttcaggctacaactagaagctttctgcagggtcttaaaactatgaattgtcctattgcaacaactattattggcaaaga

SEQ ID NO: 3916 - DNA, 268 bp, Zea mays
  Clone ID: LIB3061-028-Q1-K1-A3
atcgagaccaacaagcaacatacaaagtggaatccagtagcaacaatagagcatcaatggcgaccaagatactttccctccttatgctccttgctctttctgcatgtgttgctaacgcgacaattttacctcattgctaacaagctcctatagcttcccttgttcccccataccttccatcaatgatagctcaagaatgtgaaaccccagcttttcaaccttttaggctccaacagcgcattggcagcaggcaccatacctttatcac

SEQ ID NO: 3917 - DNA, 437 bp, Zea mays
  Clone ID: LIB3061-028-Q1-K1-A4
ctcatcgactccagattggagaactcgacaccatgaaggtgctgatcgttgcccttgctctcctggcgctcgctgcgagcgccgtcttcagtacaagcggcggctgtggctgccagacaccaccgtttcatctaccgcctccgttctatatgccgcctccgttctatctgccgccgcagcagcagccgcagccatggcaataccccactcaaccaccgcagctaagcccgtgccagcagttcggatcctgcggcgtcggcagcgtcggcagcccgttcctgggccagtgcgtcgagttcctgaggcaccagtgcagcccggcggcgacgccctacggctcgccacagtgccaggcgctgcagcagcagtgctgccaccagatcaggcaagtggagccgctgcaccggtaccaggcgacatacggtgtggtcctgcag

SEQ ID NO: 3918 - DNA, 164 bp, Zea mays
  Clone ID: LIB3061-028-Q1-K1-A5
gaagaaactatgtgctgtagtatagccgttggctagctagctagttgagtcatttagcggcgatgattgagtaataatgtgtcacgcatcaccatgggtggcagtgtcagtgtgagcaatgacctgaatgaacaattgaaatgaaaagaaaaaagtattgttcc

SEQ ID NO: 3919 - DNA, 443 bp, Zea mays
  Clone ID: LIB3061-028-Q1-K1-A6
cttgcttccgcggactagttttttctgaagattcggcgatggcggcgacgatccaatccgtgaaggcgcgccagatctttgacagccgtggcaaccctacagtcgaggtcgacgtgttttgctcagatggaacctttgcaagggcagctgttcccagtggagcatcaactggtgtatatgaagctctggagttgagggatggtggctctgactatttggggaagggtgtctccaaggctgtgaacaatgtgaattctgttattggacctgctctgattggcaaggaccctacagcacagactgagattgataacttcatggttcaacaacttgatgggaccaaaaatgagtggggatggtgcaagcaaaagcttggtgctaatgcgattctggctgtgtcattagctgtttgcaaagctggggctagcatcaagaggattcct

SEQ ID NO: 3920 - DNA, 438 bp, Zea mays
  Clone ID: LIB3061-028-Q1-K1-A7
ggccaatgcacctacatacctgcaacaagaattgttgcaacagattgtaccagctctaactcagctagctgtggcaaaccctgttgcctacttgcaacagctgcttccattcaaccaactaactatgtcgaactctgttgcgtacctacaacagcgacaacagttacttaatccattggcagtggctaacccattggtcgctgccttcctacagcagcaacaattgctgccatacaaccggttctctttgatgaatcctgtcttgtcgaggcagcaacccatcgttggaggtgccatcttttagattacatatgagatgtactcgataatggtgccctcataccggcatgtgtttcctagaaataatcaatatattggttgagatttatctcgatatatttctgaactatgttcatcatataaataattgaaaacatc

SEQ ID NO: 3921 - DNA, 446 bp, Zea mays
  Clone ID: LIB3061-028-Q1-K1-A8
caatgagaccttccacggctggcgctctggccgccgcggccctcgtcgcgacgctcgcgctgagcgtcggcgccaccccggagacgacgtgcgcggcggcggcggcccacgaccggcgcgtggactacggcttctgcgtgtcgaggctgagccaccaccacgacagccccgacgcggacacctggggcctggccaaggtggccgccgacgtgggcgtcgccaccgccggggacgccgtctacgacatcaaggccctgctggccaagccgtcggccgacgcccaggcgcgggcggcgctggagcagtgccagaggctgtacgacgcggcggagatggcgttcgcggaggcgtacgacgggatcaaccggcgcgactacgcggcgggcaagggcaaggccacggaggcggctgcgctggcccgccggtgcgacgacgccttcgcgcgg

SEQ ID NO: 3922 - DNA, 262 bp, Zea mays
  Clone ID: LIB3061-028-Q1-K1-B1
tcgtccacgcgttcggctcccctttcgctactaccggcgctagctggttcaagtgcggctagcggagccggagaccggtagaggaaattaagaggcgtcgatcgggcatggggtgcgacgacaagtgctggtgcgccgtgccgtgccccggcggcaaagactgcaggtgcacgtcggggagcggctggcaacgggagcacacgacttgcggctgccgggagcactgctagtgcagaccgtgcacgtgtggtcgggccacgat

SEQ ID NO: 3923 - DNA, 405 bp, Zea mays
  Clone ID: LIB3061-028-Q1-K1-B11
gcagtttcttccattcaaccatctggctgcattgaactctgctgcttatttgcgacaacaactaccattcagtcagctagctgctgcctacccccagcaatttcttccattcaaccaactggcagcattgaactctgctgcttatttacaacagcaacagctaccaccattcagccagctagctgatgtgagccctgttgccttcttgacacaacaacagttgttgccgttctacctgcacgctgcgcctaacgctggcaccctcttacaactgcaacaattgctgccattcaaccaacttgctttgacaaacccaacaacgttctaccaacaacccatcattggcggtgccctcttttagattgcttatgagttatagttcaataatgaagttttttggatgat

SEQ ID NO: 3924 - DNA, 430 bp, Zea mays
  Clone ID: LIB3061-028-Q1-K1-B12
cagcagctcctacctatcccaataggatgtaccctagcccccgaccgtacacccagtatgggaattcagtaaaaactggtcttccctacgggagtaacggttatgattccaggatatatggtcgatgtggtcttggtaatggtatggataacaggtacaggcccagggcatgtagtggatactatggttatggcaatgagagtcaggatggaacaattgagttaaacagaggtcctagatctgtccggttcaagatccagaaattgtacggtcatactgtcactattgctgtgaaagggcagtctctaccttctagtgaaagcaagaatgatagtgctgtgcctgatagagcatagtacaattgagatgacttccctgttcagtacgatgctgcaaaggtctttgtcattaaatcgtacagcgaggatga

SEQ ID NO: 3925 - DNA, 455 bp, Zea mays
  Clone ID: LIB3061-028-Q1-K1-B2
catacatagtgaagtacactagcaacatcttagcaccaatggcagccaagatttttgccatccttgccctccttgctctttcagcaagcgttgctaccgcgactattattccacaatgctcacaacaatacctctctccggtgacagccgcgagatttgaatacccaactatacaatcctacaggctacaagaggccatcgcagcaagcatcttacggtcgttagcattgaccgtccaacaaccatatgccctattgcaacaaccatccttaatgaatctatatctccaaagaatcgcagcacaacaactacaacaacagttgcttccaacaatcaatcaagtagttgcagcgaaccttgctgcttaccttcagcaacaacaatttcttccattcaatcaactagctggggtgaaccctgctgcttacttgcaggcacaacagctactaccattc

SEQ ID NO: 3926 - DNA, 455 bp, Zea mays
  Clone ID: LIB3061-028-Q1-K1-B3
gacggatgcatccacgcgtccatccactcgtgcggctgctacttcgctgctaccgccgctagctggttcaagtgcctcagagcgtgagccacgagaccggttacaggaaattaacaggcgtctaccggtcatggcgtacgtcaacaagtgcgggtgctcattgccatgccccggctgctaagactagctgtgcacgtagatagcgtcatgcagcgggagcacactacttgcggctgccgctagcacatgcagtgcaacgtgctcacgtgtggtcgggccacaatgccatccagccgctagaacaggatggctaactgctcctgcggtgcgttctgcaactgcgcatcctgcgcctactcctgatacgtgcgcctacgtctcgtgctaccgcgctgactaatggaaggagctgtctaatgaagatggacacgaagcatctatcactacttttaata

SEQ ID NO: 3927 - DNA, 331 bp, Zea mays
  Clone ID: LIB3061-028-Q1-K1-B4
caacatatacaggacatgatcactgcagacacggctgataatcgagcatgaggttcttatgactacttggacacatctgcaagagctggtactagagccatgtttagcacaatgctcacatgctgctatagctatccttgatgctcagaacctataaactgaggtctcttccgtatgtgaaaaaccattgcttaatgacttcactatcctactagcaatcgcagctgacatattaaccacatcaaccttggtgatacaacaatcgatagccctattacatgcagtaagatttgctgcatcgattgacagatcatcatgacggcacaactac

SEQ ID NO: 3928 - DNA, 447 bp, Zea mays
  Clone ID: LIB3061-028-Q1-K1-B8
agaccattagctttatctactccagagcgcagaagaacccgatcgacaccatgagggtgttgctcgttgccctcgctctcctggctctcgctgcgagcgccacctccacgcatacaagcggcggctgcggctgccagccaccgccgccggttcatctaccgccgccggtgcatctgccacctccggttcacctgccacctccggtgcatctcccaccgccggtccacctgccgccgccggtccacctgccaccgccggtccatgtgccgccgccggttcatctgccgtcgccaccatgccactaccctactcaaccgccccggcctcagcctcatccccagccacacccatgcccgtgccaacagccgcatccaagcccgtgccagctgcagggaacctgcggcgttggcagcaccccgatcctgggccagtgcgtcgagtttctga

SEQ ID NO: 3929 - DNA, 301 bp, Zea mays
  Clone ID: LIB3061-028-Q1-K1-A11
tcggcgccgccgcgctgctgcaagcgccagttcgacggcgtgcgaatagtacactctaacgccgtcatggggcggatgcacaggcccgggaagggtattttggccttagggcctgccggacaaaaggacgcctcctacctggctgaagaccgccgcttcgaacttgaagaggatatccccaaaggaacccaaaaaggcccagatgccgggacatatgggggtcttgctccgagaccatcacggtttcccccttgtaaagagtgcaaccgagagcaaaattctccgaatcctaagggcccat

SEQ ID NO: 3930 - DNA, 245 bp, Zea mays
  Clone ID: LIB3061-009-Q1-K1-C1
gtcacgcgttcgtccacacgtccgcccacgcttgccgcgccgactacatgcccatgggcgagcacgatcataacgccagcccttacttcactgcttccgccgctgccgacttcggaccatgatccactgctgctatagctcccgtcgttgccagatacccgtttaccagcctgattcaagatgaggacaacctcatccttgaactcttcctgctccagcaagcaatcgcatacatcatgctgacc

SEQ ID NO: 3931 - DNA, 366 bp, Zea mays
  unsure (1)..(366): unsure at all n locations; Clone ID: LIB3061-009-Q1-K1-C10
gcctgggcaacagtggtttgctcatgctctccttgaaggcgaagcatatgaaccgcctggttacagacaaccttttgaaaagggagtggcagaaggttcctgattgcatgctaccatggagtcgaaaaaggcaatggataacatgtggcacagcatttgatccggtcccctgcgccttggtctgacatggaattttaccttctttgtctgagcactataatattttagtcctttcatatcattggcctatctntagatctttctatgttgntgtgacaagttctgcgaaaacgcattacttgtgtttgctttgtataacgccgncgaaacaatcgaaacggttcctttatcacctgctgntctgtt

SEQ ID NO: 3932 - DNA, 365 bp, Zea mays
  Clone ID: LIB3061-009-Q1-K1-C2
accaactagcaacatacatagtgaagtacactagcaacatcttagcaccaatgggaggcaagatttttgccctccttgccctccttgctctttcagcaagcgctgctacctcgacttttattccacaatgctcacaacaatacctctctccggtgacagccgcgggatttcaatacccaactatacaatcctacatggtacaagaggccatccaagcaagcatcttacggtcattagcattaaccctccaacaaccatatgctctattgcaacagccatccttagtgcatctgtatctccaaagaatcgcggcacaacaactacaacaacagttgctaccaacaatcaatcaagtagttgcagcg

SEQ ID NO: 3933 - DNA, 343 bp, Zea mays
  Clone ID: LIB3061-009-Q1-K1-C4
catacatagtgaagtacactagcaacatcttagcaccaatggcagccaagatttttgcgctgcttgccctccttgctctttcagcaagtgttgctaccgcgactattattccacaatgctcacaacaatacctctctccagtgatagccgcgagatttgaatacccatctatacaatcctacaggctacaagaggccatcacagcaagcatcttacggtcgttagcattgaccgtccaacaaccatatgccctattgcaacaaccatccttagtgaatctgtatctccaaagaatcacagcacaacaactacaacaacggttgcttccaacaattaatcaagt

SEQ ID NO: 3934 - DNA, 361 bp, Zea mays
  Clone ID: LIB3061-009-Q1-K1-C5
cagctagcaacatagaaagcacaatagtgtaccaacaatggcagccaaaatatgttagttccttatgctccttggtctttctgcaagtgctgctaccgcaaccattttcccacaatgctcacaagctcctatagcttcctttcttcccccatacctctcaccagcggtgtcttcagtatgtgaaaacccaattcttcaaccctacaggatccaacaggcaatcgcagcaggcatcttacctttatcacccttgttcctccaacaaccgtcagccctattacagcagttacctttggtgcatttgttggcacaaaacatcaaagcacaacaactacaacaacttgtgctaagaaaccttgct

SEQ ID NO: 3935 - DNA, 259 bp, Zea mays
  Clone ID: LIB3061-009-Q1-K1-C6
gcccgtgccagcagttcggatcctgcggcgtcggcagcgtcggcagcccgtgggtgggccagtgcgtcgagttcctgaggcaccagtgcagcccggcggcgacgccctacggctcgccacagtgccaggcgctgcagcagcagtgctgccaccagatcaggcaggtggagccgctgcaccggtaccaggcgacatacggtgtggtcctgcagtccttcctgcagcagcagtcgcaaggcgagctcgccgagctgatggc

SEQ ID NO: 3936 - DNA, 372 bp, Zea mays
  Clone ID: LIB3061-009-Q1-K1-C7
ccgagttatttatgtaattatgtacctcatattgaaaattgagctaaaaaaggcatgggagcatgttatccaatcccattctgtttgatttgttatatgatgcaaaatttaaattcgtccgcaattgtgacaccctcatcagttccttttttttctcgaaagcgcaagagagctgcgcgaaaatatattaagaaggagataaaggtccaaaaggaccccaagatacatggtacaaaaaaggctgccctacgaccctcatcagttccttgattgcacagatcaattagtgtttgcatcttacgccattgtgaatcttggttattcatattatatcctgtcatgcaaaaatttaatatcaatttgttcaaatgt

SEQ ID NO: 3937 - DNA, 356 bp, Zea mays
  Clone ID: LIB3061-009-Q1-K1-C8
cccacgcgtccgagaaaatgcacttggtggtatctacggtgttctgaaccaggggagaggtcatgtctttgaggagatgcagaggccgggtaccccgctctacaacatcaaggctttcctccctgtcatcgagtcctttggtttctccagccaactgagggccgcaacctctggtcaggcgttcccccagtgtgtctttgaccattgggacatgatgggctcagatcctttggaggccggcttccaggctgctcagctggtgctggatatccgcaagatgaacggtctcaaggaacagaagacctccctttctgagttcgaagacaagctctaaaatttttggctgctggtgatac

SEQ ID NO: 3938 - DNA, 413 bp, Zea mays
  Clone ID: LIB3061-009-Q1-K1-C9
tgcttcttatttgcaacaacaacaactaccattcatccagctacctgctgcctaccccgagcaatggcttccattcaaccaactggcagcattgaactctcctgcttatttacagcagcaacaactactaccattcagccagctagctggtgtgagccctgctaccttcttgatacaaccacagttgttgccgttctaccagcacgctgcgcctaacgctggcaccctcttacaactgcaacaattgctgccattcaaccaacttgctttgacaaacccagcagcgttctaccaacaacccatcattggtggtgccctcttttagatttcttatgagttatagttcaataataaagttttttgtctgatgtttgtggcttcccagaaataagaaagtacatttctagattctt

SEQ ID NO: 3939 - DNA, 433 bp, Zea mays
  Clone ID: LIB3061-009-Q1-K1-D1
tgcgattttgatcttgcagccacctttttttgttctgttgtgtatctagtagttgggggagatatgcagtttgcacttgcattggacacgaactcaggtcctcaccagataagatcttgtgagggtgatgggattgacaggttggaaaaattaagtattgggggcagaaagcaggagaaagctttgagaaataggtgctttggtggtagagttgctgcaactacacaatgtattcttacctcagatgcttgtcctgaaactcttcattctcaaacacagtcctctaggaaaaattatgctgatgcaaaccgtgtatctgctatcattttgggcggaggcactggatctcagctctttcctctgacaagcacaagagctacgcctgctgtacctgttggaggatgttacaggcttattgatatccctatgagta

SEQ ID NO: 3940 - DNA, 379 bp, Zea mays
  Clone ID: LIB3061-009-Q1-K1-D10
caacatagaaagcacaatagtgtaccaacaatggcagccaaaatattttgcttccttaggctccttggtctttctgcaagtgctgctaccgcaaccattttcccacaatgctcacaagctcctatagcttcctttcttcccccatacctctcaccagcggtgtcttcagtatgtgaaaacccaattcttcaaccctacaggatccaacaggcaatcgcagcaggcatcttacctttatcacccttgttcctccaacaaccgtcagccctattacagcagttacctttggtgcatttgttggcacaaaacatcaaagcacaacaactacaacaacttgtgctaagaaaccttgctgcctactctcagcaacaagcagttc

SEQ ID NO: 3941 - DNA, 432 bp, Zea mays
  Clone ID: LIB3061-009-Q1-K1-D11
attgagaccaactagcaacatagaaagcacaatagtgtaccaacaatggcagccaaaagattttgcctccttatgctccttggtctttctgcaagtgctgctacggcgaccattttcccgcaatgctcgcaagctcctatagcttcccttcttcccccgtacctctcaccagcggtgtcttcggtatgtgaaaacccaattcttcaaccctacaggatccaacaggcaatcgcagctggcatcttacctttatcacccttgttcctccaacaatcatcagccctattacaacagttacctttggtgcatttattggcacaaaacatcaaggcacaacaactacaacaacttgtgctagcaaaccttgctgcctactctcagcaacagcagtttcttccattcaaccaactaggttcattgaactctgcttct

SEQ ID NO: 3942 - DNA, 324 bp, Zea mays
  Clone ID: LIB3061-009-Q1-K1-D12
gcaagctgtggaaaacattgcttctttcttgcgacaacaacaattgttgccattttacgcacaggttgtgggaaacattaatgccttcttgcaacagcaacaattgctgccattctacccacataatgtggcaaacattgttgccttcttacaacaacaacaattgctgccatttagccaacatgctttgacgaatcctaccaccttattgcaatcgcccaccattggtggtgccatcttctagattttttatgatttatactgtaataataaagttctcatgctgatatgtgcgacctctcagtaataaagtattatagatct

SEQ ID NO: 3943 - DNA, 422 bp, Zea mays
  Clone ID: LIB3061-009-Q1-K1-D2
ggcggcatgcaatgaattgccagacaaatggatcagaaaataatgcagccagcaatggtattagtgccaacgttgctaatgggtcaaagacaggagaaaacagcgacgaggaaagtgatgcccaaagctttggtagcaagagggatactgaaattcatagtgttgaggcggtacaagatattcgtagagatgaagtggctggctcatccaaaaataacgaactacaaaataagtcttatgatggagtaaacacaaaagtggatgtgtcaaaatataccaatggtgctccaagtggaagtgagaagaatgtgcggtccaaatgccttaacggtattacttctgcaaaggtggctgagcaaattatggataatgccttgaggatcacggatgcaagttcacgccgtccaacaaatcttggcaat

SEQ ID NO: 3944 - DNA, 262 bp, Zea mays
  Clone ID: LIB3061-009-Q1-K1-D3
tctgcacaaactcatacgacaaccattaccacgaaatgctcgcaaactcctatagcttccctacttacaccgtacctctcaccatcgatgccttccatattataaaacccaattattcaaccctacaagatccaactggcaatctcagctatcatcttacctatatcaccctcgctcctgcaacaatcatcaaccatactacatcagctacctttggtacatatattaacacacaacattaaggcacaaccactaccacaac

SEQ ID NO: 3945 - DNA, 388 bp, Zea mays
  Clone ID: LIB3061-009-Q1-K1-B9
ggagtattggactcacccgggcaagcatcgttatgactggagaggggtggcgcctcgaggcaagtacattgccaatttgctgaaggatctggatgtggctatgaagaaatcaactgcaaggtggaagattgtggttgggcatcacaccatgaggagtgtgagtgagcacggggacaccgaggagcttctggaattactacttccagtcctcaaggacaatggcgtcgacttctacatcaatggacacgatcactgcctggagcacattagcagcagagacagtccactccagtatttcacgagcggaggcggttccaaggcatggagaggagtcttccatccaaacaaggacaagctccggttcttctacgatgggcaaaggttcatg

SEQ ID NO: 3946 - DNA, 420 bp, Zea mays
  Clone ID: LIB3061-009-Q1-K1-A3
cccctttgcaagtatagtctctctgctaagcgaagcgaagcttcaagctagtctcgggggcgctagaagacgatgggcaaggacgacgtgatcgagagcggcgctggcggcggcgagttcgctgccaaggactacacggaccctcccccggcgccgctgatcgacgcggcggagctggggtcctggtcgctgtaccgcgccgtgatcgccgagttcatcgccacgctgctgttcctgtacatcacggtggccaccgtgatcgggtacaagcaccagacggacgcgtcggcgtcgggcgccgacgcggcgtgcggcggcgtgggcgtgctgggcatcgcctgtgccttcggcggcatgatcttcgtcctcgtctactgcaccgccggcatctcggggggccacatcaaccacgccgtcacc

SEQ ID NO: 3947 - DNA, 438 bp, Zea mays
  Clone ID: LIB3061-009-Q1-K1-A4
aacaatggctaccaagatattatccctctttgcgcttcttgccctttttgtgagcgcggcagatgcgttcattattccacaatgctcacttgctcctagtgccattattccacagttcctccctccagttacttcaatgggcttcgaacacccagctgtgcaagcctacaggctacaacaagcgcttgcggcgagcgtcttacaacaaccaattgcccaattacaacaacaatccttggcacatctaaccatacaaaccatcgcaacgcaacagcaacaacaatttctaccagcactgagccaactagctgtggtgaaccctgtcgcctacttgcaacagcagttgcttgcatccaacccacttgctctggcaaacatagttgcataccaacaacaacaacaattgcaacagtttctaccagcgctcagtcaactagc

SEQ ID NO: 3948 - DNA, 432 bp, Zea mays
  unsure (1)..(432): unsure at all n locations; Clone ID: LIB3061-009-Q1-K1-A5
gcacaatagtgtaccaacaatggcagccaaaatattttgcttccttatgctggttgggctttctgcaagtgttgctaccgcaaccattttcccacaatgctcacaagctcctatagcttcccttcttcccccatacctctcaccagcggtgtcttcaatgtgcgaaaccccaattgttcaaccctacaggatccaacaggcaatcgcaacaggcatcttaccattatcacccttgcttctccaacaaccgtcagccctattacagcagttacctttggtccatttggtggcacagaacatcanggcacaacaactacaacaacttgtgctagcaaaccttgctgcatactctcagcaacatcagtttcttccattcaaccaactggctgcattgaactctgctgcttatttgcaacaacaattacccattca

SEQ ID NO: 3949 - DNA, 430 bp, Zea mays
  unsure (1)..(430): unsure at all n locations; Clone ID: LIB3061-009-Q1-K1-A7
atttgagcattcagaaacacaccaagcgaagcgcactagcaacgacctaagggcagtggctaccaagatattagccctccttgcgcttcttgccctttttgtgagcgcaacaaatgcgttcattatttcacaatgctcacttgctcctagtgccattattccacagttcctgccaccagttactttaatgggcttcgaacacctagctgtgctagccaacatgcaacaacaagcgcttgcggcgagcgtcttacaacaacccattgcccaattgcaacaacaatccttgccacatctaacaatacaagccatcacaacgcaacatcaacaacagttgctaccagcactgagccacctagccatggtgaaccctgacgnctacttgcaagagcagctgcttgcatccaacccacttgctctggcgaacgta

SEQ ID NO: 3950 - DNA, 276 bp, Zea mays
  Clone ID: LIB3061-009-Q1-K1-A8
gccgtccatgaggaaattcttgctggctgggggcttcagcaaggggcagcccgactgcgccgagaacatcttcaaagggatcgacgcccggttcctgagcgaagccctgggcgtcagcatgcacgtcgccgagaagctgcagagccggcgtgaccagcgaggcgagatcgtccgcgtggagccggagcacggctttcaccagctgaatccgtcgccgtcgtcgtcgtcgttttcgttcccatcgtcacaaggccagtaccaaacgtgccagcgcga

SEQ ID NO: 3951 - DNA, 422 bp, Zea mays
  Clone ID: LIB3061-009-Q1-K1-A9
ctcgtgctacctctgatcaaccaagtagctctggcaaacctttctccctactctcagcgccctcttacaactgcaacaattgctgccattcaaccaacttgctttgacaaacccaacagtgttctaccaacaacccatcattggtggtgccctcttttagattgcttatgagttatagttcaataatgaagttttttggatgatgtttgtggcgtcccagaaataagaaagtacatttctagattcttaaaaaaaaaaaaaaaaaaaaaaaaaaaaaaaaaaaaaaaaaaaaaaaaaaaaaaataaaaaaaaaaaaaaaaaaaaaaaaacaaaaaaaaaaaaaaaaaaaaaaaaaaaaaaaatattcactaaataaaaaaactaaacaaaaatttttaaaaaaaaaaaaaggggcccccttt

SEQ ID NO: 3952 - DNA, 385 bp, Zea mays
  unsure (1)..(385): unsure at all n locations; Clone ID: LIB3061-009-Q1-K1-B1
cgcgacggcacggtgtcgctggcgtccaacacgggggcgctgccgtcgcccttcgcgggctgcgcgggcctgctgcagagcttctcggaccgggggctgaacctgacggacctcgtggcgctgtcgggggcgcacaccatcggcgtggcaagctgctccagcgtcaccccgcgcctgtaccaggggaacgccagcagcgtggacccgctgctggactcggcctacgcgcggacgctcatgtcgtcgtgccccaacccgtcgccggcgtcggccaccgtggcgctggacggcggcacgccgttccggttcgacagcgggtactacaccagggtgcagcagaggcagggcacgctggcctncgacgccgcgctggcgcagaacgccg

SEQ ID NO: 3953 - DNA, 326 bp, Zea mays
  Clone ID: LIB3061-009-Q1-K1-B10
ggagcttgatttcgacgagctggatattgagaccctatgggagctcgatcgatttgtggtcaatgggaggaaagctctaaagaagagccagcggaattctacgatgaatggtgatgctgctgtgatgaatgcagatgccatcgatgtgacaattgttccggatgatgatgatgacagggtcgaggttgctgtcaatccatctgtggtggttgaaattggagagtcggagactgacgttccagagaagattgaagtggaggctgagatgggtgacgagtatgtggatatcggtgatgagatgccgacgatgaattaccagtcggtgg

SEQ ID NO: 3954 - DNA, 409 bp, Zea mays
  Clone ID: LIB3061-009-Q1-K1-B11
gcaacatagaaagtggaatacagtagctaaaatagagcaacaatggcggccaagatatgttccatccttatgctccttgctctttctgcatgtgttgctaacgcgaccatttttcctcaatactcacaagctcctatagctgcccttcttcccccataccttccatcaatgaccgctttagtatgtgaaaacccagcccttcaaccctacaggatccagcaagcaatcgcaacaagcaacttacctttatcacacctgttctttcaacaatcgccagccctatctttggtgcagtcattggtacaaaccatcagggcagaacagttgcagcaactcgtgctaccagtgatcagccaagtagctctggcaaacctttccccctactctcagcaacaacaatttctttcat

SEQ ID NO: 3955 - DNA, 290 bp, Zea mays
  Clone ID: LIB3061-009-Q1-K1-B12
aaacacaccaagcgaagcgcactagcaacgacctaacaacaatggctaccaagatattggccctcgttgcgcttcttgccctttttgtgagcgcaacaaatgcgttcattattccacaatgctcacttgctcctagtgccattattccacagttcctcccaccagttacttcaatgggcttcgaacacctagctgtgcaagccaacatgcaacaacaagcgcttgcggcgagcgtcttacaacaaccaattgcccaattgcaacaacaatccttgccacatctaacaata

SEQ ID NO: 3956 - DNA, 342 bp, Zea mays
  Clone ID: LIB3061-009-Q1-K1-B2
gcctcagcctcatccccagccacacccatgcccgtgccaacagccgcatccaagccggtgccagctgcagggaacctgcggcgttggcagcaccccgatcctgggccagtgcgtcgagttcctgaggcatcagtgcagcccgacggcgacgccctactgctcgcctcagtgccagtcgttgcggcagcagtgttgccagcagctcaggcaggtggagccgcagcaccggtaccaggcgatcttcggcttggtcctccagtccatcctgcagcagcagccgcaaagcggccaggtcgcggggctgttggcggcgcagatagcgcagcaactgacggcgatgtg

SEQ ID NO: 3957 - DNA, 412 bp, Zea mays
  Clone ID: LIB3061-009-Q1-K1-B3
gaaaacccaattcttcaaccctacaggatccaacaggcaatcgcagctggcatcttggcttgatcacccttgttcctccaacaatcatcagccctattacaacagttacctttggtgcatttattggcacacaacatcagggcacaacaactacaacaacttgtgctagcaaaccttgctgcctactctcagcaacagcagtttcttccattcaaccaactaggttcattgaactctgcttcttatttgcaacaacaacaactaccattcagccagctacctgctgcctacccccagcaatttcttgcattcaaccaactagcagcattgaactctgctgcttatttacagcagctgcatactactaccattcagacacttagctcgtgtgagcgctgatagcttcttgaca

SEQ ID NO: 3958 - DNA, 304 bp, Zea mays
  Clone ID: LIB3061-009-Q1-K1-B5
cccagctcttcaaccatataggcttcaacaagcaatcgcagcaagcaacatacgttggtcgcccttgttgtttcaacaatcaccagccctatctttggtgcagtcattggtacaaaccatcagggcacaacagctgcagcaactcgtgctacctgtgatcaaccaagtagctctggcaaacctttctccctactctcagcaacaacaatttcttccattcaaccaactgtgtacactgaaccctgctgcttatttgcagcaacaactattaccatttagccagctagctacatgctactctcag

SEQ ID NO: 3959 - DNA, 410 bp, Zea mays
  Clone ID: LIB3061-009-Q1-K1-B6
cggacgcgtgggtggcgcccgcaccggcatcgctctccgcgcccaacgccctgtgcgtgcccgcgcctgctagagtcacctccgggaggtggaacaggagcctgtctgtctccgccgctgcgcggtccgtgtcccgggtggtgtctgtcgcgtccgcggcagcggtcacggcgcagaggaggctggtcgccgcggcagcggccacggagatggcgcccgcggcgagcggggaggatgggagcaagcccttcgtggaggagatgcgggcggtcgcgatgaagctgcacaccaaggaccatgcccgcgagggggagaaggagcctcaggcgcccaccgtcgccaagtgggagccctccgtcgagggctacctccgattcctcgtcgacagcaagctcgtcttccagacgctc

SEQ ID NO: 3960 - DNA, 414 bp, Zea mays
  Clone ID: LIB3061-009-Q1-K1-B7
ccaacaatcacaaggccatgtgcaacaacacgaacagagccatgagcaacacggagggcagagccatgagcaacaacatcaacaacaattccagggtcatgacaagcagcaacaaccacaacagcctcagcaatatcagcagggccaggaaaaatcacaacagcaacaatgtcattgccaggagcagcaacagactacaaggtgcagctataactactatagcagtagctcaaatctaaaaaattgtcatgaattcctaaggcagcagtgcagccctttggtaatgccttttctccaatcacgtttgatacaaccaagtagctgccaggtattgcatcaacaatgctgtcatgatcttaggcagattgagccacaatacattcaccaagcaatctacaacatggttcaatccat

SEQ ID NO: 3961 - DNA, 355 bp, Zea mays
  Clone ID: LIB3061-009-Q1-K1-B8
aaatcctcggcttcatcaagggctacaagcgcacctttaatctcgcttgcatggaccgcagaggcacaccggagcatccggcgaggacctgcacgcttgaaaccgacgacgaggccatatgctggggaattgcatattgtgtcaagggtggtccagaaaaagagctaaaagcaatgcagtacttggagagaagagagtgtgagtacgaccagaagatatccattgatttctacaaggaaggagatcccttgaaaccagctgtgacaagccgtctagtggtcgtttccattcaaaatccaattgggaccaagtcctatcttggccttgttcctttgcaggatatggcaaggcaaat

SEQ ID NO: 3962 - DNA, 435 bp, Zea mays
  unsure (1)..(435): unsure at all n locations; Clone ID: LIB3061-009-Q1-K1-A2
gtcagcctagcaattagctcatcgactccagattggagaactcgacaccatgaaggtgctgatcgttgcccttgctctcctggcgctcgctgcgagcgccgcctccagtacaagcggcggctgtggctgccagacaccaccgtttcatctaccgcctccgttctatatgccgcctccgttctatctgccgccgcagcagcagccgcagccatggcaataccccactcaaccaccgcagctaagcccgtgccagcagttcggatcctgcggcgtcggcagcgtcggcagcccgttcctgggccaatgcgtcgagttcctgaggcaccagtgcagcccggcggcgacgccctacggctcgccacagtgccaggcgctgcagcagcagtgctgccaccagatcangcaggtggagccgctgcaccggtaccaggcgac

SEQ ID NO: 3963 - DNA, 460 bp, Zea mays
  Clone ID: LIB3061-008-Q1-K1-G9
taccggtttcggaattaccggctttttttttttgtttaagaagctataaatgtactttctcattttcctgaagccacaaacatcatccaaaaaacttgattattgaagtataactcataagcaatctaaaagagggcaccaccaatgatgggttgttggtagaacgctgttgggtttgtcaaagcaagttggttgaatggcagcaattgttgcagttgtaagagggtgccagcgttaggcgcagcgtgcaggtagaacggcaacaactgttgttgtgtcaagaaggcaacagggctcacatcagctagctggctgaatggtggtagctgttgctgttgtaaataagcagcagagttcaatgctgccagttggttgaatggaagaaattgctgggggtaggcagcagctagctgactgaatggtagttgttgttgcaaataagcagcagagttcaatgcag

SEQ ID NO: 3964 - DNA, 412 bp, Zea mays
  unsure (1)..(412): unsure at all n locations; Clone ID: LIB3061-008-Q1-K1-H1
ggggaaccctgtcgtctacttgcaacatcaggtgtttgcatccaacccacttgctctggcaaacgtagctgcataccaacaacaacaacaattgcaacagtttctgccagcgctcagtcaactagccatggtgaaccctgccgcctacctacaacagcaacaactgctttcatctagccctctcgttgtgggtaatgcacctacatacctgcaacaacaattgctgcaacagattgtaccagctctgactcagctagctgtggcaaaccctgctgcctacttgcaacagctgcttccattcaaccaactgactgtgtcgaactctgctgcgtacctacaacagcgacaacagttacttaatccactagcagtgcctaacccattggtcactgccttnctacagcagcaacaa

SEQ ID NO: 3965 - DNA, 424 bp, Zea mays
  unsure (1)..(424): unsure at all n locations; Clone ID: LIB3061-008-Q1-K1-H10
taggnatttacacacttatcactacgtatctatcaacgacctaacaacaatggcttccaagacattatccctccttgcgcttcttgccctttttgtgagtgcaacaaatgcgttcattattccacaatgctcacttgctccgagtgccattattccacagttcctccctccagttacttcaatgggcttcgaacacccagctgtgcaagcctataggctacaacaagcgcttgcggcgagcgtcttagaacaaccaattgcccaattacaacaacaatccttggcacatctaaccatacaaaccatcgcaacgcagcagcaacaagcactgagccacctagccgtggtgaaccctatcgcctacttgcaacaacagctgctngcatccaacccacttgctttggcaaacgtagctgcataccaa

SEQ ID NO: 3966 - DNA, 413 bp, Zea mays
  Clone ID: LIB3061-008-Q1-K1-H12
gagctcatagataactcttttgcggttttacggacgcgcgtctccggtcccgtccggaatagcactgatccgatccacgccggccggcgatggagctcatcaagtccagggcgaccgtgtgcgcgctcctcctggcgctgctcctgctctcgcactacgacggcgggacgacgacgacgatggtggcggaggcccgggtgtgcatgggcaagagccagcaccactcgttccgctgcatctccgaccgcctctgcagcaacgagtgcgtcaaggaggactgcgggtggaccgccggctactgccaccttcgctactgcaagtgccagaaggcgtgctaagcaaagctcttgaaacacccttggcttgccagaactgaactggggtagtactaagttacacccttggctagctgt

SEQ ID NO: 3967 - DNA, 392 bp, Zea mays
  Clone ID: LIB3061-008-Q1-K1-H2
ggggagctaacggtgccattggccatttcgaccagtacggcaacccagtgggcggcgtcgagcacggcaccggcggcatgaggcacggcacgggaaccaccggcggcatgggccagctgggtgagcacggcggcgctggcatgggtggcgggcagttccagcctgcgagggaggagcacaagaccggcggcatcctgcatcgctccggcagctccagctccagctcgtcggaggacgacggcatgggcggaaggaggaagaagggaatcaaggagaagatcaaagagaagctgcccggaggccacaaggacgaccagcacgccacggcgacgaccggcggcgcctatgggcagcagggacacaccggcagcgcctacgggcagcagggacac

SEQ ID NO: 3968 - DNA, 454 bp, Zea mays
  Clone ID: LIB3061-008-Q1-K1-H3
gaattaccggcattgagaccaactagcaagatagaaagcactttagtgtaccaataatggcttctcaaaatattttgcctccttatgctccttggtctttctgcaagtgctgctacggcgaccattttcccgcaatgctcgcaagctcctatagcttcccttcttcccccgtacctctcaccagcggtgtcttcggtatgtgaaaacccaattcttcaaccctacaggatccaacaggcaatcacagctggcatcttacctttatcacccttgttcctccaacaatcatcagccctattacatcagttacctttggtgcatttattggcacaaaacatcagggcacaacaactacaacaacttgtgctagcaaaccttgctgcctactctcagcaacagcagtttcttccattcaaccaactagctgcattgaactctgcttcttatttgcaac

SEQ ID NO: 3969 - DNA, 372 bp, Zea mays
  Clone ID: LIB3061-008-Q1-K1-H4
atctcgtgggtcaaatgattgccatgtgaaacttaaaattaagtcttttaaggtgcctgaacttcttgttgaaatcccagaaagtgcaactgttggctcactaaagaaaactgttctcgaggcagtgactgcgattctcggaggtggtctacgtgttggtgttcttcaccatggaaagaaagttagagatgataataaaacgttgattcaggctggtattggtcaggaggatatgctggacaaccttggcttttcacttgaacccaactgtacacaaaacccacaagtccaagctcctgaagatatcagtttcctggaaaccattgatactgctgaacccctcgcaaggattgcacctgctgactcgtcttc

SEQ ID NO: 3970 - DNA, 409 bp, Zea mays
  Clone ID: LIB3061-008-Q1-K1-H5
ccgttatcaacaatagagcttcaatggtgaccaagatattttccctccttatgctccttgctctttctacatgtgttgctaacgcgacaattttccctcaatgctcacaagctcctatagcttcccttcttcccccataccttccatcaattatagcttcagtatgtgaaaacccagctcttcaaccatataggcttcaacaagcaatcgcagcaagcaacatacctttatcgcccttgttgtttcaacaatcaccagccctatctttggtgcagtcattggtacaaaccatcagggcacaacagctgcagcaactcgtgctacctgtgatcaaccaagtagctctggcaaacctttctccctactctcagcaacaacaatttcttccattcaaccaactgtctacact

SEQ ID NO: 3971 - DNA, 393 bp, Zea mays
  Clone ID: LIB3061-008-Q1-K1-H6
ctccggcccctggttcccggctcgcctccctcccctccctgtgcgcctcttttcatgcgcgaggagggaccgtggggaccaccaccaccagcaccaccacctccatccgtgcgcctctcgctctcgctggtggtgctcctcctcctccacctgctcccggggcgggcggcctccttttccacctcctgctggtgccagggccgggagggcgtcgcggaggtggcgcgcatggggctcgccggggacgggtcggcggacaccgtccacctcagtaataatgaaaatgggcggttcatttatggagttgcgagttctcctggtaaaagagcatcgatggaggacttctatgaggcaagaatagacgacgttgatggagagaaaattggaatgttc

SEQ ID NO: 3972 - DNA, 432 bp, Zea mays
  Clone ID: LIB3061-008-Q1-K1-H8
acatataaagtagaatcctttagcaacaatagagcaacaatggcgaccaagatattttccctccttatgctccttgctctttctacatgtgttgctaacgcgacaattttccctcaatgctcacaagctcctatagcttcccttcttcccccataccttccatcaattatagcttcagtatgtgaaaacccagctcttcaaccatataggcttcaacaagcaatcgcagcaagcaacatacctttatcgcccttgttgtttcaacaatcaccagccctatctttggtgcagtcattggtacaaaccatcagggcacaacagctgcagcaactcgtgctacctgtgatcaaccaagtagctctggcaaacctttctccctactctcagcaacaacaatttcttccattcaaccaactgtctacactgaaccct

SEQ ID NO: 3973 - DNA, 421 bp, Zea mays
  Clone ID: LIB3061-008-Q1-K1-H9
atgggaggccagagacagcttaggttcttttgtgaacttcaaagacttgtattactacaatggcaataagctgccattcgctgcagcccaaattggtcaggccttcaggaatgagatatctccccgtcaaggccttttgagagtccgtgagtttactttagcggaaattgagcactttgtggacccagaggacaaatcccatccaaagtttggtgatgtttctgatctagagttctggatgtttccgagagaggatcaaatggcaggaaggtcagccacaagacttaaactcggaaattctatatctgagggaactgtgaacaatgagacccttggctacttcattggaagggtctaccttttcttgacacaacttgggattgacaaggatcgtctccgtttccgtcaacacctgccaaat

SEQ ID NO: 3974 - DNA, 373 bp, Zea mays
  Clone ID: LIB3061-009-Q1-K1-A1
gaaccccgctgcttatttgcagcagcaaatactactgccatttagcgagctagctggggcaagtcgtgcttccttcttgacacagcaacagttgctgcctttgtacaagcagtttgcggctaaccccgcaaccctcttacaactacaacaattggtgccctttgtgcaacttgctttgacaaacccagtagactactaccaacaacacatcattggtggtgccctcttttagattgatgattagtcgtcattcaataataaagttacttggatgatgtatgtggccaaccagaaataagaagttacatttccaacaactacaacaacttgtgctagcaaaccttgctgcatactctcagcaacatcagtttct

SEQ ID NO: 3975 - DNA, 450 bp, Zea mays
  Clone ID: LIB3061-009-Q1-K1-A10
accaactagcaacatagaaagcacaatagtgtaccaacaatggcagccaaaatatttgggctccttatgctccttggtctttctgcaagtgctgctacggcgaccattttcccgcaatgctcgcaagctcctatagcttcccttcttcccccgtacctctcaccagcggtgtcttcggtatgtgaaaacccaattcttcaaccctacaggatccaacaggcaatcgcagctggcatcttacctttatcacccttgttcctccaacaatcatcagccctattacaacagttacctttggtgcatttattggcacaaaacatcaaggcacaacaactacaacaacttgtgctagcaaaccttgctgcctactctcagcaacagcagtttcttccattcaaccaactaggttcattgaactctgcttcttatttgcaacaacaacaactacca

SEQ ID NO: 3976 - DNA, 388 bp, Zea mays
  Clone ID: LIB3061-009-Q1-K1-A11
ccaactagcaacatagaaagcacaatagtgtaccaacaatggcagccaaaatattttggctccttatgctccttggtctttctgcaagtgctgctacggcgaccattttcccgcaatgctcgcaagctcctatagcttcccttcttcccccgtacctctcaccagcggtgtcttcggtatgtgaaaacccaattcttcaaccctacaggatccaacaggcaatcgcagctggcatcttacctttatcacccttgttcctccaacaatcatcagccctattacaacagttacctttggtgcatttattggcacaaaacatcagggcacaacaactacaacaacttgtgctagcaaaccttgctgcctactctcagcaacagcagtttct

SEQ ID NO: 3977 - DNA, 425 bp, Zea mays
  Clone ID: LIB3061-009-Q1-K1-A12
caacaacaaagccatgagcagcaacatcatccacaacaacatcatccacaaaaacaacggcatcaagcaccaccacaacatcaccagcagcagcaacaccaacaacaacaagttcacatgcaaccacaaaaacatcagcaacaacaagaagttcatgttcaacaacaacaacaacaaccgcagcaccaacaacaacaacaacaacaacagcaccaacaacaacatcaatgtgaaggccaacaacaacatcaccaacaatcacaaggccatgtgcaacaacacgaacagagccatgagcaaccaccaagacagagccatgagcaacaacatcaacaacaattccaaggtcatgacaagcagcaacaaccacaacagcctcagcaatatcaacagggcccaggaaaatcacaacagcaacaatgtca

SEQ ID NO: 3978 - DNA, 419 bp, Zea mays
  Clone ID: LIB3061-008-Q1-K1-G8
atggctcgcatcgcgattctcgcggcggcgcatgcgaggccggagtcgtcgcaggaggaggaggaggactggaaggaggccgagggggacgtcgccgaagtcgaccgcgccgccaccaatggcgccggcgaggggggcgtgcccacagacaggccgatccgggtctacgccgacggcatctacgacctcttccacttcggccacgccaagtcgctggagcaggccaagaagtcgtttccaaacacatatcttcttgttggatgctgcaatgatgagttgacacataaattcaaaggaagaactgttatgactgaggatgagcgatatgagtcacttcgtcattgcaagtgggttgatgaagtcattccagatgctccatgggtggtgacagaagagttcttggataagcataacattga

SEQ ID NO: 3979 - DNA, 307 bp, Zea mays
  Clone ID: LIB3061-027-Q1-K1-G7
caacaagcaacatagaaagtggaatacagtagcaacaatagagcaacaatggcggccaagatattttccatccttatgctccttgctctttctgcatgtgttgctaacgcgaccatttctcctcaatactcacaagctcctatagctgcccttctttccccataccttccatcaatgaccgcttcagtttgtgaaaacccagcccttcaaccctacaggctccaacaagcaatcgcatacaagcaacttacctttatcacccctgttctttcaacaatcgccagccctatctttggtgccatcattg

SEQ ID NO: 3980 - DNA, 319 bp, Zea mays
  Clone ID: LIB3061-027-Q1-K1-G8
accatttagccagctagctgcagcataccgtgcttccttcttgacacagcaacagttgctgcctttctaccagcagtttgcggctaaccccgcaaccctcttacaactacaacaattgttgccctttgtccaacttgctttgacagaccgagcggcctcctaccaacaacacatcattggtggtgccctcttttagattgcttattagttgtaattcaataataaagttttttggatgatgtatgtggccaaccagaaataagaagttacatttccagattttaaaaagtgcaattaaaggcacaaaacattaagagac

SEQ ID NO: 3981 - DNA, 429 bp, Zea mays
  Clone ID: LIB3061-027-Q1-K1-G9
tgcagcccgacggcgacgccctactgctctcctcagtgccagtcgttgcggcagcagtgttgccagcagctcaggcaggtggagccgcagcaccggtaccaggcgatcttcggcttggtcctccagtccatcctgcagcagcagccgcaaagcggccaggtcgcggggctgttggcggcgcagatagcgcagcaactgacggcgatgtgcggcctgcagcagccgactccatgcccctacgctgctgccggcggtgtcccccactgaagaaactatgtgctgtagtatagccgctggctagctagctagttgagtcatttagcggcgatgattgagtaataatgtgtcacgcatcaccatgggtggcagtgtcagtgtgagcaatgacctgaatgaacaattgaaatgaaaagaaaaaagtattgttcc

SEQ ID NO: 3982 - DNA, 387 bp, Zea mays
  unsure (1)..(387): unsure at all n locations; Clone ID: LIB3061-027-Q1-K1-H1
gtgaagtacactagcaacatcttagctccaatggcagccaagatttttgccatccttgccctccttgctctttcagcaagcgttgctaccgcgactattattccacaatgctcacaacaatacctctctccggtgacagccgcgagatttgaatacccaactatacaatcctacaggctacaagaggccatcgcagcaagcatcttacggtcgttagcattgaccgtccaacaaccatatgccctattgcaacaaccatccttaatgaatctatatctccaaagaatcgcagcacaacaactacaacaacagttgcttccaacaatcaatcaagtagttgcagcgaaccttgctgcttacctncagcaacaacaatttcttccattc

SEQ ID NO: 3983 - DNA, 429 bp, Zea mays
  Clone ID: LIB3061-027-Q1-K1-H10
gcgtcgttcttgccggccgcgcctcacctaggccctctcctcctccagggggatcggatactccacaggctgcgcgatggtgctgtgggtcttcggctacggctccctcatctggaaccccggcttcgacttcgacgacaaaatcctcggcttcatcaagggctacaagcgcacctttaatctcgcttgcattgaccacagaggcacaccggagcatccggcgaggacctgcacgcttgaaaccgacgacgaggccatatgctggggaattgcatattgtgtcaagggtggtccagaaaaagagctaaaagcaatgcagtacttggagagaagagagtgtgagtacgaccagaagatatccattgatttctacaaggaaggagatcccttgaaaccagctgtgacaggcgtcttaatggtcgtttccac

SEQ ID NO: 3984 - DNA, 437 bp, Zea mays
  Clone ID: LIB3061-027-Q1-K1-H11
cggacgcgtggggagcattcagaaacactccaagcgaagctacctagcaacgacttaacaacaatggctaccaagatattagccctccttgcgcttcttgccctttttgtgagcgcaacaaatgcgttcattattccacaatgctcacttgctcctagtgccattataccacagttcctccgaccagttacttcaatgggcttcgaacacctagctgtgcaagcctacaggctacaacaagcgcttgcggcgagcgtcttacaacaaccaattaaccaattgcaacaacaatccttggcacatctaaccatacaaaccatcgcaacacaacagcaacaacagttcctaccagcactgagccaactagatgtggtgaaccctgtcgcctacttgcaacagcaggtgcttgcatccaacccacttgctctggcaaacgt

SEQ ID NO: 3985 - DNA, 441 bp, Zea mays
  Clone ID: LIB3061-027-Q1-K1-H12
gaccaactagcaacatataaagcacaattgtgtaccaacaatggcagccaaaatattttgcctccttatgctccttggtctttctgcaagtgctgctacggcgaccattttcccgcaatgctcgcaagctcctatagcttcccttcttcccccgtacctctcaccagcggtgtcttcggtatgtgaaaacccaattcttcaaccctacaggatccaacaggcaatcacagctggcatcttacctttatcacccttgttcctccaacaatcatcagccctattacatcagttacctttggtgcatttattggcacaaaacatcagggcacaacaactacaacaacttgtgctagcaaaccttgctgcctactctcagcaacagcagtttcttccattcaaccaactagctgcattgaactctgcttcttatttgcaacaaca

SEQ ID NO: 3986 - DNA, 384 bp, Zea mays
  Clone ID: LIB3061-027-Q1-K1-H2
gggctagcgacattcaacgcacaattttgaattaacaatggcagccaaaatatcagggccaggtatgctctttggactatctgcaagagctgctacagcgaccattattacacaatgctcacaagctcctatagctcaacttgttgcgacggacctatcaccatcggtgtctacactctacgaaaacgcaagtcttcaaccctataggaaccaacaggcattcgcagctggcatcttaccgttataacccttgcccatcagcaatcataagacctattacagcaatttacctttggtgcattcattggcacataacatcagggcacaacaactacaacaacttgtgctataaaacctagctgcctactctaagaacaacagatt

SEQ ID NO: 3987 - DNA, 355 bp, Zea mays
  Clone ID: LIB3061-027-Q1-K1-H3
acgcggatcaactggcgctgcaatacatataaaggagttcattgtaatttctcatctatagttagtggtgccataatcagtgctccactggcgttcggcaataatgtcggagagcgagttagcactcattgaaccagaggcgttaaagacttatatctgccttcagtgctatgatggatccattcagcatgtggaggacgaggttgcaatgttctgccccatgatatgtcgtgaaattgagaagaatggcacagggtcgtccaaaaatgatgctattgcgctccctgaatgagttaatccagccagtttgagtgtgattcttgactactgccggattcatcatgttactgggcgc

SEQ ID NO: 3988 - DNA, 280 bp, Zea mays
  Clone ID: LIB3061-027-Q1-K1-H4
cgcccaagacgaaggcgtcgcacattgtggggcgcttactggccgcgtccaagccggccgagtgccggcagatcggtgaccacagtgacctcggctactaatacaccaacgaggcgctcctgcgatccaggtcgatcgcggtcaaagacgaagtgttctgcctggctgaaggggtgctggacaacctgtgtcggatgaggcagcagcactgtctgtcatgctagggcgccaacaaggtgctcctggtaatcgaggcctacaagacgatgcgcgagcgctc

SEQ ID NO: 3989 - DNA, 318 bp, Zea mays
  Clone ID: LIB3061-027-Q1-K1-H5
cttatttatataaccctatttaatctatgaattagaaatagaacttacggggtgggggaacggtttagctcttgaccttttccttcataattaatgataaatacaagataactgtaccgtctattctagtggagaaaacagaaattttagatttacaatttacattacattcaagctaatctaaatttttacatatcactgatgtgtgctattgagcggggtacgaaatagcgaccaatttaaccatttgacgctatttatgcaaaaactttaccaatatgatttcatcttctagtgcgctatgtacatatcaatatt

SEQ ID NO: 3990 - DNA, 214 bp, Zea mays
  Clone ID: LIB3061-027-Q1-K1-H6
cctgacatagagatatgtttgacttatcgattaagccttgcatgtgcggggctggggtactttttactgtcgaaactgtgaatgtcacattgaatcagttatacaacgtcagctggcgcttgcttctcggctaaccgccataactgtccgactgacactttacatacaacacaacttacgcgaagcgctcacatataacacatatgggttgcgc

SEQ ID NO: 3991 - DNA, 416 bp, Zea mays
  Clone ID: LIB3061-027-Q1-K1-H7
ctcgaggccacgcgtcacgcggttcggcgagacacaccaatcgaatttcactatcaacaacctatcaacaatgtctagcaagatgtttatacttccttgcgcttcttgcgctttttgcgagcgcatcaaatgcgtacattattccagaatgctcacttgctgctagttacattattacacagttactgctaccagttacttaaatggccttcgaacactcagctgtgcaagcctatacgctacatcaagcgattgctgcgagcgtcttacaccaaccaattgcccaattgcaacaacaatccttagtacatataacaatacagaccatcgcagcgtaacagcaacaacagttactaccatcactgatccacctagccatggtgaacactgtacgctacttgcaacagcagctgctt

SEQ ID NO: 3992 - DNA, 329 bp, Zea mays
  Clone ID: LIB3061-027-Q1-K1-H8
cggacacgtgggcggactcttggggctgcattgaactctgcttcttatttgcaacgacaacaactaccattcagccagctatctgctgcctacccccagcaatgtcttccattcaaccaactgacagctttgaactctcctgcttatttacaggagcatcaactactaccattcagtcagctagctggtgtgagctctgctaccttcttgacacaaccacaattgttgccgtgctaccagcacgctgcgcctaacgctggcaccctattacaactgccacaattgctgccattcaaccaacttgctttgacagacccaacagcatttta

SEQ ID NO: 3993 - DNA, 437 bp, Zea mays
  Clone ID: LIB3061-027-Q1-K1-H9
gcctcgcgtcgtcgccccacagccacgctagccttctccgatccgcgagcgcagatcgccgaagccaggcggcggagagggagctcgaggcggcggaggaaggcgttcgccacagtcgctgatttccctggggaagagatgggtctctcctttgggaagctgttcagccgcctcttcgccaagaaggagatgaggattctcatggtcgggctcgatgccgcctgtaagaccaccatcctatacaagctcaagctcggcgagatcgtcaccaccatccgcactatcggattcaatgttgaaactgttgagtataagaacattagcttcactgtttgggatgttggtggccaggacaagatcaggcccctgttgaggcactactttcagaacacacagggacttatttttgttgtagacagcaacgactgggaacgtgt

SEQ ID NO: 3994 - DNA, 394 bp, Zea mays
  Clone ID: LIB3061-028-Q1-K1-A1
cagcattcaaaaacacaccaagcgaagcgcactagcaacgacctaacaccaatggctaccaagatattagccctccttgcgcttcttgcccttttagtgagcgcaacaaatgcgttcattattccacagtgctcacttgctcctagtgccagtattccacagttcctcccaccagttacttcaatgggcttcgaacatccagccgtgcaagcctacaggctacaactagcgcttgcggcgagcgccttacaacaaccaattgcccaattgcaacaacaatccttggcacatctaaccctacaaaccattgcaacgcaacaacaacaacaacagtttctgccatcactgagccacctagccgtggtgaaccctgtcacctacttgcaacagcagc

SEQ ID NO: 3995 - DNA, 300 bp, Zea mays
  Clone ID: LIB3061-027-Q1-K1-G5
acgcacaccatctagctggtgtgttcccttctaccttcttgacacaaccacaggggttggcgttctaccagctcgttgcgcctaactgctggcgcctgttatacaactgcatcaactgctgtgattcaaccaactctgtttgacaaattcatcaacgatcgatcaacaacccatcattggtggtgccctattttacattcttatgcgtatagtcataatgagtttgatatgatcttatggctatccagatatagaaagtacatttctaaaaaatattacacagttacattaaaggccttt

SEQ ID NO: 3996 - DNA, 435 bp, Zea mays
  Clone ID: LIB3061-027-Q1-K1-F11
attatgcctttgcttctctcttggttcggttgtgtatattgctgtctctgtcttcgtcatcactgtgtgcctacaatcctgctcacgataatgcagatgggaagttgtgcattgccggaagtcttcttttcgaaggtaaaaaaaaactaactcgacaactgttttgtagcttgaattaataagtgttgcaggtagaatacccaagattaccttcggctcaccttcggcggggatggttgcaatgcaacaacgaatacaaaagcgcaagcttcggagtaacagcatgtgcacatgaggggtgaacaagccaaaaccatgagaggtcaacaagacagctatagaaattgactgcagtatcctaatatatttgctagctcaattgtatgtgcgttcgagtgtacgattgtaattttgacgaagaagctgtaactcacg

SEQ ID NO: 3997 - DNA, 432 bp, Zea mays
  Clone ID: LIB3061-027-Q1-K1-F2
ggccgcccaagaagggttcagctgttcagcgccctcgcaccaggactctgactgctgtccatgatggcatcctggaggatgttgtcttcccagctgagattgtggggaagcgtgtcaggtaccgtctggatggtgccaagatcatcaagatcttcttggacccaaaggagaggaacaacacagaatacaagctggacacctacactacggtctaccgcaggctgtgtgggaaagatgtggtctttgagtaccctatggccgaaaatgcataaatatgacgcccggatatccccattttattttgttgaatctggatgtttctttggggtctcaactagactgctccgtatgtacttcaaaaaccatagttttgatgccaaagttgttgcctaggaatttggtactcgggaatggtagcggacctgaacaatg

SEQ ID NO: 3998 - DNA, 254 bp, Zea mays
  Clone ID: LIB3061-027-Q1-K1-F3
acgcgacgcgtacgattgacaccagcttttcacattaacagcagaatccattaacatcggtagagtatcaatgccgaccgagatattgtgactgcttatgctgcttgctctatctacatgtgctgataacgctacaattctacctttacgctgacaagcttatcaagcattcctttgtgcctcgaacactccaataattaatcgcttaggatgcgaaaagccagctcttcaagcatattagcttaaacaagcaa

SEQ ID NO: 3999 - DNA, 384 bp, Zea mays
  Clone ID: LIB3061-027-Q1-K1-F5
accaagcgaagcacattagcttcaacttaacagcaatggctaccaagatctgatccgtacttgcgctgattgcgctatttgcgagcgcaacacatgcggttattattacataatgctcacttgctacaagttccattattacacagataccgttcaccaggcacttcaatgggcttcgaacacccaactgtgcaagcctataggctacaacaagcaatctctgcaagcgtattacatcaaccaagcttccagttgcagcaacaatccttggtacatcttacagtacaaaccatcgcaacgcatcagcaacaaccattcctaccagcactgaatcacctagccatagcgaaccctgccggctacttgcaacagcagatgcttgca

SEQ ID NO: 4000 - DNA, 409 bp, Zea mays
  Clone ID: LIB3061-027-Q1-K1-F7
gcgacgcgtccgattgagaccagcatttaacatagaaagtagaatccattagcaacggtagagcaacaatggcgaccaagatattttccctccttatgctccttgctctttctacatgtgttgctaacgcgacaattttccctcaatgctcacaagctcctatagcttcccttcttcccccataccttccatcaattatagcttcagtatgtgaaaacccagctcttcaaccatataggcttcaacaagcaatcgcagcaagcaacatacctttatcagccttggtggttcaacaatcaccagccctatctttggtgcagtcattggtacaaaccatcagggcacaacagctgcagcaacttgtgctacctgtgatcaaccaagtagctctggccaaccctttttccct

SEQ ID NO: 4001 - DNA, 421 bp, Zea mays
  Clone ID: LIB3061-027-Q1-K1-F8
gaaacacacctagcgaagctcactatcaacgacctaacaacaatggcttccaagacattatccctccttgcgcttcttgccctttttgtgagtgcaacaaatgcgttcattattccacaatgctcacttgctccgagtgccattattccacagttcctccctccagttacttcaatgggcttcgaacacccagctgtgcaagcctataggctacaacaagcgcttgcggcgagcgtcttagaacaaccaattgcccaattacaacaacaatccttagcacatctaaccatacaaaccatcgcaacgcagcagcaacaagcactgagccacctagccgtggtgaaccctatcgcctacttgcaacaacagctgcttgcatccaacccacttgctttggcaaacgtagctgcataccaacaac

SEQ ID NO: 4002 - DNA, 422 bp, Zea mays
  Clone ID: LIB3061-027-Q1-K1-F9
attcccgggccaattcttgaactcctacaggatccaacgaggctatcgcagctggtttctgacctttatcacccttgttcctccaacgaatcatgagccctattacagcagttacctttggtgcatttattggcacaaaacatcagggcacaacaactacaacaacttgtgctagcaaaccttgctgcctactctcagcatcagcagtttcttccattcaaccaactagctgcattgaactctgcttcttatttgcaacaactacttctaccattcagccagctatctgctggctaccttcagcaattccttccattcaaccaactgacagcattgaactctcctgcttatgtacagcagccacatctactaccattcagccagctagctggtgtgagccctgctaccttcttgacacaacc

SEQ ID NO: 4003 - DNA, 435 bp, Zea mays
  Clone ID: LIB3061-027-Q1-K1-G10
cctacaacaatcatcagccctattacattagttacctttggtgcatttattggcacaaaacatcagggcacaacatctacaacaacttgtgctagcaaaccttgctgcctactctcagcaacagcagtttctttcattcaaccaactagctgcattgaactctgcttcttatttgcaacaacaacaactaccattcagccagctacctgctgcctacccccagcaatttcttccattcaaccaactggcagcattgaactctactgcttatttacagcagcaacaactactaccattcagccagctagctggtgtgagccctgctaccttcttgatacatccacagttgttgccgttctaccagcacgctgcgcctaacgctggcaccctcttacaactgcaacaattgctgccattcaaccaacttgctttgac

SEQ ID NO: 4004 - DNA, 442 bp, Zea mays
  Clone ID: LIB3061-027-Q1-K1-G11
accatataggcttcaacaagcaatcgcagtaagcaacattaccttattggcccttggtggttgcaacaattaaccaacccctatctttgggtgccattcattggtacaaaccaatcaggcacaacagctgcagcaactcgtgctacctgtgatcaaccaagtagctctggcaaacctttctccctactctcagcaacaacaatttcttccattcaaccaactgtctacactgaaccctgctgcttatttgcagcaacaactattaccatttagccagctagctactgcctactctcagcaacaacaacttcttccatttaaccaattggccgcactgaaccccgctgcttatttgcagcagcaaatactactgccatttagcgagctagctgcagcaagtcgtgcttccttcttgacacagcaacagttgctgcctttctac

SEQ ID NO: 4005 - DNA, 427 bp, Zea mays
  Clone ID: LIB3061-027-Q1-K1-G2
ctttggtgcatttattggcacaaaacatcagggcacaacaactacaacaacttgtgctagcaaaccttgctgcctactctcagcaacagcagtttcttccattcaaccaactagctgcattgaactctgcttcttatttgcaacaacaacaactaccattcagccagctacctgttgcctacccccaacaatttcttccattcaaccaactggcagcattgaactctcctgcttatttacagcagcaacaactactaccattcagccagctagctggtgtgagccctgctaccttcttgacacaaccacagttgttgccgttctaccagcacgctgcgcctaacgctggcaccctcttacaactgcaacaattgctgccattcaaccaacttgctttgacaaacctagcagtgttctaccaacaacc

SEQ ID NO: 4006 - DNA, 427 bp, Zea mays
  Clone ID: LIB3061-027-Q1-K1-G3
attgacaccaactagcaacatagaatgcacaatagtgtaccaacaatggcagccaaaatattccgcttccttatgctccttggtctttctgcaagtgttgctaccgcaaccattttcccacaatgctcacaagctcctatagcttcccttcttcccccatacctctcaccagcggtgtcttcaatgtgtgaaaccccaattgttcaaccctacaggatccaacaggcaatcgcaacaggcatcttaccattatcacccttgttcctccaacaaccgtcagccctattacagcagttacctttggtccatttggtggcacagaacatcagggcacaacaactacaacaacttgtgctagcaaaccttgctgcatactctcagcaacatcagtttcttgcattcaaccaactggctgcattgaactctg

SEQ ID NO: 4007 - DNA, 350 bp, Zea mays
  Clone ID: LIB3061-027-Q1-K1-G4
cactagcaacatataaagcacaattttgtaccaacaatggcagccaaaatattttgcctccttatgctccttggtctttctgcaagtgctgctacggcgaccattttcccacaatgctcacaagctcctatagcttcccttcttcccccgtacctctcaccagcggtgtcttcggtatgtgaaaacccaattcttcaaccctataggatccaacaggcaatcgcagctggcatcttacctttatcacccttgatcctccaacaatcatcagccctattacagcagttacctttggtgcatttattggcacaaaacatcagggcacaacaactacaacaccttgggctagc

SEQ ID NO: 4008 - DNA, 438 bp, Zea mays
  Clone ID: LIB3061-027-Q1-K1-F10
gcgcttcttgcccttttagtgagcgcatctaaatgcgttcattattccacagtgctcactggcactaggagcaagtgagcactgtggaataatgaacgcattccacagtctctcccaccagttacttcaatgggcttccaacatccagccgtgcaagcctacacgctacaactagcgcttgctgcgagcgccttacaacaaccaattgcccaattgcaacaacaatccttggcacatctaaccctacaaaccattgcaacgcaacaacaacttcaacagtttctgccatcactgagccacctagccgtggtgaaccctgtcacctacttgcaacagcagctgcttgcatccaacccacttgctctggcgaacgtatctgcataccagcaacaacatcagcttgaacagtttatgccagtgctcagtcaactagccatg

SEQ ID NO: 4009 - DNA, 391 bp, Zea mays
  Clone ID: LIB3061-027-Q1-K1-D7
agtaagcttagcaactagattatggtctacagattggagtactcgacaccgtgaaggtgctgatcgttgcccttgctcttctggcgctcgctgtgagcgccgccttcagtacaagcgtaggctgtggctgccagacaccaccgtttcatctaccgactgcgttctatatgccgcctccgttctatctgccgccgcagcatcagccgcaaccatggcaataccccactcaaccaccgcaactaatcccgtgccagcagttcggatcctgaggcgtcggcagcgtcagcagtccgtacctgggcacaatgcgtcgagcacctgaagcaccaatgcatgctggcaaagacgcgctactgctcgccacagtgccaggcgctgcaacagcagtgct

SEQ ID NO: 4010 - DNA, 290 bp, Zea mays
  Clone ID: LIB3061-027-Q1-K1-D8
gcggggggaggcatcgtcctctccgtgctttctcagaggtgggttggcttctcctggcgcaccggttcgtgttcaggttctggttcctgggcgagagggaagagatggcggcatgcgacgtttagtaccgttgctctcttggcggcctcgtctgggccaccgacgaccactcgctcaacaactccttcagcacctacggcgaggtcctcgagtcgaagatcatcctgcatcgggagacgcagaggtcccgcggctactgcttacgcaccttctccacagacgacgcgatg

SEQ ID NO: 4011 - DNA, 380 bp, Zea mays
  Clone ID: LIB3061-027-Q1-K1-E1
aactactaccattcagccagctagcttatgtgagccctgctgccttcttgacacaacaacaggtgctgccggtctacctgcacgctatgcctaacgctggcaccctcttacaactgcaacaattgctgccattcaaccaactcgctttgacaaacccaacagtgttctaccaacaacccatcattggtggcgccctcttttagattgcttatgagttatagttcaataatgaagttctttggatgatgttcgtggcgtcccagaaataacaaagttaaataaaagcgtcagcataccgtacctgggtcaatgcgtcgagttcctgaagcaccaatgcaacccggcggcgacaccctacggctcgccacaatgccaggcgc

SEQ ID NO: 4012 - DNA, 420 bp, Zea mays
  Clone ID: LIB3061-027-Q1-K1-E10
acgagttactaccagcactgatccacgtagttttggtgaaccctgacgtctacttgcaagagcagctgcttgcatccaacccacttgatgtggcgaacgtagctgcaaaccagctacaacaacagctacaacagtttcagccaacgctcagtcaactagccatggtgaaccctgacgtctacgtacaacaacaacaactgctttcatctaacccgctcgctgcgggcaatgcacactacatacctgcaacaacaattgctgcaacagattgtaccagctctgactcaactagctggggcaaacccatgtgcctacttgcaacagctgcttacatgcgaccaactgactctggcgaactctgctgacgacctacaacagcgacaacagttacttaatccattgttagtggctaacccattg

SEQ ID NO: 4013 - DNA, 437 bp, Zea mays
  Clone ID: LIB3061-027-Q1-K1-E11
ggcgaccaagatattttccctccttatgctccttgctctttctgcatgtgttgctaacgcgacaattttccctcaatgctcacaagctcctatagcttcccttcttcccccataccttccatcaatgatagcttcagtatgtgaaaacccagctcttcagccctataggctccaacaagcaatcgcagcaagcaacatacctttatcacccttgttgtttcaacaatcgccagccctatctttggtgcagtcattggtacaaaccatcagggcacagcagctgcagcaactcgtgctacctgtgatcaaccaagtagctctggcaaacctttctccctactctcagcaacaacaatttcttccattcaaccaactgtctacactgaaccctgctgcttatttgcagcaacaactattaccattcagccagcaaatac

SEQ ID NO: 4014 - DNA, 353 bp, Zea mays
  Clone ID: LIB3061-027-Q1-K1-E12
cggacgcgtgggccctgataagattgcctttgttcccatttctggttctgagggtgacaacatgattgagaggtccaccaaccttgactggtacaaaggcccaaccctgcttgaggctcttgaccagatcaccgagcccaagaggccttcagacaagcccctgcgtctgcccctccaggatgtgtacaagattggtggtattggaactgtaccggttggtcgtgtggagactggtgtcatcaaacctggtatggttgtcacctttggtccaactgggctgactaccgaggtgaactctggtgagatgcaccacgaggcgcttcacgaagcttttccgggtgacaatgttggct

SEQ ID NO: 4015 - DNA, 386 bp, Zea mays
  Clone ID: LIB3061-027-Q1-K1-E2
cggacgcgtgggccagcaagcaacatataaagtagaatccattagcaacaatagagcaacaatggcgaccaagatattttccctccttatgctccttgctctttctacatgtgttgctaacgcgacaattttccctcaatgctcacaagctcctatagcttcccttcttcccccataccttccatcaattatagcttcagtatgtgaaaacccagctcttcaaccatataggcttcaacaagcaatcgcagcaagcaacatacctttatcgcccttgttgtttcaacaatcaccagccctatctttggtgcagtcattggtacaaaccatcagggcacaacagctgcagcaactcgtgctacctgtgatcaaccaagtagctctgg

SEQ ID NO: 4016 - DNA, 357 bp, Zea mays
  Clone ID: LIB3061-027-Q1-K1-E3
cgcgagcgccgccctttttttttttttttttttttttttttttttttttttttttttttttttttttttttttttttttttttttttttttttttttttttttttttttttttttttttttttttttttttttttttttttttttttttttaaaaaaaaaaaaaaatgcaaaaaaaaaaaaatatttataaaaaaaataaaaaaaattataaatattgggccataaaaaaattttttaggattagttggaaaaaattttaaaaaaaaaaaatttatattttaacaaaggttaaaaatataaaagggaaaataaatgtaaaaaaaaatgggggtatttaaccaacagaaattttaaat

SEQ ID NO: 4017 - DNA, 415 bp, Zea mays
  Clone ID: LIB3061-027-Q1-K1-E4
cgcgcgcgtgggccagcaagcaacatatcaagtagaatccattatcaacaatagagcgaacagtggcgaccaagatattttccctccttatgctccttgctctttctacatgtgttgctaacgcgacaattttccctcaatgctcacaagctcctatagcttcccttcttcccccataccttccatcaattatagcttcagtatgtgaaaacccagctcttcaaccatataggcttcaacaagcaatcgcagcaagcaacatacctttatcgcccttgttggttcaacaatcaccagccctatctttggtgcagtcattggtacaaaccatcagggcacaacagctgcagcaactcgtgctacctgtgatcaaccaagtgctctggcaaacctttttcctactcttagcaacaac

SEQ ID NO: 4018 - DNA, 438 bp, Zea mays
  unsure (1)..(438): unsure at all n locations; Clone ID: LIB3061-027-Q1-K1-E5
ggggttcgagccacgcgtcacgcgctagcgccagctcttcaaccatatatttgnctatacaagcaatcgcagcaagcaacatgacctgtgtcgcccttgttgtttcaacaatcaccagccctatctttggtgcagtcattggtacaaaccatcagggcacaacagctgcagcaactcgtgctacctgtgatcaaccaagtagctctggcaaacctttctccctactctaagcaactacaatgtcttccattcaaccaactgtctacactgaactctgctgcttatttgcagcaacaactatgtccatttagccagctagctactgcctactctcagcaacaacaacttcttccatttaaccaattggccgcactgaacctcgctgcttatttgcagcagcaaatactactgtcatttagcgagctagctgcagcaagt

SEQ ID NO: 4019 - DNA, 423 bp, Zea mays
  Clone ID: LIB3061-027-Q1-K1-E6
aactagcaacatagaaagcataatagtgtaccaacaatggcagccaaaatattttgcgctccttatgctccttggtctttctgcaagtgctgctacggcgaccattttcccgcaatgctcgcaagctcctatagcttcccttcttcccccgtacctttcaccagcggtgtcttcggtatgtgaaaacccaattcttcaaccctacaggatccaacaggcaatcgcagctggcatcttacctttatcacccttgttcctccaacaatcatcagccctattacaacagttacctttggtgcatttattggcacaaaacatcagggcacaacaactacaacaacttgtgctagcaaacctagctgcctactctcagcaacagcaggtacatccatttaaccaactatgttcattgaactttgcttc

SEQ ID NO: 4020 - DNA, 415 bp, Zea mays
  Clone ID: LIB3061-027-Q1-K1-E8
gattgggctaaaagtctgcttgcggtgtagcaacgataatgcacttgagaactctgatggagcaggagctcgtctggccaaggtgaacacagatgccgtttttgacgcttcatctgagaccgtagttctgtaccctgaaaatggagggaacttgcactgctttacggcgctgaccccttgtgccgtgctggatgtgatgggccctccctacaaccgtgctcaaggaagggattgcgcgtattacagcgaatcgccctactcgtgtgctggagatgcacaatattcttggctcaaagaggttcacagcacatttgagatggaaggcataaagatggagcccaacttcatcgtctaataattaagcaggcatggcatgacatgacatggcatcgtaatgctgctagtttcatgtaga

SEQ ID NO: 4021 - DNA, 473 bp, Zea mays
  Clone ID: LIB3061-027-Q1-K1-E9
atcgccccggattcccgggtggacgtcagcctacaattagctcatcgactccagattggagaactcgacaccatgaaggtgctgatcgttgcccttgctctcctggcgctcgctgcgagcgccgcctccagtacaagcggcggctgtggctgccagacaccaccgtttcatctaccgcctccgttctatatgccgcctccgttctatctgccgccgcagcagcagccgcagccatggcaataccccactcaaccaccgcagctaagcccgtgccagcagttcggatcctgcggcgtcggcagcgtcggcagcccgttcctgggccagtgcgtcgagttcctgaggcaccagtgcagcccggcggcgacgccctacggctcgccacagtgccaggcgctgcagcagcagtgctgccaccagatcaggcaggtggagccgctgcaccggtaccaggcgacatacggtgtggtcct

SEQ ID NO: 4022 - DNA, 394 bp, Zea mays
  Clone ID: LIB3061-027-Q1-K1-F1
cagctagcaacatagaaagcacaatattgtaccaacaatggcagccaaaatattttgcctccttatgctccttggtctttctgcaagtgctgctacggcgaccattttcccgcaatgctcgcaagctcctatagcttcccttcttcccccgtacctctcaccagcggtgtcttcggtatgtgaaaacccaattcttcaaccctacaggatccaacaggcaatcacagctggcatcttacctttatcacccttgttcctccaacaatcatcagccctattacatcagttacctttggtgcatttattggcacaaaacatcagggcacaacaactacaacaacttgtgctagcaaaccttgctgcctactctcagcaacagcagtttcttccattc

SEQ ID NO: 4023 - DNA, 389 bp, Zea mays
  Clone ID: LIB3061-027-Q1-K1-D6
agaaacaggcgacgctgcaacaacgccgaccacattctcgtcgctggcgaccggtagcgccgcggccatgctgctgatgatgttggccacgactgcgactgaggccgctaacacagtgcaatccggcgcagctgacgccgtgctcggcgccggcgctgctctgagagcccgtgcctccgtcttgctgcgcgcagctgccgacgcatcaggggtgactatgctggtacgcgcgcagcccaaactacggtagctacattcgtaggcgcaacgcggcgaggcttttatgcatctgaaacctggacatgtcacgatgtcgtaatacgcggtcaacagtatatatactagctagctcttccaatacaatcatgctcagtcgctggaatatcgta

SEQ ID NO: 4024 - DNA, 423 bp, Zea mays
  Clone ID: LIB3061-008-Q1-K1-F2
tccgttgcaacgcatctacaacatcaatttcagtttctgccatcactgagccacctagccgtggtgaaccctgtcacctacttgcaacagcagctgcttgcatccaacccacttgctctggcgaacgtagctgcataccagcaacaacaacagctgcaacagtttatgccagtgctcagtcaactagccatggtgaaccctgccgtctacctacaactactttcatctagcccgctcgcggtgggcaatgcacctacgtacctacaacaacagttgctgcaacaaattgtaccagctctgactcagctagctgtggcaaaccctgctgcctacttacaacagttgcttccattcaaccaactggctgtgtcaaactctgctgcgtacctacaacagcgacaacagttacttaatccattggca

SEQ ID NO: 4025 - DNA, 400 bp, Zea mays
  Clone ID: LIB3061-008-Q1-K1-F4
tcgacgcgtgcgcataccattagctagtgctacctcagagcgcagaagaacccgatcgacaccatgagggtgttgctcgttgccctcgctctcctggctctcgctgcgagcgccaccttcacgcatacaagcggcggctgcggctgccagccaccgccgtcggttcatctaccgtcgccggtgcatctgccacctccggttcacctgccacctccggtgcatcttccaccgccggtccacctgccgccgccggtccacctgccaccgccggtccatgtgccgacgccggttcatctgccgtcgtcaccatgccactaccctactcaaccgccccggcctcagcctcatccccagccacacccatgcccgtgccaacagccgcatccaagcccgtgccagc

SEQ ID NO: 4026 - DNA, 437 bp, Zea mays
  Clone ID: LIB3061-008-Q1-K1-F6
cagctagcaacatataaagttacaatactgtaccaacaatggcagccaaaatattttgcttccttatgctccttggtctttctgcaagtgttgctaccgcaaccattttcccacaatgctcacaagctcctatagcttcccttcttcccccatacctctcaccagcggtgtcttcaatgtgtgaaaccccaattgttcaaccctacaggatccaacaggcaatcgcaacaggcatcttaccattatcacccttgttcctccaacaaccgtcagccctattacagcagttacctttggtccatttggtggcacaaaacatcagggcacaacaactacaacaacttgtgctagcaaaccttgctgcatactctcagcaacatcagtttcttccattcaaccaactggctgcattgaactctgctgcttatttgcaacaa

SEQ ID NO: 4027 - DNA, 306 bp, Zea mays
  Clone ID: LIB3061-008-Q1-K1-F7
aggggacttaatacgtactttatggattctgctctgtctggcgtctattgctggcgccgaaggctctattgcgttggatgatgcaggctcttgcactgatgcatagagatgagcaaagcgtgatacgctgtatcggtagaagatcgttatccgtgcacgtaaccagctgaggccctgtattgtgctccccctagatggcacaactgctggagccgacgaccttgcacagctgccattgaactatgatcacacaagttctaccaacgatcatcatgcatgattcgacactgacgatgcatgcactga

SEQ ID NO: 4028 - DNA, 458 bp, Zea mays
  Clone ID: LIB3061-008-Q1-K1-F8
cggctcgaccctcgcgtccgtggcaacttagaaagcacatcagagatcaacaatggcagccaaaatatggggcctcgttatgctccttggtctttctgcaagtgctgctacggcgaccattttcccgcaatgctcgcaagctcctatagcttcccttcttcccccgtacctctcaccagcggtgtcttcggtatgtgaaaacccaattcttcaaccctacaggatccaacaggcaatcacagctggcatcttacctttatcacccttgttcctccaacaatcatcagccctattacatcagttacctttggtgcatttattggcacaaaacatcagggcacaacaactacaacaacttgtgctagcaaaccttgctgcctactctcagcaacagcagtttcttccattcaaccaactagctgcattgaactctgcttcttatttgcaacaacaacaac

SEQ ID NO: 4029 - DNA, 420 bp, Zea mays
  Clone ID: LIB3061-008-Q1-K1-F9
ctgctatcagtaccatcatttatcattcttcttagtagtataggcaccaaatcaaatgtgcaacatcaattatctaactccaaaaaccatgaagctggtgcttgtggttcttgctttcattgctttagtatcaagtgtttcttgtacacagacaggcggctgcagctgtggtcaacaacaaagccatgagcagcaacatcatccacaacaacatcatccacaaaaacaacaacatcaaccaccaccacaacatcaccagcagcagcaacaccaacaacaacaagttcacatgcaaccacataaacatcagcaacaacaagaagttcatgttcaacaacatcaactacaaccgcagcaccaacaacatcaacaacaacaacagcaccaacaacaacatcaatgtgaaggccaacaacaaca

SEQ ID NO: 4030 - DNA, 113 bp, Zea mays
  Clone ID: LIB3061-008-Q1-K1-G1
cagcaacccatcatttgcggtgccctgttttagatcgcttatgagttatagttcaatgatgaagttttttggatgatgtttgtggcttcccagaaataagaaagtacatttct

SEQ ID NO: 4031 - DNA, 392 bp, Zea mays
  Clone ID: LIB3061-008-Q1-K1-G11
tcggtggccatataaaatcttcaagtatgaagattcttccctcgtaaggttaagtggacaaaagcatacaggcatttgcatggcaaggacatgacccaggatacaacctttgagtttgagaggaagaggaacaggcccgagcgctacgaccgcaatttgacggagcagaccctgaaggctatcccgcttattacaaagattaggcatgatcgtatggaaaaacacatctcaaacagacataaacctggtaaacgcaaggagatggaaaaggattccaaggagctggagcaggacatcgccatgctcccgaagaagcttattagcaaccatcttgcggctgagaaaacgaaggtcaaggtttgaagtgttcagcagcagacagaagataacgc

SEQ ID NO: 4032 - DNA, 390 bp, Zea mays
  Clone ID: LIB3061-008-Q1-K1-G12
aaaacaacccgatcgacaccattaagggggttgttcgttgcccttggttctcttggctctagcttggaacgccaacttcaagcatacaaaccgcggcttccgcttgcaaccaacggcggcggttcatttaccggcggcggtgcattttccaacttcggttcaactggcaacttcggtgcattttccaacggcggtccaacttgcggcggcggttcaacttccaacggcggtccatgttccggcgtcggttcatctgccggcggcaccatgccactaccctatttaaccgccccgggctcagactcatacccagacacacccatgcccgtgccaacagacgcattcaaacccgtgccagatgcagggaacctgcggcgttggcagcacccc

SEQ ID NO: 4033 - DNA, 385 bp, Zea mays
  unsure (1)..(385): unsure at all n locations; Clone ID: LIB3061-008-Q1-K1-G3
ctgtatcacccctgttctttcaacaagtcccagctttatctttggtgcagtcattggtgcaaaccatcagggcacaacagctgcaacaactcgtgctaccagtgatcagccaagtagctctggcaaacctttctccctactctcagcaacaacaatttcttccattcaaccaactgtctacactgaaccctgctgcttatttacaacaacaacaactactaccattcagccagctagctactgcctactctcagcagcaacaatttcttccatttaaccaattggccgcactgaacccctctgcttatttccagcagcaaatactactaccatttggccagctagctacaacaagccccacttnctttttgaaacaacaacaatt

SEQ ID NO: 4034 - DNA, 393 bp, Zea mays
  Clone ID: LIB3061-008-Q1-K1-G4
atgttgatcagtcataaacacaccaatctaagcttcctagcaacgacttaacaacaatggctaccaagatattagccctccttgcgcttcttgccctttttgtgagcgcaacaaatgcgttcattattccacaatgctcacttgctcctagtgccattataccacagttcctccgaccagttacttcaatgggcttcgaacacctagctgtgcaagcctacaagctacaacaagcgcttgcggcgagcgtcttacaacaaccaattaaccaattgcaacaacaatccttggcacatctaaccatacaaaccatcgcaacacaacagcaacaacagttcctaccagcactgagccaactagatgtggtgaaccctgtcgcctacttgcaacagc

SEQ ID NO: 4035 - DNA, 424 bp, Zea mays
  Clone ID: LIB3061-008-Q1-K1-G5
aggccattagctttatctactccagtcttcagaagaacccgatcgacaccatgagggtgttgctcgttgccctcgctctcctggctctcgctgcgagcgccacctccacgcatacaagcggcggctgcggctgccagccaccgccgccggttcatctaccgccgccggtgcatctgccacctccggttcacctgccacctccggtgcatctcccaccgccggtccacctgccgccgccggtccacctgccaccgccggtccatgtgccgccgccggttcatctgccgccgccaccatgccactaccctactcaaccgccccggcctcagcctcatccccagccacacccatgcccgtgccaacagccgcatccaagcccgtgccagctgcagggaacctgcggcgttggcagcaccccgatcct

SEQ ID NO: 4036 - DNA, 392 bp, Zea mays
  Clone ID: LIB3061-008-Q1-K1-G6
cgaagatctctgaaaatgtttgagttcctcatctgatcacaccccaggaagcctgcaaccgcatagcagaggtagtccaagaggccgtgagaaagatggagctcgtggcagaagaaaagatgcgactttacaagaaggctcgcctcgccgtggaggcctgcgaccgagagctggaggagaaggttagggaagcccaggagctgaaggcagagcgtcagcgcaagaagcagcaggtggaggagctggagagcatcgtgcggttgaagcaggcggaagcggagatgttccagctgaaggcgaacgatgcccggcaggaggcggagcgtctgcagagcattgcgctcaccaagtccaagacagccgagcaggactatgccagcatgtacctaaag

SEQ ID NO: 4037 - DNA, 251 bp, Zea mays
  Clone ID: LIB3061-008-Q1-K1-G7
tgtgcccgtactccttttctgtccacgcttccagaatatgcatcagtgggatcaaagatgttcccagcctttgtcaagttcttgaagagcaaggatgctagtgatgggtcagagaaggcgcttctggatgagctgcaagcactggatgatcatcttaaagctcatggcccctacataaatggggagaacctgtcagcgactgatcttaacctggggccaaagctttttcacctacacatagcactggggca

SEQ ID NO: 4038 - DNA, 364 bp, Zea mays
  Clone ID: LIB3061-008-Q1-K1-F12
aattgcttcaacagatagtatcagctctctactcagctagctgtggcaaaccctgctgcctacttgcaacagctgcttccattcaaccaactgactgtgtcgaactctgctgcgtacctacaacagcgacaacagttacttaatccactagcagtgcctaacccattggtcactgccttcctacagcagcaacaattgctaccatacagccagttctctttgatgaaccctgccttgtcgtggcagcaacccatcgttggaggtgccatcttttagattacatatgagatgtaatcgataatggtgccctcataccggcatgtgtttcctagaaataatcaatatattgattgacatttatctc

SEQ ID NO: 4039 - DNA, 407 bp, Zea mays
  Clone ID: LIB3061-008-Q1-K1-E1
ccgacgcgtgcgacttatgcatcacaatacatcctcctatcagtaccatcaatcatcgttcatcgtagtagtataggcaccaaatcaaatctgcaacatcaattatctaactccaaaaaccatgaagctggtgcttgtggttcttgctttcattgctttagtatcaagtgtttcttgtacacagacaggcggctgcagctgtggtcaacaacaaagccatgagcagcaacatcatccacaacaacatcatccacaaaaacaacaacatcaaccaccaccacaacatcaccagcagcagcaacaccaacaacaacaagttcacatgcaaccacaaaaacatcagcaacaacaagaagttcatgttcaacaacaacaacaacaaccgcagcaccaccaccaacaacaac

SEQ ID NO: 4040 - DNA, 421 bp, Zea mays
  unsure (1)..(421): unsure at all n locations; Clone ID: LIB3061-008-Q1-K1-E10
ggcctattacatcagtnatctttggttcttttattggcacaaaacatcagggcacagcaactacaacaacttgtgctagcaaaccttgctgcctactctcagcaacagcagtttcttccattcaaccaactagctgcattgaactctgcttcttatttgcaacaacaacaactaccattcagccagctacctgctgcctacccccagcaatttcttccattcaaccaactggcagcattgaactctcctgcttatttacagcagcaacaactactaccattcagccagctagctggtgtgagccctgctaccttcttgatacaaccacagttgttgccgttctaccagcacgctgcgcctaacgctggcaccctcttacaactgcaacaattgctgccattcaaccaacttgctttgacaa

SEQ ID NO: 4041 - DNA, 448 bp, Zea mays
  Clone ID: LIB3061-008-Q1-K1-E11
accggtttcggattacggctcgacccactcgtccggcgcactttagctcacttctcttatggagaactcgacaccatgaaggtgctgatcgttgcccttgctctcctggcgctcgctgcgagcgccgcctccagtacaagcggcggctgtggctgccagacaccaccgtttcatctaccgcctccgttctatatgccgcctccgttctatctgccgccgcagcagcagccgcagccatggcaataccccactcaaccaccgcagctaagcccgtgccagcagttcggatcctgcggcgtcggcagcgtcggcagcccgttcctgggccagtgcgtcgagttcctgaggcaccagtgcagcccggcggcgacgccctacggctcgccacagtgccaggcgctgcagcagcagtgctgccaccagatcaggcaggtggagccgctgcacc

SEQ ID NO: 4042 - DNA, 420 bp, Zea mays
  Clone ID: LIB3061-008-Q1-K1-E12
tgcactttccgcatcacttcagctcttacaacaacatcaatgtgaaggccaacagcaacatcaccaacaatcacaaggccatgtgcaacaacacgaacagagccatgagcaacaccaaggacagagccatgagcaacaacatcaacaacaattccagggtcatgacaagcagcaacaaccacaacagcctcagcaatatcagcagggccaggaaaaatcacaacagcaacaatgtcattgccaggagcagcaacagactacaaggtgcagctataactactatagcaagagctcaaatctaaaaaattgtcatgaattcctaaagcagcagtgcagccctttggtaatgccttttctccaatcacgtttgatacaaccaagtagctgccaggtattgcagcaacaatgttgtcatgatct

SEQ ID NO: 4043 - DNA, 386 bp, Zea mays
  Clone ID: LIB3061-008-Q1-K1-E2
gtgagcctagcaattagctcatcgacttcagatttgagaactcgacaccatgaaggtgctgatcgttgcccttgctctcctggcgctcgctgcgagcgccgcctccagtacaagcggcggctgtggctgccagacaccaccgtttcatctaccgcctccgttctatatgccgcctccgttctatctgccgccgcagcagcagccgcagccatggcaataccccactcaaccaccgcagctaagcccgtgccagcagttcggatcctgcggcgtcggcagcgtcggcagcccgttcctgggccagtgcgtcgagttcctgaggcaccagtgcagcccggcggcgacgccctacggctcgccacagtgccaggcgctgcagcagcagt

SEQ ID NO: 4044 - DNA, 409 bp, Zea mays
  Clone ID: LIB3061-008-Q1-K1-E3
ctgtaggaagcaaggtacaccaccgccatggcagttagatgcttgcattgttcgctctcctagctctttgtgcaagcgccactagtgcgacccatattccagggcacttgccaccagtcatgccattgggtaccatgaacccatgcatgcagtactgcatgatgcaacaggggcttgccagcttgatggcgtgtccgtccctgatgctgcagcaactgttggccttaccgcttcagacgatgccagtgatgatgccacagatgatgacgcctaacatgatgtcaccattgatgatgccgagcatgatgtcaccaatggtcttgccgagcatgatgtcgcaaatgatgatgccacaatgtcactgcgacgccgtctcgcagattatgctgcaacagcagttaccattcat

SEQ ID NO: 4045 - DNA, 360 bp, Zea mays
  Clone ID: LIB3061-008-Q1-K1-E4
ccggcgcgacccactcgtccgtcgaaagtcggccattccatctcgactactggggtagtatcgctctcgcccgcgtcggcttcctagggatcgaggaacgtccgtccgttcgtccggggaaggagcacgagggaggcggagatgatcgaggtggtgctcaacgaccgcctggggaagaaggtgcgggtcaagtgcaacgaggacgacaccatcggcgacctcaagaagctggtggcggcgcagacggggacgcgccccgagaagatccgcatccagaagtggtacaacatctacaaggaccacatcaccctcaaggactacgaggtccacgacggcatgggcctcgagctctactacaac

SEQ ID NO: 4046 - DNA, 432 bp, Zea mays
  unsure (1)..(432): unsure at all n locations; Clone ID: LIB3061-008-Q1-K1-E5
taggaagtttaatccttnagtttcaacctagcaacacatggcgaccaagatactttcccgccttatgctccttgctctttctgcatgtgttgctaacgcgacaattttccctcaatgctcacaagctcctatagcttcccttcttcccccataccttccatcaatgatagcttcagtatgtgaaaacccagctcttcaaccctataggctccaacaagcaatcgcagcaagcaacatacctttatcacccttgtttcaacaatcgccagccctatctttggtgcagtcattggtacaaaccatcaaggcacagcagctgcagcaactcgtgctacctgtgatcaaccaagtagctctggcaaacctttctccctactatcagcaacaacaatttcttccattcaaccaactatctacactgaaccctgctgc

SEQ ID NO: 4047 - DNA, 436 bp, Zea mays
  Clone ID: LIB3061-008-Q1-K1-E6
agacagtcggctgcagctgtggtcaataacaaagccatgagcagcaacatgatccacggcaacatcatccacaaaaacaacaacatcaaccaccaccacaacatcaccagcagcagcaacaccaacaacaacaagttcacatgcaaccacaaaaacatcagcaacaacaagaagttcatgttcaacaacaacaacaacaaccgcagcaccaccaccaacaacaacaacaacagcaccaacaacaacatcaatgtgaaggccaacaacaacatcaccaacaatcacaaggccatgtgcaacaacacgaacagagccatgagcaacaccaaggacagagccatgagcaacaacatcaacaacaattccagggtcatgacaagcagcaacaaccacaacagcctcagcaatatcagcagggccagggaaaatcacaaca

SEQ ID NO: 4048 - DNA, 243 bp, Zea mays
  unsure (1)..(243): unsure at all n locations; Clone ID: LIB3061-008-Q1-K1-E7
tcagacattatagatttaggtttccaatgcaacaacagagcaacaanggcgaccaaggganaatcccaccggaagccccacgctccatcggcacgcgacgccaacgcgacaagagccccncaaggcccacaagcnccaaaagcnacccgncacaccccaaaccngccaacaacgacacgcgcaggacgngaaaacccagcnccncagcccaacaggcgccaacacgcaancgcagcaagcaac

SEQ ID NO: 4049 - DNA, 406 bp, Zea mays
  Clone ID: LIB3061-008-Q1-K1-E8
cgggacgtcagcctagcatttagcttattgactccagattggagaactcgacaccatgaaggtgctgatcgttgcccttgctctcctggcgctcgctgcgagcgccgcctccagtacaagcggcggctgtggctgccagacaccaccgtttcatctaccgcctccgttctatatgccgcctccgttctatctgccgccgcagcagcagccgcagccatggcaataccccactcaaccaccgcagctaagcccgtgccagcagttcggatcctgcggcgtcggcagcgtcggcagcccgttcctgggccagtgcgtcgagttcctgaggcaccagtgcagcccggcggcgacgccctacggctcgccacagtgccaggcgctgcagcagcagtgctgccaccagatc

SEQ ID NO: 4050 - DNA, 437 bp, Zea mays
  unsure (1)..(437): unsure at all n locations; Clone ID: LIB3061-008-Q1-K1-F1
cggaattaccggccccagctgtgcaagcctagangctacgaacatgcgcttgcgggtgcgtcttagaacaaccaattgcccaattacgaacaacgatccttggcacatctaaccatacaaaccatcgcaacgcagcagcaacaagcactgagccacctagccgtggtgaaccctatcgcctacttgcaacaacagctgcttgcatccaacccacttgctttggcaaacgtagctgcataccaacaacaacaacagttgcaacagtttctaccagcgctcagtcaactagccatggtgaaccctatcgcctacctacaacagcaacaacttctttcatctagcccgctcgctatgggcaatgcacctacatacctgcaacaacagttgttgcaacaacagttgctgcaacaaattgtaccagctcttactcagctagc

SEQ ID NO: 4051 - DNA, 418 bp, Zea mays
  Clone ID: LIB3061-008-Q1-K1-F10
cagctatcaacatataatgtcttaattttttaccaacaatggcagccaaaatattttgcttccttatgctccttggtctttctgcaagtgttgctaccgcaaccattttcccacaatgctcacaagctcctatagcttcccttcttcccccatacctctcaccagcggtgtcttcaatgtgtgaaaacccaattgttcaaccctacaggatccaacaggcaatcgcaacaggcatcttaccattatcacccttgttcctccaacaaccgtcagccctattacagcagttacctttggtccatttggtggcacaaaacatcagggcacaacaactacaacaacttgtgctagcaaaccttgcttgatactctcagcaacatcagtttcttacattcaaccaactggctgcattgaactc

SEQ ID NO: 4052 - DNA, 420 bp, Zea mays
  Clone ID: LIB3061-008-Q1-K1-F11
gggcgtctgcctagcaattttctcattctctccagattggagaactcgacaccatgaaggtgctgatcgttgcccttgctctcctggcgctcgctgcgagcgccgcctccagtacaagcggcggctgtggctgccagacaccaccgtttcatctaccgcctccgttctatatgccgcctccgttctatctgccgccgcagcagcagccgcagccatggcaataccccactcaaccaccgcagctaagcccgtgccagcagttcggatcctgcggcgtcggcagcgtcggcagcccgttcctgggccagtgcgtcgagttcctgaggcaccagtgcagcccggcggcgacgccctacggctcgccacagtgccaggcgctgcagcagcagtgctgccaccagatcaggcaggtggagccgc

SEQ ID NO: 4053 - DNA, 420 bp, Zea mays
  Clone ID: LIB3061-008-Q1-K1-D9
ccgggactccctggcgtcctttcccttctatccgcgcagatgctttgcgccggcggcgaaccggatccggccgctcgcgccttctgcgacgcaccggcctcgcgcgcggatgcgggggccaacgggacgcccagcccgcaggatcacgccgagaaggatccgcccaatgtgctagacgttgctatcgttggtggaggcatgatgggcttggctgttgcttgtgcaatgtgtagggattgctgttcgtgtgctctgacctgttttaagccaatatgccgttaacgaaacaccttagagtcgctattatcgatagcaatccagcgctgaagtcaagaagttacctgggcaaaaacagtatacccgattctagggtcagcaccgttacccctgcaaccatttccttcttcaagggttgcagca

SEQ ID NO: 4054 - DNA, 376 bp, Zea mays
  Clone ID: LIB3061-008-Q1-K1-C4
atggagaccaacattcaacatagaaagtaggaactagtagcaacaacagagcaacaatggcgaccaagatattttccctccttatgctccttgctctttctgcatgtgttgctaacgcgacaattttccctcaatgctcacaagctcctatagcttcccttcttcccccataccttccatcaatgatagcttcagtatgtgaaaacccagctcttcagccctataggctccaacaagcaatcgcagcaagcaacatacctttatcacccttgttgtttcaacaatcgccagccctatctttggtgcagtcattggtacaaaccatcagggcacagcagctgcagcaactcgtgctacctgtgatcaaccaagtagc

SEQ ID NO: 4055 - DNA, 395 bp, Zea mays
  Clone ID: LIB3061-008-Q1-K1-C5
cggagatccaccccccacttttatccgctcgcctgcgcctgcgcctgcctacctgcgatcgatctctcatggcgaccaccagcgccaggaggccgagcggcccggtgctctcggccgcgcactaccgctctgcctcgccgacgcgcgtctcgctcgccgggcagcccgtcagcgtcagcgtgtcctcgtcgtctcggggccggcggacctgcatgtgctcgccgaccaaccacccgggctcgttccgctgcagcctgcacaaggagcgcgtcaagcctgcggcggggccccacggccacgggcacggcaagccgagctcgccgtcgtcgcccccgaccgtcagccgcctgtgcgcgggcgcgggcaggcggatgggcagcgcgctggtgcggatc

SEQ ID NO: 4056 - DNA, 355 bp, Zea mays
  Clone ID: LIB3061-008-Q1-K1-C6
atggagtccaactatcaactcagaaactacaatagtgtaccaacaatggcagccaaagtattttgcctccttatgctccttggtctttctgcaagtgctgctacggcgaccattttcccacaatgctcacaagctcctatagcttcccttcttcccccgtacctttcaccagcggtgtcttcggtatgtgaaaacccaattcttcaaccctataggatccaacaggcaatcgcagctggcatcttacctttatcacccttgttccttcaacaatcatcagccctattacagcagttacctttggtgcatttattggcacaaaacatcagggcacaacaactacaacaacttgtgc

SEQ ID NO: 4057 - DNA, 403 bp, Zea mays
  Clone ID: LIB3061-008-Q1-K1-C8
cttctcctcctcgcctcgtctccctagccttcacttctcaagctagagtgacggaaagcgactcggcgcgagcgaggagggccaaggggaagaggggaagcaccgcaccaggacccttgttcgccgccgccgcctctgatctccgcgaggttgtcaggattcaatatgtcgaccagcacattcgctacttcctgcacgctgttgggcaatgttagaacaacgcaggcctcccagacagcggtgaagagcccttcgtctctaagcttcttcagccaagttacgaaggttccaagcctgaagacctccaagaaactggatgtctccgccatggctgtatacaaggtgaagcttgtcgggcctgaaggtgaagagcacgagtttgatgctccagacgacgcctaca

SEQ ID NO: 4058 - DNA, 416 bp, Zea mays
  Clone ID: LIB3061-008-Q1-K1-C9
tggaactgaacctgaatctttttcatactaatttttgcatgagatgcgcataaaggcgtcagcgaagctaactttgttgcactctatgctaaaaatattacacaaggaaggccaccgtgtccttatattctctcagatgacaaaacttcttgacatccttgaagattatctgactttagaatttggccctaaaacatttgaaagagttgatggctcagtatctgtggcagagcgccaagcggcgattgctcgctttaatcaggataagacacgttttggtttcttgctgtctacacgatcatgtggacttggtattaatttggcaacttgcggatactggtatcatatatgattcagatttcaacccacatgctgatatacaggcgatgaacagggcacacagaattggacaatcg

SEQ ID NO: 4059 - DNA, 407 bp, Zea mays
  Clone ID: LIB3061-008-Q1-K1-D1
tcgacgcgtgcgcctactagcaacatataaagcataatagtgtaccaacaatggcagctaaaatattttgcctccttatgctccttggtctttctgcaagtgctgctacggcgaccattttcccacaatgctcacaagctcctatagcttcccttcttcccccgtacctctcaccaacggtgtcttcggtatgtgaaaacccaattcttcaaccctacaggatccaacaggcaatcgcagctggcatcttacctttatcacccttgttcctccaacaatcatcagccctattacagcagttacctttggtgcatttattggcacaaaacatcaaggcacaacaactacaacaacttgtgctagcaaaccttgctgcctactctcagcaacagcagtttcttccattc

SEQ ID NO: 4060 - DNA, 387 bp, Zea mays
  Clone ID: LIB3061-008-Q1-K1-D10
cggtcggcttccggctcgcccacgcgtccggcgcgattagttcctaacctttaggttctcgagccgcccaagatcccgatccccactgcgctggttgccggagctctagccggattcgcctcaaccttgtgcacctaccccatggagctgatcaagaccagggtcaccatcgagaaggacgtatacgacaacgtcgcgcacgcgttcgtgaagatcctacgcgacgagggcccgtcggagctgtaccgtgggctgacacccagcctgatcggcgtggtgccgtacgcggcctgtaacttctacgcctacgagacgctgaagcggctctaccgtcgcgcgaccgggcggcgtcccggcgcggacgtgggccccgtggcgacgctgctc

SEQ ID NO: 4061 - DNA, 398 bp, Zea mays
  Clone ID: LIB3061-008-Q1-K1-D12
acggcgtccattttcccgtatgctttctagctcctatagcttcccttcttcccccgtacctctcaccagcggtgtcttcggtatgtgaaaacccaattcttcaaccctacaggatccaacaggcaatcacagctggcatcttacctttatcacccttgttcctccaacaatcatcagccctattacatcagttacctttggtgcatttattggcacaaaacatcagggcacaacaactacaacaacttgtgctagcaaaccttgctgcctactctcagcaacagcagtttcttccattcaaccaactagctgcattgaactctgcttcttatttgcaacaacaacaactaccattcagccagctacctgctgcctacccccagcaatttcttccattc

SEQ ID NO: 4062 - DNA, 229 bp, Zea mays
  Clone ID: LIB3061-008-Q1-K1-D2
cgtcgcgctgctcaacgggtactaggcgctcaagcgcggccagggggtggtggtgccatcgcgggtgccattgctgaccatcctcgtcgccttcggcacgtcagcgctgggtatcgtctacggcacgctttaggatagctgggaccccgacaaggaaaggtagttgttcagcattaaccgagcccactagaacttgcaattgccaagttacgataaaaacccttggcac

SEQ ID NO: 4063 - DNA, 403 bp, Zea mays
  Clone ID: LIB3061-008-Q1-K1-D3
agcttcccttcttcccccgtgcctctcggcagcggtgtcttcggtatgtgaaaacccaattcttcaaccctataggatccaacaggcaatcgcagctggcatcttacctttatcacccttgttcctccaacaatcatcagccctattacagcagttacctttggtgcatttattggcacaaaacatcagggcacaacaactacaacaacttgtgctagcaaaccttgctgcctactctcagcaacaacagtttcttccattcaaccaactagctgcattgaactctgcttcttatttgcaacaacaacccatcattggtggtgccctcttttagatttcttatgagttatagttcaataataaagctttttgtctgatgtttgtggcttcccagaaataagaa

SEQ ID NO: 4064 - DNA, 362 bp, Zea mays
  Clone ID: LIB3061-008-Q1-K1-D4
gtgtcgccaagagtttcaacgttaagctgcggtctcataaattatagatgctagatgacatagaggagatatatttgaggaggatatattttttttctgtacacaatgagaaaatgtagagcatcaaagggcggttatatatgtgttgtatgtgtgattccataccctaatatagaggtggttggcttaaaaaaaaaaaaaaaaaataaaaacaaaaactaaaatataaacaaataaaaaaaaaaaaagaaacaataaggacctacaacatcaacccctagaactaaaaaatacccacaatgaaataactaaactcttctataccctgaatgataactaaaaaaaaaaacgggggggcccct

SEQ ID NO: 4065 - DNA, 393 bp, Zea mays
  Clone ID: LIB3061-008-Q1-K1-D5
ggggagcaccggctggaggttaagcttatgccgcagcggccggcgtggagcgggcgcgtcaagaacccggatctaaaccgggcgcccagccccgagagctccgacgccgagtgacatgggaagcgagcgagcagcagccaccgcaaaggctcaacgacgacgacgtccgttgttgcgacggcgcccagcgcagcatgccgctgtcgtcttcgttcgtatccacgtacgtacgacggcccagctgacccgcctgcctaccggtccgttctctgcgactggatggtcggtcggcgggcgtcgcggcgagggctttcggtacgtcgtggataagcacgaggggagggcggtggtgggcgggaacggaggcggaggcggcggccccaagtggcggtc

SEQ ID NO: 4066 - DNA, 407 bp, Zea mays
  Clone ID: LIB3061-008-Q1-K1-D6
cactccaatcgaagggcactagcaacttacctttcacgctttggctaccaagatattagccctccttgcgcgtcttgcccttttagtgagcgcaacaaatgcgttcattattccacagtgctcacttgctcctagtgccagtattccacagttcctcccaccagttacttcaatgggcttcgaacatccagccgtgcaagcctacaggctacaactagcgcttgcggcgagcgccttacaacaaccaattgcccaattgcaacaacaatccttggcacatctaaccctacaaaccattgcaacgcatcaactacaacaacagtttctgccatcactgagccacctagccgtggtgaaccctgtcacctacttgcaacagcagctgcttgcatccaacccacttgctc

SEQ ID NO: 4067 - DNA, 445 bp, Zea mays
  Clone ID: LIB3061-008-Q1-K1-D7
atggagtccaactagtcactagaactccaatagtgtaccaacaatggcagccaaaatattttgcctccttatgctccttggtctttctgcaagtgctgctacggcgaccattttcccgcaatgctcgcaagctcctatagcttcccttcttcccccgtacctctcaccagcggtgtcttcggtatgtgaaaacccaattcttcaaccctacaggatccaacaggcaatcacagctggcatcttacctttatcacccttgttcctccaacaatcatcagccctattacatcagttacctttggtgcatttattggcacaaaacatcagggcacaacaactacaacaacttgtgctagcaaaccttgctgcctactctcagcaacagcagtttcttccattcaaccaactagctgcattgaactctgcttcttatttgcaacaacaa

SEQ ID NO: 4068 - DNA, 435 bp, Zea mays
  Clone ID: LIB3061-008-Q1-K1-D8
ggccattagctttatctactccagagctcagaagaacccgatcgacaccatgagggtgttgctcgttgccctcgctctcctggctctcgctgcgagcgccacctccacgcatacaagcggcggctgcggctgccagccaccgccgccggttcatctaccgccgccggtgcatctgccacctccggttcacctgccacctccggtgcatctcccaccgccggtccacctgccgccgccggtccacctgccaccgccggtccatgtgccgccgccggttcatctgccgccgtcaccatgccactaccctactcaaccgccccggcctcagcctcatccccagccacacccatgcccgtgccaacagccgcatccaagcccgtgccagctgcagggaacctgcggcgttggcagcaccccgatcctgggccagtgcgt

SEQ ID NO: 4069 - DNA, 396 bp, Zea mays
  Clone ID: LIB3061-008-Q1-K1-C3
gcggttcacacacgggtcacggccggcctaaccatggcggcggctgactccactaagctctccctcgccttcgtcctcctcctctccgcgctcgtcgtgctcggcgaggtcggaggaagcatggcagccgactgctcgacgctccggtgcatccagggcggctacatcacctgcgacaactacccggggaagcagctggacgggtgcgactgcgtctgcgcgcccgacaacggccggaactgcgttctccacctccagtccggctccacctacaactgcagccgcagcaacaagggatagctagctagtcgatctcgaccagtcttcgacaataataatgcttcaagctgtacgctgtcgaatagtaacagttgtgctgaaacgaccgggtgatgc

SEQ ID NO: 4070 - DNA, 365 bp, Zea mays
  Clone ID: LIB3061-027-Q1-K1-C2
ttgaccgtgacgcaggggaagcaggtgcagaagtgggacaggatctccaaggcggccttcgagtgggctgaccaccccaccgctgtgatccccgacatgcagaagcttggcatcaaggataagaacgaagcagcgaggatcgttgcgctcgttaagaatcaaactactgccgctgccgctactgctgccagtgctgacaacgacgacgacgaggcctgatcaatgcaacgacacatcatgatctgctgctgcacttaattactatgttcgtatacaaataaatacacccggcgtacgcggtgttccttatatggtctaaaatgtagccagtaaattttaaactactttatttcttgaggctctat

SEQ ID NO: 4071 - DNA, 413 bp, Zea mays
  Clone ID: LIB3061-027-Q1-K1-C3
actgagtggaggcagcgtattcagtctgaggcagaacattttgtcgatgtttctgccatgacttccgataatatcgccaagcttatcaatcaagacaaaatacaaattttgataaatcttaatggctacacaaagggtgccaggaacgaaatttttgcaatgcagccagcacctatccaagtttcgtacatggggttccctggaacaacgggtgctgcatacatagattacttggtcacagatgagtttgtttctccatctagctatgcacatatatattcagaaaagctcgtccatttgcctcattgctattttgtcaatgactacaagcagaaaaatcgagactgtctcactccagtatgtccacacaaaagatctgattatggattacctgaggataaatttatttttgc

SEQ ID NO: 4072 - DNA, 425 bp, Zea mays
  Clone ID: LIB3061-027-Q1-K1-C4
attgagaccaactagcaacatagaaagcacaatagtgtaccaacaatggcagctaaaatattttgcctccttatgctccttggtctttctgcaagtgctgctacggcgaccattttcccacaatgctcacaagctcctatagcttcccttcttcccccgtacctctcaccaacggtgtcttcggtatgtgaaaacccaattcttcaaccctacaggatccaacaggcaatcgcagctggcatcttacctttatcacccttgttcctccaacaatcatcagccctattacagcagttacctttggtgcatttattggcacaaaacatcagggcacaacaactacaacaacttgtgctagcaaaccttgctgcctactctcagcaacagcagtttcttccattcaaccaactagctgcattgaactc

SEQ ID NO: 4073 - DNA, 363 bp, Zea mays
  Clone ID: LIB3061-027-Q1-K1-C5
gcgcagacaagtagcgacagctcttcaaatattcgtgagagtgatccggcgctgagaagagatggctaagatcgccggagccgtcgcggcggcggcggcgctgtgcttcacggccctggtgggcgcggccgtctgccaaggcaaggtcgagcgggcaatgctcagggacccgctgtgctggcaggaggtccaggagagcccgctcgacgcgtgccgacaggtcctcgaccggcagataaccggctgcggcgttagctgtcccttccggcagggcaccgggcttcggatgctgtgctgccagcagcgttaggacgtgaagccgtagtgccgctgcgccgacatccggagcatggtcaggggcta

SEQ ID NO: 4074 - DNA, 435 bp, Zea mays
  Clone ID: LIB3061-027-Q1-K1-C6
cccacgcgtccgctcgcccttggctcccatggcttccggcttcttctcctcgccgttgcgtgagaccgcgctaaaaccctaggctttgacaccccaatggcgtccgcgacggcgacggcgcccgcattcgctctcgcgtcgtccctctcgcgccgcggtttcctcccgctctctcgtcgcgccggccggcccgtgccccagtcgctgcggttcgtagcgtcagccgtgaggcggcgccgcagcgcggtcgtggtggcagcggacgcggcggcagcggccgggagcgcggagttcggcgacgaggagaacccttatgagcttctgggcatcaggccgcttgatagcttcgaccacatgaagatggcctacaagaagaagcgcaaggacgccgaggagactggagacgatgagttcccttgccaagtggatagggcc

SEQ ID NO: 4075 - DNA, 415 bp, Zea mays
  Clone ID: LIB3061-027-Q1-K1-C7
aattcgggattcgaggctacgacgtcacgcgtccgcatcaagctacatataatgtttaagctaatcgcgacaatagagcaacactggctaccgatatacaatatctgcatacgcttcgtgctctatctgcatgtgttgctaacgcgacataattccgtcaatgctcacaagctcgtatagctatgcttgatgcagcatacctataatcaatgatagcttctgaatgtgaatacccatctctttgaccctataggcttcaaccagctatcacagctagctacataccgctatcaccattgtgcaaacaatcgccaggcgaatctgtagtgcagtcattggtacaaactataaaggcacatcagctgcaataactactgctaccagggatcaatcaagcaggtctggcaaacctttc

SEQ ID NO: 4076 - DNA, 428 bp, Zea mays
  Clone ID: LIB3061-027-Q1-K1-C8
cagaaacacaccaagcgaagtacattatcaacaacctaacaacaatggctaccaagatattatccctccttgcgcttcttgcgctttttgcgagcgcaacaaatgcgttcattattccacaatgctcacttgctccaagttccattattacacagttcctcccaccagttacttcaatgggcttcgaacacccagctgtgcaagcctataggctacaacaagcaattgcggcgagcgtcttacaacaaccaatttcccagttgcaacaacaatccttggcacatctaacaatacaaaccatcgcaacgcaacagcaacaacaattcctaccagcactgagccacctagccatggtgaaccctgccgcctacttgcaacagcagttgcttgcatcaaacccacttgctctggcaaacgtagttgcaaac

SEQ ID NO: 4077 - DNA, 410 bp, Zea mays
  Clone ID: LIB3061-027-Q1-K1-C9
gtgccctgatggtttgtaccaatgactgctacaacagctgcagcaactcgtgctacctgtgatcaaccaagtagctctggcaaacctttctccctactctcagcaacaattgctgccattcaaccaacttgctttgacaaacccaacagcgttctaccaacaacccatcattggtggtgccctcttttagattgcttatgagttatacttcaataatgaagttttttggatgatgtttgtggcttcccagaaataagaaagtacatttctaaaaaaaaaatataaaaaaaaaaaaaaaaaaaacataaaaaaaaaaaaaaagaaacaaaaaaaaaaaaaacaacaactaaaaaaaacaaaaacttgtaaaccaaaataaacaaatataaaaaaaaaaagggggcgccctt

SEQ ID NO: 4078 - DNA, 398 bp, Zea mays
  Clone ID: LIB3061-027-Q1-K1-D1
acgaattcgactgttgatactcgtaatactttgggtgatcgtgatcaaagtgttcgcgctgttgcagctatgcaattcttgcagacactgcgtaaaaaatacccgcaagttgcgcaggagcataataatgtctacatgcaacaggatgcagaagaatgctggacacagctggtgtatacgctgtctcagactattacctcacattcaagagaatctgcagctatcacgatgaaccaactatctgcgatagatatcgtgagctgggtccactgtgcataaagtgcagaggagaacatggagacagaatcagcatattccgttaagtgttatatgtctgaagatgtgaaccatgctaatgagggatataagcatggcttgaagacagaacttgagaaagc

SEQ ID NO: 4079 - DNA, 435 bp, Zea mays
  Clone ID: LIB3061-027-Q1-K1-D10
gggcgctggcagacagtccgattataggggagatacgtggcttggggatgattatggggaccgaattcacaaacaacaagtcaccgactgatctgttccctgccgaatggggggttggtgccatcttcggcgaagagtgccagaagcgcggcatgctggtcagggtcgctggcgacgccatcatgatgtcgccgacgctgatcatgacgcccggcgaagtcgacgagttggtgcgcatctacggggaagccctcaaggccacggaggagagggtggcagccctgcagtccaagaagaactagccaaaagggcggcgacgacgataacgataaacgccgggcgacgacggaccatatttgatgtacaggtgaataaacagccaagttcgtggctgcgagatggcaatagcgcgccggtctctgttcttgctctgtc

SEQ ID NO: 4080 - DNA, 434 bp, Zea mays
  Clone ID: LIB3061-027-Q1-K1-D11
gcagaactctctagacctcatcggcgttgtcggagcgcgtgttgaccggagatggcgccgagcgggtggaggacgagcgcggcggcgcggatcggctggctcccggacacggtttgcctgtggctcgcgctctccggcgccgcactgacgctcggccagtctaagaaggacctgacggaggttacccacaaggtctacttctacatcgagatcgacggctagcccacaggccggattgtcatggggctttttgggaagactgttcctaagacggcagagaacttccgagctctttgcacaggagagaaaggggtcggcaagagtggcaaagccctccactacaagggaagtcagttccacagaatcatgcacagcttcatgctccaaggaggtgacttcactctcgtggacgggaggggtggtgaatctatcta

SEQ ID NO: 4081 - DNA, 229 bp, Zea mays
  Clone ID: LIB3061-027-Q1-K1-D12
gcaacatttgttgccgttctacctgcacactgcgcctaacgttggcaccctcttacaactgcaacaattgctgccattcgaccaacttgctttgacaaacccagcagtgttctaccaacaacccatcattggtggtgccctcttttagattgcttatgagttatagttcaataataaagttttttttgctgatatttgtggcttcccagaaataagaaagtacatttct

SEQ ID NO: 4082 - DNA, 419 bp, Zea mays
  Clone ID: LIB3061-027-Q1-K1-D3
gcttcatataaagcacaatagtgtaccgacaatggcagccaaaacatcttgcttccttatgctccttggactttctgcatgtgtagctaccgcaaccattttgcaacaatgctcacagcctcctatagcttacattgttcacacatacctataaccagcggtgtattcaatgtgtgaaaccccaagagttcaaccctacaggatacaacaggcaatcgcaacaggcatcttaccattatcacccttgctcctacaacaaccgtcagacctattacagcacatacctctggtccattaggtggcacaaaacatcagggcacaacaactacgacaactcgtgctagcaaaccttggtgcatactctcagcaacatcagtttcttccattcgaccaactgtctgcattgaactctgctgctt

SEQ ID NO: 4083 - DNA, 370 bp, Zea mays
  Clone ID: LIB3061-027-Q1-K1-D5
gtcatcgatgcctaccgtactttgggtgaccgcggtcactacgcggccgatgaggcagttaaggacctcgtcggcacattcgccttcgtcgtacttcgacagccgctccggagcctaattatgcgtacttggcgccggctacacaagaatagcgcacacacctgtggactacggcgtctcagactattgcttcagattgatcagcgtctgaccggtatctcggtcaagcacggttgctgcgagagatacgcgcacttccgcgcagtctgcatgatgcacagagacgaacgtctcaacagcttcgagctcttcatgaacaggctaaatgtcatgccatgcgtacactgctaatgcgccatgtacggatcca

SEQ ID NO: 4084 - DNA, 434 bp, Zea mays
  Clone ID: LIB3061-027-Q1-K1-C12
gcggcacaggcgtggaggtatctcggcagtcggcagggcggctggagttcggtcccagaagagatggcggggggccctgatgtcgcgggcttgatcgaggatgatgcggtctccgtcatcacggagggcttagtggtgtgtgacatatgtggcagtggtagtgcccctcatcttattgcaaactgcgctcggtgcaatgcgcgtgagcacgggtactgtatggaggggttgacgttcctgattccgctcatatggttttgtaatagatgccaacgcaacgccaacagggcacccagatcctaaccaaggttctggagatggtgttgggcgccaaattcccttgaggaaggtagcagctagtgtcgtgtgagaaatgttggcttgtttttgtggttgtgtgtattggcaatcgctggagcctggagctgtgtgta

SEQ ID NO: 4085 - DNA, 229 bp, Zea mays
  Clone ID: LIB3061-027-Q1-K1-A6
cttgcccttttccagagcactttcgtcgtcggccatgggtcaagcctggggtaatcttcaagataggctccaagggctgcagtggaaggagcaccaggtgaggaagatcaccgacaaggtgttcgaccgcctcacggatgacgcccagaagcgcgacatggaggccctcagattcgacgaggtctacatcgtcgtactctgcgtctacaatgacatgaacaagtacttg

SEQ ID NO: 4086 - DNA, 306 bp, Zea mays
  Clone ID: LIB3061-027-Q1-K1-A7
agcgtgatacatactcacaatacattgtacgtatcgcgttcggcatgcatgtttacgggctatcgagaagacgttggcacaatcagatgattgctcgatgcacacttgtcgctcactgagcagccttccaagttggatacttatgatccaagatcacctttcttcactgataccactatgctaggctacgacgcaattgtaaaagagcaagatgaaagacgcatagatctcaaatggcagcttactgagagaatgcaacatctatcattctgtgatagcagtctgctcacgtgtcatctctgcatg

SEQ ID NO: 4087 - DNA, 430 bp, Zea mays
  Clone ID: LIB3061-027-Q1-K1-A9
gccaaatggtagtagtatttggccagctagctacaacaagccccgcttccttcttgacacaacaacaagtgcttccgttctaccagcagtctgtggctaaccccgcaaccctcttacaactgcaacagttgctgccctttgtccaacttgctttgacaaacccagcagacttctaccaacaacacatcattggcggtgccctctcttagattgcttattactagcaattcaataatgaacttttacggctgatgtatgtggcctgctagaaataagaagtcatatttccaaaagatgtacagactcatcgacgagtacaagttgaagggccatatacggtggatctcggcgcagatgaaccgcgtccgcaacggggagctgtaccgatacatttgcgatacgaagggcgcattcgtgcagcctgcgttct

SEQ ID NO: 4088 - DNA, 421 bp, Zea mays
  Clone ID: LIB3061-027-Q1-K1-B1
gaccaactagcaacatagaaagcacaatagtgtaccaacaatggcagccaaaatattttgcctccttatgctccttggtctttctgcaagtgctgctacggcgaccattttcccacaatgctcacaagctcctatagcttcccttcttcccccgtacctctcaccagcggtgtcttcggtatgtgaaaacccaattcttcaaccctataggatccaacaggcaatcgcagctggcatcttacctttatcacccttgttcctccaacaatcatcagccctattacagcagttacctttggtgcatttattggcacaaaacatcagggcacaacaactacaacaacttgtgctagcaaaccttgctgcctactctcagcaacaacagtttcttccattcaaccaactagctgcattgaactct

SEQ ID NO: 4089 - DNA, 166 bp, Zea mays
  Clone ID: LIB3061-027-Q1-K1-B10
ctgccattcaaccaacttgctttgacaatcccagcagcgttctaccaacaacccatcattggtggtgccctcttttagatttcttatgagttatagttcaataataaagttttttgtctgatgtttgtggcttcccagaaataagaaagtacatttctagattctt

SEQ ID NO: 4090 - DNA, 385 bp, Zea mays
  Clone ID: LIB3061-027-Q1-K1-B11
cacgtagcggcgcgctctagcacgactctaacacaacggctccagcagataccggtcttgcgcatctagcgttctagcgagctcaacagatgcctccatatgcacagtgctcactagctgctagtgccgttactccacagttcctataaccagtatctacaacgggctcagaacatgcaaccgtgcaagcctacacgctacagctagcgcttgcggccagcgccttacaacaacctattgcacaattgcaacatcaatacttggcacatctaaccctgcaaaccattgtaacgcaacagctacagcaacaacagctgctgccattactgatccacctagccgaggcgaaccctgtgacctacttgcaacagcagctgtttgcata

SEQ ID NO: 4091 - DNA, 435 bp, Zea mays
  Clone ID: LIB3061-027-Q1-K1-B12
gcgaagatggcgatgaccgtcgaagtgcttgctgcactcgcgttcatgttttccacgagtattctactgcagatactggcatgcgctttgtacaacaactggtggcccatgttagcagctctcatgtacgtccttgtaccaatgccatgcctgttttttggtggtggatccacacacttcttgaccagcagagaaggtggagggtggattaatgctgcaaaattcttgactggtgcgtcggccatgggaagccttgctattccagcaattctgaggcacgctggcttaatcgagaccggggccatgttcatcgagttcacgtccttcttcatccttgtatgcacagtgctgtgcttccatagggcgactctggatgaagactggtaaatgcgcatttcaccgtcaccctgaaccctagcggttcttggctgcttc

SEQ ID NO: 4092 - DNA, 372 bp, Zea mays
  unsure (1)..(372): unsure at all n locations; Clone ID: LIB3061-027-Q1-K1-B2
agcagctagcacatcaaacaagtggcgacagacaaagatttgtgagggtgatccgcgctgagaagagatggctaagatcgccgcggcggcggcggcggcgctgtgcttcgcggccctggtggccgtggccgtctgccaaggcgaggtcgagcggcagaggctcagggacctgcagtgctggcaggaggtccaggagagcccgctcgacgcgtgccgccaggtcctcgaccggcagctaaccggcggcggcggcggcggcggcgttggcccgttccggtggggcaccgggctccggatgcggtgctgccagcagctccaggacgtgagccgcgagtgccgctgcgccgncatccggagcatggtcaggggata

SEQ ID NO: 4093 - DNA, 409 bp, Zea mays
  Clone ID: LIB3061-027-Q1-K1-B3
ccacgcgtccgaccacgcgtgcgccatttttcatgctgttgacattaaatttcagtgatggttgcaactgttagagctcctcaattggatggcctgttgattttcagaagcgaaaagacagcttcgtcagagatagagctctagtcctacgggagttgtactctgctgcacagcgcgagtcttgcattgggcaacaagaaattctggaaagagagaacctaccaagagctgagacgtctattcatggaatcgtgacaaacatcgctaggtatgacactgaacatgaaaagttggctccacccaagaatgatctgatgaatcacagccgcagcaaccctgcaaaacggcacgtggaaggcactgattgccactcgtcattgccaaagatactgaagtactttctgaaaga

SEQ ID NO: 4094 - DNA, 404 bp, Zea mays
  Clone ID: LIB3061-027-Q1-K1-B4
cccacgcgtccggagaccaactagcatcatagaaagcacaatagtgtaccaacaatggcagctaaaatattttgcctccttatgctccttggtctttctgcaagtgctgctacggcgaccattttcccacaatgctcacaagctcctatagcttcccttcttcccccgtacctctcaccaacggtgtcttcggtatgtgaaaacccaattcttcaaccctacaggatccaacaggcaatcgcagctggcatcttacctttatcacccttgttcctccaacaatcatcagccctattacagcagttacctttggtgcatttattggcacaaaacatcatggcacaacaactacaacaacttgtgctagcaaaccttgctgcctactctcagcaacagcagtttct

SEQ ID NO: 4095 - DNA, 426 bp, Zea mays
  Clone ID: LIB3061-027-Q1-K1-B5
ctgccgcctacctacaacagtaacaactgctttcatctagcccgctcgctgtggccaatgcacctacatacctgcaacaagaattgttgcaacagattgtaccagctctaactcagctagctgtggcaaaccctgttgcctacttgcaacagctgcttccattcaaccaactaactatgtcgaactctgttgcgtacctacaacagcgacaacagttacttaatccattggcagtggctaacccattggtcgctgccttcctacagcagcaacaattgctgccatacaaccggttctctttgatgaatcctgtcttgtcgaggcagcaacccatcgttggaggtgccatcttttagattacatatgagatgtactcgataatggtgccctcataccggcatgtgttttctagaaataatcaatata

SEQ ID NO: 4096 - DNA, 423 bp, Zea mays
  Clone ID: LIB3061-027-Q1-K1-B6
caactagcaacatacaaagcacaatagtgtaccaacaatggcagccaaaatattttgcctccttatgctccttggtctttctgcaagtgctgctacggcgaccattttcccgcaatgctcgcaagctcctatagcttcccttcttcccccgtacctctcaccagcggtgtcttcggtatgtgaaaacccaattcttcaaccctacaggatccaacaggcaatcgcagctggcatcttacctttatcacccttgttccttcaacaatcatcagccctattacaacagttacctttggtgcatttattggcacataacatcagggcacaacaactacaacaacttgtgctagcaaaccttgctgcctactctcagcaacagcagtttctttcattcaaccaactaggttcattgaactctgcttc

SEQ ID NO: 4097 - DNA, 432 bp, Zea mays
  Clone ID: LIB3061-027-Q1-K1-B8
cttacaacaaccaattgcccaattgcaacaacaatccttggcacatctaaccctacaaaccattgcaacgcaacaacaacaacaacagtttctgccatcactgagccacctagccgtggtgaaccctgtcacctacttgcaacagcagctgcttgcatccaacccacttgctctggcgaacgtagctgcataccagcaacaacaacagctgcaacagtttatgccagtgctcagtcaactagccatggtgaaccctgccgtctacctacaactactttcatctagcccgctcgcggtgggcaatgcacctacgtacctacaacaacagttgctgcaacaaattgtaccagctctgactcagctagctgtggcaaaccctgctgcctacttacaacagttgctttcattcaaccaactggctgtgtcaaactc

SEQ ID NO: 4098 - DNA, 423 bp, Zea mays
  Clone ID: LIB3061-027-Q1-K1-B9
ctcgatgctgaactgaatctggttggtgtttatggtctgacgtgcaagcgtgagctttgggagggtccagtatgcactgagcaagatccgtaatgctaaaaggcacttgctcacccttgacgagaagaacccccgtcgtatctttgagggtgaagcacttcttcgacgcatgaaccgctatgggctgcttgcttagggtcagaacaagcttgattatgtacttgccctcaccgttgagaacttacttgcatggcggattcaaacacttggcttcaaggctggcatggccatatccattaaccatgctggagtcttgatcaagcagggttacatcagggttggcaggcaaattgtcaacgtaccatcattcatggtgagggtggaatctgaaaatcacattgacttttcaatgtcaaacccatt

SEQ ID NO: 4099 - DNA, 373 bp, Zea mays
  Clone ID: LIB3061-027-Q1-K1-C1
gatcagcaaagcggcagtgcgtagagtaggatcgtcgaacagaacagcatgaagatggtcatcgttctcgtcgtgtgcctggctctgtcagctgccagcgcctctgcaatgcagatgccctgcccctgcgcggggctgcagggcttgtacggcgctggcgccggcctgacgacgatgatgggcgccggcgggctgtacccctacgcggagtacctgaggcagccgcagtgcagcccgctggcggcggcgccctactacgccgggtgtgggcagccgagcgccatgttccagccgctccggcaacagtgctgccagcagcagatgaggatgatggacgtgcagtccgtcgcgcagcatctgcagatgatgatgc

SEQ ID NO: 4100 - DNA, 438 bp, Zea mays
  Clone ID: LIB3061-027-Q1-K1-C10
gagaccagcaagcaacatagaaagtagattccattagcaacaatagagcaacaatggcgaccaagatattttccctccttatgctccttgctctttctacatgtgttgctaacgcgacaattttccctcaatgctcacaagctcctatagcttcccttcttcccccataccttccatcaattatagcttcagtatgtgaaaacccagctcttcaaccatataggcttcaacaagcaatcgcagcaagcaacatacctttatcgcccttgttgtttcaacaatcaccagccctatctttggtgcagtcattggtacaaaccatcagggcacaacagctgcagcaactcgtgctacctgtgatcaaccaagtagctctggcaaacctttctccctactctcagcaacaacaatttcttccattcaaccaactgtctacac

SEQ ID NO: 4101 - DNA, 427 bp, Zea mays
  Clone ID: LIB3061-027-Q1-K1-A5
cccacgcgtccggggcagatacggttcctagtatatactttggagaatgcaatcttgagcctgcctgaaggccaagaaaaaatggtatggctgattgatttcacaggatggacagtgtcccatgcttcgccgataaagacttgtagagaaactgcaaatatactgcaaaatcattttcctgaaaggctggccattggatttctatttaatccccccaaagtatttgaagctttttataaggtcatcaagattttcctcgatccaaaatcagtcgagaaggtgaacttcgtgtacgagaaggatgaggagagcatgaaggtcatgtacaaatacatcgatccggaagtcctttctgtagagtttgtagggaagagcaatgtggtgtacaaccacgaggagtactccgagttaatgagacaagatgaca

SEQ ID NO: 4102 - DNA, 450 bp, Zea mays
  Clone ID: LIB3061-026-Q1-K1-G8
cagcacaacaactacaacaacggttgcttccaacaattaatcaagtagttgcagcgaaccttgctgcttaccttgagcaacaacaatttcttccattcaatcaactagctggggtgaaccctgctgcttacttgcaggcacaacagctactaccattcaaccaacttgtcgggagccctgctgccatcttattgcagcaacagttgctgccattccgtctacaagttgttgcaaacattgctgctttcttgcaacaacaacaattgctgccattttacccacaggttgtgggaaacattaacgccttcttgcaacaacaacaattgctgccattctacccacaggatgtggcaaacattgtcgccttcttacaacaacagcaattgctgccatttagccaactcgctttgacgaatcctaccaccttattgcatcagcccaccattggtg

SEQ ID NO: 4103 - DNA, 278 bp, Zea mays
  Clone ID: LIB3061-026-Q1-K1-H1
gagcattcaaaaacacggcaagcgaagcgcactatcaacttcttaacatcaatggctaccaatatattatccgttctttttctaattgcccttgatgttagctctacaaattcattcattattccacaatgctcacttgctcctagtaccattattccacagttccttccaccatttacttcaatgagcttcgaacacctatctatacaagccaacattcatcaacaatctctttcatctaacttcttacaacaaccaattatccaattgtaacaaca

SEQ ID NO: 4104 - DNA, 304 bp, Zea mays
  Clone ID: LIB3061-026-Q1-K1-H10
tcgcgacaagcagggagttcacctcgctcttgtgcagtgagctcgactagatgggtgactgcataacaaaacccatcgttgtcggatcggagatgatgagttccgtcgtcgtggatgctgctgctaccagcatcgctcctgaagaagacgcttcttccctgaggccgtccagccagcggagtctggcggtatgcgcagacccttgtcttggaccttactctattctacgtgccatcgcagctggcatctcacctttatcacccttgtttcgtcaacaatcatgaggcctattacaacagatacc

SEQ ID NO: 4105 - DNA, 426 bp, Zea mays
  Clone ID: LIB3061-026-Q1-K1-H11
gcaacatagaaagcacaatagtgtacctacaatggcagccaaaatattttgcctccttatgctccttggtatttctgcaagtgctgctacggcgaccattttcccgcaatgctcacaagctcctatagcttcccttcttcccccgtacctctcaccagcggtgtcttcggtatgtgaaaacccaattcttcaaccctacaggatccaacaggcaatcgcagctggcatcttacctttatcacccttgttcctccaacaatcatcagccctattacagcagttacctttggtgcatttattggcacaaaacatcagggcacaacaactacaacaacttgtgctagcaaaccttgctgcctactctcagcaacagcagtttcttccattcaaccaactagctgcattgaactctgcttcttatttgca

SEQ ID NO: 4106 - DNA, 417 bp, Zea mays
  Clone ID: LIB3061-026-Q1-K1-H12
gtccgtgagcataaaaagctcaatagtgtactttcaatggcagccaaaatattttggctccgtatgctcctaggtatttctgcaagtgctgctacagcgaccattttaccgcaatgctcacaagctcctatagcttcccttcttaccccgtacctctcaccagcggtgtcttcggtatgtgaaaacccaattcttcaaccctacaggatccaacaggcaatcgcagctggcatcttacctttatcacccttgctcctccaacaatcatcagccctattacagcagttacctttggtgcatttattggcacaaaacatcagggcacaacaactacaacaacttgtgctagcaaaccttgctgcctactctcaacaacagcaagttcttccattcaaccaactagcttcattgaactct

SEQ ID NO: 4107 - DNA, 439 bp, Zea mays
  Clone ID: LIB3061-026-Q1-K1-H2
gaccaactagcaacatagaaagcacaatagtgtaccaacaatggcagccaaaatattttgcctgcttatgctccttggtctttctgcaagtgctgctacggcgaccattttcccgcaatgctcgcaagctcctatagcttcccttcttcccccgtacctctcaccagcggtgtcttcggtatgtgaaaacccaattcttcaaccctacaggatccaacaggcaatcgcagctggcatcttacctttatcacccttgttccttcaacaatcatcagccctattacaacagttacctttggtgcatttattggcacaaaacatcatggcacaacaactacaacaacttgtgctagcaaaccttgctgcctactctcagcaacagcagtttcttccattcaaccaactaggttcattgaactctgcttcttatttgcaacaa

SEQ ID NO: 4108 - DNA, 442 bp, Zea mays
  unsure (1)..(442): unsure at all n locations; Clone ID: LIB3061-026-Q1-K1-H4
cggttccggattcgagccacgcgtccggagctccgccgnctccccgtctctcgccgatcttccccaaaccctagcctcgacctgagcgccagcgggcccgcaggccggagaaggagtcggagtcgcccccacccacccaccctctgccgcgggcggtgagcgggcggcggacgagatgccgtcgcacggcgatctggaccggcagatcgcgcagctgcgcgactgcaagtacctgcccgaggcggaggtcaaggtgctctgcgagcaggccaaggccatcctcatggaagaatggaacgtgcagcccgtgcgcctgcccgtcaccgtccgcggcgacatccacggccagttctatgacctcatcgagctcttccgcatcggcggcgactctgccgacaccaactacctgttcatgggcgactacgtcgatcgtggctattat

SEQ ID NO: 4109 - DNA, 436 bp, Zea mays
  Clone ID: LIB3061-026-Q1-K1-H5
tccggttcggggttcgagggtcgcgccacgcgtccgactcgcgtgccgttgaactctgttcgttattgtagcacctactgctaccacggatcgagttacatgctgcctaggttcaggatcggctgccatggaaccaactggtggcacagatcgtctctgatgatgtacaggcggagcagctagtatcattcaaccagctatctgacgtgagcgctgttaccttgttgatccagccacacgtggtgccgttctaccagctcgctgaggctaacacttgctacaatcttacaactgacacaattgttgccagtctaccaactcgctatgactaactcagcaacgtgctagctactgcccatcatgggtggtgccacatgttagacctcttaggagttgtagttgagtatgcaagtttattgtcagatgatcgtggctc

SEQ ID NO: 4110 - DNA, 297 bp, Zea mays
  Clone ID: LIB3061-026-Q1-K1-H7
tttacagcagcatcatctactaccattcatccagctagctggtgtgagccctgctaccgtcttgatacaaccacagttgttgccgttctaccagcacgctgcgcctaacgctggcaccctcttacaactgcaacaattgctgccattcaaccaacttgctttgacaaacccagcagcgttctaccaacaacccatcattggtggtgccctcttttagatttcttatgagttatagttcaataataaagttttttgtctgatgtttgtggcttcccagaaataagaaagtacatttct

SEQ ID NO: 4111 - DNA, 117 bp, Zea mays
  Clone ID: LIB3061-026-Q1-K1-H8
acattttaaaaagtcatcgctggcctttaccatctaatacatcatgctgacgatcgcgcactttaacaaccatactaggattatctgagcaagtacactatcgctactgcgggctgc

SEQ ID NO: 4112 - DNA, 404 bp, Zea mays
  Clone ID: LIB3061-026-Q1-K1-H9
attgagaccaactagcaacatagaaagtcacaatagtgtaccaacaatggcaggcaagatattttgcctacttatgctcataggtactttctgcaagtgctgctacggcgaccattctcccgcaatgctcgcaagctcctatagcttcccttcttgcctcgtacctctcaccatcggtgtcttcggtatgtgaaaacccaattcttcaaccctacaggatccaacaggcaatcgcagctggcatctcacctttatcacccttgttcattcaacaatcatcagccctattacaacagttacctatggtgcattgattgtcacaaaacatcacggcacaacaactacgacaacttgtgctagcaaaccttgctgcctactctcatcatcagcagtttcttgcattc

SEQ ID NO: 4113 - DNA, 421 bp, Zea mays
  Clone ID: LIB3061-027-Q1-K1-A12
ctctcaccagcggtgtcttcagtatgtgtaaacccaattcttcaaccctacaggatccaacaggcaatcgcagcaggcatcttacctttatcacccttgttcctccaacaaccgtcagccctattacagcagttacctttggtgcatttgttggcacaaaacatcaaggcacaacaactacaacaacttgtgctaggaaaccttgctgcctactctcagcaacagcagtttcttacattcaaccaactggctgcattgaactctgctgcttatttgcaacaacaactaccattcagtcagctagctgctgcctacccccagcaatttcttccattcaaccaactggcagcattgaactctgctgcttatttacaacagcaacagctaccaccattcagccagctagctgatgtgagccctg

SEQ ID NO: 4114 - DNA, 416 bp, Zea mays
  unsure (1)..(416): unsure at all n locations; Clone ID: LIB3061-027-Q1-K1-A2
acgaaaaaatctgttcataacagcccaagttaagagagatgcctgtgttcatgtcgtgaacacttgggatgaattcacaactgctctgaataacaaaaagttgatcttggctccatggtgtgatgaggaggaaattgagaaagatgtaaaaactcggacaaaaggggaacttggagctgcgaaaacattgtgtactccatttgagcagccagaacttccagaaggtaccctgtgctttgcatctggaaagccagcgaagaagtggtcgttctggggccgcagctactgattgcctgtgctgggattatntctggattcagttctagtgagttatgtagctttgaagtgtcggatacanatccaaaaatccatttacattgcgttttacatcgacttgcagttctcatgtcatcact

SEQ ID NO: 4115 - DNA, 310 bp, Zea mays
  Clone ID: LIB3061-027-Q1-K1-A3
tgccaacaatgctctccagtatcaagagcaaaaccctcagcgagctggaagtacccctgcaggctcaggctccctcaaccaatttggttcccttttgctgtggttgctggaaggccgtccttcggatggcttagttccttcctccttaaggtccaaaaaggtcctgatcaagggccagaataccccgatccaacttgaaatggaaatgatccagggacataaaatcatggggattaaagtgggcccatgactgaactcgagtgctttggccgcagcagtctctttctaatatgatataatgccagcacct

SEQ ID NO: 4116 - DNA, 419 bp, Zea mays
  Clone ID: LIB3061-027-Q1-K1-A4
ggaatacccggcgttggattgggttcaaagttgggcttttggacagctgtggtgtgcacggcagctctgtgacttgtgaggaggaagggaggaagaaagcggatccatggcgtcgaagcggatcctcaaggagctcaaggacctgcagaaggatcctcccacctcttgcagcgcaggccctgttgccgaagatatgttctactggcaggcgacgattatggggccatcagatagcccatacgctggtggcgtatttttggtcactattcactttccaccggactacccattcaaaccaccgaaggttgcattcaagacgaaggtttaccatccgaatatcaacagcaacgggagcatctgtcttgatatcttgaaggagcaatggagccctgcactgacagtttctaaagtcctcctct

SEQ ID NO: 4117 - DNA, 429 bp, Zea mays
  Clone ID: LIB3061-026-Q1-K1-G7
ttgagcattcataaacacaccaagcgaagcgcactatcatcgactctaacaacaatggctaccaagatattagcgctccttgcgcttcttgccctttttgtgagcgcaacaaatgcgttcattattccacaatgctcacttgctcctagtgccattattccacagttccttccaccagttacttcaatgggcttcgaacacctagctatgcaagccaacatgcaacaacaagcgcttgcggcgagcgtcttacaacaaccaattgcccaattgcaacaacaatccttgccacatctaacaatacaagccatcacaacgcaacagcaacaactgttcctaccagcactgaaccacctagccatggtgaaccctgccgtctacttgcaagagcatctgcttgcattcaacccacttgctctggcgaacgta

SEQ ID NO: 4118 - DNA, 438 bp, Zea mays
  Clone ID: LIB3061-008-Q1-K1-B1
cagcaactacgacatcttgtgctagcatacctagttgcctactctcagcaacagcagtttcttccattcaaccaactagctgcattgaactctgcttcttatttgcaacaacaacaactaccattcagccagctatctgctgcctacccccagcaatttcttccattcaaccaactgacagcattgaactctcctgcttatttacagcagcaacaactactaccattcagccagctagctggtgtgagccctgctaccttcttgacacaaccacagttgttgccgttctaccagcacgctgcgcctaacgctggcaccctcttacaactgcaacaattgctgccattcaaccaacttgctttgacaaacccagcagcattctaccaacaacccatcattggtggtgccctcttttagaattcttatgagttataggtc

SEQ ID NO: 4119 - DNA, 415 bp, Zea mays
  Clone ID: LIB3061-008-Q1-K1-B10
tgggacctacaagctcattttaagttttatccagtagcaacaacagagcaacaatggcgaccaagatattttccctccttatgctccttgctctttctgcatgtgttgctaacgcgacaattttccctcaatgctcacaagctcctatagcttcccttcttcccccataccttccatcaatgatagcttcagtatgtgaaaacccagctcttcagccctataggctccaacaagcaatcgcagcaagcaacatacctttatcacccttgttgtttcaacaatcgccagccctatctttggtgcagtcattggtacaaaccatcagggcacagcagctgcagcaactcgtgctacctgtgatcaaccaagtagctctggcaaacctttctccctactctcagcaacaacaatttct

SEQ ID NO: 4120 - DNA, 419 bp, Zea mays
  Clone ID: LIB3061-008-Q1-K1-B11
ctggaatctctccccggtttctctctcctatagagtataaaacctgaaccctgcacccttgaagcgcccaacccgccatattcaagagccctcatcgaaagcatgaaggagatctgactgatggcttggggtcgcggtggtccgctacacctgaatcacaccatcgaagtcgttcgaacccggcatgtgctcgagtaggggtcgtcgggtacactgagtgtgtccaggacctcttcgtgcaagctcgatgatcggagagctcgtcgccatgaaaactgagatggatcgccgccgtgaatctatgcctggcgtggtcaagaacaggtaccacaagatgaggcgcatggaggatgttgtgacatgttcgtgcgaggtctaagccgtcgtctcccaatcaactttgggttgctggatcattg

SEQ ID NO: 4121 - DNA, 419 bp, Zea mays
  Clone ID: LIB3061-008-Q1-K1-B12
gcggagatgaccagtgttttctagcttattggaaccgctcgaggttggggtttccatggagagtgacccgattgtcggaggggaggcgccttctcgctcgaggtgggaagcgagccggtgggcgcccgtggaggctgcgctgaatcggatgagtaaatggctggtggctggttgttttgcttttgcagctatttggaagcgtgatgctgaaatcatgtgggttttgctgggtgcggttggcaactctctgctttcgttggttctcaagaagatgctaaaccatgaaagacctgcaccagctttgcggtctgatcctgggatgccatcgtcccatgcacaatccatattctatgctgcgaccgtcctagctctttcattgtactactggcttgggacaaattatctgaccatgattcttg

SEQ ID NO: 4122 - DNA, 409 bp, Zea mays
  Clone ID: LIB3061-008-Q1-K1-B2
cggcggagaagtgcaaggaagcgggcggccgccattgtgaagggacgtacgggatagcgcgtcaggctctacgtccggggcaccatcctcggatacaagaggtccaagtcgaaccagtacgagaccacgtcgctcgttcagatcgagggggtgaacaccaaggaggacgtcgcgtggtacgctggcaagcgcatggcgtacatctacaaggctaagaccaagagcagcgagacccgctacaggtgcatctggggcaaggtcacccgcccgcacggcaactcgggcgtcgtccgcgccaagttcaagtccaaccttccgcctgagtccatggggcgcaaggtcagagtgttcatgtacccgagcagcatctaaggttaggtttttggtggagtaaaggtggactctaaat

SEQ ID NO: 4123 - DNA, 380 bp, Zea mays
  Clone ID: LIB3061-008-Q1-K1-B3
gcgacatatagagctcaatagtgtacctacaatgttagccaaaatattttgcttcctgatgctccttggtctttctgcaagtgttgctaccgcaaccattttcccacaatgctcacaagctcctatagcttcccttcttcccccatacctctcaccagcggtgtcttcaatgtgtgaaaccccaattgttcaaccctacaggatccaacaggcaatcgcaacaggcatcttaccattatcacccttgttcctccaacaaccgtcagccctattacagcagttacctttggtccatttggtggcacaaaacatcagggcacaacaactacaacaacttgtgctagcaaaccttgctgcatactctcagcaacatcagtttc

SEQ ID NO: 4124 - DNA, 279 bp, Zea mays
  Clone ID: LIB3061-008-Q1-K1-B4
attgcaccaagaaatccatcgagaggctgccgactggggaattaatggcgtcgtcgtgtagcaggagccaccgccgcctcatcctcgcagccgccgtcctgctctccgtgctcgcggctgccagcgccagcgccgggacctcctgcgtgccggggtgggccatcccgcacaacccgctcccgagctgccgctggtacgtgaccagccggacctgcggcatcgggccgcgccttccgtggccggagctgaagaggagatgccggcgggagctggcggaca

SEQ ID NO: 4125 - DNA, 434 bp, Zea mays
  Clone ID: LIB3061-008-Q1-K1-B5
ctggcattttacctttatttttctagctcctccaacaatcatcagccctattacatcagttacctttggtgcatttattggcacaaaacatcagggcacaacaactacaacaacttgtgctagcaaaccttgctgcctactctcagcaacagcagtttcttccattcaaccaactagctgcattgaactctgcttcttatttgcaacaacaacaactaccattcagccagctacctgctgcctacccccagcaatttcttccattcaaccaactggcagcattgaactctcctgcttatttacagcagcaacaactactaccattcagccagctagctggtgtgagccctgctaccttcttgatacaaccacagttgttgccgttctaccagcacgctgcgcctaacgctggcaccctcttacaactgcaacaa

SEQ ID NO: 4126 - DNA, 410 bp, Zea mays
  Clone ID: LIB3061-008-Q1-K1-B6
ccgacgcttccgactacatttacaactttttgtgctagcaaaccttgctgcatactctgagcaacatcagtttcttccattcaaccaactggctgcattgaactctgctgcttatttgcaacaacaattaccattcagccagctagttgctgcctacccccagcaatttcttccattcaaccaactagcagcattgaactctgctgcttatttacagcagcaacaactactaccattcagccagctagctgatgtgagccctgctgccttcttgacacaacaacagttgttgccgttctacctgcacgctatgcctaacgctggcaccctcttacaactgcaacaattgctgccattcaaccaacttgctttgacaaacccaacagtgttctaccaacaacccatcattg

SEQ ID NO: 4127 - DNA, 419 bp, Zea mays
  Clone ID: LIB3061-008-Q1-K1-B7
caggaggtacacgcgtcgactgacaagctgaggggagcagtcggcgggcgatggtcggcggcggcgcacatggcggcaccacctacaaaggctacaccatcccacacaacaagcgctggcacaccgtcgccggcaagggcctgtgcgctgtgatgtggttctgggtcttctacagggctaagcaggatggtgctacgctcttgggtttgcgtcatccttgggatgggcatgatgaccactctcatggtcatggacatgggaatgaggcatcgtgacattaagttgcctactctcggcggacggtgatttgatgctttgcatgtcacaacaactaaagattgagttaataaattctaccacccttcatggtactcatgttgtatgtactcatgttgtatgcaactggtttagcacaaact

SEQ ID NO: 4128 - DNA, 442 bp, Zea mays
  Clone ID: LIB3061-008-Q1-K1-B8
atggagaccaacatgcaacttagaaactggaatccagtagcaacaacagagcaacaatggcgaccaagatattttccctccttatgctccttgctctttctgcatgtgttgctaacgcgacaattttccctcaatgctcacaagctcctatagcttcccttcttcccccataccttccatcaatgatagcttcagtatgtgaaaacccagctcttcagccctataggctccaacaagcaatcgcagcaagcaacatacctttatcacccttgttgtttcaacaatcgccagccctatctttggtgcagtcattggtacaaaccatcagggcacagcagctgcagcaactcgtgctacctgtgatcaaccaagtagctctggcaaacctttctccctactctcagcaacaacaatttcttccattcaaccaactgtctacact

SEQ ID NO: 4129 - DNA, 190 bp, Zea mays
  Clone ID: LIB3061-008-Q1-K1-B9
atgttatattgcgagtaatttatggtcttgtagcggtggagtaaataaagaaaaaggggaaaaaaaaaaaaaaaaaaaaaaaaaaaaggacagacgaaaaaaaagaacacggcaaaacaaacaaaaaacaagcaaaagcaaaaaaaaaacaaaagagaaacctaaaaacaaggggacgggccgtcgaggg

SEQ ID NO: 4130 - DNA, 387 bp, Zea mays
  Clone ID: LIB3061-008-Q1-K1-C1
gagggtgctgatcgttgcccttgcttcattggcgtccgctgcgagcgccgcctccagtgcaagcggcggctgtggctgccagacaccaccgtttcatctaccgcctccgttctatatgccgcctccgttctatctgccgccgcagcagcagccgcagccatggcaataccccactcaaccaccgcagctaagcccgtgccagcagttcggatcctgcggcgtcggcagcgtcggcagcccgttcctgggccagtgcgtcgagttcctgaggcaccagtgcagcccggcggcgacgccctacggctcgccacagtgccaggcgctgcagcagcagtgctgccaccagatcaggcaggtggagccgctgcaccggtaccaggcgacata

SEQ ID NO: 4131 - DNA, 413 bp, Zea mays
  Clone ID: LIB3061-008-Q1-K1-C10
cagcaactgttgcatcagttacttgactgggtatgcagctacgtttgccaaagcaagtgggttggatgcaagcagctgttgttgcaggtaggcgatagggctcaccgaaggtaggtgggtcattacatgctgttacatcacagagatggttggcatggttagatatgatatggattgagaatgtgacagtaaataatttgaatgagtcgatggctcatgatctacggtatagcgcaagtccgtgatcggtcgcttcaatcatgataagacacgttttgtttcgttgctgtctacacgatcatgcggacttggtattaatttcacaactgcaaatactgtgatcatatatgatatagattataacccacatgctgatatacaggcgatgaacaaggcacacaaaattggacaat

SEQ ID NO: 4132 - DNA, 414 bp, Zea mays
  Clone ID: LIB3061-008-Q1-K1-C12
tggaatcacaccagtcgtctgcacttctaatcacctaacaacaatggctaccaagatattatccctccttgcgcttcttgcgctttttgcgagcgcaacaaatgcgtccattattccacaatgctcacttgctcctagttccattattccacagctcctaccaccagatacttcaatggccttcgaacacccagctgtgcaagcctataggctacaacaagcgattgcggcgagcgtcttacaacatccaattgcccaattgcaacaacaatacttggcacatataacaatacaaaccatcgcaacgcaacagctacaacagttactaccagcactgagccacctagccatggtgaaccctgtcgcctacttgcaacagcagctgcttgcatccaacccacttgctctagcaaa

SEQ ID NO: 4133 - DNA, 371 bp, Zea mays
  unsure (1)..(371): unsure at all n locations; Clone ID: LIB3061-008-Q1-K1-C2
ctgttttttggtttttaccaaaatatctcngctatttatatgtgtgtgtactgtcatgaaaactgcttcatcgccatcataataagaccaccacttatttgctgtgactgaacaacatgcatggatggatcctcacgaggaggagttgtcaactgacggacttttgacccagtgaacacactcaccgcaccgcgtcggtctctctgttctttttgtagacatatagtagatatacaaattcgaaaggaaatggaagaaaagaagagagaatgaggcgaaaagaaatggaaagaatccacagaagaaacaatggcactactgatgagagcagggaagatccatggacaagggaggtaggtaccgtctgatcg

SEQ ID NO: 4134 - DNA, 437 bp, Zea mays
  Clone ID: LIB3061-008-Q1-K1-A9
ccaactagcagcatataaggcacattagtgtacctctcttggcactcaaaatattttgcctccttatgctccttggtctttctgcaagtgctgctacggcgaccattttcccgcaatgctcgcaagctcctatagcttcccttcttcccccgtacctctcaccagcggtgtcttcggtatgtgaaaacccaattcttcaaccctacaggatccaacaggcaatcgcagctggcatcttacctttatcacccttgttcctccaacaatcatcagccctattacaacagttacctttggtgcatttattggcacaaaacatcagggcacaacaactacaacaacttgtgctagcaaaccttgctgcctactctcagcaacagcagtttcttccattcaaccaactaggttcattgaactctgcttcttatttgcaacaa

SEQ ID NO: 4135 - DNA, 466 bp, Zea mays
  Clone ID: LIB3061-007-Q1-K1-H4
cggttcggaatactcgacccacgcgttcgaggattcgaaaacacaccatgcgaatttactttcaacgacctaacaccaatggctaccaagatattagccctccttgcgcttcttgcccttttagtgagcgcaacaaatgcgttcattattccacagtgctcacttgctcctagtgccagtattccacagttcctcccaccagttacttcaatgggcttcgaacatccagccgtgcaagcctacaggctacaactagcgcttgcggcgagcgccttacaacaaccaattgcccaattgcaacaacaatccttggcacatctaaccctacaaaccattgcaacgcaacaacaacaacaacagtttctgccatcactgagccacctagccgtggtgaaccctgtcacctacttgcaacagcagcttgtttgcatccaacccacttgctctggcgaacgtagctgcatac

SEQ ID NO: 4136 - DNA, 434 bp, Zea mays
  unsure (1)..(434): unsure at all n locations; Clone ID: LIB3061-007-Q1-K1-H5
gcggcgacatagaaagctcaatagtgtactctcaatggcagccaaaatattttgcctccttatgctccttggtctttctgcaagtgctgctacggcgaccattttcccgcaatgctcgcaagctcctatagcttcccttcttcccccgtacctctcaccagcggtgtcttcggtatgtgaaaacccaattcttcaaccctacaggatccaacaggcaatcacagctggcatcttacctttatcacccttgttcctccaacaatcatcagccctattacatcagttacctttggtgcatttattggcacanaacatcagggcacaacaactacaacaacttgtgctagcaaaccttgctgcctactctcagcaccagcagtttcttccattcaaccaactagctgcattgaactctgcnttctatttgcaacaac

SEQ ID NO: 4137 - DNA, 313 bp, Zea mays
  Clone ID: LIB3061-007-Q1-K1-H6
caatagagcaacattggcgacgaagatattagccctccttatgctccttgctctttctacatgtgttgctaacgcgacaattgtccctcaatgctcacaagctcctatagctttcctacttcccccataccttccatcaattatagcttcagtatgtgaaaacccagctcttcaaccatataggcttcaacaagcaatcgcagcacgcaacatacctctatcgcccttgttgctacaacattcaccagccctatctcaggtgcagtcactggtacaaaccatccaggcactacagctgcagcagctagcgcta

SEQ ID NO: 4138 - DNA, 433 bp, Zea mays
  unsure (1)..(433): unsure at all n locations; Clone ID: LIB3061-007-Q1-K1-H7
gcgacgaactagcaacatagaaagctcatcattgtaccaacaatggcagccaaaatatttggcttccttatgctccttggtctttctgcaagtgttgctaccgcaaccattttcccacaatgctcacaagctcctatagcttcccttcttcccccatacctctcaccagcggtgtcttcaatgtgtgaaaccccaattgttcaaccctacaggatccaacaggcaatcgcaacaggcatcttaccattatcacccttgttcctccaacaaccgtcagccctattacagcagttacctttggtccatttggtggcacaaaacatcagggcacaacaactacaacaacttgtgctaggcaaccttgctgcatactctcagcancatcagtttcttccattcaaccaactggctgcattgaactctgctgcttatt

SEQ ID NO: 4139 - DNA, 377 bp, Zea mays
  Clone ID: LIB3061-007-Q1-K1-H8
gcgagtgagaccaactatcaacatttaatcttcaatagtgtaccaacaatggcagccaagatattttgcttccttatgctccttggtctttctgcaagtgttgctaccgcaaccattttcccacaatgctcacaagctcctatagcttcccttcttcccccatacctctcaccagcggtgtcttcaatgtgtgaaaacccaattgttcaaccctacaggatccaacaggcaatcgcaacaggcatcttaccattatcacccttgttccttcaacaaccgtcagccctattacagcagttacctttggtccatttggtggcacaaaacatcagggcacaacaactacaacaacttgtgctagcaaaccttgctgcata

SEQ ID NO: 4140 - DNA, 419 bp, Zea mays
  Clone ID: LIB3061-007-Q1-K1-H9
gagcaactagcaacatagaagcacactttgtctttacaatggcagccaaaatattgggcttccttatgctccttggtctttctgcaagtgctgctaccgcaaccattttcccacaatgctcacaagctcctatagcttcctttcttcccccatacctctcaccagcggtgtcttcagtatgtgaaaacccaattcttcaaccctacaggatccaacaggcaatcgcagcaggcatcttacctttatcacccttgttcctccaacaaccgtcagccctattacagcagttacctttggtgcatttgttggcacaaaacatcaaggcacaacaactacaacaacttgtgctaggaaaccttgctgcctactctcagcaacagcagtttcttccattcaaccaactggctgcattgaactct

SEQ ID NO: 4141 - DNA, 392 bp, Zea mays
  Clone ID: LIB3061-008-Q1-K1-A10
cagccctatctttggtgcagtcattggggcaaaccatcagggcacaacagctgcagcaactcgtgctacctctgatcaaccaagtagctctggcaaacctttctccctactctcagcaacaacaatttcttccattcaaccaactgtctacactgaaccctgctgcttatttgcagcaacaactattaccatttagccagctagctactgcctactctcagcatcaacaacttcttccatttaaccaattggccgcactgaaccccgctgcttatttgcagcagcaaatactactaccatttagccagctagctgcagcaaaccgtgcttccttcttgacacagcatcagttgctgcctttctaccagcagtttgcggctaaccccgcaacc

SEQ ID NO: 4142 - DNA, 438 bp, Zea mays
  Clone ID: LIB3061-008-Q1-K1-A11
ccggctcgacccactggtcctccgcattgtcagtctctacagctctgacctttggtccatttggtggcacaaaacgatcagggcacaacaactacaacaacttgtgctagcaaaccttgctgcatactctcagcaacatcagtttcttccattcaaccaactggctgcattgaactctgctgcttatttgcaacaacaattaccattcagccagctagttgctgcctacccccagcaatttcttccattcaaccaactagcagcattgaactctgctgcttatttacagcagcaacaactactaccattcagccagctagctgatgtgagccctgctgccttcttgacacaacaacagttgttgccgttctacctgcacgctatgcctaacgctggcaccctcttacaactgcaacaattgctgccattcaaccaact

SEQ ID NO: 4143 - DNA, 367 bp, Zea mays
  Clone ID: LIB3061-008-Q1-K1-A12
gtgtcattcagatgagtttatcaattccttggcagctagaggtccagggaagtttttgtccaaaaggatgaggtccaattggttggacctatataggagatttctcgaaggccccaattttatgccttggttccggcaaaggcgtgctgctgcggagcaagaacagcagaggctctggaggcaggctcgcatgaatgttgacattgaaaagctaatgtcaaatatgtccgaaatagagaggattgattcttttgatgctgttgagcgttatcttctcagagagatggagaaccctggaaaaggaagtgctgattcaataggggcatgccaaaaattgaaggtagaccttcaagcagcattcaatgta

SEQ ID NO: 4144 - DNA, 398 bp, Zea mays
  Clone ID: LIB3061-008-Q1-K1-A2
tagtattgagaccatctagcaacatagtaagcactttagtgtaccaacaatggcagccaaaatatgttgcctccttatgctccttggtctttctgcaagtgctgctacggcgaccattttcccgcaatgctcgcaagctcctatagcttcccttcttcccccgtacctctcaccagcggtgtcttcggtatgtgaaaacccaattcttcaaccctacaggatccaacaggcaatcacagctggcatcttacctttatcacccttgttcctccaacaatcatcagccctattacatcagttacctttggtgcatttattggcacaaaacatcagggcacaacaactacaacaacttgtgctagcaaaccttgctgcctactctcagcaacagcagtttc

SEQ ID NO: 4145 - DNA, 402 bp, Zea mays
  Clone ID: LIB3061-008-Q1-K1-A3
gcgtgggggttgatagactgcataggaggtcaatggcccatgccacacccataaagactgcaagagaatgtacaagcatcctgcaaaatcattaccctgagaggctggccattgcatttctgttgaatcccccaaaagtattcgaagccttttacagggctgtcaaatatttccttgacccaagatcgatcgagaaactgaacttcgtgtacctgaaggatgaggagagcatgaaggtcctgtacaagtgcattgatcccgtggtccttcctgtggagttcgggggaaagaacagtgttgtgtacaaccatgaggactactccaagttgatgctgcaagaagatatcgaaacatcaagcttctgggaggatgatgcgaaaactgttaaccatgctatcaatg

SEQ ID NO: 4146 - DNA, 404 bp, Zea mays
  unsure (1)..(404): unsure at all n locations; Clone ID: LIB3061-008-Q1-K1-A4
ttgagaatcagcacctgcgaagcacactagcaacttcctaacaacaatggctaccaagatattatccctccttgcgcttcttgcgctttttgcgagcgcaacaaatgcgttcattattccacaatgctcacttgctccaagttccattattacacagttcctcccaccagttacttcaatgggcttcgaacacccagctgtgcaagcctataggctacaacaagcaattgcggcgagcgtcttacaacaaccaatttcccagttgcaacaacaatccttggcacatctaacaatacaaaccatcgcaacgcaacagcaacaacaattcctaccagcactgagccacctagccatggtgaaccctgccgnctacttgcaacagcagttgcttgcatcaaacccac

SEQ ID NO: 4147 - DNA, 209 bp, Zea mays
  Clone ID: LIB3061-008-Q1-K1-A5
cgcccctagctagctagcctggggcggtcacacacacacacacgcgcggtgatgggcgccgagatccgtcgccggtcctcatcgccctctatagtccgtccccccttcctctcctctccctctttgattgtcctctccttttcttctactgtcatctatttttattgcgagggggaaaaatgattcgatggtcaccgatcgatccgtcc

SEQ ID NO: 4148 - DNA, 457 bp, Zea mays
  Clone ID: LIB3061-008-Q1-K1-A6
cgcgtctacagcacagaggcggctgtgcctagggctctagagtactcggcggcgacatctatactggctgaccggcgccattccatcggtgtccgcttctcgcaggtcatgtgtgacctgcttggtgtggttgctcgacactctcctcaattggtgatattttcttttggagcccaagttcttcgtctaaggcatgactggacatggcattttggcgacatcagaatagcacatgctgctagtgttgtttgatattagagacactttttgatttgcttgcatgttttattttcagtttgaggggcacgagtggtcggacttgtttcagtttcagaaaactagggacacttcttttagtttcagaattgagagaagtgtattttagtttcaggattcataatgatagggacacttcactcagcatatgttcggttgtgattaaaaccatggttgtgga

SEQ ID NO: 4149 - DNA, 423 bp, Zea mays
  Clone ID: LIB3061-008-Q1-K1-A7
cagctcttcagccctatagtctccaatctgcaatcgcagcaagcaacatacctttatgacccttgttgtttcaacaatcgccagccctatctttggtgcagtcattggtacaaaccatcagggcacagcagctgcagcaactcgtgctacctgtgatcaaccaagtagctctggcaaacctttctccctactctcagcaacaacaatttcttccattcaaccaactgtctacactgaaccctgctgcttatttgcagcaacaactattaccattcagccagctagctactgcctactctcagcaacaacaacttcttccatttaaccaattggccgcactgaaccccgctgcttatttgcagcagcaaatactactaccatttagccagctagctgcagcaaaccgtgctttcttcttgacac

SEQ ID NO: 4150 - DNA, 416 bp, Zea mays
  Clone ID: LIB3061-008-Q1-K1-A8
gagcaactagcaacatagattgcacaatattgtaccaataatggcagccaaaatattgtgcctcattatgctccttggtctttctgcaagtgctgctacggcgagcattttcccgcaatgctcacaagctcctatagcttcccttcttcccccatacctctcaccagcgatgtcttcagtatgtgaaaatccaattcttctaccctacaggatccaacaggcaatcgcagcaggcatcttacctttatcacccttgttcctccaacaatcatcagccctattacagcagttacctttggtgcatttattggcacaaaacatcagggcacaacaactacaacaactcgtgctagcaaaccttgctgcctactctcagcaacagcagttacctttggtgcatttgttggcacaaaaca

SEQ ID NO: 4151 - DNA, 343 bp, Zea mays
  Clone ID: LIB3061-007-Q1-K1-H2
tcgccgacgcgtccggccaaggtctgggattgctctaaggtcgtcatcatccccgaccactacatcttcaccagcgacgagcgcgccaaccgcaacgtcgatatcctcagggacttctgtctggagcagaacatcaagtacttctatgatatcaaggacctcagcgatttcagggctaatccagactacaagggtgtctgccacattgcacttgctcaggaaggccactgccgaccaggcgaagttctcctgggtactgattctcatacgtgcaatgctggagcctttggtcaatttgcaaccggaattggaaacactgatgcaagttttgtgatgggcactg

SEQ ID NO: 4152 - DNA, 422 bp, Zea mays
  Clone ID: LIB3061-007-Q1-K1-F7
gcggcagaggagaataagaaggtcgatatgcccaaggatgcaggcggagccggaagcgaggagaagaaggacggcaaggaggaggaagagaagaaggacggcggcgagaagaatgaggagaagaaggacggcggcgacggagacggcgacaagaaggacgaggccggcgacaaggacaaggacccggccgccagcctgtacatgcactacccgcggttcccgttcgctggagggtactaccagccgccggcctacccgccgcctccggggtacccgtacgcctaccagccggcctacccgccgccgttctacgcgccgtcgcaccaccacctgcaccagcagcagcccatggcgccgcagatcttcagcgacgagaaccccaacgcctgctccgtcatgtagttgtcactcaaatgtcatgt

SEQ ID NO: 4153 - DNA, 435 bp, Zea mays
  Clone ID: LIB3061-007-Q1-K1-F8
gcgccgactatcaacattgaaagctctttactgtaccaacaatggcagccaaaatattttgcctccttatgctccttggtatttctgcaagtgctgctacggcgaccattttcccgcaatgctcacaagctcctatagcttcccttcttcccccgtacctctcaccagcggtgtcttcggtatgtgaaaacccaattcttcaaccctacaggatccaacaggcaatcgcagctggcatcttacctttatcacccttgttcctccaacaatcatcagccctattacagcagttacctttggtgcatttattggcacaaaacatcagggcacaacaactacaacaacttgtgctagcaaaccttgctgcctactctcagcaacagcagtttcttccattcaaccaactagctgcattgaactctgcttcttatttgc

SEQ ID NO: 4154 - DNA, 410 bp, Zea mays
  Clone ID: LIB3061-007-Q1-K1-F9
cgacccactctcatgtcacagcattacacaccaatactagcgctctagcaacgacctaacaccaatggctaccaagatattagccctccttgcgcttcttgcccttttagtgagcgcaacaaatgcgttcattattccacagtgctcacttgctcctagtgccattattccacagttcctcccaccagttacttcaatgggcttcgaacatccagccgtgcaagcctacaggctacaactagcgcttgcggcgagcgccttacaacaaccaattgcccaattgcaacaacaatccttggcacatctaaccctacaaaccattgcaacgcaacaacaacaacaacaacagtttctgccatcactgagccacctagccgtggtgaaccctgtcacctacttgcaacagcagc

SEQ ID NO: 4155 - DNA, 414 bp, Zea mays
  Clone ID: LIB3061-007-Q1-K1-G10
cagaccattagctttatctactccatatctgcagtactaacccgatcgacaccatgagggtgttgctcgttgccctcgctctcctggctctcgctgcgagcgccacctccacgcatacaagcggcggctgcggctgccagccaccgccgccggttcatctaccgccgccggtgcatctgccacctccggttcacctgccacctccggtgcatctcccaccgccggtccacctgccgccgccggtccacctgccaccgccggtccatgtgccgccgccggttcatctgccgccgccaccatgccactaccctactcaaccgccccggcctcagcctcatccccagccacacccatgcccgtgccaacagccgcatccaagcccgtgccagctgcagggaacctgcggcgttggca

SEQ ID NO: 4156 - DNA, 350 bp, Zea mays
  unsure (1)..(350): unsure at all n locations; Clone ID: LIB3061-007-Q1-K1-G11
ggctacaacaagcgctagcggcgagcgncnaacaacaaccgnnggcccanaaacaacaacaagccnaggcacagcgaaccatacaaaccatcgcaacacaactagagcaacaggnngcgcccgcattgagccaactagccgcggtgaaccctgtctcctacttgcaacagcaactgcttgcatccaacccacttgctctggcgaacacagccgcataccagcaacaactacagttgcaacagtttctaccagctcttagtcaactagccatggtgaaccctgccacatacctgcaacagcaacaactgctttcatctagcccactcgctgtgggcaatgcggctacatac

SEQ ID NO: 4157 - DNA, 438 bp, Zea mays
  unsure (1)..(438): unsure at all n locations; Clone ID: LIB3061-007-Q1-K1-G2
tcggagcaggtcccctctccttatcgtccatgncttcacagcagcagccatggcggccgagccggagaagcaggcggcccccgcggcacaagagacggccgtgcacatcgtgtacgttgaccgccccgaggacgccgaccctgaggagttccacatccgcaccctcacccccgtcctcggcagcgaacagaaggccagggacgcagtgctctaccactacaagaacgccgncagcggcttctccgcgaagctcaccccccagcaggtcaaggatctcaaggagcaaccaggtgttctccaggttgtgccgagccagacttaccagctacatggtcctgggtctggcactcaccagggcacgacacacaccttgggcctatgtgaaggcgtatgagaatcaggaggactgggtttagtatggctgtatggcacaggtct

SEQ ID NO: 4158 - DNA, 439 bp, Zea mays
  Clone ID: LIB3061-007-Q1-K1-G4
tcctcagcttgtcaaccgtcgccccatctttatactccaccacggtcatcattaacatttgttgtccattcttttcaggaccgtcgaggatcgatcaggcgggcagaagcggtcgtcgccggacaagacgcataggtccaccatggatggcgtctaccaccatcaccaccaccaagagtcgccgttgacgggcaacggcgtcgccaccgccggtgagaagctaggcgtggagcggttcgagctgccgctgatctacatctcgctgtcgcggaaggagaaggaagacgatttccttgcgatgaagggcaccaagctgccccagcggcccaagaaaagggctaagaacgtggacaagaccctccatattgccttcccggtatgtggttgtccgatttgacgaaggggacggtacgaggtgcgggagaagaaatgcgtgaag

SEQ ID NO: 4159 - DNA, 436 bp, Zea mays
  unsure (1)..(436): unsure at all n locations; Clone ID: LIB3061-007-Q1-K1-G5
gcggtgcattcataaacatcacctagtanatgcactagcaacgacctaacaacaatggctgccaagacattatccctccttgcgcttcttgccctttttgtgagtgcaacaaatgcgttcattattccacaatgctcacttgctccgagtgccattattccacagttcctccctccagttacttcaatgggcttcgaacacccagctgtgcaagcctataggctacaacaagcgcttgcggcgagcgtcttagaacaaccaattgcccaattacaacaacaatccttggcacatctaaccatacaaaccatcgcaacgcagcagcaacaagcactgagccacctagccgtggtgaaccctatcgcctacttgcaacaacagctgcttgcatccaacccacttgctttggcaaacgtagctgcataccaacaacaac

SEQ ID NO: 4160 - DNA, 389 bp, Zea mays
  Clone ID: LIB3061-007-Q1-K1-G6
tcggcatcaaagaaaggtgcgggacaggaaaaattgctttgagacgtgaaaagattggtgcaacagcccgtttctggcgattttctgctgcttcttatccagaccttatagaggcattaccaaaaaaccgcttacatctgtaaataagacagtgaatggcagttttgttcgaccatccaatgctgggggtgatgtttatcctgtggaatcttacgagagctcagctaaccaagtacttgatgctcactggggtgttctggatgatgatgatgcaactggactttgctcgcataccctctccatccttgtgaatgattgtcctggtgttctcaacattgtaacaagagtctttgctcgcaggggctacaatatacagagccttgctgttg

SEQ ID NO: 4161 - DNA, 437 bp, Zea mays
  Clone ID: LIB3061-007-Q1-K1-G7
gcgttgagcattcagaatcacaccatgctaatcgcactagcaacgacctaacaacaatggctaccaagatattagccctccttgcgcttcttgccctttttgtgagcgcaacaaatgcgttcattattccacaatgctcacttgctcctagtgccattattccacagttcctcccaccagttacttcaatgggcttcgaacacctagctgtgcaagccaacatgcaacaacaagcgcttgcggcgagcgtcttacaacaaccaattgcccaattgcaacaacaatccttgccacatctaacaatacaagccatcacaacgcaacagcaacaacagttcctaccagcactgagccacctagccatggtgaaccctgccgcctacttgcaagagcagctgcttgcatccaacccacttgctctggcgaacgtagttgca

SEQ ID NO: 4162 - DNA, 437 bp, Zea mays
  Clone ID: LIB3061-007-Q1-K1-G8
aggaagcacaatattgtaccattaaatgcagccaaaatattttgcctccttatgctcgttggtctttctgcaagtgctgctacggcgaccattttcccgcaatgctcgcaagctcctatagcttcccttcttcccccgtacctctcaccagcggtgtcttcggtatgtgaaaacccaattcttcaaccctacaggatccaacaggcaatcgcagctggcatcttacctttatcacccttgttcctccaacaatcatcagccctattacaacagttacctttggtgcatttattggcacaaaacatcagggcacaacaactacaacaacttgtgctagcaaaccttgctgcctactctcagcaacagcagtttcttccattcaaccaactaggttcattgaactctgcttcttaattgcaacaacaacaactaccatt

SEQ ID NO: 4163 - DNA, 159 bp, Zea mays
  Clone ID: LIB3061-007-Q1-K1-G9
tggcattcaaccaacttgctttgacatcatcagctttgttctaccaacaacccatcattggtggtgccctcttttagatttcttatgagttatagttcaataataaagttttttatctgatgtttgtggcttcccagaaataagaaagtacatttctag

SEQ ID NO: 4164 - DNA, 363 bp, Zea mays
  unsure (1)..(363): unsure at all n locations; Clone ID: LIB3061-007-Q1-K1-H10
gccaaaatattnngcctgcttatggtccttggtctttctgcaagtgctgctacggcgaccattttcccgcaatgctcgcaagctcctatagcttcccttcttcccccgtacctctcaccagcggtgtcttcggtatgtgaaaacccaattcttcaaccctacaggatccaacaggcaatcacagctggcatcttacctttatcacccttgttcctccaacaatcatcagccctattacatcagttacctttggtgcatttattggcacaaaacatcagggcacaacaactacaacaacttgtgctagcaaaccttgctgcctactctcagcaacagcagtttcttccattcaaccaactagct

SEQ ID NO: 4165 - DNA, 413 bp, Zea mays
  Clone ID: LIB3061-007-Q1-K1-H11
tcgaatccagatcatctaaagcggcagtctcttagagtggatcgtcgaacagaacagcatgaagatggtcatcgttctcgtcgtgtgcctggctctgtcagctgccagcgcctctgcaatgcagatgccctgcccctgcgcggggctgcagggcttgtacggcgctggcgccggcctgacgacgatgatgggcgccggcgggctgtacccctacgcggagtacctgaggcagccgcagtgcagcccgctggcggcggcgccctactacgccgggtgtgggcagacgagcgccatgtaccagccgctccggcaacagtgctgccagcagcagatgaggatgatggacgtgcagtccgtcgcgcagcagctgcagatgatgatgcagcttgagcgtgccgctgccgtcagcagca

SEQ ID NO: 4166 - DNA, 454 bp, Zea mays
  Clone ID: LIB3061-007-Q1-K1-H12
accggtctcggacattaccgactcgtccgatggagaccagctattaacatataatcctcaattccttaccaacaatggcagccaagggattttggctacttatgctccttggtctttctgcaagtgctgctacggcgaccattttcccgcaatgctcgcaagctcctatagcttcccttcttcccccgtacctctcaccagcggtgtcttcggtatgtgaaaacccaattcttcaaccctacaggatccaacaggcaatcacagctggcatcttacctttatcacccttgttcctccaacaatcatcagccctattacatcagttacctttggtgcatttattggcacaaaacatcaaggcacaacaactacaacaacttgtgctagcaaaccttgctgcctactctcagcaacagcagtttcttccattcaaccaactagctgcattgaactc

SEQ ID NO: 4167 - DNA, 385 bp, Zea mays
  Clone ID: LIB3061-007-Q1-K1-F6
gcgggggatcaaacaagtagcgactgtttgataaagatttgtgagagtgatccggcgctgagaagagatggctaagatcgccgcagccgccgcggcggcggcggcgctgtgcttcgcggccctggtggccgtggccgtctgccaaggcgaggtcgagcggcagaggctcagggacctgcagtgctggcaggaggtccaggagagcccgctcgacgcgtgccgccaggtcctcgaccggcagctaaccggcggcggcgtcggcggcccgttccggtggggcaccgggctccggatgcggtgctgccagcagctccaggacgtgagccgcgagtgccgctgcgccgccatccggagcatggtcaggggctacgaggaggccatgccg

SEQ ID NO: 4168 - DNA, 433 bp, Zea mays
  unsure (1)..(433): unsure at all n locations; Clone ID: LIB3061-026-Q1-K1-F3
gttctatggtgatgatgacccanaagagcggctgcgcattctaagtgaataccttgaccagtttgtagccaaccctgctcctaatgaatcgaaggtttggccacagaggctattcaaggaacctgtgagggtcatagagaagtaccctgctggtcaagaaggtgatttgacaaagaaatatatggtgtgcatcaattggcttttgtcagaagagccattagatgtagaaactgagcttgcacttggtttcctggatcatctattgctggggactccagcttcaccacttagaaggattcttcttgaaagtggtttaggagaagctattgtgggaggtggtgttgaggatgagctccttcaaccacaatttagcataggcctgaaaggtgtatcagaggataatattgaaaaagttgaagagttggttatgcaa

SEQ ID NO: 4169 - DNA, 418 bp, Zea mays
  Clone ID: LIB3061-026-Q1-K1-F4
tgacaagccacatattaagcggtacaggatccaaccggcagtcgaacaatgcatctcaggattggcaccattgttacgttaacaggtataagtgctagtgcagctgacacgaccgttgcatgtaatgactcacaacatcatatcgctgcacctactacaacatgcgctagataaccgagcggtctactctgagaaaccgcagtcatttaaggcgacaggctccgaccagaacatgcaggaagaacatctcctacatcacccgcgatctatcaacgatggctactcttatcttcagcacagtcagtgattcaaccaattaggtgacttcaactgtaacgattattggtagcagcgaccactactaccattctggcagatagctgttgctaatctcaggaactaccttgcattcaatcaa

SEQ ID NO: 4170 - DNA, 434 bp, Zea mays
  Clone ID: LIB3061-026-Q1-K1-F5
agcagcttctgcttgctctggggggaaggagagagagagagcgagagagatctagtagagaggctagctaggtggtcctcgaacgaagatgttggcggtgttcagcgggcaggtggtggaggtgccggcggagctggtggcggcgggcagccggacgccgtcgcccaagacgaaggcgtcgcagctggtggggcgcttcctggccgcctccgagccggccgtgtccgtgcagctcggcgaccacggccacctcgcctactcccacaccaaccaggcgctcctccgccccaggtcgttcgcggcgaaggacgaggtgttctgcctgttcgagggggtgctggacaacctgtgtcgtctgagccagcagcacgggctgtcaagcaagggcgccaacgaggtgctcctcgtcatcgaggcctacaagacgctgcgcg

SEQ ID NO: 4171 - DNA, 433 bp, Zea mays
  Clone ID: LIB3061-026-Q1-K1-F6
ctagcaacatagaaagcacaatagtgtaccaacaatggcagccaaaatattttgcctggttatgctccttggtctttctgcaagtgctgctacggcgaccattttcccgcaatgctcgcaagctcctatagcttcccttcttcccccgtacctctcaccagcggtgtcttcggtatgtgaaaacccaattcttcaaccctacaggatccaacaggcaatcgcagctggcatcttacctttatcacccttgttcctccaacaatcatcagccctattacaacagttacctttggtgcatttattggcacaaaacatcagggcacatcatctacaacaacttgtgctagcaaaccttgctgcctactctcagcaacagcagtttcttgcattcaaccaactaggttcattgaactctgcttattatttgcaacaa

SEQ ID NO: 4172 - DNA, 427 bp, Zea mays
  Clone ID: LIB3061-026-Q1-K1-F7
gcagcttatgcttgctctggggggaaggagagagagagagcgagagagatctagtagagaggctagctaggtggggctcgtacgaagatgttggcggtgttcagcgggcaggtggtggaggtgccggcggagctggtggcggtgggcagccggacgccgtcggccaagacgaaggcgtctcagctggtggggcgcttcctggccgcctccgagccggacgtgtccgtgcagctcggcgaccacggtcacctcgcctactcccacaccaaccaggcgctcctccgccccatgtcgttcgcggcgaatgacgacgtgttctgcctgttcgagggggtgctggacaacctgagtcgtctgagccagcagcacgggctgtcaagcatgggcgccaacgaggtgctcctcgtcatcgaggcctacaagacgc

SEQ ID NO: 4173 - DNA, 433 bp, Zea mays
  Clone ID: LIB3061-026-Q1-K1-F8
tcaactagcatcatataaagcacaatagtgtaccaacaatggcagccaaaatattttggtgtccttatgctccttggtctttctgcaagtgttgctaccgcaaccattttcccacaatgctcacaagctcctatagcttcccttcttcccccatacctctcaccagcggtgtcttcaatgtgtgaaaccccaattgttcaaccctacaggatccaacaggcaatcgcaacaggcatcttaccattatcacccttgttcctccaacaaccgtcagccctattacagcagttacctttggtccatttggtggcacaaaacatcaggtcacaacaactacaacaacttgtgctagcaaaccttgctgcatactctcagcaacatcagtttctttcattcaaccaactggctgcattgaactctgctgcttatttgc

SEQ ID NO: 4174 - DNA, 409 bp, Zea mays
  Clone ID: LIB3061-026-Q1-K1-F9
tcttcctcagctagcaacatataaagcacaatattttaccaacaatggcagccataatatggtaggttccttatgctccttggtctttctgcaagtgttgctaccgcaaccattttcccacaatgctcacaagctcctatagcttcccttcttcccccatacctatcaccagcggtgtcttcaatgtgtgaaaccccaattgttcaaccctacaggatccaacagtcaatcgcaacaggcatcttaccattatcacccttgttcctccaacaaccgtcagccctattacagcagttaccttcggtccatttggtggcacaaaacatcagggcacaacaactacaacaactggtgctagcaaaccttgctgaatactctcagcaacatcagtttcttccattcaaccaac

SEQ ID NO: 4175 - DNA, 388 bp, Zea mays
  Clone ID: LIB3061-026-Q1-K1-G10
gcaacatagaaagcacaatagtgtacctacaatggcagctaaaatattttgcctccgtatgctccttggtctttctgcaagtgctgctacggcgaccattttcccacaatgctcacaagctcctatagcttcccttcttcccccgtacctctcaccaacggtgtcttcggtatgtgaaaacccaattcttcaaccctacaggatccaacaggcaatcgcagctggcatcttacctttatcacccttgttcctccaacaatcatcagccctattacagcagttacctttggtgcatttattggcacaaaacatcagggcacatcaactacaacaacttgtgctagcaaaccttgctgcctactctcagcaacagcagtttcttccattc

SEQ ID NO: 4176 - DNA, 393 bp, Zea mays
  Clone ID: LIB3061-026-Q1-K1-G12
ttgaaaaacacaccatgcgaagcgctctagcaacgacctaacaccaatggctaccaagatattagccctccttgcgcttcttgcccttttagtgagcgcaacaaatgcgttcattattccacagtgctcacttgctcctagtgccattattccacagttcctgccaccagttacttcaatgggcttcgaacatccagccgtgcaagcctacaggctacaactagcgcttgcggcgagcgccttacatcaaccaattgcccaattgcaacaacaatccttggcacatctaaccctactaaccattgcaacgcaacaactacaacaacaacagtttctgccatcactgagccacctagccgtggtgaaccctgtcacctacttgcaacagcagct

SEQ ID NO: 4177 - DNA, 238 bp, Zea mays
  Clone ID: LIB3061-026-Q1-K1-G2
ttaccaacaatggcaaccataataggggaagtttatattctacttgatctttctaataatattgctacctcaaccattttcccacaattctcacaatctcctatatctttcctttcttcccccatacctcttaccatctgtatcttcaatctgttaaaccccaatttttcaaccctatcttatccaacattcaatttcaacaaacatcttaacattttcacccttttatccttcaaca

SEQ ID NO: 4178 - DNA, 420 bp, Zea mays
  Clone ID: LIB3061-026-Q1-K1-G3
attcagatcacccctgccgaacggaattccacggcctaacaaccatgggctcccaagatttttgcccctcctgggccttctggccctttctgtgagcgcaacatatgcgttcattattccacaatgctcactagctcctagtgccattattccacagttcctgccaccagttacttcaatggtcttcgaacacctagctgtgcaagccaacatgcaacaacaagcgcttgcggcgagcgtattacaactaccaattgcccaattgcaacatcaatccttgccacatctaacaatacaagccatcacaacgcaacagcaacaacagttcctaccagcactgagccacctagccatggtgaaccctgccgtctacttgcacgagcagctgcttgcatgcaacccacttgctctggcgaacgt

SEQ ID NO: 4179 - DNA, 434 bp, Zea mays
  Clone ID: LIB3061-026-Q1-K1-G4
aacaagcaacatagaaagtggaatccagtagcatcaatagagcaacaatggcgaccaagatatggtccctccttatgctccttgctctttctacatgtgttgctaacgcgacaattttccctcaatgctcacaagctcctatagcttcccttcttcccccataccttccatcaattatagcttcaatatgtgaaaacccagctcttcaaccatataggcttcaacaagcaatcgcagcaagcaacatacctttatcgcccttgttgtttcaacaatcgccagccctatctttggtgcagtcattggtacaaaccatcagggcacaacagctgcagcaactcgtgctacctctgatcaaccaagtagctctggcaaacctttctccctactctcagcaacaacaatttcttccattcaaccaactgtctacactg

SEQ ID NO: 4180 - DNA, 435 bp, Zea mays
  Clone ID: LIB3061-026-Q1-K1-G5
gttggcaccttgatctcttttactgtaatatcccttggcgctctaggactaatatcaaggcttaatatcggcgcacttgaactgggagactatcttgcacttggggcaatattctcggccacagactcggtttgcaccttgcagaactttgatcctggaaatatcagcagtgccaaattactgaacttcattggcagtttcctttatctgttcggctccagcaccattcttggagtagcttctggacttcttagtgcttataccattaagaagttgtacttcggcaggcattcaaccgatcgtgaagtttccattatgatgctaatggcttatttatcttacatgctagctgaattgctcgatttgagtggcattctcactgtgtttttctgcggtatcgtaatgtcacactatacttggcacaatgtaacagaa

SEQ ID NO: 4181 - DNA, 432 bp, Zea mays
  Clone ID: LIB3061-026-Q1-K1-G6
ttcctcgcgcctcgcgcgcccacccaccttcacgcgctctcccagctagatcgaccccgctggcaatcgcgcaggctcccctatcccttcctgttccttcaaaaagactggactggatcttcccagagttcccgttcggagagccgccggatcttcttcgacgaggcttcgatctgctgctctccgtcggcgtgttggggacttgcaccttatccgaagatgtcttttcggagcatggttcgtgatataagggaaagttttgggaatatatcgaggcggaactttgaggtgagaattcaccacagagggaagtctcttgggtcttcaggtgacttgcaagacaggcctgctgaagttcagcaaagcaggtgggctagccttcctcctgagttgctctgcgatgtgatgaaaaggttggaggaagatgacagt

SEQ ID NO: 4182 - DNA, 436 bp, Zea mays
  unsure (1)..(436): unsure at all n locations; Clone ID: LIB3061-026-Q1-K1-F2
ccgccgcgtcaacatcaacctccgccgcgtcgccgtcgcctccgcgctcgccgccaccggcgtgccggccctcgtccaggcgcgcggccaccgcatcgagtctgtccccgagatgccccttgtcatttccgactccgcggagtccattgagaagacctcccaggcgctcaagatcctcaagcagatcggcgcccacgccgacgccgagaaggccaaggactccgtcggcatccgccccggcaagggtaagatgcgcaaccgtcgctacatcaaccgcaagggcccgctcatcgtctacggcaccgagggctccaaggtcgtcaaggccttccgcaaccttcccggtgtggatgttgccaacgtcgagcgcctcaacctactagaccttgcccccggtggccaccttgggcgctntgtgatctggacccagagcgcg

SEQ ID NO: 4183 - DNA, 377 bp, Zea mays
  Clone ID: LIB3061-026-Q1-K1-D9
cagttgcttccattccatctacaagttgtggcaaacattgctgctttcttgcaacaggtacaacaattgctgccattttacccacaggttgtgggaaacattaacgccttcttgcaacagcatcagttgctaccattctacccacaggatgtggcaaacaatgtctccttcttacaacaacaacaattgctgccatttaaccaacttgctttgacgaatcctaccaccttattgcagcagcccaccattggtggtgccatcttctagattcttttatgctttatactgtaataataaagttctcatactgatatgtgcaacttctcagtaataaaagattagagatctatattttaagttcaaaaaaaatgaaaata

SEQ ID NO: 4184 - DNA, 395 bp, Zea mays
  Clone ID: LIB3061-026-Q1-K1-E1
gcagcagcagcagcgacgaaggcgtcgtcgtggatggtggccatgagcgtgggcgccgtggaagcgctcaaggaccagggaggcctctgccgctggaactacgcgctgcggtccgtctaccggaccgccaaggccaacgtgcgcagcggcagcagaagcttcgccgcgcagcgggacaaggacctggccccggcggcggagaaggggcggcaggacaaggccgccgcggaggagggcttgaggaccgtcatgtacctcagctgctggggacccaattaactagcctttcgtatcttagctggtctttggccttcttcagcgaccgcgagctcgcgagctgattattgtaaatatacgacgatgatcggatgatgatgatgatgaaaagttctgcc

SEQ ID NO: 4185 - DNA, 394 bp, Zea mays
  Clone ID: LIB3061-026-Q1-K1-E10
gcggcggctgcggctgccagccaccgttcgccggttcatctaccgccgccggtgcatgtgccacctccggttcacctgccacctccggtgcatctcccaccgccggtccacctgccgccgccggtccacctgccaccgccggtccatgtgccgccgccggttcatctgccgccgccaccatgccactaccctactcaaccgccccggcctcagcctcatccccagccacacccatgcccgtgccaacagccgcatccaagcccgtgccagctgcagggaacctgcggcgttggcagcaccccgatcctgggccagtgcgtcgagtttctgaggcatcagtgcagcccgactgcgacgccctactgctcgcctcagtgccagtcgttgcggcagc

SEQ ID NO: 4186 - DNA, 416 bp, Zea mays
  Clone ID: LIB3061-026-Q1-K1-E11
cttcaatgggcttcgaacatccagcctttcaagcctacaggctacaactagcgcttgcggcgagcgccttacaacaaccaattgcccaattgcaacaacaatccttggcacatctaaccctacaaaccattgcaacgcaacaacaacaacaacaacagtttctgccatcactgagccacctagccgtggtgaaccctgtcacctacttgcaacagcagctgcttgcatccaacccacttgctctggcgaacgtagctgcataccagcaacaacaacagctgcaacagtttatgccagtgctcagtcaactagccatggtgaaccctgccgtctacctacaactactttcatctagcccgctcgcggtgggcaatgcacctacgtaccttacacaacagttgctgcaacaaattgta

SEQ ID NO: 4187 - DNA, 395 bp, Zea mays
  Clone ID: LIB3061-026-Q1-K1-E12
atgagctttatctactccagagcgcataagaacccgatcgacaccatgagggtgttgctcgttgccctcgctctcctggctctcgttgcgagcgccacctccacgcatacaagcggcggctgcggctgccagccaccgccgccggttcatctaccgccgccggtgcatctgccacctccggttcacctgccacctccggtgcatctcccaccgccggtccacctgccgccgccggtccacctgccaccgccggtccatgtgccgccgccggttcatctgccgccgccaccatgccactaccctactcaaccgccccggcctcagcctcatccccagccacacccatgcccgtgccaacagccgcatccaagcccgtgccagctgcagggaacctg

SEQ ID NO: 4188 - DNA, 340 bp, Zea mays
  Clone ID: LIB3061-026-Q1-K1-E2
gttggcttctcctccccctccggttcgggttcgggttcgtgaggttctccggggttcggtttcgtgggtgagcggatcgagatggcggcgtcggatgttgagtaccgctgcttcgtcggcggcctcgcctgggccacggacgaccactccctccacaacgccttcagcacctacggcgaggtcctcgagtccaagatcatcctcgatcgggagacgcagaggtcccgcggcttcggcttcgtcaccttctccacggaggaggcgatgcggaacgccatcgagggcatgaacggcaaggagctggacggccgcaacatcaccgtcaacgaggcccagtccc

SEQ ID NO: 4189 - DNA, 438 bp, Zea mays
  Clone ID: LIB3061-026-Q1-K1-E3
gaagaatgttgctgtgaaggatctgaagcgtgggtatgtggcctccaactccaaggatgaccctgccaaggaggctgctagcttcacctcccaggtcatcatcatgaaccaccctggccagattggcaatggctatgccccagttctggactgccacacctcacacattgctgtcaagtttgctgagctcgttaccaagattgataggcgatccggcaaggagctggagaaggagcccaaatttctcaagaacggtgatgctggtatggtgaagatggttcccactaagcccatggtggtggagaccttttctcagtatcctcctcttggtcgatttgctgtccgtgacatgaggcaaacggtggctgtcggagtcatcaagagtgtggagaagaaggacccaactggagccaatgtgactaaagctgctgccaagaa

SEQ ID NO: 4190 - DNA, 432 bp, Zea mays
  Clone ID: LIB3061-026-Q1-K1-E5
gtccccttctccgaggaggagcttgagtacattgcaagacttgatcctgtaaaagatggagaaatgctacgcatggagctacccatgatacgagacgcatgtctcagggtgctggtgctatcaacagtatttctcaaggaagctgcagcgtctggcctctgcctctcggagattggagacatgatgagcaggcagttcactgcgaaggaggaggaaccgagtcagcttgagctgctctgcatggaggcaaggaagtgggttgaggaaagagagtcctttcttcccaacgaagccggagttgaagatgacgatgatgacttcacccagttccttatcgacgacgaggatgattatccggatgccttggaaccatcagctttctgcaagtttggtagcatgaaggcaagttctaggaatccactgtccaagcta

SEQ ID NO: 4191 - DNA, 432 bp, Zea mays
  Clone ID: LIB3061-026-Q1-K1-E6
gtggccttctccgaggaggagcttgagttcattgcaagacttgatcctgtaagggatggagaaatgctacgcatggagctacccatgatacgagacgcatgtctcagggtgctggtgctatcaacagtatttctcaaggaagctgcagcgtctggcctctgcctctcggagattggagacatgatgagcaggcagttcactgcgaaggaggaggaaccgagtcagcttgagctgctctgcatggaggcaaggaagtgggttgaggaaagagagtcctttcttcccaacgaagccggagttgaagatgacgatgatgacttcacccagttccttatcgacgacgaggatgattatccggatgccttggaaccatcagctttctgcaagtttggtagcatgaaggcaagttctaggaatccactgtccaagcta

SEQ ID NO: 4192 - DNA, 416 bp, Zea mays
  Clone ID: LIB3061-026-Q1-K1-E7
gctgcattgaactctgctgcttatttgcaacaacaactaccattcagtcagctagctgctgcctacccccagcaatttcttccattcaaccaactggcagcattgaactctgctgcttatttacaacagcaacagctaccaccattcagccagctagctgatgtgagccctgttgccttcttgacacaacaacagttgttgccgttctacctgcacgctgcgcctaacgctggcaccctcttacaactgcaacaattgctgccattcaaccaacttgctttgacaaacccaacagcgttctaccaacaacccatcattggtggtgccctcttttagattgcttatgagttatacttcaataatgaagttttttggatgatgtttgtggcttcccagaaataagaaagtacatttct

SEQ ID NO: 4193 - DNA, 432 bp, Zea mays
  unsure (1)..(432): unsure at all n locations; Clone ID: LIB3061-026-Q1-K1-E8
agaaaagagagaaaccagaatccatgatcgcatttgctcttatttcgaggtcgcaggggttcaaccttggaaatttgtttgagaaggagatgatgggaatggtaaagagggaaacatctttcacgtctcaatgcacagcacaggagatcatgacaaaaatagaggatgcatgtgggccactcggtttcaacgtgcggaaacaaaattacaagatgaaattgaaaggtgacaaatctggaagaaaaggtcacttatctgttgcaactgaggtttttgaggttgccccatcacttcacatggttgagcttcgtaaaaccggaggagacacattggagttccacagcttctacaagaacttctcatcggagctgaaagatatcgtgtggaaagctgaatctgacgcanataataaacagacgaataagtgatacc

SEQ ID NO: 4194 - DNA, 396 bp, Zea mays
  Clone ID: LIB3061-026-Q1-K1-E9
aaaacacaccaagcgaagcgcactatctacgacctaacaccaatggctaccaagatattagccctccttgcgcttcttgcccttttagtgagcgcaacaaatgcgttcattattccacagtgctcacttgctcctagtgccattattccacagttcctcccaccagttacttcaatgggcttcgaacatccagccgtgcaagcctacaggctacaactagcgcttgcggcgagcgccttacaacaaccaattgcccaattgcaacaacaatccttggcacatctaaccctacaaaccattgcaacgcatcaacaacaacaacaacagtttctgccatcactgagccacctagccgtggtgaaccctgtcacctacttgcaacagcagctgcttgca

SEQ ID NO: 4195 - DNA, 269 bp, Zea mays
  Clone ID: LIB3061-026-Q1-K1-F1
aatcctttacaacaaacaactccacataaactctactcttattacaacagctaccctaccaccattcaacacctacccatttcaccactaaccttcttaacacaacaacaactttctcactctatcttaaccctcctcctaactctgtctccctattacatctacatcaactacttccacacaaccaactcgcttttacaaaccaaacaactttctaccaacaacccatcattcttcctgccctactttatactgctcaacatttatac

SEQ ID NO: 4196 - DNA, 414 bp, Zea mays
  Clone ID: LIB3061-026-Q1-K1-F10
cccaattgttcaaccctacaggatccaacaggcaatcgcaacaggcatcttaccatgatcacccttgttcctccaacaaccgtcagccctattacagcagttacctttggtccatttggtggcacaaaacatcagggcacaacaactacaacaacttgtgctagcaaaccttgctgcatactctcagcaacatcagtttcttccattcaaccaactggctgcattgaactctgctgcttatttgcaacaacaattaccattcagccagctagttgctgcctacccccagcaatttcttccattcaaccaactagcagcattgaactctgctgcttatttacagcagcaacaactactaccattcagccagctagctgatgtgagccctgctgccttcttgacacaacaacagtt

SEQ ID NO: 4197 - DNA, 387 bp, Zea mays
  Clone ID: LIB3061-026-Q1-K1-F11
gcaacatagaaagtggaatccagtagctacaatagagcaacaatggctaccaagatgggtttccctccttatgctccttgctctttctacatgtgttgctaacgcgacaattttacctcaatgctcacaagctcctatagcttcccttcttcccccataccttccatcaattatagcttcaatatgtgaaaacccagctcttcaaccatataggcttcaacaagcaatcgcagcatgcaacatacctttatcgcccttgttgtttcaacaatcgccagccctatctttggtgcagtcattggtacaaaccatcagggcacatcagctgcagcaactcgtgctacctctgatcaaccaagtagctctggcataaccttcttcctactc

SEQ ID NO: 4198 - DNA, 384 bp, Zea mays
  Clone ID: LIB3061-026-Q1-K1-F12
gtatcgttcggtcttccacccctttcccctcttcgtcgatctcaccaccgcgccgacgcccgatggcctccgccgcctcatcggccgccgccgctggcaaatcgctgttccaggggttccgcaggttcctcaaaaagccgtgggagatcacgggcccctgcgcctcgcccgagtaccgcagcgcgctgcctggcgcgctcgagtaccgcgtcaagtgcccggccaccgtgcgcgacgaccgcgacaaggccatcgtgcccacatccgatccggagacagtctacgacatcaagtacttcacccgcgatcgccgtcggaaccgttcgtccgtgcgccgcaccctgctccgcaagcccgacctcgagcgctacatggtcaccaagc

SEQ ID NO: 4199 - DNA, 433 bp, Zea mays
  Clone ID: LIB3061-026-Q1-K1-D8
gtcgtatctggggcggcgctggcataagggcaggctgcagtttcagctgctcaagatagcgccttctaccaacaaggagaaaatcagcgacgcggttggaccgttaaaccgcatcaacgacattctcgttgctggcaaccacccaagtcacggtgtccatgggcatgcccgtgcaggctgaatgcagtcagttcgcgaacccatcgggcgtcctggacccatatactatcatgtgtcgctttgagaatcggctcaagacaaaccatcgggcaggactggagtagttgtccaaggactgaggatgtttatgcagacacaagtatgtttggtggctcgatgtatgtgaattccaaaactccatctgggtatgtaaatatttgtatgggtttagtttggttgctttttcgtttggtcatctcatgaaacctctgct

SEQ ID NO: 4200 - DNA, 435 bp, Zea mays
  Clone ID: LIB3061-026-Q1-K1-C3
caacaacttgtgctagcaaaccttgctgcctactctcagcaacagcagtttcttccatgcaaccgactagctgcattgaactctgcttcttatttgcaacaacaacaactaccattcagccagctatctgctgcctacccccagcaatttcttccattcaaccaactgacagcattgaactctcctgcttatttacagcagcaacaactactaccattcagccagctagctggtgtgagccctgctaccttcttgacacaaccacagttgttgccgttctaccagcacgctgcgcctaacgctggcaccctcttacaactgcaacaattgctgccattcaaccaacttgctttgacaaacccagcagcattctaccaacaacccatcattggtggtgccctcttttagatttcttatgagttatagttcaataat

SEQ ID NO: 4201 - DNA, 427 bp, Zea mays
  Clone ID: LIB3061-026-Q1-K1-C4
ctggtcagagagggagagcgagctagaagcctagaaccggcaggaagccagacgagcggagccaccacgcgtgagctgcaacgtatgcggcgggggcatggcgggccggctggcggggcgaggcgggaggccgctgctaggcggaagtggcggtggcgggaagcggtgcgggaggccgtcgatggcggtcgtggcggcgctgctgctggcgtgcgcggcgctgctcctgctcctggccctcggcgcgctatcgctgcccggggcctccgacggctccgggggacgcggtgcggggctctcgctctcgcgcccccgctcgcgcttccgcagatccgccttcgactcggggctagagacgcgtggggagaagggggagccgtggacggaggtgctgtcgtgggagccccgcgcgttcgtgtaccacaac

SEQ ID NO: 4202 - DNA, 395 bp, Zea mays
  Clone ID: LIB3061-026-Q1-K1-C5
tccacgcgtccgcagaaacacacctagcgaagcgcactagcaacgacctaacaacaatggctaccaagatattatccctctttgcgcttcttgccctttttgtgagcgcaacaaatgcgttcattattccacaatgctcacttgctcctagtgccattattccacagttcctccctccagttacttcaatgggcttcgaacacccagctgtgcaagcctacaggctacaacaagcgcttgctgcgagcgtcttacaacaaccaattgcccaattacaacaacaatccttggcacatctaaccatacaaaccatcgcaacgcatcagcaacaacaatttctaccagcactgagccaactagctgtggtgaaccctgtcgcctacttgcaacagcag

SEQ ID NO: 4203 - DNA, 456 bp, Zea mays
  Clone ID: LIB3061-026-Q1-K1-C6
cggcccgacccactcgtgcgccggcgcgtccgcagaaacactctctagttaagcgcactagcaacgacctaacggcaagggctaccaagatattatccctgtttgcgcttcttgccctttttgtgagcgcaacaaatgcgttcattattccacaatgctcacttgctcctagtgccattattccacagttcctccctccagttacttcaatgggcttcgaacacccagctgtgcaagcctacaggctacaacaagcgcttgcggcgagcgtcttacaacaaccaattgcccaattacaacaacaatccttggcacatctaaccatacaaaccatcgcaacgcaacagcaacaacaatttctaccagcactgagccaactagctgtggtgaaccctgtcgcctacttgcaacagcagttgcttgcatccaacccacttgctctggcaaacatagttg

SEQ ID NO: 4204 - DNA, 428 bp, Zea mays
  Clone ID: LIB3061-026-Q1-K1-C8
gagctgctgtggcctcttggaacagtgctgcttggtctacaaagatgaacgaatcttgggactggggatggaaaattaggttttgctgtattctccccaaggttgctaagttctcaaggatggtctcttctgtccaatgagaaaggtggactcaatcagagtagcactaaccttgccaatcgcgtacgtgagattgctggttcatattctgacgaatacgatgactatgctgagtgggcacatggtagctttcctttggaagagtacattaaagcactagaccgtgctaaaggcgaactgtactataatcattcactgggtatgcagtacagcaagatatcagatcatatatttgttgggtcatgtatacaaacagagaaagatgtgaagatgttatcagaaactatgggtattactgctgatctgaa

SEQ ID NO: 4205 - DNA, 417 bp, Zea mays
  Clone ID: LIB3061-026-Q1-K1-C9
caacaagcaacatagaaagtggaatccagtagcaacaatagagcaacaatggcgaccgagatattttccctccttatgctccttgctctttctacatgtgttgctaacgcgacaattttccctcaatgctcacaagctcctatagcttcccttcttcccccataccttccatcaattatagcttcaatatgtgaaaacccagctcttcaaccatataggcttcaacaagcaatcgcagcaagcaacatacctttatcgcccttgttgtttcaacaatcgccagccctatctttggtgcagtcattggtacaaaccatcagggcacaacagctgcagcaactcgtgctacctctgatcaaccaagtagctctggcaaacctttctccctactctcagcaacaacaatttcttccattc

SEQ ID NO: 4206 - DNA, 438 bp, Zea mays
  Clone ID: LIB3061-026-Q1-K1-D1
caacaagcaacatagaaagtggaatccagtagcaacaatagagcaacaatggcgaccaagatacgttccctccttatgctccttgctctttctgcatgtgttgctaacgcgacaattttccctcaatgctcacaagctcctatagcttcccttcttcccccataccttccatcaatgatagcttcagtatgtgaaaacccagctcttcaaccctataggctccaacaagcaatcgcagcaagcaacatacctttatcacccttgtttcaacaatcgccagccctatctttggtgcagtcattggtacaaaccatcaaggcacagcagctgcagcaactcgtgctacctgtgatcaaccaagtagctctggcaaacctttctccctactatcagcaacaacaatttcttccattcaaccaactatctacactgaaccct

SEQ ID NO: 4207 - DNA, 426 bp, Zea mays
  Clone ID: LIB3061-026-Q1-K1-D10
ccttcttcccccgtacctctcaccagcggtgtcttcggtatgtgaaaacccggttctgcaaccctacaggatccaacaggcaatcgcagctggcatcttacctttatcacccttgttcctccaacaatcatcagccctattacaacagttacctttggtgcatttattggcacaaaacatcagggcacaacaactacaacaacttgtgctagcaaaccttgctgcctactctcagcaacagcagtttcttccattcaaccaactaggttcattgaactctgcttcttatttgcaacaacaacaactaccattcagccagctacctgctgcctacccccagcaatttcttccattcaaccaactagcagcattgaactctcctgcttatttacagcagcaacaactactaccattcagccagctagc

SEQ ID NO: 4208 - DNA, 395 bp, Zea mays
  Clone ID: LIB3061-026-Q1-K1-D11
cccactcgtccgcttcccttcttcccctataccttccatcaattatagcttcagtatgtgaaaacccagctcttcaaccatataggcttcaacaagcaatcgcagctagcaacatacctttatcgaccttgttgtttcaacaatcaccagccctatctttggtgcagtcattggtacaatccatcatggctcaacagctgcagtaactcttgctacctgtgatcaaccatgtaactctggcaaacctttctccttactctaagcaacatcattgacttccattcaacctactgactacactgaactctgatgctaattggtagctgctactatcaccatttaaccagctagctactgcctactatcagcatcaacatcttcttccatttaaccaa

SEQ ID NO: 4209 - DNA, 375 bp, Zea mays
  Clone ID: LIB3061-026-Q1-K1-D12
gtttcttccattcaaccaactggctgcattgaactctgctgcttatttgcagcgaacaactaccattcagtcagctagctgctgcctacccccagcaatttcttccattcaaccaactggcagcattgaactctgctgcttatttacaacagcaacagctaccaccattcagccagctagctgatgtgagccctgttgccttcttgacacaacaacagttgttgccgttctacctgcacgctgcgcctaacgctggcaccctcttacaactgcaacaattgctgccattcaaccaacttgctttgacaaacccaacagcgttctaccaacaacccatcattggtggtgccctcttttagattgcttatgagttat

SEQ ID NO: 4210 - DNA, 386 bp, Zea mays
  Clone ID: LIB3061-026-Q1-K1-D2
gggggtggctttcctgcccttcgttcgggttcgggttcgtgaggttctcaggggtgggttcggggtgagcggatcgagatggcggcgtcggatgttgagtaccgctgtttcgtctgcgggctcgcctgggccactgacgaccactctttccacatcgccttcatcacctacggcgaggtcctggagtccaagatcattctcgatcggtagactcagaggtgccgcggcttcgggttcgtcaccttcttcacggaggaggcgacgctgaacgccattgagggcatgaacggcatggagctggacggtcgcagcatcaccgttaacgaggcccagtcccgctgcggtcgtggaagcggctgcggcggcgggtactgtggtggtcgtgg

SEQ ID NO: 4211 - DNA, 433 bp, Zea mays
  Clone ID: LIB3061-026-Q1-K1-D4
aaagcacaatagtgtaccaccattggcagtcaaaatattttgcctgcttatgctccttggtctggctgcaagtgctgctactgcgaccattttcccgcaatgctcgcaagctcctatagcttcccttcttcccccgtacctctcaccagcggtgtcttcggtatgtgaaaacccaattcttcaaccctacaggatccaacaggcaatcacagctggcatcttacctttatcacccttgttcctccaacaatcatcagccctattacatcagttacctttggtgcatttattggcacaaaacatcagggcacaacaactacaacaacttgtgctagcaaaccttgctgcctactctcagcaacagcagtttcttccattcaaccaactagctgcattgaactctgcttcttatttgcaacaacaacaactacca

SEQ ID NO: 4212 - DNA, 434 bp, Zea mays
  Clone ID: LIB3061-026-Q1-K1-D5
gcaacatagaaagcacaatagtgtaccaacaatggcagccaaaatattttgcctccttgtgctccttggtctttctgcaagtgctgctacggcgaccattttcccacaatgctcacaagctcctatagcttcccttcttcccccgtacctctcaccagcggtgtcttcggtatgtgaaaacccaattcttcaaccctataggatccaacaggcaatcgcagctggcatcttacctttatcacccttgttcctccaacaatcatcagccctattacagcagttacctttggtgcatttattggcacaaaacatcagggcacatcaactacaacaacttgtgctagcaaaccttgctgcctactctcagcaacaacagtttcttccattcaaccaactagctgcattgaactctgcttcttatttgcaacaacaac

SEQ ID NO: 4213 - DNA, 433 bp, Zea mays
  Clone ID: LIB3061-026-Q1-K1-D6
cccacgcgtccggttcattattccacaatgctcacttgctccaagttccattgttacggagttcctcccaccagttacttcaatgggcttcgaacacccagctgtgcaagcctataggctacaacaagcaattgcggcgagcgtcttacaacaaccaatttcccagttgcaacaacaatccttggcacatctaacaatacaaaccatcgcaacgcaacagcaacaacaattcctaccagcactgagccacctagccatggtgaaccctgccgtctacttgcaacagcagttgcttgcatcaaacccacttgctctggcaaacgtagttgcaaaccagccacatcaacagctgcaacagtttctgccagcgctcagtcaactagccatggtgaaccctgccgcctacctactacagcatcaactgctttcatct

SEQ ID NO: 4214 - DNA, 438 bp, Zea mays
  Clone ID: LIB3061-026-Q1-K1-C2
cggtactgcagctgctgctccaccaagaatcaaataactctgcgcagttgtcccaaatttgtgattctaaatgcccaacaacaactcaatcaaaacaatgtaattattggtgttatagtgtcctattgttttcagattgacacggagcaactgctggcccatctagtagaaacagaaatgataaagagaacgataatttccattgttgttgttatttcttgttttttttcttctctgaacctctgtccatagtgattggggatgtttgatatttcagaaagaaggaaggtacaagggaaggaagttcagttcagtatgtcatttctttggatatcaggcttgaggatctacaccatcaaatttcgactgtgactatgcttatgctcttggacgtatctccctgcatatgattgcagttggattgactggctacatggc

SEQ ID NO: 4215 - DNA, 348 bp, Zea mays
  Clone ID: LIB3061-007-Q1-K1-E2
gctcgcccacgcgtcagcaaacacactagcgaacatatactacaacctaacaacaatggctaccaagatattatccctccttgcgcttcttgcgctttttgcgagcgcaacaaatgcgttcattattccacaatgctcacttgctccaagttccattattacacagttcctcccaccagttacttcaatgggcttcgaacacccagctgtgcaagcctataggctacaacaagcaattgcggcgagcgtcttacaacaaccaatttcccagttgcaacaacaatccttggcacatctaacaatacaaaccatcgcaacgcaacagcaacaacaattcctaccagcact

SEQ ID NO: 4216 - DNA, 352 bp, Zea mays
  Clone ID: LIB3061-007-Q1-K1-E3
gagccctgcgctgctagcaacaaagtactactttgtccacccgtccatctagctctcaagaaccaacccgtaccagcgctatccggccggccatggcggcggcgcgccggctctccctgcccctcgtcctgctggtcgtcctggccgtcgccgggcgcgcggcggcgcaggactacgacttcttctacctcgtgctgcagtggccgggggcctactgcgacaccaagcagagctgctgctaccccaagtccggcaagccggcggcggacttcgggatccacggcctctggcccaaccgcgacgacggcacgtacccgcagaactgcagccccgacaacgcctttcacccgtc

SEQ ID NO: 4217 - DNA, 397 bp, Zea mays
  unsure (1)..(397): unsure at all n locations; Clone ID: LIB3061-007-Q1-K1-E4
gtgatcaaccaagtttctctggcaatcatttttccctactctcagcaacaacaatttcttccattcaaccaactgtctacactgaaccctgctgcttatttgcagcaacaactattaccattcagccagctagctactgcctactctcagcaacaacaacttcttccatttaaccaattggccgcactgaaccccgctgcttatttgcagcagcaaatactactaccatttagccagctagctgcagcaaaccgtgcttccttcttgacacagcaacagttgctgcctttctaccagcagtttgcggctaaccccgcaaccctcttacaactacaacaattgttgccctttgtccaacttgctttgacagaccgagcgggctnctaccaacaacaca

SEQ ID NO: 4218 - DNA, 449 bp, Zea mays
  Clone ID: LIB3061-007-Q1-K1-E5
cctagcaacatagaaagcagaatagtgtacctacaatgctgcctaaatattttgcctccttatgctccttggtctttctgcaagtgctgctacggcgaccattttcccacaatgctcacaagctcctatagcttcccttcttcccccgtacctctcaccagcggtgtcttcggtatgtgaaaacccaattcttcaaccctataggatccaacaggcaatcgcagctggcatcttacctttatcacccttgttcctccaacaatcatcagccctattacagcagatacctttggtgcatttattggcacaaaacatcatggcacaacaactacaacaacttgtgctagcaaaccttgctgcctactctcagcaacaacagtttcttccattcaaccaactagctgcattgaactctgcttcttatttgcaacaacaacaactaccattca

SEQ ID NO: 4219 - DNA, 434 bp, Zea mays
  unsure (1)..(434): unsure at all n locations; Clone ID: LIB3061-007-Q1-K1-E6
gcgggggcttctgcttgctctggggggatctcgtagagagagagagcgagagagagagagagatctagtagagaggctagtaggtggtcctcgaacgaagatgttggcggtgttcagcgggcaggtggtggaggtgccggcggagctggtggcggcgggcagccggacgccgtcgcccaagacgaaggcgtcgcagctcgtggggcgcttcctggccgcgtccgagccggccgtgtccgtgcagctcggcgaccacggccacctcgcctactcccacaccaaccaggcgctcctccgncccaggtcgttcgcggccaaagacgaggtgttctgcctgttcaaaggggtgctggacaacctgnggtcgctgacccagcagcaacgggctgtcaagcagggccgccaacgaggtgctcctcgtcatcgaggcctac

SEQ ID NO: 4220 - DNA, 439 bp, Zea mays
  Clone ID: LIB3061-007-Q1-K1-E7
gcgtggcaacatagaatgcacaatattgtatctaacaatggcagccaaaatattttgcctcgttatgctccttggtctttctgcaagtgctgctacggcgaccattttcccacaatgctcacaagctcctatagcttcccttcttcccccgtacctctcaccagcggtgtcttcggtatgtgaaaacccaattcttcaaccctataggatccaacaggcaatcgcagctggcatcttacctttatcacccttgttcctccaacaatcatcagccctattacagcagttacctttggtgcatttattggcacaaaacatcagggcacaacaactacaacaacttgtgctagcaaaccttgctgcctactctcagcaacaacagtttcttccattcaaccaactagctgcattgaactctgcttcttatttgcaacaacaa

SEQ ID NO: 4221 - DNA, 439 bp, Zea mays
  Clone ID: LIB3061-007-Q1-K1-E8
gcgaggaagcacaatattgtaccattaatctcagccaaaatatacagcttccttatgctcgttggactatctgcaagtgttgctaccgcaaccattgtcccacaatgctcacaagctcctatagctacccttcttaccccatacctctcaccagcggtgtcttcaatgtgtgaaaccccaattgctcaaccctacaggatccaacaggcaatcgcaacaggcatcttaccattatcacccttgatccttcaacaaccgtaagccctattacagcagttacctttggtccatttggtggcacaaaacatcagggcacaacaactacaacaacttgtgctagcaaaccttgctgcatactctcagcaacatcagttacttccattcaaccaactggctgcattgaactctgctgcttatttgcaacaacaattaccattca

SEQ ID NO: 4222 - DNA, 359 bp, Zea mays
  Clone ID: LIB3061-007-Q1-K1-F1
cggacgcgtgggatccgatccatcctcatctctccaaggcagagaagaagaagaggaggaagaagaagcatcggcagcatgtcggaggggactgccaactgcgtggacatcctgatcgccatcatcctgcctccgctgggggtgttcctcaagtacgggtgcggccacgagttctggatctgcctcctcctcaccttcctcggctacatccccggcatcatctacgccatctacgccatcaccaagaacacctagctagtcatccttgccgacgacgatccatgtctctgtatctgtgtctgttcatatgcctgatgccgacttgtgctgtatgtagttgcttgaattcagtcgtgttc

SEQ ID NO: 4223 - DNA, 440 bp, Zea mays
  unsure (1)..(440): unsure at all n locations; Clone ID: LIB3061-007-Q1-K1-F10
cggctcgacccactcgtccgttgacgcttcgggtcttacaagcaactttgaaagttgaatccaggagcaacaacagaggaacagtggcgaccaagatatgcnccctccttatgctccttgctctttctgcatgtgttgctaacgcgacaattttccctcaatgctcacaagctcctatagcttcccttcttcccccataccttccatcaatgatagcttcagtatgtgaaaacccagctcttcagccctataggctccaacaagcaatcgcagcaagcaacatacctttatcacccttgttgtttcaacaatcgccagccctatctttggtgcagtcattggtacaaaccatcatggcacagcagctgcagcaactcgtgctacctgtgatcaaccaagtagctctggcaaacctttcttcctactctcagcaacaacaa

SEQ ID NO: 4224 - DNA, 428 bp, Zea mays
  Clone ID: LIB3061-007-Q1-K1-F11
tcgcagcgactgggttaccgacgcagccgtactcagcctggtgcgcgcgtcttctttgggcccttcgctggtgacgagcgcccactaggttggctgtgtgctgatgctatttgtgtttaagtacttccacctggtgttaatcttttgggagtggaatctctgagacctctgaggtgtgcctttctggcatcaagtttaactgcaacgatcagagggtttctggtgcctgctcattctgaatggcagaccttacggacatcggttgctgcagttgctttagctttttaaggaagcccagtgtacctgtacgtcaacatcaggatgctgatggcatgttatctgaagatttactgaagcgtcaatcagctgaagatcctgatggaagtttctacactggggatgatcctgatgtaagcttttataacggg

SEQ ID NO: 4225 - DNA, 425 bp, Zea mays
  Clone ID: LIB3061-007-Q1-K1-F12
atggagaccagctatcaacatagaattctcaaattgtaccaacaatggcagccaaaatattttgcctccttatgctccttggtctttctgcaagtgctgctacggcgaccattttcccgcaatactcgcaagctcctatagcttcccttcttcccccgtacctctcaccagcggtgtcttcggtatgtgaaaacccaattcttcaaccctacaggatccaacaggcaatcacagctggcatcttacctttatcacccttgttcctccaacaatcatcagccctattacatcagttacctttggtgcatttattggcacaaaacatcagggcacaacaactacaacaacttgtgctagcaaaccttgctgcctactctcagcaacagcagtttcttccattcaaccaactagctgcattgaactct

SEQ ID NO: 4226 - DNA, 394 bp, Zea mays
  Clone ID: LIB3061-007-Q1-K1-F2
atggagaccaactagcaacatagaatcttcattagtgtaccaacaatggcagccaaaatattttgcctccttatgctccttggtctttctgcaagtgctgctacggcgaccattttcccgcaatgctcgcaagctcctatagcttcccttcttcccccgtacctctcaccagcggtgtcttcggtatgtgaaaacccaattcttcaaccctacaggatccaacaggcaatcacagctggcatcttacctttatcacccttgttcctccaacaatcatcagccctattacatcagttacctttggtgcatttattggcacaaaacatcagggcacaacaactacaacaacttgtgctagcaaaccttgctgcctactcttagcaacagcagtttc

SEQ ID NO: 4227 - DNA, 399 bp, Zea mays
  Clone ID: LIB3061-007-Q1-K1-F4
cgacctcgctaatggttccctggttcgggcaacatcaattgttgctacttactgtaccagctctgactcagctagtggtggcaaaccctgctgcctacttgcaacagctgcttgcattcaaccaactgactatgtcgaactctgctgcgtacctacaacagcgacaacagttacttaatccactagcagtggctaacccattggtcgctgccttcctacagcagcaacaattgctgccatacaaccagttctctttgataaaccctgtcttgtcgaggcagcaacccatcgttggaggtgccatcttttagattacatatgagatgtactcgataatggtgccctcattccggcatgtgtttcctagaaataatcaatatattgattgagatttatctc

SEQ ID NO: 4228 - DNA, 434 bp, Zea mays
  unsure (1)..(434): unsure at all n locations; Clone ID: LIB3061-007-Q1-K1-F5
gcgggtgatacatcttttggtggtgttcttattggaagagcaatcaacagaaagtgcaccggaaaacaaagtagttaatgtgtctgaacaaagctcaacagtgagccggatcagcccggcagctaaattactgatcaaggaacatggactggatacatcatcactgagagcatcaggcccccgtggcacccttctgaaaggggatgttctggcagcattgaagtcaggtatcaattcaagttcaaccaaagaaaagaagtctccagctcaaccttcgtctcagccaactcgagattcccaatctcaagcatcctctatttcacanaaggatgatacatatgaagatattccgaatagtcagatacgcaaggtcattgccaaaaggttgctcgaatcaaaacagacgactccacatttgtatctatccaaagatg

SEQ ID NO: 4229 - DNA, 351 bp, Zea mays
  Clone ID: LIB3061-007-Q1-K1-E12
tggcggttaagtagataatctggggtactgatgtctaccgaggaaagagtgaggaaaagaaaggaatccaatagagaatcagccagacgctcgagatacaggaaagccgctcacctgaaagaactggaagaccaggtagcacagctaaaagccgagaattcttgcctgctgaggcgcattgccgctctgaaccagaagtacaacgacgctaacgtcgacaacagggtgctgagagcggacatggagaccctaagagctaaggtgaagatgggagaggactctctgaagcgggtgatagagatgagctcatcagtgccgtcgtccatgcccatctcggcgccgacccccagc

SEQ ID NO: 4230 - DNA, 434 bp, Zea mays
  unsure (1)..(434): unsure at all n locations; Clone ID: LIB3061-007-Q1-K1-C7
gcggtttgcttataaattaaacggattgtatgcagcaggatgagtgggtggtatgtcgtgtgttccacaagaccactgggatcaagaagaccaccactgctgcaccggcgtaccaggtggccatggccggcgctgagatggatcagaatcagaacaacatccccttccccatgccgatgcaattttccatgctgcccgacttctccttggacccggtgcccccctactacccgtaccccaacgctggcgcggggatgccgatgcttcctatggcagcaggtataggtggtggcgccggtgggctccacctcaacggcgccgccctgttcggcaatccgatggccgcgccccagcccatgagcttctaccaccagatgggcacggngactgcttgcgctggcggcttcgatgtttctgcgccggagagtaggccg

SEQ ID NO: 4231 - DNA, 436 bp, Zea mays
  Clone ID: LIB3061-007-Q1-K1-C8
gcgcgcaggttccctgcagcgttggtagtatcccgatcctgggccagtgcgtcgagttcctgaggcatcagtgcagcccgacggcgacgccctactgctcgcctcagtgccagtcgttgcggcagcagtgttgccagcagctcaggcaggtggagccgcagcaccggtaccaggcgatcttcggcttggtcctccagtccatcctgcagcagcagccgcaaagcggccaggtcgcggggctgttggcggcgcagatagcgcagcaactgacggcgatgtgcggcctgcagcagccgactccatgcccctacgctgctgccggcggtgtcccccactgaagaaactatgtgctgtagtatagccgctggctagctagctagttgagtcatttagcggcgatgattgagtaataatgtgtcaacgcatcaccatgggt

SEQ ID NO: 4232 - DNA, 415 bp, Zea mays
  Clone ID: LIB3061-007-Q1-K1-C9
acggattattcaatgcaagtccagagttctgggctctgctaccaagtgcagctgggcagaagggacggcatggtgtcgcaggcgtccatggcgagcattctgccgggccccaacgtcgacgtccccaccgtcatcgatctgttcgcgcggaagggcctcaacagcttcgagatggtcagcctcatgggcgcgcacacggtgggggtgacgcactgctcggtgatccacgaccggctgttcaacttcaacggcaccgggtcgccggacccggccatggacccgatgtacgtgtggatcctgacgacgtacgcgtgccccaagggccaggccttcgacaacatcgtctacctcgacgacccctccagcatcctgctcgtcgaccggagctactactcccagatcatgaagcgccacg

SEQ ID NO: 4233 - DNA, 409 bp, Zea mays
  Clone ID: LIB3061-007-Q1-K1-D1
ccgacgcgtccgcatcaagcaacatatttatttgaatccagtagcaacaatagagcaacaatggcgaccaagatactttccctccttatgctccttgctctttctgcatgtgttgctaacgcgacaattttccctcaatgctcacaagctcctatagcttcccttcttcccccataccttccatcaatgatagcttcagtatgtgaaaacccagctcttcaaccctataggctccaacaagcaatcgcagcaagcaacatacctttatcacccttgtttcaacaatcgccagccctatctttggtgcagtcattggtacaaaccatcaaggcacagcagctgcagcaactcgtgctacctgtgatcaaccaagtagctctggcaaacctttctccctactatcagcaac

SEQ ID NO: 4234 - DNA, 292 bp, Zea mays
  Clone ID: LIB3061-007-Q1-K1-D10
ccgacgcgtccgccctcgcgtccgattactgagtctaacaagcaacatagaaagtggaatccagtagcaacaacagagcaacaatggcgaccaagatattttccctccttatgctccttgctctttctgcatgtgttgctaacgcgacaattttccctcaatgctcacaagctcctatagcttcccttcttcccccataccttccatcaatgatagcttcagtatgtgaaaacccagctcttcagccctataggctccaacaagcaatcgcagcaagcaacatacctttatc

SEQ ID NO: 4235 - DNA, 391 bp, Zea mays
  Clone ID: LIB3061-007-Q1-K1-D11
gacccactcgtccgttggaacatcgatccttggcacatcttcactctatttaccattgcaacgcaacaacaacgacaacagcagtttctgccatcactgagccacctagccgtggtgaaccctgtcacctacttgcaacagcagctgcttgcatccaacccacttgctctggcgaacgtagctgcataccagcaacaacaacagctgcaacagtttatgccagtgctcagtcaactagccatggtgaaccctgccgtctacctacaactactttcatctagcccgctcgcggtgggcaatgcacctacgtacctacaacaacagttgctgcaacaaattgtaccagctctgactcagctagctgtggcaaaccctgctgcctacttacaac

SEQ ID NO: 4236 - DNA, 428 bp, Zea mays
  Clone ID: LIB3061-007-Q1-K1-D12
aggaagctcagtagtttaccaacaatctctgccttaatattttgcctccttatgctcgttggtctttctgcaagtgctgctacggcgaccattttcccgcaatgctcgcaagctcctatagcttcccttcttcccccgtacctctcaccagcggtgtcttcggtatgtgaaaacccaattcttcaaccctacaggatccaacaggcaatcacagctggcatcttacctttatcacccttgttcctccaacaatcatcagccctattacatcagttacctttggtgcatttattggcacaaaacatcagggcacatcaactacaacaacttgtgctagcaaaccttgctgcctactctcagcaacagcagtttcttccattcaaccaactagctgcattgaactctgcttcttatttgcaacaacaaca

SEQ ID NO: 4237 - DNA, 352 bp, Zea mays
  Clone ID: LIB3061-007-Q1-K1-D2
aggattgaaaaacacaccaagcgaatactactttgcaacgacctaacaccaatggctaccaagatattagccctccttgcgcttcttgcccttttagtgagcgcaacaaatgcgttcattattccacagtgctcacttgctcctagtgccattattccacagttcctcccaccagttacttcaatgggcttcgaacatccagccgtgcaagcctacaggctacaactagcgcttgcggcgagcgccttacaacaaccaattgcccaattgcaacaacaatccttggcacatctaaccctacaaaccattgcaacgcaacaacaacaacaacaacagtttctggcatcactga

SEQ ID NO: 4238 - DNA, 346 bp, Zea mays
  Clone ID: LIB3061-007-Q1-K1-D3
gcgttcagaaacactccaagcgaagtatttttcaacaacctaacaacaatggctaccaagatattatccctccttgcgcttcttgcgctttttgcgagcgcaacaaatgcgttcattattccacaatgctcacttgctccaagttccattattacacagttcctcccaccagttacttcaatgggcttcgaacacccagctgtgcaagcctataggctacaacaagcaattgcggcgagcgtcttacaacaaccaatttcccagttgcaacaacaatccttggcacatctaacaatacaaaccatcgcaacgcaacagcaacaacaattcctaccagcacttgacc

SEQ ID NO: 4239 - DNA, 223 bp, Zea mays
  Clone ID: LIB3061-007-Q1-K1-D4
ctatagatgaagcacagaaacatgcatcccatgccataatggccaaagatgtctcaacgaatgacgcactgggagaccaactcacgtctgagcaaacccaacagctgaccctggaactgaaatcatccgacgaccagaaccaaatcaccaggtgcaagcacgcatcttgacgcactatagagaacatgccagcacaacgcaaccaccaccaccagcactacca

SEQ ID NO: 4240 - DNA, 332 bp, Zea mays
  Clone ID: LIB3061-007-Q1-K1-D5
gcaacaatggttacgaaggtattttccctacttatgctccttgctccctctacatgtgttgctaacgcgacaattttccctcaatgctcacaagctcctatagcttcccttcttcccccataccttccatcaattatagcttcagtatgtgaaaacccagctcttcaaccatataggcttcaacaagcaatcgcagcaagcaacatacctttatcgcccttgttgtttcaacaatcaccagccctatctttggtgcagtcattggtacaaaccatcagggcacaacagctgccacaactcgtgctacctgtgatcaaccaagtagctctggc

SEQ ID NO: 4241 - DNA, 438 bp, Zea mays
  unsure (1)..(438): unsure at all n locations; Clone ID: LIB3061-007-Q1-K1-D7
gcggtgtggctaccatgtcgtccaatanactatagaatgcatcccacaggagaagatacagttcatcatttctgctttttacggacatgtggtggagttttctcatgcatccctatggttgccgcgttattcatagggtattggagcattgtgatgatgaaagcacacataatgccatgatggaagagatcatgcagtccgcggctactttaacagaggaccagtatggtaattatgtaatccagcatgtcctgcagcatgggaaaccagaagagcgttctacattaattacacaactcgctggacagatagtgaaaatgagccatcagaaatttgcttctaatgcaatgatgaatgaccagttcgcacactatgtggtgcacaaggttctggagatatgtgatgaccagaaccgtgaattgattctttcccgtatca

SEQ ID NO: 4242 - DNA, 435 bp, Zea mays
  Clone ID: LIB3061-007-Q1-K1-D8
gcgctgccgcgtgcttgtaggatccttttcaatctgcggatgcactgagagtaaaagagcttgccatcacgaatctcacaaactacctcacaaaagagaacagagctgaagacctcaggaaccttttgacccagctcaggcccttttttgcattgatccccaaggcgaagactgcgaagattgtgcgtggcatcattgatgccgttgccaaggtgcctggaacatctcagcttcagatctcactgtgcaaggagatggtagaatggacccgtgcagagaagcgaaccttcctcaggcagcgtgtggaagcaaggctggcagcccttctgttggagaatcaggagtatactgaggctcttacactcctttctggactcatcaaggaagttaggaggctggatgacaagttgcttcttgtggacatcgaccttttgg

SEQ ID NO: 4243 - DNA, 440 bp, Zea mays
  unsure (1)..(440): unsure at all n locations; Clone ID: LIB3061-007-Q1-K1-D9
ggctcgacccactcgtccggagcaactagcaactatanaaagcacatctttgnatctacaatggcagctaaaatatggggcctccttatgctccttggtctttctgcaagtgctgctacggcgaccattttcccacaatgctcacaagctcctatagcttcccttcttcccccgtacctctcaccaacggtgtcttcggtatgtgaaaacccaattcttcaaccctacaggatccaacaggcaatcgcagctggcatcttacctttatcacccttgttccttcaacaatcatcagccctattacagcagttacctttggtgcatttattggcacaaaacatcagggcacaacaactacaacaacttgtgctagcaaaccttgctgcctactctcagcaaccgcagtttcttccattcaaccaactagctgcattgaactc

SEQ ID NO: 4244 - DNA, 418 bp, Zea mays
  unsure (1)..(418): unsure at all n locations; Clone ID: LIB3061-007-Q1-K1-E1
tcggagattttccctccttatgctccttgatctttcntcatgtgttgctaacgcgacaatgttcgctcaatgctcacaagctcctatagcttcccttcttcccccataccttccatcaattatagcttcaatatgtgaaaacccagctcttcaaccatataggcttcaacaagcaatcgcagcaagcaacatacctttatcgcccttgttgtttcaacaatcgccagccctatctttggtgcagtcattggtacaaaccatcagggcacaacagctgcagcaactcgtgctacctctgatcaaccaagtagcttttggcaaacctttctccctactctcagcaacaacaatttcttccattcaaccaactgtctacactgaaccctgctgcttatttgcagcaacaactattaccatt

SEQ ID NO: 4245 - DNA, 389 bp, Zea mays
  unsure (1)..(389): unsure at all n locations; Clone ID: LIB3061-007-Q1-K1-E11
cgggcgcgtgggtgttcattcagaactattcctattcgaacgcactagcaacgacctggcaacaatggcttccaagacattatccctccttgcgcttcttgccctttttgtgagtgcaacaaatgcgttcattattccacaatgctcacttgctccgagtgccattattccacagttcctccctccagttacttcaatgggcttcgaacacccagctgtgcaagcctataggctacaacaagcgcttgcggcgagcgtcttagaacaaccaattgcccaattacaacaacaatccttggcacatctaaccatacaaaccatcgcaacgcagcagcaacaagcactgagccacctagccgtggtgaaccctatcgnctacttgcaacaac

SEQ ID NO: 4246 - DNA, 418 bp, Zea mays
  unsure (1)..(418): unsure at all n locations; Clone ID: LIB3061-007-Q1-K1-C6
gcgggggttgtccgttgatccttctcatcttccgccctttcctcccacttgctcggcgaacccagagccccgcccacctcttttcggttttttctcgccggcggttgtgccaggatcgggctttgggctccgtgcatcgacgcgccgccgcctcctgatcgcaaagggtgtttcccccaggctttcgtgctccggaagtggcgagattcgccgagaaaggtcagatccggtggcctggttcgagcaacagtgtgttggcgtatcgatctgcattggatcgtcgggcgattcgtgtgacggagacgacgtnctctgtgtgggctccggtttgctcctcagctctagatctggagggactgggtgatctgctgcctcaagcagcttgaggtgcattggaaagtgaccatctttcccagac

SEQ ID NO: 4247 - DNA, 436 bp, Zea mays
  Clone ID: LIB3061-007-Q1-K1-B11
cggctcgacccactcgtccgctgagtcaacgagccatggtgaacctcatctgactcattacaactactttcatctagcccgctcgcggtgggcaatgcacctacgtacctacaacaacagttgctgcaacaaattgtaccagctctgactcagctagctgtggcaaaccctgctgcctacttacaacagttgcttccattcaaccaactggctgtgtcaaactctgctgcgtacctacaacagcgacaacagttacttaatccattggcagtggctaacccattggtcgctaccttcctgcagcagcaacaacaattgctgccatacaaccagttctctttgatgaaccctgccttgcagcaacccatcgttggaggtgccatcttttagattacatatgagatgtactcgacaatggtgccctcataccgacatg

SEQ ID NO: 4248 - DNA, 245 bp, Zea mays
  Clone ID: LIB3061-007-Q1-K1-B12
ccgacgcgtgggcccacgcgtccgatcactaaatctaaaaaaaaaaaaaaaaaaaaaaggaaaagggaaaaaaaaaaaaaaaaaaaaaaaaaaaaaaaaaaaaaaaaaaaaaaaaacaaaaaagagaaagaaaaaagaacaagaaaaaaaaaaaagacaaccagcaacaacaggaacacacaagcaacgaagaggacgaaccgaaacaaggagcggacgagaaaaagcaaaaacacagacacaag

SEQ ID NO: 4249 - DNA, 413 bp, Zea mays
  unsure (1)..(413): unsure at all n locations; Clone ID: LIB3061-007-Q1-K1-B2
ctgatttgcactagttggttgaagggttgatactcctgtnggngagagtgagcgggggggggtttaaaagcaagnaaaacatcccttcttaaagcaaggttaggacaagttaaagaaagaaatagcactgttcttgaatgcatacatgtcgatttgcatggcaagggaatatcaaatggattgtgctacatagattcgacaacggtaaacttgcaggagctacctttggaggttgggcggttcaaagaagaactgttgttaggactccatgatatcagcaagaagactgaccttgttattgcggtgcataacctagcacaccgaattccacagtatcaacggtccaatacttctcagcctcagcctgctctttcacttctcttggataaaactaaagcgctaaacattccttg

SEQ ID NO: 4250 - DNA, 434 bp, Zea mays
  unsure (1)..(434): unsure at all n locations; Clone ID: LIB3061-007-Q1-K1-B3
tcgcagaggtgctgccttcatggacaggtactttattttcaagacttactggagcgagaaagctcgcgaagggagggactatgtgcacaagaacttcaactgtgaggacttgctcatgaattttctgtatgcgaacgcaagctccacaaggactgtggagtatgtccaccctgcgtgggctatcgatacatccaagctttcttctgtggccattagccgggacacccagaaacactacgatatcagaacagattgcttggcaaagttctcctccatctatggccccctccctcagaaatgggagttcggcatgcgtgaagatcattgggacaaataggatcgcaatggtggtacacaacggattgtttaaaccttnttggtaatcccctaaaaagtttgtagcttggggtctacggtgaagtttgtaggtcctt

SEQ ID NO: 4251 - DNA, 310 bp, Zea mays
  unsure (1)..(310): unsure at all n locations; Clone ID: LIB3061-007-Q1-K1-B4
aagatacatagtgaagacactagctctcttttagcaccaatgggagccaagattttgtccctccttgccctccttgctctttcagcaagcgctgctacctctactattattccacaatgctcacaacaatacctctctccggtgacagccgcgggatttcaacacccaactatacaatcctacatgctacatgaggccatcgtagcaagcatcttacggtcattagcattaaccctncaacagccatatgccctattgcaacaaccatccttagtgcatctgtatctccaaagaatcgcgacacaacaac

SEQ ID NO: 4252 - DNA, 364 bp, Zea mays
  Clone ID: LIB3061-007-Q1-K1-B5
gcggttatttattatttttggcatgtcgtatttctcataaatacttcctggacgacatgaaccaataagagagctcacgtgttactacaggaaaagggaaaacccataggatccggacttattatgaagatgaggagctaattagagcactatatgagatatctttagatccaaattggaaaagtacagggaggctataacaactgggatctgccatgtcataaacaatgaactcagagtcatgctaccactgagtggtctaaatgctatggcacacattgagtatacagtgaggcatcatatgaccacgaatcagactaacgaggtacttcttgctaagagtggcactaatcagatgacgatg

SEQ ID NO: 4253 - DNA, 428 bp, Zea mays
  unsure (1)..(428): unsure at all n locations; Clone ID: LIB3061-007-Q1-K1-B7
gcgtgcaccaagaaatctatcgagtgtctactgacaggggaattaatggcgtcgtcgtcgagcagcagccaccgccgcctcatcctcgcagccgccgtcctgctctccgtgctcgcggctgccagcgccagcgccgggacctcctgcgtgccggggtgggccatcccgcacaacccgctcccgagctgccgctggtacgtgaccagccggacctgcggcatcgggccgcgcctcccgtggccggagctgaagaggagatgctgccgggagctggcggacatcccggcgtactgccggtgcacggcgctgagcatcctcatggacggcgcgatcccgccgggcccggacgcgcagctggagggccgcctagaggacctgccgggctgcccgcgggaggtgcagaggggattcgccgncaccctcgtcac

SEQ ID NO: 4254 - DNA, 411 bp, Zea mays
  Clone ID: LIB3061-007-Q1-K1-B8
gcggggacgccgtcatggagccggttgtttatggcagcaacacggtagtagctgttgcccaagttgagttgcaaacaatgaacgtgcagcagcccgctgatgttgccggacccagcgagggggtggcggcgatctccaaaggggggaaggtagggccgaaccggtgcagcgcctgcaggaagagggttggacttacgggattcaactgccggtgtgggaacttgtactgcgcactccaccgctactccgacaagcacgactgcaagttcgactaccggactgctgccagggacgccattgccaaggctaatccggtggtgaaggcagacaagctcgacaagatctagggggggttccctacggttgggtatcaggaagattgtaaaccgcggtaactcgtcatgcggaact

SEQ ID NO: 4255 - DNA, 381 bp, Zea mays
  Clone ID: LIB3061-007-Q1-K1-B9
gacccactcgtccgctggaagcaacgtataagtggaatttctagcattatagagcaacaatggcgaccaagatattgtccctccttatgctccttgctctttctacatgtgttgctaacgcgacaattttccctcaatgctcacaagctcctatagcttcccttcttcccccataccttccatcaattatagcttcaatatgtgaaaacccagctcttcaaccatataggcttcaacaagcaatcgcagcaagcaacatacctttatcgcccttgttggttcaacaatcgccagccctatctttggtgcagtcattggtacaaaccatcagggcacaacagctgcagcaactcgtgctacctctgatcaaccaagtagctc

SEQ ID NO: 4256 - DNA, 417 bp, Zea mays
  Clone ID: LIB3061-007-Q1-K1-C1
tcgcagcagggtctgtcatcactgagccatttatatgtggtgaaccctgtcacctacttgcaacagcagctgcttgcatccaacccacttgctctggcgaacgtagctgcataccagcaacaacaacagctgcaacagtttatgccagtgctcagtcaactagccatggtgaaccctgccgtctacctacaactactttcatctagcccgctcgcggtgggcaatgcacctacgtacctacaacaacagttgctgcaacaaattgtaccagctctgactcagctagctgtggcaaaccctgctgcctacttacaacagttgcttccattcaaccaactggctgtgtcaaactctgctgcgtacctacaacagcgacaacagttacttaatccattggcagtggctaacccattggtc

SEQ ID NO: 4257 - DNA, 422 bp, Zea mays
  Clone ID: LIB3061-007-Q1-K1-C11
gtggcctactgtcagtcaacagcagtataatccattttaccaactagctgcattgaacgctgcttgttatttgcaacaacaacaactaccattcagccagctacctgctgcctacccccagcaatttcttccattcaaccaactggcagcattgaactctcctgcttatttacagcagcaacaactactaccattcagccagctagctggtgtgagccctgctaccttcttgatacaaccacagttgttgccgttctaccagcacgctgcgcctaacgctggcaccctcttacaactgcaacaattgctgccattcaaccaacttgctttgacaaacccagcagcgttctaccaacaacccatcattggtggtgccctcttttagatttcttatgagttatagttcaataataaaagttttt

SEQ ID NO: 4258 - DNA, 438 bp, Zea mays
  Clone ID: LIB3061-007-Q1-K1-C12
tggatcctgtagggttgaacatgcgatcttaacaggcattactcatgtccacccttgttcctccaacaaccgtcagccctattacagcagttacctttggtccatttggtggcacaaaacatcagggcacaacaactacaacaacttgtgctagcaaaccttgctgcatactctcagcaacatcagtttcttccattcaaccaactggctgcattgaactctgctgcttatttgcaacaacaattaccattcagccagctagttgctgcctacccccagcaatttcttccattcaaccaactagcagcattgaactctgctgcttatttacagcagcaacaactactaccattcagccagctaacttatgtgaacccttgttgctttttgacacaacaaccagtggtggccgtcttacctgcacgctatgcctaacgc

SEQ ID NO: 4259 - DNA, 345 bp, Zea mays
  Clone ID: LIB3061-007-Q1-K1-C2
ctgctcgtcccccttcggttcgggttacttctgtgaggttctccggggttcggtttcgtgggtgagcggatcgagatggcggcgtcggatgttgagtaccgctgcttcgtcggcggcctcgcctgggccacggacgaccactccctccacaacgccttcagcacctacggcgaggtcctcgagtccaagatcatcctcgatcgggagacgcagaggtcccgcggcttcggcttcgtcaccttctccacggaggaggcgatgcggaacgccatcgagggcatgaacggcaaggagctggacggccgcaacatcaccgtcaacgaggcccagtcccgcggcgggcgt

SEQ ID NO: 4260 - DNA, 352 bp, Zea mays
  Clone ID: LIB3061-007-Q1-K1-C3
ccgccttgcgcttcttgcccttttatactttttaacaaatgcgttcattattccacagtgctcacttgctcctagtgccattattccacagttcctcccaccagttacttcaatgggcttcgaacatccagccgtgcaagcctacaggctacaactagcgcttgcggcgagcgccttacaacaaccaattgcccaattgcaacaacaatccttggcacatctaaccctacaaaccattgcaacgcaacaacaacaacaacaacagtttctgccatcactgagccacctagccgtggtgaaccctgtcacctacttgcaacagcagctgcttgcatccaacccacttgctctg

SEQ ID NO: 4261 - DNA, 382 bp, Zea mays
  Clone ID: LIB3061-007-Q1-K1-C4
tcgctgcttgtagatcgttagcggctgcgcttgctcttcttgtttttgctctcacaattggttgggttccaatttaaatttagacttttgatcatttgttattcagaacgagcacgagtgtcacgttatgacgacgtgaccaccttgagctcgaatttctcgacgacgaccagcgacaacccctccacttgagcggcgccgagtgctccgtgcctttgataccctagcgtcgcgccagtcgagttggccatcttaacgccgttgacatacacggcgaactgtaccggcggcgccagcgagggcagtgccaggaacatcaccttgccgatgaccagtttccggctcgggccgtgcgcgtcgtgcactcacgtgcgacatgagc

SEQ ID NO: 4262 - DNA, 439 bp, Zea mays
  Clone ID: LIB3061-007-Q1-K1-C5
ttgcgggcctgccgctttcggttgcacattgggtaccaacactggcagccaaaatattgggctgccttatgctccttggtctttctgcaagcgttgctaccgcaaccattttcccacaatgctcacaagctcctatagcttcccttcttcccccatacctctcaccagcggtgtcttcaatgtgtgaaaccccaattgttcaaccctacaggatccaacaggcaatcgcaacaggcatcttaccattatcacccttgttcctccaacaaccgtcagccctattacagcagttacctttggtccatttggtggcacaaaacatcagggcacaacaactacaacaacttgtgctagcaaaccttgctgcatactctcagcaacatcagtttcttccattcaaccaactggctgcattgaactctgctgcttatttgcaaca

SEQ ID NO: 4263 - DNA, 450 bp, Zea mays
  Clone ID: LIB3061-007-Q1-K1-B10
ggaattacccgggctcgactccacgtcgtctcggttgtctgtcgtgctactcagcatccagccttatcacccttccgcgtctagggttttctgctgcaatggccgccgcgagggcagacggggagcgcaggatcggggtggccatcgactactcggagagcgccaagaaggcgctggactgggccatcgacaacctgctccaccacggggacaccctcgtcgtcgtccacgtcctgcaccacggcgcggaggagaccaagcacacgctctgggccaagtccggatccccgctgatcccactctccgagttccgggagcccgaggtgatgcagggctacggcgtgcgccccgacgccgaggtgctcgacgcgatcgacacggcagcgcgccagaagcagcttgaagtggtggcgaagctgtactggggcgacgccagggagaagctctgcg

SEQ ID NO: 4264 - DNA, 396 bp, Zea mays
  Clone ID: LIB3061-026-Q1-K1-A9
ccgcgcctctccaaccaggcgccactcgccagggtctaggctgatcatggaaggaaacgccgcagccgggaagaggtcccggacggagacggcgaacggggctgccggcggcgggaagcgctccaaagacatggagtcatttcaaactggtctatcaagcaaatcgaagccttgcaacaagtttttcagtacgattgggtgcccgtttggtgagggatgtcgttttctgcactttgtccctggcggttacccggcagttgcaaagatgctcaatctaggtagccctgctgtatctgcgccatcaagaactcatgtggatcacgctgctcttactggcgcctctcattcagcttcgtcaggcaagacacgcatgtgcaccaagtacaatactacaga

SEQ ID NO: 4265 - DNA, 440 bp, Zea mays
  unsure (1)..(440): unsure at all n locations; Clone ID: LIB3061-026-Q1-K1-B1
tcggacctaaagaagaattcaagggtctataacaagtacaccgacagtgctcaaaaggaaagccctcgtcaggccgagggtacacagaaaccagtatttgatcaccaggactccttcaccaacgagacacaggactatgtgccgtctcatgtgccgcagaggtcgccgtctctggaggacgatccgtatttctcctaccccaacttgttctcggcgccaaaaccttgaaggcggaaactagtggcctgtaactgctagtagtagtcctattatgtcttggtcttcgctgttgcctcggaatttctgtgtgttgctgagtttggtacataacggtacaaaaggagactactgggttattacttggctacgaaacctgtctagtttgagtctctgtaaactgtacatgtacggtgtctgtatcagttntctgaaacatttct

SEQ ID NO: 4266 - DNA, 407 bp, Zea mays
  unsure (1)..(407): unsure at all n locations; Clone ID: LIB3061-026-Q1-K1-B10
gcaaagtattttgctaagctcttacgaaaggccatgaaaggtttaggcactgatgacgtgacacttataagggtggtggtgacgaggaccgagattgacatgcaatatatcaaggcagagtacttgaagaagtataagaagccattagctgaggctatcaactccgagacatcaggaaactatcggacgttccttctttcacttgttggtcatggccattaggctatgtttcgaccatggggcatgatatttctatcgatccaccctaaatgcagcgacctacctggaaaacttatgatgttgccatttatctgtcgtgactcctggatctaactgccacatatcacatatgcggtccctagtatgcttgtttaaagtattcgtgtatatatntccatctgggtttc

SEQ ID NO: 4267 - DNA, 335 bp, Zea mays
  Clone ID: LIB3061-026-Q1-K1-B11
taaggaatctaaatataaagcattatgttttcattgcctatgtcaatgaacgggtggggagctaattgcatactagctgatgcccctaaagctcaagcacatgccagcaatcattagacagaacaacgaaaagtatactaagccacttctagacactgtctcatctcaatcatcagcagcatattgaccacaaatatctgaagagccacgtgcttgccagtctgcataggagaagcatatgtgaaataacgatctgacttatctaatcgactcacagctacagaagcatcatgatccaccatatcaccacatatccttaaagaacgctagatatc

SEQ ID NO: 4268 - DNA, 389 bp, Zea mays
  Clone ID: LIB3061-026-Q1-K1-B12
gaccaactagcaacatagaaagcacaatagtgtaccaacaatggcagccaaaatatggtgcttccttatgctccttggtctttctgcaagtgctgctaccgcaaccattttcccacaatgctcacaagctcctatagcttcctttcttcccccatacctctcaccagcggtgtcttcagtatgtgaaaacccaattcttcaaccctacaggatccaacaggcaatcgcagcaggcatcttacctttatcacccttgttcctccaacaaccgtcagccctattacagcagttacctttggtgcatttgttggcacaaaacatcaaggcacaacaactacaacaacttgtgctaggaaaccttgctgcctactctcagcaacagcaagttc

SEQ ID NO: 4269 - DNA, 56 bp, Zea mays
  Clone ID: LIB3061-026-Q1-K1-B2
aataaagttcaagctgattgcgaacctctagttaaaggtttagagctctatattat

SEQ ID NO: 4270 - DNA, 409 bp, Zea mays
  Clone ID: LIB3061-026-Q1-K1-B3
cgttcacggtagcgagagcttatcgtcgtcggcggcgaagatggtgtcgctgaagctgcggaagcggctcgccgcgagcgtcctcaagtgtgggaaaggcaaagtctggcttgaccccaatgaagtcagcgagatctccatggctaactcccgccagaacatccggaagttggttaaggatgggtttatcatcaggaagcctcagaaagttcactctatgtcccgtgcaagaaaggcacatgaggccaagcagaagggaaagcactctggatatggcaagcgcacgggtaccagggaggctatgcttcccaccaagattctgtggatgaggaggatgcgtgttctgaggcgcctgcttcgcaagtaccccgagggccagaagatcgacaagcacatgtatcatgacatg

SEQ ID NO: 4271 - DNA, 365 bp, Zea mays
  Clone ID: LIB3061-026-Q1-K1-B4
tatgctccttgctctttctgcatgtgttgctaacgcgacaattttccctcaatgctcacaagctcctatagcttcccttcttcccccataccttccatcaatgatagcttcagtatgtgaaaacccagctcttcaaccctataggctccaacaagcaatcgcagcaagcaacatacctttatcacccttgtttcaacaatcgccagccctatctttggtgcagtcattggtacaaaccatcaaggcacagcagctgcagcaactcgtgctacctgtgatcaaccaagtagctctggcaaacctttctccctactatcagcaacaacaatttcttccattcaaccaactatctacactgaaccctg

SEQ ID NO: 4272 - DNA, 430 bp, Zea mays
  unsure (1)..(430): unsure at all n locations; Clone ID: LIB3061-026-Q1-K1-B5
gcgctggtgaaggaccgcgaagtggccaggaatatggtctacttcgtcgaccgcagcagcaccggcgtatgcaaggagtcgcagatgcgcgccaccaagatcctcggggtcgtctccgacgcctacgaggtcgtcccgccggccagggccagggccagcggcgcggtgccccgcctcttcgacttcgcgctgcggcgcctggaggagcgctggcgcatcctgcgcgccaccgtggctgccaccggcgccttcagcctgccggaggagacctccggctactgcaacttcgccaagcaaaccgtgacagcttgccctgcgttcgcgtggctgcngtgtgagaaggagggcgtcgaggactgcgcggagttgctcgccggccacaatatcgtgggtagcggcggtgagcagttcggaggagacgcgcggtgcg

SEQ ID NO: 4273 - DNA, 451 bp, Zea mays
  Clone ID: LIB3061-026-Q1-K1-B6
agctacccccctcccgcgtccgtcgaattcgcctccgccgcctgctcgatccggtgggaactcgccgctgccgggttgttttcgctgggtgattaaggctcgggattcgagatctacgcgagtcgcgggcaagcagccatgagcgaggtgttcgagggctacgagcggcagtactgcgaggcctccgcctcgctctcccgcaagtgcaccgctgcctccgccctcgatggggagaagaagaagcagaagctgtccgagatccaatccggcgttgaggaagctgaatcgctgattcgtaagatggacctggaggcaaggagcctacagcctagcattaaggctggtttgcttgcaaagctgagggagtataaatctgacctcaacaacgtcaagagtgagcttaagaggatctcagcgcccaatgctaggcaggctacccgggaggagctcc

SEQ ID NO: 4274 - DNA, 355 bp, Zea mays
  Clone ID: LIB3061-026-Q1-K1-B7
aatggttcaaatggtatagtaatcaatctggctgatggtcccgaaataccacctctcaaggagatagttgcaaaggagactgctgatctacttgatcgtagtcagcgtctctctgtccgtgaacttgcgatgaagtttgagaagggtctcagcactgccacattgctgtcgaatgaggttaaatggagacaagtagctttgatggagcgggatatccttttgaagaatctaaagagtgtattatagtcactgagaggtcaggtgacaggcaaaactaacgatgaaatccaggagtctatatctatggtggagatccttacggttcagctctgcaaaagagaatctgagttggttc

SEQ ID NO: 4275 - DNA, 436 bp, Zea mays
  Clone ID: LIB3061-026-Q1-K1-B8
aaagtcccggaataatgagcaagatgcccccattgcctatctcggtggatgaaaggctagctagctgcatactcggtcacgctcctatggctcaagctcttggcagcagtcatttgaaagaagaacgaagagtatggtaagccactgctagacagggaagcatctcaatcttcagcagcagtttgaccacaaatatctgaagagccacgtgctagggagtctgcatggagaagcataggtgaaagaacgatctgacttctctgatggtctcaaagctacagaagcaacatgatccaccacttcaccacatggccttaaagaacgctgtctatcttgccttgtcaggatactctgtattagtgatcaacaaattcgagatagggagagtcatccgtactctgcagtgatcctgaccttggttgcacatatcgattct

SEQ ID NO: 4276 - DNA, 167 bp, Zea mays
  Clone ID: LIB3061-026-Q1-K1-B9
gccgtgtgtgcctgtcagaattcctaagaattcttaggcattgtttgaaagggctgggacttttttttctgaaagcaccttgccgtgaagcttttagaacatctctaacaggagagatgtatagaactctagcgcaaaaaattgcttcaacgagagttctattttac

SEQ ID NO: 4277 - DNA, 392 bp, Zea mays
  Clone ID: LIB3061-026-Q1-K1-C1
ctcaagcatcagcggcaggagctctgggcagcgtgcgcacgtggggtacctagctcgggctgctggcctaccatggctgatcaccaccggggcgcgacgggaggtggcgggggctacggcgacctccagcgcgggggcggcatgcacggcgaggcgcagcagcagcagaagcagggcgccatgatgacggcgctcaaggccgcgacggccgcgaccttcggcgggtcgatgctggtgctgtccgggctgatcctggccggcaccgtgatcgcgctcacggtggccacccccgtgctggtgatcttcagcccggtgctggtgccggccgtcatcgcgctggcgctcatggcggccgggttcgtcacctccggcggcctcggcgtcgctgcgct

SEQ ID NO: 4278 - DNA, 369 bp, Zea mays
  Clone ID: LIB3061-026-Q1-K1-C10
caacttcttccatttaaccaattggccgcactgaaccccgctgcttatttgcagcagcaaatactactaccatttagccagctagctgcagcaaaccgtgcttccttcttgacacagcaacagttgctgcctttctaccagcagtttgcggctaaccccgcaaccctcttacaactacaacaattgttgccctttgtccaacttgctttgacagacccagcggcctcctaccaacaacacatcattggtggtgccctcttttagattgcttattagttgtaattcaataataaagttttttggatgatgtatgtggccaaccagaaataagaagttacatttccagattctaatgtgatattggtctcc

SEQ ID NO: 4279 - DNA, 421 bp, Zea mays
  Clone ID: LIB3061-026-Q1-K1-C12
gtggaagttgcttcagatctagtcacattcacaaatgaagaaaaagttgatgggacagcgtctgttgttgctccagcggctgaaattatgccactgcaagacatcaacagcgaagaaaatgctttggtgaatgatgtggaagagagatccaaagaagaacattcatctactgataacctgaaaggcagcaagaggaggtcttcattctcagctaaacctgaatatccagaaaatggctccaaaaattctccagccctgccaagctacatggctgctacacaatctgcaaaggcgaaactgcgggggaatagttcaccaagacttagctctgattcagcagagaaaaacgggttcactcgtcgtcactcccttccgtcccctaacaatggtaagataatttcacattctgcacgtacgcaaa

SEQ ID NO: 4280 - DNA, 432 bp, Zea mays
  Clone ID: LIB3061-026-Q1-K1-A8
atctagccgtccgctccctgttgcctcccaagccaaccatatccactctcggcgccggggcgcatctctcccctcttcttgcccttccttccccccaggccccaacccacgcagcctcactaggggtctaccggcggcggcgacgagatggtgcagcgcctcacctaccgaaagcgtcacagctacgcgacaaaatccaatcagacccgggtcgtgaagaccccaggtgggaagcttgtgtaccaatacaccaagaagagggcgagcggtcccaagtgccccgtcaccgggaagaagatccaggggatcccccacttgagacctgccgagtacaagaggtccaggttgtctaggaaccgcaggactgttaaccgtccttatggtggagtactctctggaattgctgttagggagagaattatccgtgctttc

SEQ ID NO: 4281 - DNA, 416 bp, Zea mays
  Clone ID: LIB3061-025-Q1-K1-H4
ttcccggttaaatgaatgtgcattccgtacgtcgaaatgacattgagattgatggagcgttttggtgtgaaagcagaacattgtgatagcggcgacagattctacattaatggaagtcaaaaatacaagtcccctaaagatgcctatgttgaaggtgatacctctagcgcaagctatgttttggatggtgctacgattactgcagggactgacactgatagaggttgtggcacacaccactttgcaggttgatataaagttagctgaagtactgcaaatgatgggagcaaaggtcacatggaccgagactagcggaactggtactgagccatgctggtagccattctacaggaaacatctcaaggctagtgatgacaacatgaacaagactcccgatgttgacatggctctggctg

SEQ ID NO: 4282 - DNA, 400 bp, Zea mays
  Clone ID: LIB3061-025-Q1-K1-H5
cgtcagcctagcaattagctcatcgactccagattggagaactcgacaccatgaaggtgctgatcgttgcccttgctctcctggcgctcgctgcgagcgccgcctccagtacaagcggcggctgtggctgccagacaccaccgtttcatctaccgcctccgttctatatgccgcctccgatctatctgccgccgcagcagcagccgcagccatggcaataccccactcaaccaccgcagctaagcccgtgccagcagttcggatcctgcggcgtcggcagcgtctgcagcccgttcctgggccagtgcgtcgagttcctgaggcaccagtgcagcccggcggcgacgccctacggctcgccacagtgccaggcgctgcagcagcagtgctgccaccagat

SEQ ID NO: 4283 - DNA, 423 bp, Zea mays
  Clone ID: LIB3061-025-Q1-K1-H6
ctcacgcagtccggccacgcgtgcgatgaagtctgtgaaaacccagatcttcaggcgtaggggctccaacacgcaatccgaacaggcaccatacctttatcacccttgctgttcgaacaatcgtcagccctatctctggtgcattgattggcacacaccatcagggcacagtagttgtagaaactgatgctacctgtgatcaaccaagcaactgtgccaaacctttctccctactgttagctacaacaataccttgcattcaaccaactgtatacactgaaccctgctgcttatgtgcagcagcaactattaccattcagtcagctagctactgcctactctcagcaacatcaacttatgacatttaaccaatgggaccgactgaacgccgctgcctatttgcagcagcatatactactacca

SEQ ID NO: 4284 - DNA, 399 bp, Zea mays
  Clone ID: LIB3061-025-Q1-K1-H7
tcgcggacgcgtgggtttcagcattcaaaaacacaccaagcgaagcgcactagcaacgacctgagcaccaatggctaccaagatattagccctccttgcgctgcttgcccttttagtgagcgcaacaaatgcgttcattattccacagtgctcacttgctcctagtgccattattccacagttcctcccaccagttactttaatgggcttcgaacatccagccgtgcaagcctacaggctacaactagcgcttgcggcgagcgccttacaacaaccaattgcccaattgcaacaacaatccttggcacatgtaaccctacaaaccattgcaacgcaacaacaacaacaacaacagtttatgccatcactgagccacctagccgaggtgaaccctgtcac

SEQ ID NO: 4285 - DNA, 435 bp, Zea mays
  Clone ID: LIB3061-025-Q1-K1-H8
ggctcatcaattggagttagctaggaaggcagaggagttagataggaaggcagaggagttggcgcggaaggaggaggaactaagaaaagagagggatgcagctgaaaaggagcggcttaggatggagcagaaggctaaggctaaggaggctgaggagaggaagaggcggaaagcagagaaggacaaggaaagagccgagttcaaagcacgcaaggaagctgaggagagagagaagaagaaagcaaagagagacaaaaagaaaggcgcagcaccagcagattcgagcgccattggtgacagccatgctgctgcttcggctacagcagatactgacagtaatgcatcagacaacccaagggaagctgacgtttctcaaccagcggtggctcccaggaggccggctagaccagcggcggcaatcaagcaactgaacag

SEQ ID NO: 4286 - DNA, 397 bp, Zea mays
  Clone ID: LIB3061-025-Q1-K1-H9
cggacgcgtggtcgaccgcgcgccctacgcggtcagctacatgctagcccagctcaggggctcctacgccttcgtcctcttcgacaagaccaccaactccctgctcgtcgcatctgaccccgagggcagggtgccggtcttctgggggatcaccgacgacggatgcgtcgacttctccgacgacatcgacatgctcaaaggctcatgcagcaagtcgctcgcgccgttcccgcatggctgcttctactccaacgccctcggagggctcaagtgctacgagaaccccaagcacaaggtcaccgatgtccacgccgacgaacaagagatctgcggtgccactctcaaggcggtggaagggtctactgtcctgacggcgctgcactgatcgatcatcatc

SEQ ID NO: 4287 - DNA, 452 bp, Zea mays
  Clone ID: LIB3061-026-Q1-K1-A1
caactagcaacatagaaagcacaatagtgtaccaacaatggcagctaaaatattttgcctccttatgctccttggtctttctgcaagtgctgctacggcgaccattttcccacaatgctcacaagctcctatagcttcccttcttcccccgtacctctcaccaacggtgtcttcggtatgtgaaaacccaattcttcaaccctacaggatccaacaggcaatcgcagctggcatcttacctttatcacccttgttcctccaacaatcatcagccctattacagcagttacctttggtgcatttattggcacaaaacatcagggcacaacaactacaacaacttgtgctagcaaaccttgctgcctactctcagcaacagcagtttcttccattcaaccaactagctgcattgaactctgcttcttatttgcaacaacaacaactaccattca

SEQ ID NO: 4288 - DNA, 316 bp, Zea mays
  Clone ID: LIB3061-026-Q1-K1-A11
gatgaaggctgtgttgagaagcctgaacgtgaaaatatgtcccctagcacaagcgggggaggccgccaacaaatcattttttataatgctccaacataccttgtaaaaccgacctgtgaaaccattcgggccaggtgctttgtcaaggggtaagtcattaactgctgctcataattcctcttctgtgaatgggttgtccaggctggccaaatcatgctgttgcataccaatctcactaagattttttttcgaacacgcaggagagctgcgtatcattgaattaagaaaaggagggtctaaaaaatagatcgaatac

SEQ ID NO: 4289 - DNA, 427 bp, Zea mays
  Clone ID: LIB3061-026-Q1-K1-A12
attgacatacacaccatgcgaatcgctctaacaacgacctaacaacattggctaccaggatattagccctacttgcgcttcttgccctatttgcgagcgcaacagatgcgttcattattccacaatgctcacttgctcctagtgccattattgcacagttacttgcaccagttacttcaatgggcttcgaacacctatctgtgcaagccaacatgcatcaacaagcgcttgcggcgagcgtcttacaacaaccaattgcccaattgcaacaacaatccttgccacatctaacactacaagccatctcaacgcaacagcaacatcagttgctaccagcactgagccacctagccatggcgaaccctgccggctacttgcaagagcagctgcttgcatccaacccacttgctctggcgaacgtaattgc

SEQ ID NO: 4290 - DNA, 378 bp, Zea mays
  Clone ID: LIB3061-026-Q1-K1-A2
ccgatcagctagcagcataaatcgcgcaatagtgtaccaacaatgtccctctaaactattctgtctacttatgctccttgagctctgggtaaatactgatactgcgaccattttcccacaatgctcacaagctaccataacttcccttcttcatccgtacctgttaccaacattctattgcctatattaaacaccaactctttaaacctacatgatccaacttgcaacaccaacctggcatattactctttatcaccctcattcgctacaacaataatgagtcatatcacagcatttacctttgctacatctattggcacataacataacgatacaacacctacaacaacttgtgctagcaaaccttgctgactactc

SEQ ID NO: 4291 - DNA, 432 bp, Zea mays
  Clone ID: LIB3061-026-Q1-K1-A3
cttgaaaccagctgtgacaggcgtcttagtgttcgtttccactccagatccaattggcaacaaggactatcttggccctgctcctttgcaggatatggcaaggcaaattgctacagccaatggccctactggctataatagggattacctgttctcaatggagaaggcattagccagcattagccacgaagatgattcgatcatagagcttgcaaacgaggtgaggaaggtgctcaacagaacaaaggagaccaagatcactggtgccaatgcttccctgaaatcacatgcccctcttgtgcacctgtccgcgcttccagaaggcaccgttgtggactcgagatagcgagagccttggacgttggacctctactcggaatctacttccagctcttgcatgtttgtggccatcatgtactgattttccctttt

SEQ ID NO: 4292 - DNA, 390 bp, Zea mays
  unsure (1)..(390): unsure at all n locations; Clone ID: LIB3061-026-Q1-K1-A4
acgctcgtnctccgtcgttggtcccggaatcctagccggccgctgggccgcgccccgcgccgtcccggtccgcgcgctcccgccccgtcgcgtcaccgtcgtctgcagcagcgccgcggcggcagccgaggcctcggacgccgcagcgccagtggagaagttccggctcgacaatttggggccccagaaggggtcccgccggcggcccaagcgtaagggacgcggtattgctgcaggccagggcgcgagctgcgggttcggtatgcgcgggcagaaatcgcgctcggggcccggcgtccggcgcgggttcaagggagggcagatgccgttctaccgccgtttccccaagctacggggcattgccggcgggatgcacattggcctgccgaa

SEQ ID NO: 4293 - DNA, 423 bp, Zea mays
  Clone ID: LIB3061-026-Q1-K1-A5
agcgcttgcggcgagcgtcttacaacaaccaattgcccaattgcaacaacaatccttggcacatctaacaatacaagccatcacaacgcaacagcaacaacagttcctaccagcactgagccacctagccatggtgaaccctgccgcctacttgcaagagcagctgcttgcatccaacccacttgctctggcgaacgtagttgcaaaccagcaacaacaacagctacaacagtttctgccaacgctcagtcaactagccatggtgaaccctgccgcctacgtacaacaacaacaactgctttcatctagcccgctcgctgtgggcaatgcacctacatacctgcaacaacaattgttgcaacagattgtaccagctctgactcaactagctgtggcaaaccctgttgcctacttgcaacagct

SEQ ID NO: 4294 - DNA, 429 bp, Zea mays
  Clone ID: LIB3061-026-Q1-K1-A6
attgtgagcattcagaaacacacctagcgaagcgcactagcaacgacctaacaacaatggcttccaagacattatccctacttgcgcttattgccctttttgtgagtgcaacaaatgcgttcattattccacaatgctcacttgctccgagtgccattattccacagttcctccctccagttacttcaatgggcttcgaacacccagctgtgcaagcctataggctacaacaagcgcttgcggctagcgtcttagaacatccaattgcccaattactacaacaatccttggcacatgtaaccatacaaaccatcgcaacgcagcagcaacaagcactgagccacctagccgtggtgaaccctatcggctacttgcaacaacagctgcttgcatgcaacccacttgctttggcaaacgtagctgcatacc

SEQ ID NO: 4295 - DNA, 451 bp, Zea mays
  Clone ID: LIB3061-026-Q1-K1-A7
attgagaccaactagcaacatagaaagcacaatagtgtaccaacaatggcagccaaaatattttgcctgcttatgctccttggtctttctgcaagtgctgctacggcgaccattttcccgcaatgctcgcaagctcctatagcttcccttcttcccccgtacctctcaccagcggtgtcttcggtatgtgaaaacccaattcttcaaccctacaggatccaacaggcaatcacagctggcatcttacctttatcacccttgttcctccaacaatcatcagccctattacatcagttacctttggtgcatttattggcacaaaacatcagggcacaacaactacaacaacttgtgctagcaaaccttgctgcctactctcagcaacagcagtttcttccattcaaccaactagctgcattgaactctgcttcttatttgcaacaacaacaac

SEQ ID NO: 4296 - DNA, 399 bp, Zea mays
  Clone ID: LIB3061-025-Q1-K1-H3
caactattaccatttagccagctagctactgcctactctcagcaacaacaacttcttgcgtttaaccaattggccgcactgaaccccgctgcttatttgcagcagcaaatactactgccatttagcgagctagctgcagcaagtcgtgcttccttcttgacacagcaacagttgctgcctttctacaagcagtttgcggctaaccccgcaaccctcttacaactacaacaattgttgccctttgtccaacttgctttgacaaacccagcagcctcctaccaacaacacatcattggtggtgccctcttttagattgattattagttgtaattcaataataaagttttttggatgatgtatgtggccaaccagaaataagaagttacatttccagattct

SEQ ID NO: 4297 - DNA, 404 bp, Zea mays
  unsure (1)..(404): unsure at all n locations; Clone ID: LIB3061-006-Q1-K1-H3
cgacgacaccatgagggagtgcatttcgatccacatcggccaggccggtatccaggtgggaaacgcgtgctgggagctgtactgccttgagcatggcattcaggctgacggtcagatgcccggtgacaagaccattgggggaggtgatgatgctttcaacaccttcttcagtgagactggtgctgggaagcacgtgccccgtgctgtttttgttgaccttgaacccactgtcatcgatgaggtgaggactggcacctaccgccagctcttccaccctgagcagctcatcagtgggaaggaggatgcagccaacaactttgcccgtggtcactacaccattggcaaggagattgttgacctatgccttgatcgcatcangaagcttgccgacaactgcactggtc

SEQ ID NO: 4298 - DNA, 420 bp, Zea mays
  unsure (1)..(420): unsure at all n locations; Clone ID: LIB3061-006-Q1-K1-H4
gaaggtcgaggcgtgaaagaaaaactccggaggtcgaaatggcggcggcggtgcggcgagcggaggagctggtggagagggagatgggcgggcgcgatgcctnccacgacgccgcgcacgcgctccgcgtccgagaccttgcgctctcgctcgcagccgaagagggcctctccgctcccgaccgcctcctcaccgtggaactggccgctctcctgcacgacgttggagattacaagtataccaagaacaatgtggaggatataagcgtcgttgagatgtttcttcaagaggtaggattggatgaaggccaaaaggatgaaatagtggcaattattaaggggatggggttcaaaaatgaagtttcaaataaatctattgttgagcccactcttgaatttgcaattgtacaagatgcagatc

SEQ ID NO: 4299 - DNA, 394 bp, Zea mays
  Clone ID: LIB3061-006-Q1-K1-H5
caactagcaacatagaaagcacaatagtgtaccaacaatggcagccaaaatattttgcttccttatgctccttggtctttctgcaagtgttgctaccgcaaccattttcccacaatgctcacaagctcctatagcttcccttcttcccccatacctctcaccagcggtgtcttcaatgtgtgaaaccccaattgttcaaccctacaggatccaacaggcaatcgcaacaggcatcttaccattatcacccttgttcctccaacaaccgtcagccctattacagcagttacctttggtccatttggtggcacaaaacatcagggcacaacaactacaacaacttgtgctagcaaaccttgctgcatactctcagcaacatcagtttcttccattc

SEQ ID NO: 4300 - DNA, 394 bp, Zea mays
  Clone ID: LIB3061-006-Q1-K1-H6
gaacgattacaacaacaatccttggcacatctaaccatacaaaccatcgcagcgcaggagcaacaagcactgagccacctagccgtggtgaaccctatcgcctacttgcaacaacagctgcttgcattcaacccacttgctttggcaaacgtagctgcataccaacaacaacaacagttgcaacagtttctaccagcgctcagtcaactagccatggtgaaccctatcgcctacctacaacagcaacaacttctttcatctagcccgctcgctatgggcaatgcacctacatacctgcaacaacagttgatgcaacaacagttgctgcaacaaattgtaccagctcttactcagctagctgtggcaaaccctgctgcctacttgcaacaactac

SEQ ID NO: 4301 - DNA, 419 bp, Zea mays
  unsure (1)..(419): unsure at all n locations; Clone ID: LIB3061-006-Q1-K1-H7
gtttgcggggtatgcgtggggataattggaagcagctgcgcactgtctgatgctcagaactcatcactcttcgtaaagattttggtgattgagatcttcggcagcgctctgggactgttcggtgtcattgtgggcatcattatgtcatctcaagcgacatggccagcaaaagcttgattttcaccatttgtagctctgtaaattattcagatggagtgtatcgaaatgtgcatgtggtctaactgcattttcatgttccttttatgtggcgtcttttttggcagaacacgaaatgcggcgcgcgtaccgncaccgattgtagagttgctattcttactgccggagtactccatgtgtgttggatatctggttggcatattanataaatgcttggacaaaataaaatgaatttttttgcc

SEQ ID NO: 4302 - DNA, 437 bp, Zea mays
  Clone ID: LIB3061-006-Q1-K1-H8
acccacgcgtccgcccacgcgtccggaagtcaaaggcacctgcatggtgaatcttccgctttgggggcgcgcacgccattgttcgagagggatttaattgcttcacctttcacagattttaccattcagaaaaaaagaaactaccggtatgacatactcggtacatgtcaaagttcacccgaacctggcttttgatgctgtactaggagtaagagtattaaataatgcacttccttgctgatagttgttgaaagaataagatgtaacgttgcaccttagcttgtttcagggccctgctgctgataagagggacttacgacttagtggtacttttagtgtctgcaacctctacacgtgaaatgtgatacgtgcctgttcgtgagctgtcagttctcttcttcaccttcgtctcgcgcccactgaatactgatggcatg

SEQ ID NO: 4303 - DNA, 390 bp, Zea mays
  Clone ID: LIB3061-006-Q1-K1-H9
gcaaagcggcagtgcgtagagaggatcgtcgaacagaacagcatgaagatggtcatcgttctcgtcgtgtgcctggctctgtcagctgccagcgcctctgcaatgcagatgccctgcccctgcgcggggctgcagggcttgtacggcgctggcgccggcctgacgacgatgatgggcgccggcgggctgtacccctacgcggagtacctgaagcagccgcagtgcagcccgctggcggcggggccctactaccgccgggtgtgggcagacgagcgccatgtcccagccgttccggcaccagtgctgccagcagcaaatgaggatgatggacgtgcagtccgtcgcgcaagcagctgcagatgatgatgcagtttgagcgtgccgttgccg

SEQ ID NO: 4304 - DNA, 390 bp, Zea mays
  unsure (1)..(390): unsure at all n locations; Clone ID: LIB3061-007-Q1-K1-A11
gttcgcaggccattaggtttatctactccagttctcagtcctacccgatcgacaccatgagggtgttgctggnngccctcgctctcctggctctcgctgcgagcgccaccttcacgcatacaagcggcggctgcggctgccagccaccgtcgtcggttcatctaccgtcgncggtgcatctgccacctncggttcacctgccacctncggttgcatctccaccgncggtccacctgccgncgncggtccaacctgcaccgncggtccatgtgccgncgccggttcatctgccgncgncaccatgccactaccctactcaaccgtcccggcctcagcctcatccccagccacacccatgcccgtgccaacagccgcattcaagcccgtgcc

SEQ ID NO: 4305 - DNA, 422 bp, Zea mays
  Clone ID: LIB3061-007-Q1-K1-A12
cgggcgcgtggggaaattcttgctgtatctgggcttcagcaaggggcagccccacttggccgagaacatcttcaaagggatcgacgcccggttcctgagcgaagccctgggcgtcagcatgcacgtcgccgagaagctgcagagccggcgtgaccagcgaggcgagatcgtccgcgtggagccggagcacggctttcaccagctgaatccgtcgccgtcgtcgtcgtcgttttcgttcccatcgtcacaagtccagtaccaaacgtgccagcgcgacgtcgacaggcacaacgtctgcgccatggaggtgaggcacagcgtcgaacggctggaccaggccgacgtctacagccctggggctgggaggatcacacgcctcaccagccacaagttccccgtcctcaacctcgtacagatgagcg

SEQ ID NO: 4306 - DNA, 420 bp, Zea mays
  Clone ID: LIB3061-007-Q1-K1-A4
ccgacgcgtccgcaacaagcaacatatctagttgaatccagtagcaacaatagagcagcaatggcgaccaagatattttccctccttatgctccttgctctttctacatgtgttgctaacgcgacaattttccctcaatgctcacaagctcctatagcttcccttcttcccccataccttccatcaattatagcttcaatatgtgaaaacccagctcttcaaccatataggcttcaacaagcaatcgcagcaagcaacatacctttatcgcccttgttggttcaacaatcgccagccctatctttggtgcagtcattggtacaaaccatcagggcacaacagctgcagcaactcgtgctacctctgatcaaccaagtagctttggcaaacctttctccctactctcagcaacaacatttt

SEQ ID NO: 4307 - DNA, 403 bp, Zea mays
  Clone ID: LIB3061-007-Q1-K1-A5
gcgcggaccacagggctgtgccgattgatactactatgacggtcatcacctttatggcacgtgttgaccgagtgcataacaggacaggactggcagcgacgtgcggtaagaacgctcgcttgatgcagttagcaacactagtgactcgcagtcggcgacacatggctgggtagaactgtactggttagatccagcgcagctacgatgatgtccagtctctgctgcctacacacatcgatgggtcatattcaagcgattggcaggcatgtgatctgctgctgattcacagcactgtcaggttccatcattgatacaaatggctcatgcgagcactgtgggctttacgacacgtcagcactggctgtcatcgtacctgtgagctgcggctagcgatggatcgcta

SEQ ID NO: 4308 - DNA, 316 bp, Zea mays
  Clone ID: LIB3061-007-Q1-K1-A6
gcgcagaccctgctgcctacttgcatcatactcttccattcaaccaactgactgtgtcgaactctgctgcgtacctacaacagcgacaacagttacttaatccactagcagtgcctaacccattggtcactgccttcctacagcagcaacaattgctaccatacagccagttctctttgatgaaccctgccttgtcgtggcagcaacccatcgttggaagtgccatcttttagattacatatgagatgtaatcgataatggtgccctcataccggcatgtgtttcctagaaataatcaatatattgattgacattt

SEQ ID NO: 4309 - DNA, 454 bp, Zea mays
  Clone ID: LIB3061-007-Q1-K1-A7
ccggctcgtcccacgcgtgcgatggaaagcacaattgtgtacctactactgcagctaaaatattttgcctccttatgcgccttggtctttctgcaagtgctgctacggcgaccattttcccacaatgctcacaagctcctatagcttcccttcttcccccgtacctctcaccaacggtgtcttcggtatgtgaaaacccaattcttcaaccctacaggatccaacaggcaatcgcagctggcatcttacctttatcacccttgttcctccaacaatcatcagccctattacagcagttacctttggtgcatttattggcacaaaacatcagggcacaacaactacaacaacttgtgctagcaaaccttgctgcctactctcagcaacagcagtttcttccattcaaccaactagctgcattgaactctgcttcttatttgcaacaacaacaact

SEQ ID NO: 4310 - DNA, 428 bp, Zea mays
  unsure (1)..(428): unsure at all n locations; Clone ID: LIB3061-007-Q1-K1-A9
tcgaagagctgcagcaactcgtgctaccttatacttcaaccaagtagctctggcaaacctttctccctactctcagcaacaacaatttcttccattcaaccaactgtctacactgaaccctgctgcttatttgcagcaacaactattaccatttagccagctagctactgcctactctcagcaacaacaacttcttccatttaaccaattggccgcactgaaccccgctgcttatttgcagcagcaaatactactaccatttagccagctagctgcagcaaaccgtgcttncttcttgacacagcaacagttgctgcctttctaccagcagtttgcggctaaccccgcaaccctcttacaactacaacaattgttgccctttgtccaacttgctttgacagacccagcggccttctaccaacaacaca

SEQ ID NO: 4311 - DNA, 392 bp, Zea mays
  unsure (1)..(392): unsure at all n locations; Clone ID: LIB3061-007-Q1-K1-B1
tggttttgtaactgtacgtaaagagtactatttaggactcggagagtgcgattgcttggattagagggggcaggcaaaacatccctgcttaaagcaatgttaggacaagttaaagaaagaaatagcactgttcttgaatgcatacatgtcgatttgcatggcaagggaatatcaaatggattgtgctacatagattcgacaacggtaaacttgcaggagctacctttggaggttgggcggttcaaagaagaactgttgttaggactccatgatatcagcaggaagactgaccttgttattgcggtgcataacctagcacaccgaattccacagtatcaacggtccaatacttctcagcctcagnctgctctttcacttctcttggatgaagc

SEQ ID NO: 4312 - DNA, 229 bp, Zea mays
  Clone ID: LIB3061-006-Q1-K1-G1
cccacgcgtccgcccacgcgtccgcccacgcgtccgctcgtttgttgttgcccatctgggtgtttgattgcaaggtcgctctgtgtcagttgttagtgctgtgttcatcctcggctccagcagacccatgcatcaaccagcatggactgtggatcgatggatgctgttactcctgtcaggatttgttctaagttaatcctaaggaaaaaatggtgcttcttggtgctgc

SEQ ID NO: 4313 - DNA, 426 bp, Zea mays
  Clone ID: LIB3061-006-Q1-K1-G10
gtggaccatcaatcatctattcatctgtagtatgtatagagcacccaaatcactatctggcggcatgcaattcatctaacgtccaaaaaccatgaagcatggtgccttgtggttcattgcttctcatgtgctttagtattcaagctgtttcttagtacacagcacaggacggctgcaagctgcggtcaacaacaaagatcatgagctagcaacatcactccacatacaactatcattgcacaaagaacatacaacatcaaccgaccaccacaacattcaccagcagtcagcaacctccaaccaacaactaagttcactatgcaacgcacataaaacagtcagcatacaactaagaagtctcaatgttcaactaacaacaatcaacaacacgcagcgatcactcaccatacaacaactaacaacagc

SEQ ID NO: 4314 - DNA, 372 bp, Zea mays
  unsure (1)..(372): unsure at all n locations; Clone ID: LIB3061-006-Q1-K1-G11
gttgcaattggttaattggttgttgtaacaacaatccttggcacatctaaccgtacaggccatcgcaacacaacagcaacaacagttcctaccagcactgagccaactagatgtggtgaaccctgtcgcctacttgcaacagcaggtgcttgcatccaacccacttgctctggcaaacgtagctgcataccaacaacaacaacaattgcaacagtttctgccagcgctcagtcaactagccatggtgaaccctgccgnctacctacaacagcaacaactgctttcatctagccctctcgttgtgggtaatgcacctacatacctgcaacaacaattgctgcaacagattgtaccagctctgactcagctagc

SEQ ID NO: 4315 - DNA, 369 bp, Zea mays
  Clone ID: LIB3061-006-Q1-K1-G12
ccagcaagcaacatagaaagtagaatccattagcaacaatagagcaacaatggcgacgaagatattttccctccttatgctccttgctctttctacatgtgttgctaacgcgacaattttccctcaatgctcacaagctcctatagcttcccttcttcccccataccttccatcaattatagcttcagtatgtgaaaacccagctcttcaaccatataggcttcaacaagcaatcgcagcaagcaacatacctttatcgcccttgttgtttcaacaatcaccagccctatctttggtgcagtcattggtacaaaccatcagggcacaacagctgcagcaactcgtgctacctgtgatcaaccaagtagc

SEQ ID NO: 4316 - DNA, 418 bp, Zea mays
  unsure (1)..(418): unsure at all n locations; Clone ID: LIB3061-006-Q1-K1-G2
gtgtcccgcacggtggacgcggngttcaacagtccagcacgggtgaccttgaccggtgacgcaaggngaaagcaggtgcaaaaagtgggacaagatcttccaaggcggccttcgagtgggctgaccaccccaccgctgtgatcccccgacatgcagaagcttggcatcaaggataagaacgaagcagcgaggatcgttgcgctcgttaagaatcaaactactgccgctgccgctactgctgccagtgctgacaacgacgacgacgaggcctgatcaatgcaacgacacatcatgatctgctgctgcacttaattactatgttcgtatacaaataaatacacccggcgtacgcggtgttccttatatggtctaaaatgtagccagtgcattctaaactactttatttcttgaggctcct

SEQ ID NO: 4317 - DNA, 432 bp, Zea mays
  unsure (1)..(432): unsure at all n locations; Clone ID: LIB3061-006-Q1-K1-G3
cccacgcgtccgctagtagggactggggttccttttgcccggaagtttaaggaggatgaacccctgttggacatgattgatgataaagtgcttcgacgctggcgtcacaggcctgttcctggcgcatggtgcacaggcaaaaggaggtggttcagtgatccttgctcccagtggagcaacgtcaacattgtaagacccggtcctcaagctgagaagttccgaacatatataaaccagattatggaagaatcaaagtcaagcaacaactcttgcaagcaatagcggtagaatccgagcacgaggcttcacttcccgcagttgaagcgttgagcttgtctcattttgcgccgaggagctctccatgtctcgagcacttcctggcatctgcttcaggagcaagcatttntgcacctgttgtatgaactgaacaca

SEQ ID NO: 4318 - DNA, 410 bp, Zea mays
  Clone ID: LIB3061-006-Q1-K1-G4
ccaacaagcaacatagaaagtggaatccagtagcaacaacagagcaacaatggcgacgaagatattttccctccttatgctccttgctctttctgcatgtgttgctaacgcgacaattttcccctcaatgctcacaagctcctatagcttcccttcttcccccataccttccatcaatgatagcttcagtatgtgaaaacccagctcttcagccctataggctccaacaagcaatcgcagcaagcaacatacctttatcacccttgttgtttcaacaatcgccagccctatctttggtgcagtcattggtacaaaccatcagggcacagcagctgcagcaactcgtgctacctgtgatcaaccaagtagctcttgcaaacctttctccctactctcagcaacaacaattt

SEQ ID NO: 4319 - DNA, 411 bp, Zea mays
  Clone ID: LIB3061-006-Q1-K1-G5
cactaaaagctagacccatttttcaacagcaatatggtgtagaattgaagaaaaacttaactcggaaggtgaatttatgatgtttggtggcttctctttttggagaaatgggttggaaattgttcttaaaaaatgagttgtgaccttaatttcataatggactacagaagccattaattcaaacgccacatacttgggcctcaaatatcaaaccgatgggaagtattaaaaaaacaaaacataaaatgttttaaaaacaaaattggacagaacattcattatggaacaaaataaattttgttaagtacaagaaaatgatattaacttttgaaatatactaactgactagcatttggccctgctatgcagggacaacattgttttaaattatatctgctacaactcttaact

SEQ ID NO: 4320 - DNA, 448 bp, Zea mays
  Clone ID: LIB3061-006-Q1-K1-G6
gaccaactagcaacatagaaagcacaatagtgtaccaacaatggcagccaaaagattgtgcttccttatgctccttggtctttctgcaagtgctgctaccgcaaccattttcccacaatgctcacaagctcctatagcttcctttcttcccccatacctctcaccagcggtgtcttcagtatgtgaaaacccaattcttcaaccctaggatccaacaggcaatcgcagcaggcatcttacctttatcacccttgttcctccaacaaccgtcagccctattacagcagttacctttggtgcatttgttggcacaaaacatcaaggcacaacaactacaacaacttgtgctaggaaaccttgctgcctactctcagcaacagcagtttcttccattcaaccaactggctgcattgaactctgctgcttatttgcaacaacaactaccatt

SEQ ID NO: 4321 - DNA, 420 bp, Zea mays; identical to SEQ ID NO: 1070
  Clone ID: LIB3061-006-Q1-K1-G7

SEQ ID NO: 4322 - DNA, 438 bp, Zea mays
  Clone ID: LIB3061-006-Q1-K1-G8
accgtccgaattcccggtcgacgaccggattgcccaattacaacaacaatccttggcacatctaaccatacaaaccatcgcagcgcaggagcaacaagcactgagccagctagccgtggtgaaccctatcgcctacttgcaacaacagatgttcgggtgctacttgcacacagacgggcggctgcagctgtggtcaacaacacagccatgagcagcaacataattcacaacaacatcatacacaaaaacaacagcataaaccacgaccacaacataaccagcagcagcaacacctacaacaacaagttcacatgcaaccacaaaaacatgagcaacaacatgaagttcatgttcaacatcaacatcaacaaccgcagcaccaccaccaacaacaacagcaacagcaccaacaacaacatctatgggaaaggcaacaac

SEQ ID NO: 4323 - DNA, 353 bp, Zea mays
  Clone ID: LIB3061-006-Q1-K1-G9
ggtcaactctgtattgccaagggtgagttgcaaatggcgtctgactcgttcaagattgtgttggatgaagatgagaacaattttccagctctacttggtcaggcctctgtttactttttgatgggcgaagcagagcagcaacacaaaaaatcattggagcattacaggaactcattagatctctacaagaaagctcttcgggtctattgcaattgtcctgctgctgtaaggcttggtatagccttttgccgatacaaacttggacaagtggaaaaagctcgtcaagcttttcagcgagttttagagttggacccttaaaatggtgatgctctagtagcactggcaatcatgga

SEQ ID NO: 4324 - DNA, 393 bp, Zea mays
  Clone ID: LIB3061-006-Q1-K1-H1
gtcgtagctcaagcatcagcggcaggagctctgggcagcgtgcgcacgtggggtacggagctcgctctgctagcctaccatggctgatcaccaccggggcgcgacgggaggtggcgggggctacggcgacctccagcgcgggggcggcatgcacggcgaggcgcagcagcagcagaagcagggcgccatgatgacggcgctcaaggccgcgacggccgagaccttcggcgggtcgatgctggagctgtccgggctgatcctggccggcaccgtgatcgcgctcacggtggccacccccgtgctggtgatcttcagcccggtgcttgtgccggccgacatcgcgctggcgctcatggcggccgggttcgtcaccttcggcggcctcggcgtcgc

SEQ ID NO: 4325 - DNA, 406 bp, Zea mays
  Clone ID: LIB3061-006-Q1-K1-H10
acgcggccgccgacgcgtccgggcacatctaaccatacaaaccatcgcaacacaacagcgagaacggttcctaccagcactgagccaactagatgtggtgaaccctgtcgcctacttgcaacagcaggtgcttgcatccaacccacttgctctggcaaacgtagctgcataccaacaacaacaacaattgcaacagtttctgccagcgctcagtcaactagccatggtgaaccctgctgcctacttgcaacagctgcttacattcaaccaactgactgtgtcgaactctgctgcgtacctacaacagcgacaacagttacttaatccactagcagtgcctaacccattggtcactgccttactacagcagcaacaattgctaccatacagccagttctctttgatg

SEQ ID NO: 4326 - DNA, 231 bp, Zea mays
  Clone ID: LIB3061-006-Q1-K1-H11
cgcaaattgcaccaagaaatccatcgagaggccgtcgacaggggaattaatggcgtcgtcgtctagcagcagccaccgccgcctcatcctcgcagccgccgtcctgctctccgtgctcgcggctgccagcgccagcgccgggacctcctgcgtgccggggtgggccatcccgcacaacccgctcccgagctgccgctggtacgtgaccagccggacctgcggcatcgggcc

SEQ ID NO: 4327 - DNA, 371 bp, Zea mays
  unsure (1)..(371): unsure at all n locations; Clone ID: LIB3061-006-Q1-K1-H12
gcagctagcacatcaaacaagtggcgacagacaaagatttgtgagggtgatccgcgctgagaagagatggctaagatcgccgcggcggcggcggcggcgctgtgcttcgcggccctggtggccgtggccgtctgccaaggcgaggtcgagcggcagaggctcagggacctgcagtgctggcaggaggtccaggagagcccgctcgacgcgtgccgncaggtcctcgaccggcagctaaccggcggcggcggcggcggcggcgttggcccgttccggtggggcaccgggctccggatgcggtgctgccagcagcttcaggacgtgagccgcgagtgccggtgcgccgncattcggagcatggtcaggggata

SEQ ID NO: 4328 - DNA, 158 bp, Zea mays
  Clone ID: LIB3061-006-Q1-K1-H2
acttgcttgagtctagcttattgtctagatcaatgtcttgaccaacagcgtgactacgcaacacaaccatacacacatattcacacacatatcaaaacacacataacacaccacataccacacacacacctacacacattcacatcacacaaacatac

SEQ ID NO: 4329 - DNA, 340 bp, Zea mays
  unsure (1)..(340): unsure at all n locations; Clone ID: LIB3061-006-Q1-K1-F9
gcacaatagtgtaccaacaatggcagccaaaatattttgcctccttatgctccttgggctttctgcaagtgctgctacggcgaccattttcccgcaatgctcgcaagctcctatagcttcccttcttcccccgtacctctcaccagcggtgtcttcggtatgtgaaaacccaattcttcaaccctacaggatccaacaggcaatcgcagctggcatcttacctttatcacccttgttcctccaacaatcatcagccctattacaacagttacctttggtgcatntattggcacaaaacatcagggcacaacaactacaacaacttgtgctagcaaacctt

SEQ ID NO: 4330 - DNA, 382 bp, Zea mays
  Clone ID: LIB3061-006-Q1-K1-E4
acgagcgacatagcacgtggaatccagtagccacgacagagcaacaatggcgaccaagatagttaccctccttatgctcgttgctctatctgcatgtgttgctaacgcgacaattttccctcaatgctcacaagctcctatagcttaccttattaccccataccttacatcaacgatagcttcagtatgtgaaaactcagctcttgagccctataggcttcaacaagctatctcagcaagccacctacctttatcagccttcgctgtttcaccatcggcaggctctatgttgggtgcagtcattggtacataccatcaaggcacatgagctgcatcaactcgggctacctgtgatcaacccagtagctctggcaaacctttc

SEQ ID NO: 4331 - DNA, 411 bp, Zea mays
  Clone ID: LIB3061-006-Q1-K1-E5
gtggacgtggacgagcaccgcctggccgtggccaggtcgctgggcgcggacgcggcggtgcgggtgtcgccccgcgcggaggacctggcggacgaggtggagcgcatccgcgcggccatgggctcggacatcgacgtcagcctggactgcgccgggttcagcaagaccatgtcgacggcgctggaggcgacgcggcccggcgggaaggtgtgcctggtcgggatgggccacaacgagatgacgctgcccctgacggcggcggcggcgcgggaggtggacgtggtgggcgtgttccggtacaaggacacctggccactgtgcatcgacttcctgcgcagcggcaaggtggacgtcaagcctctcatcacccaccgcttcggcttctcgcagcgggacgtggaggaggcattc

SEQ ID NO: 4332 - DNA, 436 bp, Zea mays
  Clone ID: LIB3061-006-Q1-K1-E6
gcaacatagaaagcacaatagtgtaccaacaatggcagccaaaatattttgctgcctgatgctccttggtctttctgcaagtgctgctaccgcaaccattttcccacaatgctcacaagctcctatagcttcctttcttcccccatacctctcaccagcggtgtcttcagtatgtgaaaacccaattcttcaaccctacaggatccaacaggcaatcgcagcaggcatcttacctttatcacccttgttcctccaacaaccgtcagccctattacagcagttacctttggtgcatttgttggcacaaaacatcaaggcacaacaactacaacaacttgtgctaggaaaccttgctgcctactctcagcaacagcagtttcttccattcaaccaactggctgcattgaactctgctgcttatttgcaacaacaacta

SEQ ID NO: 4333 - DNA, 446 bp, Zea mays
  Clone ID: LIB3061-006-Q1-K1-E7
cccacgcatgcagggcaatagaacactcacaaccttactttaaaaacaggcctacatatgctccgcgggctctcttcaaacgctgctacggcgaccatactcccgcaatgctcccaagctcctataactcccctacatcccccttacctctcaccaacatcgcattcgctatgtcaaaacccaattctacaaccctacatgatccatcaagcaatcacaactcacatctatacctttatcacccttgttcctccaacaatcatcaaccctattacatcactaacctttgatgcatctattgtcacaaaacatcaacacacaacaactacaacaactcgacctaacaaaccttgctgcctactctcagcatcagcagattctcacaatcaaccaactatctaccattaactttgattctaatttgcaacaacaacaactaccatcaa

SEQ ID NO: 4334 - DNA, 421 bp, Zea mays
  unsure (1)..(421): unsure at all n locations; Clone ID: LIB3061-006-Q1-K1-E8
gcaaagcggcagtgcgtagagaggatcgtcgaacagaacagcatgaagatggtcatcgttctcgtcgtgtgcctggctctgtcagctgccagcgcctctgcaatgcagatgccctgcccctgcgcggggctgcagggcttgtacggcgctggcgccggcctgacgacgatgatgggcgccggcgggctgtacccctacgcggagtacctgaggcagccgcagtgcagcccgctggcggcggcgccctactacgccgggtgtgggcagacgagcgccatgtaccagccgctccggcaacagtgctgccagcagcagatgaggatgatggacgtgcagtccgtcgcgcagcagctgcagatgatgatgcagcttgagcgtgccgctgccgncagcagcagcctgtacgagccagctctgatgc

SEQ ID NO: 4335 - DNA, 316 bp, Zea mays
  Clone ID: LIB3061-006-Q1-K1-E9
gaaactttcttgttaaccttcttgggatgtggaaggagtctgaatactctggccattgtgcttcctgatgctggtcttgcttactatgtaactggcccatcaagattaggctgatgtacttgcaaatccattccatgcactgctttatgtggtcttcatgctgacaagttgcgctctggtcttaaaaacgtggattgaagctactggatcatcagcaacagatgatggtaagcagcttaaggaacaactaatggtgatgccaggacattgagagtcaaacttgcagaaggaactgaaccggtacataccgactgat

SEQ ID NO: 4336 - DNA, 435 bp, Zea mays
  Clone ID: LIB3061-006-Q1-K1-F1
agaaagcacaatagtgtaccaacaatggcagccaaaatattttgcctccttatgctcgttggtctttctgcaagtgctgctacggcgaccattttcccgcaatgctcgcaagctcctatagcttcccttcttcccccgtacctctcaccagcggtgtcttcggtatgtgaaaacccaattcttcaaccctacaggatccaacaggcaatcacagctggcatcttacctttatcacccttgttcctccaacaatcatcagccctattacatcagttacctttggtgcatttattggcacaaaacatcagggcacaacaactacaacaacttgtgctagcaaaccttgctgcctactctcagcaacagcagtttcttccattcaaccaactagctgcattgaactctgcttcttatttgcaacaacaacaactacca

SEQ ID NO: 4337 - DNA, 400 bp, Zea mays
  Clone ID: LIB3061-006-Q1-K1-F10
cgagcgccatgtaccagccgctccggcaacagtgctgccagcagcagatgaggatgatggacgtgcagtccgtcgcgcagcagctgcagatgatgatgcagcttgagcgtgccgctgccgccagcagcagcctgtacgagccagctctgatgcagcagcagcagcagctgctggcagcccagggtctcaaccccatggccatgatgatggcgcagaacatgccggccatgggtggactctaccagtaccagtaccagctgcccagctaccgcaccaacccctgtggcgtctccgctgccattccgccctactactgattcatgatatttgggaaatctcctctatccatccctctctatctatatatgtaataatgcagtaagacgacacacattatcat

SEQ ID NO: 4338 - DNA, 288 bp, Zea mays
  Clone ID: LIB3061-006-Q1-K1-F11
cattattattctcactggtcgatctgctaacacaaacagcagcagctcctccgcactagctagccttctctatttttgctactgcaagtgtccaagtctgcgacgacgtccgagatgtcgacggtgagccgtgcatcccttgaccagaagcttgccctcgccaagcgctgctcccgagaggcgactcttgccggagctaaggcggcagcagtggcgactatcgcctccgcgattcccaccctcgcgagcgtgcggatgctgccgtgggccaaggccaacatcaacccc

SEQ ID NO: 4339 - DNA, 431 bp, Zea mays
  unsure (1)..(431): unsure at all n locations; Clone ID: LIB3061-006-Q1-K1-F2
gctcccagctcgtgttccgcttcttgcagccgtcgccgcgaagcgctccagagaactgccgtcaacatggggaagacacgtggtatgggagccgggcgcaagctcaagacccaccgcaggaaccagcggtgggctgacaaggcatacaagaagagccatttgggcaatgagtggaagaaacccttcgctgggtcatcccatgccaagggcattgtcctggagaagattggtattgaggccaagcagcccaactccgctatccgtaagtgtgctcgtgttcagcttgttaagaatggcaagaagattgctgccttcgtgccaaatgacggttgtttgaactacattgaggaaaatgatgaggtctngattgctggatttggtcgtaaggtgcacgctgtgggagatattcctggtgtncggttcaaggtcgt

SEQ ID NO: 4340 - DNA, 428 bp, Zea mays
  Clone ID: LIB3061-006-Q1-K1-F4
aaagcacaatagtgtaccaacaatggcagccaaaatattttgcttccttatgctcctgggtctttctgcaagtgctgctaccgcaaccattttcccacaatgctcacaagctcctatagcttcctttcttcccccatacctctcaccagcggtgtcttcagtatgtgaaaacccaattcttcaaccctacaggatccaacaggcaatccgcagcaggcatcttacctttatcacccttgttcctccaacaaccgtcagccctattacagcagttacctttggtgcatttgttggcacaaaacatcaaggcacaacaactacaacaacttgtgctaggaaaccttgctgcctactctcagcaacagcagtttcttccattcaaccaactggctgcattgaactctgctgcttatttgcaaacaacacta

SEQ ID NO: 4341 - DNA, 413 bp, Zea mays
  Clone ID: LIB3061-006-Q1-K1-F5
attgagaccaactagcaacatagaaagcacaatagtgtaccaacaatggcagccaaaatattttgcttccttatgctccttggtctttctgcaagtgttgctaccgcaaccattttcccacaatgctcacaagctcctatagcttcccttcttcccccatacctctcaccagcggtgtcttcaatgtgtgaaaccccaattgttcaaccctacaggatccaacaggcaatcgcaacaggcatcttaccattatcacccttgttcctccaacaaccgtcagccctattacagcagttacctttggtccatttggtggcacaaaacatcagggcacaacaactacaacaacttgtgctagcaaaccttgctgcatactctcagcaacatcagtttcttccattcaaccaactggc

SEQ ID NO: 4342 - DNA, 415 bp, Zea mays
  Clone ID: LIB3061-006-Q1-K1-F6
ttgagaccaactagcaacatagaaagcacaatagtgtaccaacaatggcagccaaaagattttgcctccttatgctccttggtctttctgcaagtgctgctacggcgaccattttcccgcaatgctcgcaagctcctatagcttcccttcttcccccgtacctctcaccagcggtgtcttcggtatgtgaaaacccaattcttcaaccctacaggatccaacaggcaatcgcagctggcatcttacctttatcacccttgttcctccaacaatcatcagccctattacaacagttacctttggtgcatttattggcacaaaacatcagggcacaacaactacaacaacttgtgctagcaaaccttgctgcctactctcagcaacagcagtttcttccattcaaccaactaggttc

SEQ ID NO: 4343 - DNA, 439 bp, Zea mays
  Clone ID: LIB3061-006-Q1-K1-F7
gccgatgctaccgcctacgccgacgctggtggcgaccagtgcgagcctggctggtcgatcggcaccgaggacgacgccgacgccgactgccagcgcgcgcagcagcagcagcatggccgccaccaccaccaacccaggcagggcggcgggccctcgtgcagtgtcatgtgaactagcatacccatgcatgcatgtttggtggtgtcgctctcttgtcttgccattttccgtgctcgtgtttcgtctcgtggaaaataagcaatttaaacttagtttaatttcctgtatgtcatgtgttcgttttagtgtgtatgcctcctatatattatggtcgtatgtgtgtgtcgacatgcttgtgtctctcagtatgtgcgtgtgtctgtttgtatgtgtcagcatcagtgtatgtaagggtcggtttggtaagttctatcttatt

SEQ ID NO: 4344 - DNA, 437 bp, Zea mays
  Clone ID: LIB3061-006-Q1-K1-F8
gagaccagcaagcaacatagaaagtataatccattagcaacaatagagcaacaatggcgaccaagatattttccctccttatgctccttgctctttctacatgtgttgctaacgcgacaattttccctcaatgctcacaagctcctatagcttcccttcttcccccataccttccatcaattatagcttcagtatgtgaaaacccagctcttcaaccatataggcttcaacaagcaatcgcagcaagcaacatacctttatcgcccttgttgtttcaacaatcaccagccctatctttggtgcagtcattggtacaaaccatcagggcacaacagctgcagcaactcgtgctacctgtgatcaaccaagtagctctggcaaacctttctccctactctcagcaacaacaatttcttccattcaaccaactgtctaca

SEQ ID NO: 4345 - DNA, 396 bp, Zea mays
  Clone ID: LIB3061-006-Q1-K1-E2
atgggcgatgaatatggtcacacaaagggagggaacaacaatacgtactggcatgacgcatgtgtcaattatttccgttgggataagaaggaagaacaatcctctgatttgtacagattctgccgtctcatgaccaaattccgcaaagaatgtgaatctcttggccttgaggacttcccgacttcagaacggttgaaatggcacggtcatcagcccgggaagcctgactggtcagaggcaagccgattcgttgccttcaccatgaaggacgaaaccaaaggcgagatctacgtggccttcaacaccagtcaccttccggtggttgttgggcttccagagcgctctgggttccgatgggagccggtggtggacaccggcaaggaggcaccatatgac

SEQ ID NO: 4346 - DNA, 270 bp, Zea mays
  Clone ID: LIB3061-006-Q1-K1-C8
cagccagctagctggtgtgagccctgctaccttcttgatacaaccacagttgttgccgttctaccagcacgctgcgcctaacgctggcaccctcttacaactgcaacaattgctgccattcaaccaacttgctttgacaaacccagcagcgttctaccaacaacccatcattggtggtgccctcttttagatttcttatgagttatagttcaataataaagttttttgtctgatgtttgtggcttcccagaaataagaaagtacatttct

SEQ ID NO: 4347 - DNA, 387 bp, Zea mays
  Clone ID: LIB3061-006-Q1-K1-C9
gtgattcgtaaggtttaggatgtaaaaggcgatggtttcctactatcgcaacgactcggcggccgattctatgttcacgttgattttggacggttttgactaaagtgattcttatagaaatgggctgaaaagctggacgtttggcagtctgcagcagaagctgaaaaaaaactgaaacagatagggcttatgtgtacgtgtggagaacctgagatggtgattgctgggactgaacgttaatgtcttgtagttgtttggcttgtttactggattgctgatgtctgaaattgtcatcaaatgaaacgtgaacttttctctggttcatttaactcacttatggcaaatgatttaacgcgacgtgtgtatgcatctgtgtgttcatcattt

SEQ ID NO: 4348 - DNA, 374 bp, Zea mays
  Clone ID: LIB3061-006-Q1-K1-D1
attttcagcattcaaaaacacaccaagcgaagcgcactagcaacgacctaacaccaagggctaccaagatattagccctccttgcgcttcttgcccttttagtgagcgcaacaaatgcgttcattattccacagtgctcacttgctcctagtgccattattccacagttcctcccaccagttacttcaatgggcttcgaacatccagccgtgcaagcctacaggctacaactagcgcttgcggcgagcgccttacaacaaccaattgcccaattgcaacaacaatccttggcacatctaaccctacaaaccattgcaacgcaacaacaacaacaacaacagtttctgccatcactgagccacctagccgtggtg

SEQ ID NO: 4349 - DNA, 376 bp, Zea mays
  Clone ID: LIB3061-006-Q1-K1-D10
gcggggagaggccacaacatccacagggttctgcgttgcctaaccaaaactcagcggaaaatgctactgctgcagctccaccagctggtggacaacaagcacaaacgctgaatcaacagccaccacagcagcagcagaagccaaatacaaatgaccaggcccaaggtgtttcaaatggccatcaggccactagaatcgtcacaccccttccacaaggaccatctaggtatttcattgataaaagttgcaatccggagaatctggaaatatcagttcaacaaggaatttgggccacacagaggagtaatgaagctaaactcaatgaagcttttgaatccactgagaatgttattttgatattctcaattaatagaac

SEQ ID NO: 4350 - DNA, 276 bp, Zea mays
  Clone ID: LIB3061-006-Q1-K1-D11
gcgcatgcgcgccgtcaaggagacgcgccagcgcttcggccgcttcttcttgcgcttgcccgagggcgagtccgccgccgacgtctttgaacggggtggccggtttcctggagccgttgtgccgggacatcgacatggggcggctggaccaggaccccagctgcgaaacgaacctggtgatcgcttccaacggcctaacttggcggtggttcctgatgaaggggttcaggggaccggtgcccaatttgagcgccttaaccactttgacaactggga

SEQ ID NO: 4351 - DNA, 379 bp, Zea mays
  Clone ID: LIB3061-006-Q1-K1-D12
cccacgcgtccgcccacgcgtccgagctcctatagcttcccttcttcccccatacctggcatcaattatagcttcagtatgtgaaaacccagctcttcaaccatataggcttcaacaagcaatcgcagcaagcaacatacctttatcgcccttgttgtttcaacaatcaccagccctatctttggtgcagtcattggtacaaaccatcagggcacaacagctgcagcaactcgtgctacctgtgatcaaccaagtagctctggcaaacctttctccctactctcagcaacaacaatttcttccattcaaccaactgtctacactgaaccctgctgcttatttgcagcaacaactattaccatttagccagctagctact

SEQ ID NO: 4352 - DNA, 414 bp, Zea mays
  Clone ID: LIB3061-006-Q1-K1-D2
gagaccagcaagcaacatagaaagtagaatccattagcaacaatagagcaacaatggcgaccaagatattttccctccttatgctccttgctctttctacatgtgttgctaacgcgacaattttccctcaatgctcacaagctcctatagcttcccttcttcccccataccttccatcaattatagcttcagtatgtgaaaacccagctcttcaaccatataggcttcaacaagcaatcgcagcaagcaacatacctttatcgcccttgttgtttcaacaatcaccagccctatctttggtgcagtcattggtacaaaccatcagggcacaacagctgcagcaactcgtgctacctgtgatcaaccaagtagctctggcaaacctttctccctactctcagcaacaacaatttc

SEQ ID NO: 4353 - DNA, 432 bp, Zea mays
  Clone ID: LIB3061-006-Q1-K1-D3
cacaatgctcacaagctcctatagcttcccttcttcccccatacctctcaccagcggggtcttcaatgtgtgaaaccccaattgttcaaccctacaggatccaacaggcaatcgcaacaggcatcttaccattatcacccttgttcctccaacaaccgtcagccctattacagcagttacctttggtccatttggtggcacaaaacatcagggcacaacaactacaacaacttgtgctagcaaaccttgctgcatactctcagcaacatcagtttcttccattcaaccaactggctgcattgaactctggtgcttatttgcaacaacaattaccattcagccagctagttgctgcctacccccagcaatttcttccattcaaccaactagcagcattgaactctgctgcttatttacagcagcaacaactac

SEQ ID NO: 4354 - DNA, 389 bp, Zea mays
  Clone ID: LIB3061-006-Q1-K1-D4
tgaaaagtaagcttcaggagctacctgattcccataatataactatagcatttccagatgacggtgcatggaaacgcttctataagcagcttcaacattttcctatggttatatgtaacaaagttagagaaggggagcagagaattgtacggataaaggagggagatcctagaggccgtcatgttgttatagtggatgacttggtccagtctggcagtactttgattgagtgccagaaagtactggctgctcatggagctgcaaaggtcagtgcatatgtgacacatggcattttccccaatagctcatgggagaaatttcagcatgacaatggaaagggtccggagcatggcctgagccacttttggcttactgattcatgccccctt

SEQ ID NO: 4355 - DNA, 445 bp, Zea mays
  Clone ID: LIB3061-006-Q1-K1-D5
ttcagaaacacacctagcgaagcgcactagcaacgacctaacaacaatggctacgaagatattatccctctttgcgcttcttgccctttttgtgagcgcaacaaatgcgttcattattccacaatgctcacttgctcctaatgccattattccacagttcctccctccagttacttcaatgggcttcgaacacccagctgtgcaagcctacaggctacaacaagcgcttgcggcgagcgtcttacaacaaccaattgcccaattacaacaacaatccttggcacatctaaccatacaaaccatcgcaacgcaacagcaacaacaatttctaccagcactgagccaactagctgtggtgaaccctgtcgcctacttgcaacagcagttgcttgcatccaacccacttgctctggcaaacatagttgcataccaaccaccaccacca

SEQ ID NO: 4356 - DNA, 432 bp, Zea mays
  Clone ID: LIB3061-006-Q1-K1-D7
atttgccaggcaggagtgttcgttggtatcgctttagcacttcttctgtttgtgtcttttggtagacttgcagaaatattctccaaagaccccatggttatacaaattgtgaggagtggtgttttgttcgttagtgctagtcagcctatcaatgccctcgcttttatctttgacggactccattttggtgtctcagacttctcgtactcagcttcctccatgatggtagttggagcaatatcctctttgtttttgctgtgtgctccaccatttttcgggcttcttggtgtttgggctggcctggctcttttcatgagtttgcgcatgactgctggatttatgagattgggatggagagcagggccttggtggtttttgcacagaaaagaacccaaatacaggctgcaatgaacaaaatgtggatctatggag

SEQ ID NO: 4357 - DNA, 400 bp, Zea mays
  Clone ID: LIB3061-006-Q1-K1-D8
acaatgctcacttgctccaagttccattattacacagttcctcccaccagttacttgaatgggcttcgaacacccagctgtgcaagcctataggctacaacaagcaattgcggcgagcgtcttacaacaaccaatttcccagttgcaacaacaatccttggcacatctaacaatacaaaccatcgcaacgcaacagcaacaacaattcctaccagcactgagccacctagccatggtgaaccctgccgcctacttgcaacagcagttgcttgcatcaaacccacttgctctggcaaacgtagttgcaaaccagccacaacaacagctgcaacagtttcttgcagcgctcagtcaactagccatggtgaaccctggcggctaactaccacaggaaccactg

SEQ ID NO: 4358 - DNA, 358 bp, Zea mays
  Clone ID: LIB3061-006-Q1-K1-D9
caactagcaacatagaaagcacaatagtgtaccaacaatggcagccaaaatattttgcttccttatgctccttggtctttctgcaagttttgctaccgcaaccattttcccacaatgctcacaagctcctatagcttcccttcttcccccatacctctcaccagcggtgtcttcaatgtgtgaaaccccaattgttcaaccctacaggatccaacaggcaatcgcaacaggcatcttaccattatcacccttgttcctccaacaaccgtcagccctattacagcagttacctttggtccatttggtggcacaaaacatcaaggcacaacaactaccacaacttgggctagcaaacctt

SEQ ID NO: 4359 - DNA, 141 bp, Zea mays
  Clone ID: LIB3061-006-Q1-K1-E1
cgctgctgccggcggtgtcccccactgaagaaactatgtgctgtagtatagccgctggctagctagctagttgagtcatttagcggcgatgattgagtaataatgtgtcacgcatcaccatgggtggcagtgtcagtgtga

SEQ ID NO: 4360 - DNA, 395 bp, Zea mays
  Clone ID: LIB3061-006-Q1-K1-E10
attgagaccaactagcaacatagaaagcacaatagtgtaccaacaatggcaggcaaagtattttgcctccttatgctccttggtctttctgcaagtgctgctacggcgaccattttcccgcaatgctcgcaagctcctatagcttcccttcttcccccgtacctctcaccagcggtgtcttcggtatgtgaaaacccaattcttcaaccctacaggatccaacaggcaatcacagctggcatcttacctttatcacccttgttccttcaacaatcatcagccctattacatcagttacctttggtgcatttattggcacaaaacatcagggcacaacaactacaacaacttgtgctagcaaaccttgctgcctactcttagcaacagcagtttct

SEQ ID NO: 4361 - DNA, 346 bp, Zea mays
  Clone ID: LIB3061-006-Q1-K1-E11
gcaacatagaaagcacaatagtgtaccaacaatggcagccaaaatattttgcgcgcctgatgctccttggtctttctgcaagtgctgctacggcgaccattttcccgcaatgctcgcaagctcctatagcttcccttcttcccccgtacctctcaccagcggtgtcttcggtatgtgaaaacccaattcttcaaccctacaggatccaacaggcaatcacagctggcatcttacctttatcacccttgttcctccaacaatcatcagccctattacatcagttacctttggtgcatttattggcacaaaacatcagggcacaacaactacaacaacttgtgctagc

SEQ ID NO: 4362 - DNA, 363 bp, Zea mays
  unsure (1)..(363): unsure at all n locations; Clone ID: LIB3061-006-Q1-K1-E12
gcaaaatcctaccctcggtaacagccacgtttatcgagtgtctctagactgacactgggtaaactatgttttgacgagtgtcaaaataagacactccgtaaaacattctttgccgagtgcctgccgtggaacactcgacaacgtatttaaaaaaaataaaacaatctttgtcaagtgcttatcaaagggcactcgacaaagacagctttgccgagtgtcagatcgaggacactcggcaaagtatatttttaaattaaaaaataactttgccgactgctagatcgcgacactcgacaaagtctgtttacatagtcttaactggccttcttcttctcttcattnntctttctcttcttcacgccg

SEQ ID NO: 4363 - DNA, 418 bp, Zea mays
  Clone ID: LIB3061-006-Q1-K1-C7
gggaccatgtaatggctgccacaagagccctcaaaaagggtgatcaccaaagggcttgaatggcataaattcgcttgagatttggaagcttttgaggaacagagagcatgttcttgagatgttgaagcttaagatcaaggaggaagctcttagaacctatctttcatcatactcgtcttcctacaagtcgttgagccttaaccagctcaccaccatgtttgatctcagcgagcagcatgcccacagtattgttagcaaaatgatgatgcatgaagagcttcaggctagctggcaccagccaacaaagtgcaccgtgtttcacagactggatcaaaccaggctttatgagctactctttcaggttgcagaaaaaatatcggtcctcgtggagacaaacgacagggcgtactaactaata

SEQ ID NO: 4364 - DNA, 360 bp, Zea mays
  Clone ID: LIB3061-006-Q1-K1-B12
agaggatcgtcgaacagaacagcatgaagatggtcatcgttctcgtcgtgtgcctgggtctgtcagctgccagcgcctctgcaatgcagatgccctgcccctgcgcggggctgcagggcttgtacggcgctggcgccggcctgacgacgatgatgggcgccggcgggctgtacccctacgcggagtacctgaggcagccgcagtgcagcccgctggcggcggcgccctactacgccgggtgtgggcagccgagcgccatgttccagccgctccggcaacagtgctgccagcagcagatgaggatgatggacgtgcagtccgtcgcgcagcagctgcagatgatgatgcagcttgagcgtg

SEQ ID NO: 4365 - DNA, 443 bp, Zea mays
  Clone ID: LIB3061-006-Q1-K1-B2
caactagcaacatagaaagcacaatagtgtaccaacaatggcagccaaaatattttggctgcttatgctccttggtatttctgcaagtgctgctacggcgaccattttcccgcaatgctcacaagctcctatagcttcccttcttcccccgtacctctcaccagcggtgtcttcggtatgtgaaaacccaattcttcaaccctacaggatccaacaggcaatcgcagctggcatcttacctttatcacccttgttcctccaacaatcatcagccctattacagcagttacctttggtgcatttattggcacaaaacatcagggcacaacaactacaacaacttgtgctagcaaaccttgctgcctactctcagcaacagcagtttcttccattcaaccaactagctgcattgaactctgcttcttatttgcaacaacaacaac

SEQ ID NO: 4366 - DNA, 347 bp, Zea mays
  Clone ID: LIB3061-006-Q1-K1-B3
caagctcctatagctgcccttcttcctccataccttccatcaatgaccgcttcagtgtgtgaaaacccagcccttcaaccctacaggctccaacaagcaatcgcaacaagcaacttacctttatcacccctgttctttcaacaatcgccagccctatctttggtgcagtcattggtacaaaccatcagggcacaacagctgcaacaactcgtgctaccagtgatcagccaagtagctgtggcaaacctttctccctactctcagcaacaacaatttcttccattcaaccaactgtctacactgaaccctgctgcttatttacaacaacaacaactactaccattcag

SEQ ID NO: 4367 - DNA, 404 bp, Zea mays
  Clone ID: LIB3061-006-Q1-K1-B4
gcatacaagcggcggctgcggctgccatccaccgccgccggttcatctaccgccgccggtgcatctgccacctccggttcacctgccacctccggtgcatctcccaccgccggtccacctgccgccgccggtccacctgccaccgccggtccatgtgccgccgccggttcatctgccgccgccaccatgccactaccctactcaaccgccccggcctcagcctcatccccagccacacccatgcccgtgccaacagccgcatccaagcccgtgccagctgcagggaacctgcggcgttggcagcaccccgatcctgggccagtgcgtcgagttcctgaggcatcagtgcagcccgacggcgacgccctactgctcgcctcagtgccagtcggtgcggcagcagt

SEQ ID NO: 4368 - DNA, 434 bp, Zea mays
  Clone ID: LIB3061-006-Q1-K1-B6
cagcaagcaacatagaaagtagaatccattagcaacaatagagcaacaatggcgaccaagatattttccctccttatgctccttgctctttctacatgtgttgctaacgcgacaattttccctcaatgctcacaagctcctatagcttcccttcttcccccataccttccatcaattatagcttcagtatgtgaaaacccagctcttcaaccatataggcttcaacaagcaatcgcagcaagcaacatacctttatcgcccttgttgtttcaacaatcaccagccctatctttggtgcagtcattggtacaaaccatcagggcacaacagctgcagcaactcgtgctacctgtgatcaaccaagtagctctggcaaacctttctccctactctcagcaacaacaatttcttccattcaaccaactgtctacact

SEQ ID NO: 4369 - DNA, 427 bp, Zea mays
  Clone ID: LIB3061-006-Q1-K1-B8
gcaacatagaaagtggaatccagtagcaacaacagagcaacaatggcgaccaagatattttccctccttatgctccttgctctttctgcatgtgttgctaacgcgacaattttccctcaatgctcacaagctcctatagcttcccttcttcccccataccttccatcaatgatagcttcagtatgtgaaaacccagctcttcagccctataggctccaacaagcaatcgcagcaagcaacatacctttatcacccttgttgtttcaacaatcgccagccctatctttggtgcagtcattggtacaaaccatcagggcacagcagctgcagcaactcgtgctacctgtgatcaaccaagtagctctggcaaacctttctccctactctcagcaacaacaatttcttccattcaaccaactgtctacac

SEQ ID NO: 4370 - DNA, 229 bp, Zea mays
  Clone ID: LIB3061-006-Q1-K1-B9
cacacggagcgaagctacctagcatcgacttaacaacaatggctaccaagataggatccggccttgcgctaattgccctttgggtgagcgcaacagaggcgttcatgaatcgacatggctcacgtgttcggagcgccgatccgcccggacgtggtccgcttcacccacaagctgctgtcctgcaacaagcgccagccttacgcagtcttccgacgagctggccaccaga

SEQ ID NO: 4371 - DNA, 403 bp, Zea mays
  Clone ID: LIB3061-006-Q1-K1-C1
gcaacatagaaagtggaatacagtagcaaaaatagagcaacaatggcggccaagatatgttccatccttatgctccttgctctttctgcatgtgttgctaacgcgaccatttttcctcaatactcacaagctcctatagctgcccttcttcccccataccttccatcaatgaccgctttagtatgtgaaaacccagcccttcaaccctacaggatccagcaagcaatcgcaacaagcaacttacctttatcacacctgttctttcaacaatcgccagccctatctttggtgcagtcattggtacaaaccatcagggcagaacagttgcagcaactcgtgctaccagtgatcagccaagtagctctggcaaacctttccccctactctcagcaacaacaatttc

SEQ ID NO: 4372 - DNA, 386 bp, Zea mays
  Clone ID: LIB3061-006-Q1-K1-C10
ggaatccagtagcaacaatagagcaacaatggcgaccaagatactttccctcgttatgctccttgctctttctgcatgtgttgctaacgcgacaattttccctcaatgctcacaagctcctatagcttcccttcttcccccataccttccatcaatgatagcttcagtatgtgaaaacccagctcttcaaccctataggctccaacaagcaatcgcagcaagcaacatacctttatcacccttgtttcaacaatcgccagccctatctttggtgcagtcattggtacaaaccatcaaggcacagcagctgcagcaactcgtgctacctgtgatcaaccaagtagctctggcaaacccttctccctactatcagcaacaacaatttc

SEQ ID NO: 4373 - DNA, 323 bp, Zea mays
  Clone ID: LIB3061-006-Q1-K1-C11
acgcgtccgctcgcccaccgatgtggtagtgcataaacgcgacctaccacgaggggcgagtaagttattagaccattaatgcacgtgtatgtcctagtagcgagcgcgacgagtgcaaccattatgacacagtgatcactagctactgacgccatgattgcagagcaacgtataccagttacttcaatgggcttatgacatacaatctcgcgagcctacgtgctacatatagctggtgcggacagcgtgatgaatcggacaagtgccgaattgctacaacaatcatggtcgcatatgaccctacgcaccatatgatcgcaaca

SEQ ID NO: 4374 - DNA, 385 bp, Zea mays
  Clone ID: LIB3061-006-Q1-K1-C12
acgcaactagcaacatagaaagcacaatattgtaccaacaatggcagccaaaatagggcggcttcttatgctacttggtctttctgcaagtgctgctacggcgaccattttaccgcaatgctcgcacgctactatagcttcccttcttccaccgtacctatcaccagcggagcattcagtatgtgaaaacccaattcttcaaacttacacgatccaacagggcattacagcatccattttacctttatcaccctcgatccttcaaccatcataagctctattacatcagttaccttcggcgcatttattggcacaaaacatcatggcacaacaactacaacaacttgagctatgcaaaccttgctgcctactctcagcaacagca

SEQ ID NO: 4375 - DNA, 398 bp, Zea mays
  Clone ID: LIB3061-006-Q1-K1-C2
aacaccttgatgaacatgttcagtgggcttggtgctggtggtggcctaggtgttccagatgctcctaatgtgccaccagaagaactgtatgcaacacaattagctcagctccaagaaatgggtttttttgacacacaggataacatccgagccttggccgtcactgctggaaatgttcatgctgcagtggagcgacttcttggaaacatgggccaatagaatatgatgacgaacataactgtgttctgatccatgcgatctgtagttggcattgtgagattatgtctggttcattggttttagacctgagattgagaggcggcatctagattctgtgtttaaggatgaataaagagtgtaccggtggaaccttacataataatgggggctggtgtcat

SEQ ID NO: 4376 - DNA, 406 bp, Zea mays
  Clone ID: LIB3061-006-Q1-K1-C3
caccactccactcgccgcaggccgccgggcgccgccgaggggatcggagcaagatgtgcttccacatcgtgctggagcggaacatgcagctgcacccacgacacttcgggccgcacctccgcgacaagctcgtttccaagctcatcaaggacgtcgagggcacctgcagcgggcggcacgggttcgttgtggcgatcacgggtgtggaggacatcggcaaggggctcatccgggaaggcacgggatacgtcaccttccccgtcaagtaccagtgcgttgtctttagacccttcaagggcgagatcctcgaagctgtcgtcaccatggtgaacaagatgggcttctttgcggaggctgggccggtgcagatcttcgtgtccaaccatttgattccagacgatatgga

SEQ ID NO: 4377 - DNA, 408 bp, Zea mays
  Clone ID: LIB3061-006-Q1-K1-C4
caaaaacacctttcttcactgcaccccgatgcttgcctccgacgcaattggacaagtgcaagatgaaagatgcatttatctcagatggttgcttactgagagaatgcaacatcgagcattctgtgattggagtctgctcacgtgtcagctctggatgtgaactcaaggactccgtgatgatgggagcggacacctatgaaactgaagaagaagcttcaaagctactgttagctgggaaggtcccagttggaataggaaggaacacaaagataaggaactgtatcattgacatgaatgctaggattgggaagaacgtggtgatcacaaacagtaagggcatccaagaggctgatcacccggaagaagggtactacataaggtctggaatcgtggtgatcttgaagaatg

SEQ ID NO: 4378 - DNA, 408 bp, Zea mays
  Clone ID: LIB3061-006-Q1-K1-C5
ggcgcctcctcccccacctagaaacccagaggctctaatcctagttctttctgtgcagtcgccgcccaattcccccacccaattcccactctccgctcgacagatccatacatgatgggagaggccaaggagaacgacgtttatgaggaggagctcctggactacgaggaggacgacgacaagacggtcgatggctccgctgctaagcccaccggagaggtcgcaaagaagggctacgtcgggatccacagttccggtttcagagacttcctgctcaagccagagctgctccgtgctatccaggattgtggttttgagcatccttccgaagtgcaacacgagtgtatccctcaagccattcttggaatggatgtcatctgtcaagctaaatctgggatggggaaaact

SEQ ID NO: 4379 - DNA, 447 bp, Zea mays
  Clone ID: LIB3061-006-Q1-K1-C6
cagaaacacaccaagcgaagcacattagcaacaacctaacaacaatggctaccaagagattatccctccttgcgcttcttgcgctttttgcgagcgcaacaaatgcgttcattattccacaatgctcacttgctccaagttccattattacacagttcctcccaccagttacttcaatgggcttcgaacacccagctgtgcaagcctataggctacaacaagcaattgcggcgagcgtcttacaacaaccaatttcccagttgcaacaacaatccttggcacatctaacaatacaaaccatcgcaacgcaacagcaacaacaattcctaccagcactgagccacctagccatggtgaaccctgccgcctacctacaacagcaacaactgctttcatctagcccgctcgctgtggccaatgcacctacataccttgaacaaccattgg

SEQ ID NO: 4380 - DNA, 320 bp, Zea mays
  Clone ID: LIB3061-006-Q1-K1-B11
gcaacagactacaaggtgcagctataactactatagcagtagctcaaatctagaaaattgtcatgaattcctaaggcagcagtgcagccctttggtaatgccttttctccaatcacgtttgatacaaccaagtagctgccaggtattgcagcaacaatgttgtcatgatcttaggcagattgagccacaatacattcaccaagcaatctacaacatggttcaatccataatccaggaggagcaacaacaacaaccatgtgagttatgtggatctcaacaagctactcaaagtgcggtggcaatcttgacagcagcacaat

SEQ ID NO: 4381 - DNA, 377 bp, Zea mays
  unsure (1)..(377): unsure at all n locations; Clone ID: LIB3061-005-Q1-K1-H8
tcggcagacgtgcggggcagagcacaacagcaggggatccggggagggagggaagccatgggcgaggaggcggccaagaaggaggaggtggagaagcccaaggaggccgccgcggcagaggagaagaagaaggacgacaagcccaaggaagtaggcggcggcggcgagaagcccaaggacaaggaggaggacgagaagaagaaggaggacgcgccgtcgccttcgccgnccccgccgtcggaggaggtcgagatgcgggtctacatgcactgcgaagggtgcgcccgcaaggtcaagaagatcctcaggcgcttcgacggagtggaggatgtgatcgccgactccaaggcgcacaaggtgctggtgaaggggaagaa

SEQ ID NO: 4382 - DNA, 355 bp, Zea mays
  unsure (1)..(355): unsure at all n locations; Clone ID: LIB3061-005-Q1-K1-H9
gagcagcttacaacttcaatgtcacggccaaatgcggtgagcctggtgcaactgcctgtgctgatccgacaacccattggagctgggacggcattcacctgacggaggctgcctaccgccatatcgccaaaggctggctatacgggcctttcgcggaccaaccgatcatccaatcctcatgatcatgccgttcctgcggtagagtttatcaaagtagcattgagagtgagagaaaaaaaatggagcggggaaagtaggtcttccatacagttccaatgcttgcatacttgtacatctncatttgattggattcatttgccatgggggtacaaaagtgggatagtaagtcgcacaa

SEQ ID NO: 4383 - DNA, 373 bp, Zea mays
  Clone ID: LIB3061-006-Q1-K1-A1
ggagagaaggaatccgatccatccaagccaagccaaggcagagaagaagaagaggaggaagaagaagcatcggcagcatgtcggaggggactgccaactgcgtggacatcctgatcgccatcatcctgcctccgctgggggtgttcctcaagtacgggtgcggccacgagttctggatctgcctcctcctcaccttcctcggctacatccccggcatcatctacgccatctacgccatcaccaagaacacctagctagtcatccttgccgacgacgatccatgtctctgtatctgtgtctgttcatatgcctgatgccgacttgtgctgtatgtagttgcttgaattcagtcgtgttcctggtttgctaccgt

SEQ ID NO: 4384 - DNA, 372 bp, Zea mays
  Clone ID: LIB3061-006-Q1-K1-A10
gtgccaggcgctgcagcagcagtgctgtcaccagatcaggcaggtggagccgctgcaccggtaccaggcgacatacggtgtggtcctgcagtccttcctgcagcagcagccgcaaggcgagctcgcggcgctgatggcggcccaggtagcgcagcagctgacggcgatgtgcggtctgcagctgcagcagccaggtccctgcccttgcaacgcagctgccggcggtgtctactactgaggaaactatgtactgtagtaataatgtaatggagccgctgactagctacctatagggctatagctaggtcactcgtttagcggcgatgagtaacggagtgtcacccatcaccatgggtggcagtgtgagcaatg

SEQ ID NO: 4385 - DNA, 319 bp, Zea mays
  Clone ID: LIB3061-006-Q1-K1-A11
gcaccgtcgactgcactaaagccatatgtccacatggcggcaaatttgctctagctctggctttggagtgtgtacggacatttccgaatggtgcagtctatagttcctcttccccgtacctgtaacagcgggtgtctttcgtatgtgaaaacccaattctttaaaccctaccagatcccacaaggcaatacagctgcatctaccttatcacccttgttcctccaacaatcatcagccctattacatcagttacctttgtgcattaattggcacaaaacatcagggcacaacacttacaacaacttgggttagcaaacct

SEQ ID NO: 4386 - DNA, 350 bp, Zea mays
  Clone ID: LIB3061-006-Q1-K1-A12
aacaagcaacatagaaagtggaatccagtagcaacaatagagcaacaatggcgaccaagatactttccctccttatgctccttgctctttctgcatgtgttgctaacgcgacaattttccctcaatgctcacaagctcctatagcttcccttcttcccccataccttccatcaatgatagcttcagtatgtgaaaacccagctcttcaaccctataggctccaacaagcaatcgcagcaagcaacatacctttatcacccttggttcaacaatcgccagccctatctttggtgcagtcattggtacaaaccatcaaagcacaacagctgcagcaactcgtgctacctggg

SEQ ID NO: 4387 - DNA, 421 bp, Zea mays
  unsure (1)..(421): unsure at all n locations; Clone ID: LIB3061-006-Q1-K1-A2
cggaaggtttcgaggaactcccgggctcgaggagatcgggacgatgatgggagggcgcgctctgctgctgctcctggtctcggcgctgctcgttcagatccgcgcctctgacccgctgctgtacgagccgtttgatgaggacttcgagggtagatggatcgtctccaagaaggatgaataccaaggtgtatggaagcatgccaagagtgatgggcatgaggactatggcctccttgttagtgacaaggcaaggaaatacgccataatcaaggagcttgatgagccagttaccttaaatgatgggacagtggtcctgcagtttgaagtgagacttcagaatggccttgaatggggaggtgcctacattaagtacantccgcctcaggatgctggatgggatgccaaagaagttgataatgag

SEQ ID NO: 4388 - DNA, 362 bp, Zea mays
  Clone ID: LIB3061-006-Q1-K1-A3
ctagcaacatagaaagcacaatagtgtaccaacaatggcagctaaaatattttgcctgcttatgctccttggtctttctgcaagtgctgctacggcgaccattttcccacaatgctcacaagctcctatagcttcccttcttcccccgtacctctcaccaacggtgtcttcggtatgtgaaaacccaattcttcaaccctacaggatccaacaggcaatcgcagctggcatcttacctttatcacccttgttcctccaacaatcatcagccctattacagcagttacctttggtgcatttattggcacaaaacatcagggcacaacaactacaacaacttgggctaacaaaacttggttgct

SEQ ID NO: 4389 - DNA, 443 bp, Zea mays
  unsure (1)..(443): unsure at all n locations; Clone ID: LIB3061-006-Q1-K1-A4
gcaacatagaaagcacaatagtgtaccaacaatggcagccaaaatattttgcctcctgatgctccttggtctttctgcaagtgctgctacggcgaccattttcccgcaatgctcgcaagctcctatagcttcccttcttcccccgtacctctcaccagcggtgtcttcggtatgtgaaaacccaattcttcaaccctacaggatccaacaggcaatcacagctggcatcttacctttatcacccttgttcctccaacaatcatcagccctattacatcagttacctttggtgcatttattggcacaaaacatcagggcacaacaactacaacaacttgtgctagcaaaccttgctgcctactctcagcaacagcaagttcttccattcaaccaactagctgcattgaactctgcttnctattttgcacaacaacaactaccat

SEQ ID NO: 4390 - DNA, 386 bp, Zea mays
  Clone ID: LIB3061-006-Q1-K1-A5
caactagcaacatagaaagcacaatagtgtaccaacaatggcagccaaaatattttgcttccttatgctgcttggtctttctgcaagtgctgctaccgcaaccattttcccacaatgctcacaagctcctatagcttcctttcttcccccatacctctcaccagcggtgtcttcagtatgtgaaaacccaattcttcaaccctacaggatccaacaggcaatcgcagcaggcatcttacctttatcacccttgttcctccaacaaccgtcagccctattacagcagttacctttggtgcatttgttggcacaaaacatcaaggcacaacaactacaacaacttgtgctaagaaaccttgctgcctactctcagcaacagcagtttc

SEQ ID NO: 4391 - DNA, 424 bp, Zea mays
  Clone ID: LIB3061-006-Q1-K1-A6
ggaaagacgtgatcaaacactgcaccgaccataaagggatcttccagcccgtgctgcgaccggagaagaaggtcccggagctatggttctacacagagctcaaaactaggaccagctccatcacgctcgccatacgcatggacaacctgtacctcgtgggcttcaggaccccgggcggggtgtggtgggagttcggcaaggacggcgacacccacctcctcggcgacaaccccaggtggctcggcttcggcggcaggtaccaggacctcatcggcaacaagggtctggagaccgtcaccatgggccgcgccgaaatgcccaggtcgttgacggccctggtgaagaagaagaagatggcgacactggaggaggaggaggtgcagatgcagatgcagatgccggaggccgttgatctggcggcggc

SEQ ID NO: 4392 - DNA, 399 bp, Zea mays
  Clone ID: LIB3061-006-Q1-K1-A7
agaccaactagcaacatagaaagcacaatagtgtaccaacaatggcagccaaagatatggtgcttccttatgctccttggtctttctgcaagtgctgctaccgcaaccattttcccacaatgctcacaagctcctatagcttcctttcttcccccatacctctcaccagcggtgtcttcagtatgtgaaaacccaattcttcaaccctacaggatccaacaggcaatcgcagcaggcatcttacctttatcacccttgttcctccaacaaccgtcagccctattacagcagttacctttggtgcatttgttggcacaaaacatcaaggcacaacaactacaacaacttgtgctaggaaaccttgctgcctactctcagcaacagcagtttcttccattc

SEQ ID NO: 4393 - DNA, 441 bp, Zea mays
  Clone ID: LIB3061-006-Q1-K1-A8
agatcgcgagcgccgccctttttttttttttttttttttactttttttcttttgattgcaattgttcattcaggtcattgctcacactgacactgccacccatggtgatgcgtgacacattattactcaatcatcgccgctaaatgactcaactagctagctagccagcggctatactacagcacatagtttcttcagtgggggacacccagctgtgcaagcctataggctacaacaagcgattgcggcgagcgtcttacaacaaccaattgcccaattgcaacaacaatccttggcacatctaacaatacaaaccatcgcaacgcaacagcaacaacagttcctaccagcactgagccacctagccatggtgaaccctgtcgcctacttgcaacagcagctgcttgcatccaacccacttgctctagcaaacgtagttgc

SEQ ID NO: 4394 - DNA, 370 bp, Zea mays
  Clone ID: LIB3061-006-Q1-K1-A9
gtgattcggaaggcttaagatgtaaaatgcgatggtttactactatcggagcgactcggcggccgattatatgtacacggtgattgtgcacggctttgactaaagtgattcttatagaaatggtctgaaaagctggacgtatggcagactgcatcagaagctgacagaaaactgaaacagatagggcttatgtgtacgtgtggagaacctgagatggtgattgctgtgactgaacgttaatgtcatgcagctgcctggctagtacactggattgctgatgtctgagattgtcatctactgaaacgtgaactttcctgtggatcatgtaactcacttatggcagatgattcaacgccacgtgtgtatgcat

SEQ ID NO: 4395 - DNA, 335 bp, Zea mays
  Clone ID: LIB3061-006-Q1-K1-B1
aaccttcagcaacctgtttgtccgtcgggctggcccaggcagcacggagctgaccgtggagggaaggccatccgaccagctgggcaggagaaacctcactgacagccccgtatttgacggccgtggccctgacgccagcctcgtggctcgcgtacagggagtcgctacccagatgggcgacgtgcgccagttgtacaccgtcgtgttccaggagaggccgctcaagggctccacgctcgtcaccgaaggcgcgatgacagaagggtcagacgagtgggcgatctacggtggaactggagtgttcgcgatggcgagaggcgtcataaggagaacgt

SEQ ID NO: 4396 - DNA, 361 bp, Zea mays
  Clone ID: LIB3061-006-Q1-K1-B10
aacgcaaacaaccaccaaagcaatcgataagcaaccctgcaagtgcaggcaaagagagggcgcgaccaaacagatccaatccaatggcgatggcaccgtccgcagcatgcgtcgtctcgttccccgcccgcccggcggcgtccacggccgggccccgcgccgccgcgggcgccggggcggtccacgctttcgcggggtcggcggagggcgccaagtggtgggcgccgcttctggggtggtccgggaaaggccacttcctggaaggcccgggccccgcgcccgccggggccccagaccaagcgccgcggaagcaagtccttggggttattaccgaagaaaaaggcccggaacttgcggcccc

SEQ ID NO: 4397 - DNA, 439 bp, Zea mays
  Clone ID: LIB3061-005-Q1-K1-H7
caactagcaacatagaaagcacaatagtgtaccaacaatggcagccaaaatatttggcctccttatgctccttggtctttctgcaagtgctgctacggcgaccattttcccgcaatgctcgcaagctcctatagcttcccttcttcccccgtacctctcaccagcggtgtcttcggtatgtgaaaacccaattcttcaaccctacaggatccaacaggcaatcgcagctggcatcttacctttatcacccttgttcctccaacaatcatcagccctattacaacagttacctttggtgcatttattggcacaaaacatcagggcacaacaactacaacaacttgtgctagcaaaccttgctgcctactctcagcaacagcagtttcttccattcaaccaactaagttcattgaactctgcttcttatttgcaacaacaa

SEQ ID NO: 4398 - DNA, 420 bp, Zea mays
  Clone ID: LIB3061-005-Q1-K1-G12
actggctgcattgaactctgctgcttatttgcaacaacaactaccattcagtcagctagctgctgcctacccccagcaatttcttccattcaaccaactggcagcattgaactctgctgcttatttacaacagcaacagctaccaccattcagccagctagctgatgtgagccctggtgccttcttgacacaacaacagttgttgccgttctacctgcacgctgcgcctaacgctggcaccctcttacaactgcaacaattgctgccattcaaccaacttgctttgacaaacccaacagcgttctaccaacaacccatcattggtggtgccctcttttagattgcttattagttgtaattcaataatgaagttttttggctgatgtatgtggcctcctagaaataagaaggtatattttc

SEQ ID NO: 4399 - DNA, 154 bp, Zea mays
  unsure (1)..(154): unsure at all n locations; Clone ID: LIB3061-005-Q1-K1-G2
nccacgcgtaccggagaacagttccccttttctggatcggcctggtccttacagcaggggccattgggggcgagcccgagaagcaagcgggccccgggggacaagaaaccggcgggcacatcgggtacgttgaccggcccgagggcgccgaccc

SEQ ID NO: 4400 - DNA, 227 bp, Zea mays
  Clone ID: LIB3061-005-Q1-K1-G3
cggagaagcatgcaaacctcactacacaggaaactgctgtgcacatcgtgtacattgaccacctccacaacaccaacactgaagagttcaacattactaccatcaatcacatactgtttaaaaaacacttgaacagaatcgcagtgctctaccactacaataacgcacacagcaacattcttcacgatgatgaccctatatcatgtcataagatcctaaagagcaac

SEQ ID NO: 4401 - DNA, 331 bp, Zea mays
  Clone ID: LIB3061-005-Q1-K1-G4
aacacaccaagcgaacccactaacacgaactaccacaaggctaccaaaaatgagccctcttgcgcttcttgcccttttagtgagcgcaacaaatgcgttcattattccacagtgctcacttgctcctagtgccagtattccacagttcctcccaccagttacttcaatgggcttcgaacatccagccgtgcaagcctacaggctacaactagcgcttgcggcgagcgccttacaacaaccaattgcccaattgcaacaacaatccttggcacatctaaccctacaaaccattgcaacgcaacaacaacaacaacagtttctgccatcactg

SEQ ID NO: 4402 - DNA, 373 bp, Zea mays
  Clone ID: LIB3061-005-Q1-K1-G5
gaatgctccaaatttctatccatttcttgtgtcactttgggtaaatgattcctttgagagaaaagacatggaaagagagttgttggctaaacttctcgtcagcctttgcagtggtcgacataatttgttgagcaagcaacaactcagtgatggcctttcaaatgttcttgcctcattagaagataatctaagtgatgctccaagagccactgagtaccttggacgacttcttgcaaggtttgtggaggaaagcatattgctcttgcaagaggtaggtaaattgattcaagagagtggagaagaaccagggtacctaatacaaggcggtattgcggctgacatcctaggtgcagtcctggattccatataatca

SEQ ID NO: 4403 - DNA, 421 bp, Zea mays
  unsure (1)..(421): unsure at all n locations; Clone ID: LIB3061-005-Q1-K1-G6
attgatacgaactagcaacatacatagtgaagtacactagcaacatcttagcaccgatggcagccaagatttttgccatccttgccctccttgctctttcagcaagcgttgctaccgcgactattattccacaatgctcacaacaatacctctctccggtgacagccgcgagatttgaatacccaactatacaatcctacaggctacaagaggccatcgcagcaagcatcttacggtcgttagcattgaccgtccaacaaccatatgccctattgcaacaaccatccttaatgaatctatatctccaaagaatcgcagcacaacaactacaacaacagttgcttccaacaatcaatcaagtagttgcagcgaaccttgctgcttacctncagcaacaacaatttcttccattcaatcaact

SEQ ID NO: 4404 - DNA, 429 bp, Zea mays
  Clone ID: LIB3061-005-Q1-K1-G7
cggacgcgtgggttggagaatgctgggatgtccaaagacagcatccttggtgtaaacgaaaatggtgattggaaagagttgagctcgattgatgaagaggataccgatagcgccaaccacaatgatgaagacgtcgatgatgacagtgttgacagcagcattgaggatggggccgaggaggacgggtacgaagagcagtttaatgagcctgaagatgatacggcagtctgaaaatttgactgagccgggtatccacatcaaaaagacaaagcgcttctccttgagtagagtttttgcacaacacattctgtagctcttcgcatattccagttataggagagggtctggtgtttaaagaaactttgtactttgttgtagttgaattgttatgttatcgccgggaatatatatactccctacgtttctttt

SEQ ID NO: 4405 - DNA, 442 bp, Zea mays
  Clone ID: LIB3061-005-Q1-K1-G8
tgtcagcattcaaaaacacaccaagcgaagcgcactagcaacgacctaacacgcgatggctaccaagatattagccctccttgcgcttcttgcccttttagtgagcgcaacaaatgcgttcattattccacagtgctcacttgctcctagtgccattattccacagttcctcccaccagttacttcaatgggcttcgaacatccagccgtgcaagcctacaggctacaactagcgcttgcggcgagcgccttacaacaaccaattgcccaattgcaacaacaatccttggcacatctaaccctacaaaccattgcaacgcaacaacaacaacaacaacagtttctgccatcactgagccacctagccgtggtgaaccctgtcacctacttgcaacagcagctgcttgcatccaacccacttgctctggcgaacgtagctgca

SEQ ID NO: 4406 - DNA, 380 bp, Zea mays
  Clone ID: LIB3061-005-Q1-K1-H1
caactagcaacatagaaagcacaatagtgtaccaacaatggcagccaaaatattttgcttccttatgctccttggtctttctgcaagtgttgctaccgcaaccattttcccacaatgctcacaagctcctatagcttcccttcttcccccatacctctcaccagcggtgtcttcaatgtgtgaaaacccaattgttcaaccctacaggatccaacaggcaatcgcaacaggcatcttaccattatcacccttgttcctccaacaaccgtcagccctattacagcagttacctttggtccatttggtggcacaaaacatcagggcacaacaactacaacaacttgtgctagcaaaccttgctgcatactctcagcaacatc

SEQ ID NO: 4407 - DNA, 362 bp, Zea mays
  Clone ID: LIB3061-005-Q1-K1-H10
aggcaatcgcagctggcatcttacctttatcacccttgttcctccaacaatcatcaggcctagtacaacagttacctttggtgcatttattggcacaaaacatcagggcacaacaactacaacaacttgtgctagcaaaccttgctgcctactctcagcaacagcagtttcttccattcaaccaactaggttcattgaactctgcttcttatttgcaacaacaacaactaccattcaaccagctacctgctggctacccccagcaatttctttcattcaaccaacttgcagcattgaactcttctgcttatttacaggagcaacaactactaccattcagacagctagctggtgtgagccct

SEQ ID NO: 4408 - DNA, 353 bp, Zea mays
  Clone ID: LIB3061-005-Q1-K1-H12
accagctagcatcgatgagcatgttaccgctgcagcaaatatcagagcttcctcttttggaataccactgcatagtctttttgaagctaaaggtgttgctggaaatatagttcatgctgtggcaactaccaatgctataattgctggtctaatcgtcatcgaggcaattaaagtgctcaagggtgattatcaagattatagaatgacatattgccttgagcatccaacaaggaagatgctcttgatgcctgtcgagccttttgaacctagtaaatcatgttatgtctgctctgagaccccacttgttctggagggtaatacttagacaaccaagcttcacgaagtcattgaaa

SEQ ID NO: 4409 - DNA, 327 bp, Zea mays
  Clone ID: LIB3061-005-Q1-K1-H2
tttccctccttatgctccttgctctttctacatgtgttgctaacgcgacaaattgttcctcaatgctcacaagctcctatagcttcccttacttctcaataccttccatcaattatagcttcaatatgtgaaaacccagctcttcaaccatataggcttcaacaagcaatcgcagcaagcaacataccttgatcgtccttgatgcttcaacaatcgtcagccctatctttggtgcagtcattggtacaaaccattagggcacaacagctgtagcaactcgtgctacctctgatcaaccaagtagctctggcaaacctttctccctac

SEQ ID NO: 4410 - DNA, 365 bp, Zea mays
  Clone ID: LIB3061-005-Q1-K1-H3
acaacgactacaacaacttgtgctagcaaaccttgctgcctactctcagcaacagcagtatcttccattcaaccaagtagctgcattgaactctgcgtgttatttgcaacaacaacaactaccattgagccagctacctgctgcctaccctcagcaatttcttccattcaaccaactggcagcattgaactgtcctgcttatttacagcagctacaactactaccatgcagccagctagctggtgtgagccctgctaccttcgtgatacaaccacaggtgatgccgatctaccagcacgctgcgcctaacgctggcacgctattacaactggcacaattgctggcattcaaccaacttgctttga

SEQ ID NO: 4411 - DNA, 421 bp, Zea mays
  Clone ID: LIB3061-005-Q1-K1-H4
ggcagccaaaatatttggcttccttatgctccttggtctttctgcaagtgctgctaccgcaaccattttcccacaatgctcacaagctcctatagcttcctttcttcccccatacctctcaccagcggtgtcttcagtatgtgaaaacccaattcttcaaccctacaggatccaacaggcaatcgcagcaggcatcttacctttatcacccttgttcctccaacaaccgtcagccctattacagcagttacctttggtgcatttgttggcacaaaacatcaaggcacaacaactacaacaacttgtgctaggaaaccttgctgcctactctcagcaacagcagtttcttccattcaaccaactggctgcattgaactctgcttgctaatttgcacatcaactaccattcagtcagctagct

SEQ ID NO: 4412 - DNA, 389 bp, Zea mays
  Clone ID: LIB3061-005-Q1-K1-H5
accaagcgaagcgcactagcaacgacctaacaccaatggctaccaagatattagccgtccttgcgcttcttgcccttttagtgagcgcaacaaatgcgttcattattccacagtgctcacttgctcctagtgccattattccacagttcctcccaccagttacttcaatgggcttcgaacatccagccgtgcaagcctacaggctacaactagcgcttgcggcgagcgccttacaacaaccaattgcccaattgcaacaacaatccttggcacatctaaccctacaaaccattgcaacgcaacaacaacaacatcaacagtttctgccatcactgagccacctagccgtggtgaaccctgtcacctacttgcaacagcagctgcttgca

SEQ ID NO: 4413 - DNA, 374 bp, Zea mays
  Clone ID: LIB3061-005-Q1-K1-H6
gtgctgatggtcgtgctggtcatgttcatcctgaccgccacggcgcagatcgccggcatcaaggtcgacctgcccaaggccagttcgtccatcgccctgtcgcagcccaagaccaaggccatttccgtcaacgacgccggccaggtgttcctggacgcctacccggtgaccctgcccgagctggaagaccggctgcgcacggagaaggcactgaatcccgactttccggtgatcgtgcgcggcgactccgccgtgcagtaccagaaggtggtggaagtgctggacctgctgcgccggctggaactggcccaggtcgggctggtcaccggcaagccgaaataaggggccgaggcgactgtcatgccgcaccacgc

SEQ ID NO: 4414 - DNA, 348 bp, Zea mays
  Clone ID: LIB3061-005-Q1-K1-G11
ctagcaacatacatagtgaagtacactagcaacatcttagcaccaatggcagccaagatttttgccatccttgccctccttgctctttcagcaagcgttgctaccgcgactattattccacaatgctcacaacaatacctctctccggtgacagccgcgagatttgaatacccaactatacaatcctacaggctacaagaggccatcgcagcaagcatcttacggtcgttagcattgaccgtccaacaaccatatgccctattgcaacaaccatccttaatgaatctatatctccaaagaatcgcagcacaacaactacaacaacaggtgcttccaacaatcaatcaa

SEQ ID NO: 4415 - DNA, 403 bp, Zea mays
  Clone ID: LIB3061-005-Q1-K1-E6
gcactttctatgagacaaaagtttgataaatattgggaaataaataatgtagctttggcagtgagagcatttcttgatcctagatacaaacataggatgattgagctatatatatctaagatgtatgacattgataaagctgagttagagaagttggtattcatgaatgttatcaacgaattatttacatattattcatcagtcatcactgcaaaatcaaccacaaaaacctcaaaaggtgctagttcaaaagagagcgagtttgttccacataaaaatactttggtggatgaggatgatgatgaggttgatcttgatgagttgtatgcaacaacaagcaaaatagatttgtacatgagtgaggatctagtgaaggtcaatgacaatgaagcaacatttgatg

SEQ ID NO: 4416 - DNA, 420 bp, Zea mays
  Clone ID: LIB3061-005-Q1-K1-E7
ggtgggttggcttctcctccccctccggttcgggttcgggttcgtgaggttctccggggttcggtttcgtgggtgagcggatcgagatggcggcgtcggatgttgagtaccgctgcttcgtcggcggcctcgcctgggccacggacgaccactccctccacaacgccttcagcacctacggcgaggtcctcgagtccaagatcatcctcgatcgggagacgcagaggtcccgcggcttcggcttcgtcaccttctccacggaggaggcgatgcggaacgccatcgagggcatgaacggcaaggagctggacggccgcaacatcaccgtcaacgaggcccagtcccgcggcggccgtggaggcggcggcggcggcgggtacggtggtggccgtggaggcggcggctacggcggtggcgggc

SEQ ID NO: 4417 - DNA, 387 bp, Zea mays
  Clone ID: LIB3061-005-Q1-K1-E8
gtaatagttgttgcctactctcagcaacaacaacttcttccatttaaccaattggccgcactgaaccccgctgcttatttgcagcagcaaatactactaccatttagccagctagctgcagcaaaccgtgcttccttcttgacacagcaacagttgctgcctttctaccagcagtttgcggctaaccccgcaaccctcttacaactacaacaattgttgccctttgtccaacttgctttgacagaccgagcggcctcctaccaacaacacatcattggtggtgccctcttttagattgcttattagttgtaattcaataataaagttttttggatgatgtatgtggccaaccagaaataagaagttacatttccagattttaatgtg

SEQ ID NO: 4418 - DNA, 406 bp, Zea mays
  Clone ID: LIB3061-005-Q1-K1-E9
acgtattgagaccaactagcaacatagaaagcacaatagtgtaccaacaatggcagccaagagattgtgcctccttatgctccttggtctttctgcaagtgctgctacggcgaccattttcccgcaatgctcgcaagctcctatagcttcccttcttcccccgtacctctcaccagcggtgtcttcggtatgtgaaaacccaattcttcaaccctacaggatccaacaggcaatcgcagctggcatcttacctttatcacccttggtcctccaacaatcatcagccctattacaacagttacctttggtgcatttattggcacaaaacatcagggcacaacaactacaacaacttgtgctagcaaaccttgctgcctactctcagcaacagcagtttgttccattc

SEQ ID NO: 4419 - DNA, 363 bp, Zea mays
  Clone ID: LIB3061-005-Q1-K1-F10
agaccaacaagcaacatagaaagtggaatccagtagcaacaacagagcaacaatggcgaccagagatattttccctccttatgctccttgctctttctgcatgtgttgctaacgcgacaattttccctcaatgctcacaagctcctatagcttcccttcttcccccataccttccatcaatgatagcttcagtatgtgaaaacccagctcttcagccctataggctccaacaagcaatcgcagcaagcaacatacctttatcacccttggtgtttcaacaatcgccagccctatctttggtgcagtcattggtacaaaccattagggcacagcagctgcagcaactcgtgctacctgtgatca

SEQ ID NO: 4420 - DNA, 384 bp, Zea mays
  Clone ID: LIB3061-005-Q1-K1-F11
ctcctgggcgggccccccgagctgcccgcgggcctgctgcagaaggccatcgacgagcacgacgccgccgcggtcaccaggaggctggaggagtacgaggcggcgcccaagctgttccactacagcgacgccggccccaactgcgtggccgtcggcagctcgccgcgcttcagggtctacgacgtcgacttcggcttcggacggcccgagcgcgtccgcagcggcgggaacaacaagttcgacggcatggtgtacctgtaccccggccgcggcggtgacggcggcatcgatgtcgagctggcgctgcagccggagcccatgcagaggctggagaaggacgacgacttcttcctgcgccaggcggcagcctaagcccgagtcgtc

SEQ ID NO: 4421 - DNA, 363 bp, Zea mays
  Clone ID: LIB3061-005-Q1-K1-F12
gcgttgagtgataaatatgaaaccgcaaagaaagagctcgaggatgcaatagccaaggtggaggaggaaatgaatgtagacaagtcagaaaaagagtctcacatctcaaaactggagcgacagattacattatctgagataaagtacatggaggagataaagaccatgcaagtggagacaactgaaaagaatgaagcactaacagccaagatgcaagaacacacagacctacagcatgagaaagatgagttggaacaacagttgctggaagtgaagaaggaattggatggtgcctaccacaccatagcaaatcaggaagaacaggcttctgtgagggagataaagtgggacgcttttaagaag

SEQ ID NO: 4422 - DNA, 397 bp, Zea mays
  Clone ID: LIB3061-005-Q1-K1-F2
attttgagcattcagaacacaccaagcgaagctacctagcaacgacttaacaacagtggctaccaagatattagcccttcttgcgcttcttgccctttttgtgagcgcaacaaatgcgttcattattccacaatgctcacttgctcctagtgccattataccacagttcctccgaccagttacttcaatgggcttcgaacacctagctgtgcaagcctacaggctacaacaagcgcttgcggcgagcgtcttacaacaaccaattaaccaattgcaacaacaatccttggcacatctaaccatacaaaccatcgcaacacaacagcaacaacagttcctaccagcactgagccaactagatgtggtgaaccctgtcgcctacttgcaacagcaggtg

SEQ ID NO: 4423 - DNA, 367 bp, Zea mays
  Clone ID: LIB3061-005-Q1-K1-F3
catcatagaatgcggaatccagtagcgacaatctagctacaatggcgaccacaacagtgggtatcaatatgctagttgttcttgctacatgtgccgttaacgcgaccgcaacacatgcgtgcatacatgcacatagctcacttgttcttactgcaaacataccataaattatagcaccaatatctgaaatcggatctcaacaactatataggctagaatacgcgatagaaccaggcatcatacctagagcgttacagcagccacatcaatcatcggcactacaatccttgcaacaattgacactacccatcatggcaccacagctgcagcaactggtgctaccagcaatgaaccaaatagatgtggc

SEQ ID NO: 4424 - DNA, 66 bp, Zea mays
  Clone ID: LIB3061-005-Q1-K1-F4
aaaaaaaaaaagaggaaaccaaaaacatcaatttaccaacaaaggcctccaaaaaaggaggggatc

SEQ ID NO: 4425 - DNA, 427 bp, Zea mays
  unsure (1)..(427): unsure at all n locations; Clone ID: LIB3061-005-Q1-K1-F5
cccgctcctctcctccccgtctgccggctcccttcttcttcgctgtcgacgacgcggactccccgccgcgctccctctctcaggcctcgcggggtgatcagaggcggctgggagactcgtgcgctccgacgagtccggttacggcgcggtaattaagcaggggaggagccggccctgagcggcggagtccaaaatgagtgacgacgtggtatggcactgcatccgccacaaccactgcagcttcatgtccaagatcacaacggggatcttctgtcgcaacccctacaacgcgacgggcatctgcaaccggagctcctgcccgcttgccaacagccgctatgccaccatccgggatcatgaaggtattttctatctgtatatgaaaaccggncgaaagagctcatctgccaaacaaattatgggagag

SEQ ID NO: 4426 - DNA, 392 bp, Zea mays
  Clone ID: LIB3061-005-Q1-K1-F6
ccgctttctcttgctagggtttcagctctccgtcaccgtcatgagtgcctgcagggcggatcaccgtcgccgccacccgtcgttcctgcgggacctctcgtccccgatctcctcgtcgtttcgcctcccaccggcctcgatgcggcgagaggcgcaggcctccaccccgccgccgtctacgccgctgctctccctcgacgacctctcccacctctacctcttcaggcagccggccacgccttcgcaggcgacgacgaccccctcgcctcagcccccgcgtggagccgttctcttctcctcgccgctgccgtccaacggctcgccggggccctcggcatggtggaccctctcgagggaggagaatccccaggagggatcaacgatgggatgcg

SEQ ID NO: 4427 - DNA, 400 bp, Zea mays
  Clone ID: LIB3061-005-Q1-K1-F7
gcaacatagaaagcacaatagtgtaccaacaatggcagccaaaatattttgcctccgtatgctccttggtctttctgcaagtgctgctacggcgaccattttcccgcaatgctcgcaagctcctatagcttcccttcttcccccgtacctctcaccagcggtgtcttcggtatgtgaaaacccaattcttcaaccctacaggatccaacaggcaatcacagctggcatcttacctttatcacccttgttcctccaacaatcatcagccctattacatcagttacctttggtgcatttattggcacaaaacatcagggcacaacaactacaacaacttgtgctagcaaaccttgctgcctactctcagcaacagcagtttcttccattcaaccaactagct

SEQ ID NO: 4428 - DNA, 295 bp, Zea mays
  Clone ID: LIB3061-005-Q1-K1-F8
ctccaacaagcaatcgcagcaggcatcataccttaatcacccttgttgttggagcagtcgccagccctatctttggggcagtcatgggtccaaaccatcagggcacagcagttgcagcaactcgggctacctgtgatcaaccaagtacttttggcaaacctttttccttactttaagaacacacacaatttcttccattcaaccaactgtatacactgaacccgtgggcatattggcagcaacacctattaccattcagccagctagctactgcatactctgagcaacaacaact

SEQ ID NO: 4429 - DNA, 399 bp, Zea mays
  Clone ID: LIB3061-005-Q1-K1-F9
ctcagtgccagtcgttgcggcagcagtgttgccagcagctcaggcaggtggagccgcagcaccggtaccaggcgatctgcggcttggtcctccagtccatcctgcagcagcagccgcaaagcggccaggtcgcggggctgttggcggcgcagatagcgcagcaactgacggcgatgtgcggcctgcagcagccgactccatgcccctacgctgctgccggcggtgtcccccactgaagaaactatgtgctgtagtatagccgctggctagctagctagttgagtcatttagcggcgatgattgagtaataatgtgtcacgcatcaccatgggtggcagtgtcagtgtgagcaatggacctgaatgaacaattgaaaatgaaagaaaaaagtattggtcc

SEQ ID NO: 4430 - DNA, 392 bp, Zea mays
  Clone ID: LIB3061-005-Q1-K1-G10
caactagcaacatagaaagcacaatagtgtaccaacaatggcagccaaaatattttggttccgtatgctccttggtctttctgcaagtgctgctaccgcaaccattttcccacaatgctcacaagctcctatagcttcctttcttcccccatacctctcaccagcggtgtcttcagtatgtgaaaacccaattcttcaaccctacaggatccaacaggcaatcgcagcaagcatcttacctttatcacccttgttccttcaacaaccgtcagccctattacagcagttacctttggtgcatttgttggcacaaaacatcaaggcacaacaactacaacaacttgtgctaggaaaccttgctgcctactcttagcaacagcagtttctttcat

SEQ ID NO: 4431 - DNA, 434 bp, Zea mays
  Clone ID: LIB3061-005-Q1-K1-C8
aaagcacaatagtgtaccaacaatggcagccaaaatattttgcctccttatgctccggggtctttctgcaagtgctgctacggcgaccattttcccgcaatgctcgcaagctcctatagcttcccttcttcccccgtacctctcaccagcggtgtcttcggtatgtgaaaacccaattcttcaaccctacaggatccaacaggcaatcgcagctggcatcttacctttatcacccttgttcctccaacaatcatcagccctattacaacagttacctttggtgcatttattggcacaaaacatcagggcacaacaactacaacaacttgtgctagcaaaccttgctgcctactctcagcaacagcagtttcttccattcaaccaactaggttcattgaactctgcttcttatttgcaacaacaacaactaccat

SEQ ID NO: 4432 - DNA, 365 bp, Zea mays
  Clone ID: LIB3061-005-Q1-K1-D1
gccttctcaccgtcgcacccggcgatgcagcggcacgtcgcctccggccggccgtggggcacggacggctccgacttttcttaccgcatggtcgtcgaatcccggtaccagagggtcgccgagggcagatcccgcctcgcgcgcctcatcctcgtgcaggcgctgcacctagtggccggaggcttgcttctattgctgtcgttgtccaagggggcggcggtgaacaagttcgccgtgctgtccatggccgcgggattcctggctatagtggtgggggaattagggcgaatgcggaccatgtcagtgctgcttcggctctacacaagcttgtcatcaattgcggttgcattctctgtgacgtgcat

SEQ ID NO: 4433 - DNA, 376 bp, Zea mays
  Clone ID: LIB3061-005-Q1-K1-D10
gcgaagcgcactagcaacgacctaacaccaatggctaccaagatattagccctccttgcgctgcttgcccttttagtgagcgcaacaaatgcgttcattattccacagtgctcacttgctcctagtgccattattccacagttcctcccaccagttacttcaatgggcttcgaacatccagccgtgcaagcctacaggctacaactagcgcttgcggcgagcgccttacaacaaccaattgcccaattgcaacaacaatccttggcacatctaaccctacaaaccattgcaacgcaacaacaacaacaacaacagtttctgccatcactgagccacctagccgtggtgaaccctgtcacctacttgcaacagcagc

SEQ ID NO: 4434 - DNA, 364 bp, Zea mays
  unsure (1)..(364): unsure at all n locations; Clone ID: LIB3061-005-Q1-K1-D11
cggacgcgtgggatattttcagcattcaaaaacacaccaagcgaagcgcactagcagcgacctaacaccaatggctaccaagatattagccctncttgcgcttcttgcccttttagtgagcgcaacaaaatgcgtcattattccacagtgctcacttgctcctaatggcattattccacaattccttccaacaggtacttcaaagggcttcgaacattcaaccgtgcaagcctacaggctacaactagcgcttgcggcgaacgccttacaacaaccaattgcccaattgcaacaacaattcttggcacatataaccctacaaaccattgcaacgcaacaaccaccacaacaacaggttctggca

SEQ ID NO: 4435 - DNA, 376 bp, Zea mays
  Clone ID: LIB3061-005-Q1-K1-D12
gtgctagcaaaccttgctgcctactctcagcaacagcagtttcttccattcaaccaggtagctgcattgaactctgcttcttatttgcaacaacaacaactaccattcagccagctatctgctgcctacccccagcaatttcttccattcaaccaactgacagcattgaactctcctgcttatttacagcagcaacaactactaccattcagccagctagctggtgtgagccctgctaccttcttgacacaaccacagttgttgccgttctaccagcacgctgcgcctaacgctggcaccctcttacaactgcaacaattgctgccattcaaccaacttgctttgacaaacccagcagcattctaccaacaaccca

SEQ ID NO: 4436 - DNA, 353 bp, Zea mays
  Clone ID: LIB3061-005-Q1-K1-D3
cagaaacacaccaagcgaagcacattagcaacaacctaacaacaatggctaccaagagattatccctccttgcgcttcttgcgctttttgcgagcgcaacaaatgcgttcattattccacaatgctcacttgctccaagttccattattacacagttcctcccaccagttacttcaatgggcttcgaacacccagctgtgcaagcctataggctacaacaagcaattgcggcgagcgtcttacaacaaccaatttcccagttgcaacaacaatccttggcacatctaacaatacaaaccatcgcaacgcaacagcaacaacaattcctaccagcactgagccacctagccatg

SEQ ID NO: 4437 - DNA, 386 bp, Zea mays
  Clone ID: LIB3061-005-Q1-K1-D4
cccacgcgtacggaccaactagcaacatagaaagcacaatagtgtaccaacaatggcagccaaaatattttgcttccttatgctccttggtctttctgcaagtgctgctaccgcaaccattttgccacaatgctcacaagctcctatagcttcctttcttcccccatacctctcaccagcggtgtcttcagtatgtgaaaacccaattcttcaaccctacaggatccaacaggcaatcgcagcaggcatcttacctttatcacccttgttcctccaacaaccgtcagccctattacagcagttacctttggtgcatttgttggcacataacatcaatgcacaacatctacaacaacttgtgctaggaaaccttgctgcctactctc

SEQ ID NO: 4438 - DNA, 431 bp, Zea mays
  Clone ID: LIB3061-005-Q1-K1-D5
cgcagaagaacccgatcgacaccatgagggtgttgctcgttgccctcgctctgctggctctcgctgcgagcgccacctccacgcatacaagcggcggctgcggctgccagccaccgccgccggttcatctaccgccgccggtgcatctgccacctccggttcacctgccacctccggtgcatctcccaccgccggtccacctgccgccgccggtccacctgccaccgccggtccatgtgccgccgccggttcatctgccgccgccaccatgccactaccctactcaaccgccccggcctcagcctcatccccagccacacccatgcccgtgccaacagccgcatccaagcccgtgccagctgcagggaacctgcggcgttggcagcaccccgatcctgggccagtgcgtcgagtttctgaggcatcagtgc

SEQ ID NO: 4439 - DNA, 374 bp, Zea mays
  Clone ID: LIB3061-005-Q1-K1-D6
cgtcaccagcagggtgtcccggccctctctagttgctaccccggcccccaacattggcctgatgctgctgccatgtagcccagcgctcccccctcggcttcaccggcggcggcggcaacgacggtgaaaactacatcgggtgctagctgcgacggtggtgcgtgccctgatgacgatagggcacgcgaggcgcgggcagcctgtaagcgttcgatcggccatgtacggcaactatacatctttggcaggtctacaactctccatcatcctccgtgggagagaagatggtaatggagtgcgtgcgtatgtatgtgtatgcccatggcgcgcgcgcgcggctctgggcgagtcacagtagatatgcagtatcatgt

SEQ ID NO: 4440 - DNA, 326 bp, Zea mays
  Clone ID: LIB3061-005-Q1-K1-D7
ccacctagacccacgcatccgcgttacctacccggtatccccactccctttctagtttctaccaatctcatcaagagtggatttatactgatgccctccagcccacccatccatcctcctctacagaaatcatgaaattaacaaccatcaaaactacactgcgacctatctgacaccttgactttacctctcttccactatcgctacacacagcccaagtacattgatagcgttagactcgcctgatatgaagtctctcatactgaatagctacttaaacattccacaccctatcatggatataacaaagaaaatacatacatgta

SEQ ID NO: 4441 - DNA, 381 bp, Zea mays
  Clone ID: LIB3061-005-Q1-K1-D8
gcaacatagaaagcacaatagtgtaccaacaatggcagctaaaatattttgcctccgtatgctccttggtctttctgcaagtgctgctacggcgaccattttcccacaatgctcacaagctcctatagcttcccttcttcccccgtacctctcaccaacggtgtcttcggtatgtgaaaacccaattcttcaaccctacaggatccaacaggcaatcgcagctggcatcttacctttatcacccttgttcctccaacaatcatcagccctattacagcagttacctttggtgcatttattggcacaaaacatcagggcacaacaactacaacaacttgtgctagcaaaccttgctgcctactctcagcaacagcagtttct

SEQ ID NO: 4442 - DNA, 322 bp, Zea mays
  Clone ID: LIB3061-005-Q1-K1-D9
cccacgcgtccgctttgcacagcgatgaggttatattcttacttgagtattttgtctgtcggtgtcgattataaactattaatcatgtgtatatttgtgtgttcttgtgaggagagaaaccctcgggaccgatgatgaagaagtgaggcccgttcgacgtttgctaaatgttcggtagaaggttcgaaccaaaaatcatcgtcgatctcgtgatttcgagtttggtttagttatggttcgttacacgtgatgcggaggacaagacccgagttgatctcaaaatgatgctggtgaacgaaccagcggaatggatgatctgatc

SEQ ID NO: 4443 - DNA, 397 bp, Zea mays
  Clone ID: LIB3061-005-Q1-K1-E10
cttctatcagtaccatcaatcatcattcatcttagtagtataggcaccaaatcaaatctgcaacatcaattatgtaacgccaaaaaccatgaagctggtgcttgtggttcttgctttcattgctttagtatcaagtgtttcttgtacacagacaggcggctgcagctgtggtcaacaacaaagccatgagcagcaacatcatccacaacaacatcatccacaaaaacaacaacatcaaccaccaccacaacatcaacagcagcagcaacaacaacaacaacaaggtcacatgccaccaccaaaacattagcaacaacaagaagttcatgttcaacaacaacaacaacaaccgcagcaccaccaccaacaacaacaacaacagcgccaacaacaacat

SEQ ID NO: 4444 - DNA, 256 bp, Zea mays
  Clone ID: LIB3061-005-Q1-K1-E11
caagctcctatagcttcccttcttcccccataccttccatcaatgatagcttcaataggtgagaacccagctcttcagccctataagctccaacaagcaatcgcagcaagcaacatacctttatcacccttggtgtttcaacaatcgccagccctatctttggtgcaatcattggtacaaaccatcaaggcacaacaactgcagcaactcgtgctacctgggatcaaccaagtagctctggcaaacctttctccct

SEQ ID NO: 4445 - DNA, 210 bp, Zea mays
  Clone ID: LIB3061-005-Q1-K1-E12
acagtgcgcacttggattgcgcgaccaccgcagcgcggaggaggcacaggcgccgaggtagagacgatggccggcgcgggctcctgggcgtgcttctcctccttgagtaagcgactggaacggaacgtggatccttgtcactggtggcgccaacggcatcggcgaggccatcgttcggctgttcatggagcactgtgccaaggtctggat

SEQ ID NO: 4446 - DNA, 375 bp, Zea mays
  unsure (1)..(375): unsure at all n locations; Clone ID: LIB3061-005-Q1-K1-E2
cgccacccaaattcatcaagctcaacacgatctcaattcgattccagttcatccatgcaacgcctnccgcctgtacgtatagaagaaagaaggaagaaccgtcaccgtacgtcctcgccagtacaaataatggccctgctcaaagccgcgcgcgtcgccgatgtgcccaccctggacgtggtggtggcccccggcctggtggcggttgccaaggcgaggagcgccgcggctgtgggcggccggttctcggtgatcgggcaccgcggcaaggggatgaacgcgctggcgtcggaggacccgcgtctgcgggatgtgcgcgagaacacggtccgctccttcaacgacgccgggcgcttncccgtcgactacgtcgag

SEQ ID NO: 4447 - DNA, 398 bp, Zea mays
  Clone ID: LIB3061-005-Q1-K1-E3
ctggagcaggagagattagaagctgaaaagaagcgggtaaaagaagacgcgcaacagcttgctcgagtttttgaaaccattggcgctttcaaactccctcgcaaaggtggaaaaggaaaacagatctttgggagtgtcacggcacaggatgttgttgacataataaagtcacaacttaatagggatgtcgacaagaagctggtgacggttccagaaatccgtgaaatcggagagtatgttgcagagatcaagcttcacccagacgtgacagcgcgagtaaggctgaatgtctatgcgaaatgagctcagcagttacagaacctcgagtaatggactttggcgaagcctgatgtttgccagagattttgcttgaagtgccaggtgctgccgtagacatg

SEQ ID NO: 4448 - DNA, 391 bp, Zea mays
  unsure (1)..(391): unsure at all n locations; Clone ID: LIB3061-005-Q1-K1-C7
cgcgacatggacctgttcgagcacttcgccgncgtcgcccagcgcctcggcgggtgcgccgcccgggactacgcggacatcgtcgagttccttgtcaagcggtggaagctggagacactggagagcgggctctccggcgagggccgcaaggccagggacttcgtctgcgggctcgcgccgaggatgcgccgggccgcggagcgcgccgaggacagggccaagaaggacgagcccaggatggtcaagttcagctggatctttgatagggaagccgttgtttaggcacttgttgctaactgtgatatgtgctcagatcatgtcgctagctgtcagtgtctttgtcacattgtgtttatgtgtttgaaatgccgtaagagtgttttttttctgc

SEQ ID NO: 4449 - DNA, 402 bp, Zea mays
  unsure (1)..(402): unsure at all n locations; Clone ID: LIB3061-005-Q1-K1-B11
gaagtgctgctacggcgaccattttcccgcaatgctcgcaagctcctatagcttcccttcttccccggtacctgtcaccagcggtgtcttcggtatgtgaaaacccaattcttcaaccctacaggatccaacaggcaatcgcagctggcatcttacctttatcacccttgttcctccaacaatcatcagccctattacaacagttacctttggtgcatttattggcacaaaacatcagggcacaacaactacaacaacttgtgctagcaaaccttgctgcctactctcagcaacagcagtttcttccattcaaccaactaggttcattgaactctgcttcttatttgcaacaacaacaactaccattcagccagctacctgctgcctacccncagcaatttc

SEQ ID NO: 4450 - DNA, 323 bp, Zea mays
  Clone ID: LIB3061-005-Q1-K1-B12
ctagccgtggtgaaccctgtcacctacttgcaacagcagctgcttgcatccaacccacttgctctggcgaacgtagctgcataccagcaacaacaacagctgcaacagtttatgccagtgctcagtcaactagccatggtgaaccctgccgtctacctacaactactttcatctagcccgctcgcggtgggcaatgcacctacgtacctacaacaacagttgctgcaacaaattgtaccagctctgactcagctagctgtggcaaaccctgctgcctacttacaacagttgcttccattcaaccaactggctgtgtcaaactc

SEQ ID NO: 4451 - DNA, 433 bp, Zea mays
  unsure (1)..(433): unsure at all n locations; Clone ID: LIB3061-005-Q1-K1-B2
gcaccataaaaggtggattccatagccaaaattggaccaccatgggcggccaaaaagttggcaatcctaaggctcctggtttttctgatggtttgctaacggcaacatttttcctcaatactcacaagctcctatagctgcccttcttcccccataccttccatcaatgaccgctttagtatgtgaaaacccagcccttcaaccctacaggatccagcaagcaatcgcaacaagcaacttacctttatcacacctgttctttcaacaatcgccagccctatctttggtgcagtcattggtacaaaccatcagggcagaacagttgcagcaactcgtgctaccagtgatcagccaagtagctcttgcaaacctttcnccctactctcagcaacaacaatttcttccattcaaccaactgtctatactgaaccct

SEQ ID NO: 4452 - DNA, 391 bp, Zea mays
  Clone ID: LIB3061-005-Q1-K1-B5
tttgagcattcagaaacacacctagcgaagcgcactagcaacgacctaacagcaatggctaccaagatattatccctctttgcgcttcttgccctttttgtgagcgcaacaaatgcgttcattattccacaatgctcacttgctcctagtgccattattccacagttcctccctccagttacttcaatgggcttcgaacacccagctgtgcaagcctacaggctacaacaagcgcttgcggcgagcgtcttacaacaaccaattgcccaattacaacaacaatccttggcacatctaaccatacaaaccatcgcaacgcaacagcaacaacaatttctaccagcactgagccaactagctgtggtgaaccctgtcgcctacttgcaacagc

SEQ ID NO: 4453 - DNA, 359 bp, Zea mays
  Clone ID: LIB3061-005-Q1-K1-B6
agaaagtggaatacagtagcaaaaatagagcaacaatggcggccaagatattgtccatccttatgctccttgctctttctgcatgtgttgctaacgcgaccatttttcctcaatactcacaagctcctatagctgcccttcttcccccataccttccatcaatgaccgctttagtatgtgaaaacccagcccttcaaccctacaggatccagcaagcaatcgcaacaagcaacttacctttatcacacctgttctttcaacaatcgccagccctatctttggtgcagtcattggtacaaaccatcagggcagaacagttgcagcaactcgtgctaccagtgatcagccaagtagctctg

SEQ ID NO: 4454 - DNA, 429 bp, Zea mays
  unsure (1)..(429): unsure at all n locations; Clone ID: LIB3061-005-Q1-K1-B7
cgccgagaagctgcagagccggcgtgaccagcgaggcgagatcgtccgcgtggagccggagcacggctttcaccagctgaatccgtcgccgtcgtcgtcgtcgttttcgttcccatcgtcacaagtccagtaccaaacgtgccagcgcgacgtcgacaggcacaacgtctgcgccatggaggtgaggcacagcgtcgaacggctggaccaggccgacgtctacagccctggggctgggaggatcacacgcctcaccagccacaagttccccgtcctcaacctcgtacagatgagcgcggtgcgggtagacctgtaccaggacgccatcatgtcgccgttctggaacttcaacgcccacagcgccatgtacggcatcaggggcagtgcaagggtccaggtcgncagcgacaacgggaccacggtgttcga

SEQ ID NO: 4455 - DNA, 376 bp, Zea mays
  Clone ID: LIB3061-005-Q1-K1-B8
aattcccgctggacccacgcatccgcgccaataagctgcagaaccgttttgttcaccgagtcgagatcgtccacatggaccgcttatcaccgctttcaccaggtgaatccgtctccgtcatcgtcgtctttttcgttcccatcgtcacaagtccattaccaaacttgccaccgcgacctctacatgcacaacctctgcaccatgtaagtgaggcacagtttcaaactgctggaccaagccgacgtctacagccctgagcctaccatgatcacacgcctcaccagccacaacttccccgttctcaacctcgtacagatgagcacagtgcatgtagacctgtaccatgacgccatcatgtctccgttctagaacttca

SEQ ID NO: 4456 - DNA, 370 bp, Zea mays
  Clone ID: LIB3061-005-Q1-K1-B9
tcgaggcacgcatcacgcgacacacgacgcgaagctacctagcaacgacttaacaacattgggtaccaagatcgtatctggtcttgcgctaagtgccctatgtctacatgcacacagtgccttcatgattccacaatgctcacttgctcgtagtgccattctaccagagcttgtccgactagatacttaaatgggcttctaacacctagctgtgcaagactacaggctacaacaagcgcttgccgcgagcgtgttacaacaaccagttaagcaattgctgcgaccattattggcacatttaaccatagaagccatcgcagcacaacagcaacaacagttcctaccagtactgagccaactagatgtggtg

SEQ ID NO: 4457 - DNA, 422 bp, Zea mays
  unsure (1)..(422): unsure at all n locations; Clone ID: LIB3061-005-Q1-K1-C1
ctgaagaaactatgtgctgtagtatagccgctggctagctagctagttgagtcatttagcggcgatgattgagtaataatgtgtcacgcatcaccatgggtggcagtgtcagtgtgagcaatgacctgaatgaacaattgaaatgaaaagaaaaaagtattgttccaaaaaaaatttaaaaaaaaaaaaaaaaataaaaaaaaaataaaaaacaaaaaataaaaaaaaaaaaaaaaaaaaaaaaaaaaaaaaaaaaaaaaaaaaaaaaaaaaaaaaaaaaaaaaaaaaaaaaaaaaaaaaaaaaaaaaaaaaaaaaaaataaaaaatataagaaaaaaaaaaaataaaaataaaataaaataaaattttttaaaaaaaaaaaaaaataaaaanttaatataaataaaaaaaaaaaagggggg

SEQ ID NO: 4458 - DNA, 373 bp, Zea mays
  Clone ID: LIB3061-005-Q1-K1-C11
ccaactagcaacatacatagtgaagtacactagcaacatcttagcaccaatgggagccaagatttttgccctccttgccctccttgctctttcagcaagcgctgctacctcgacttttattccacaatgctcacaacaatacctctctccggtgacagccgcgggatttcaatacccaactatacaatcctacatggtacaagaggccatccaagcaagcatcttacggtcattagcattaaccctccaacaaccatatgctctattgcaacagccatccttagtgcatctgtatctccaaagaatcgcggcacaacaactacaacaacagttgctaccaacaatcaatcaagtagttgcagcgaaccttgct

SEQ ID NO: 4459 - DNA, 369 bp, Zea mays
  Clone ID: LIB3061-005-Q1-K1-C12
gattttgaagaagctggacacaagcttatgaaaattaagcttgagcctggtcaagagatggagctgtgcattatgcttcttgagtgttgcagtcaggagagaacatatcttcgttattatgggctgctaggacagcgtttttgcatgatcaataaagtgtaccaagagaacttcgaaaaatgctttgtgcaacaatattcgatgattcatcgtcttgaaacaaacaagttgaggaatgttgccaagttctttgcacatttggtggggactgatgctctcccttggcatgttttggcttacatcaagttgacagaagaagacccaacatcatcttctcgtattttcataaaaatattggtcccagaatta

SEQ ID NO: 4460 - DNA, 430 bp, Zea mays
  Clone ID: LIB3061-005-Q1-K1-C2
atagaaagcacaatagtgtaccaacaatggcagccaaaatattttgcttccttatgcgtccttggtctttctgcaagtgctgctaccgcaaccattttcccacaatgctcacaagctcctatagcttcctttcttcccccatacctctcaccagcggtgtcttcagtatgtgaaaacccaattcttcaaccctacaggatccaacaggcaatcgcagcaggcatcttacctttatcacccttgttcctccaacaaccgtcagccctattacagcagttacctttggtgcatttgttggcacaaaacatcaaggcacaacaactacaacaacttgtgctaggaaaccttgctgcctactctcagcaacagcagtttcttccattcaaccaactggctgcattgaactctgctgcttattgcaacaacaact

SEQ ID NO: 4461 - DNA, 365 bp, Zea mays
  Clone ID: LIB3061-005-Q1-K1-C3
tggggtcgtcggaggccgacgaggaccagctcctcaagagcttcctcgcggaggtcggcgaggcctatcgggacaacgaagtgctcaggatacttggttgcttcaagttaaaccccttcgagcatcttaagttgtcttttgattcatcaccagatgaggtgaaaaagcaatataggaagttgtcattgctggtccatcctgataaatgcaagcatcctcaggcacaagaagcttttgcagctctggcgaaagcacaacagctcctgcttgatccacaggaaagaggctacattcttgaccaagttactgctgcaaaagaagaattgagggcaaagcggaaaaaggagctgaagtaagacagtgcg

SEQ ID NO: 4462 - DNA, 396 bp, Zea mays
  Clone ID: LIB3061-005-Q1-K1-C4
ttaaccatgagcaagctttgtttaattattacagtctacgagtacttattcaggcagatcactctgaggttgtgcctactgttgggcgctgccagcttgaccttgttggtagctgccactgccagcaggagtaagcacagccagctcatgcttcctaccgttcttgagctctgcagcttcctccatggagatggcatacgagctggcgatgacggcggccggcaagtcgctcaggacggagttcttcccggcgacgtggctgaccatggtgtcagggttcgtctcgaaggcgatgtactggaagccttctccctgcgccttggtggcgacgaggtagccctggggtacgatgagcagctgccccgcacggagcacgtcgtcgaacaccgtggtccc

SEQ ID NO: 4463 - DNA, 394 bp, Zea mays
  Clone ID: LIB3061-005-Q1-K1-C5
gaccaactagcaacatagaaagcacaatagtgtaccaacaatggcagccaaaatatggcgcttgcttatgctccttggtctttctgcaagtgttgctaccgcaaccattttcccacaatgctcacaagctcctatagctgcccttcttcccccatacctctcaccagcggagtcttcaatgtgtgaaaccccaattgttcaaccctacaggatccaacatgcaatcgcaacacgcatattaccattatcactcttggttctccaacaaccgtcagccctattacagcagttacctttggtacatttggtggcacaaaacatccaggcacaacaactactacaacttgtgctagcaaaccttgctgaatactcttagcaacatcacgttcttcca

SEQ ID NO: 4464 - DNA, 354 bp, Zea mays
  Clone ID: LIB3061-005-Q1-K1-C6
gcagaacgaagggtggaccggcctgttccgcggcaacgccgtcaacgtcctgcgcgtggctccgagcaaggctatcgagcatttcacctatgacacggccaagaagttcctaacccccaagggcgacgagccgcccaagatcccgatccccactccgctggttgccggagctctagccggattcgcctcaaccttgggcacctaccccatggagctgatcaagaccagggtcaccatcgagaaggacgtatacgacaacgtcgagcacgcgttcgtgaagatcctacgcgacgagggcccgtcggagctgtaccgtgggctgacacccagcctgatcggcgtggtgccgtacgc

SEQ ID NO: 4465 - DNA, 398 bp, Zea mays
  Clone ID: LIB3061-005-Q1-K1-B10
gcaggaagaattccaattagccttgtttaagaccaacagaaaggatagcatgtttggggaccgggtatttgacttgtttgacacgaaacacaatggaattctcgagtttgaggaatttgctcgagccctttctgtgttccatccgagtgcaccaatcgatttcaaaattgattttgctttcaaattgtatgatctcaagcaacaaggtttcattgaaaagcaggaggtcaagcaaatggtggtcgcaacacttgctgaatcaggaatgaatctttcagatgatattattgaaagcattattgataagacatttgaaggagcagatacaaagcacgatggcaaaattgataaagaggaatggcgcaaccttgtcttgaggcatccatctcctgtaaaaa

SEQ ID NO: 4466 - DNA, 434 bp, Zea mays
  unsure (1)..(434): unsure at all n locations; Clone ID: LIB3061-004-Q1-K1-H4
caacaatagagcaacaatggcggccaagatattttccatccttatgctccttgctctgtctgcatgtgttgctaacgcgaccatttttcctcaatactcacaagctcctatagctgcccttcttcccccataccttccatcaatgaccgcttcagtttgtgaaaacccagcccttcaaccctacaggctccaacaagcaatcgcaacaagcaacttacctttatcacccctgttctttcaacaatcgccagccctatctttggtgcagtcattggtacaaaccatcagggcacaacagctgcaacaactcgtgctaccagtgatcagccaagtagctctggcaaacctttctccctactctcagcaacaacaattntcttcattcaaccaactgtctacactgaaccctgctgcttatttacaacaacaacaac

SEQ ID NO: 4467 - DNA, 346 bp, Zea mays
  unsure (1)..(346): unsure at all n locations; Clone ID: LIB3061-004-Q1-K1-H6
gagaccaactagcaacatagaaagcacaatagtgtaccaacaatggcagccaagatatgttgcttccttatgctccttggtctttctgcaagtgctgctaccgcaaccattttcccacaatgctcacaagctcctatagcttcctttcttcccccatacctctcaccagcggtgtcttcagtatgtgaaaacccaattcttcaaccctacaggatccaacaggcaatcgcagcaggcatcttacctttatcacccttgttcctncaacaaccgtcagccctattacagcagttacctttggtgcattttgtggcacaaaacatcaaggcacaacaactacaacaac

SEQ ID NO: 4468 - DNA, 241 bp, Zea mays
  Clone ID: LIB3061-004-Q1-K1-H8
aactccaccttatgctataggctccgagctatcataatcactacaacgctcagccatatgcacaacatcaccaacatctcctaatttgtcaataaatcactaccattacaccaacgatctactgcaacattccctagaacagaaaccaaactgctatttccgtgaaacccctgaacaatgattgctacaagacacgagcacatgctacaacgccacctctatgcaaaagtggcgatgatcc

SEQ ID NO: 4469 - DNA, 354 bp, Zea mays
  Clone ID: LIB3061-004-Q1-K1-H9
acggcgcgaattaatcatcccggttcagccctctccaggcgctccaccccgcgtcgcgggggcccgacccgccccccgcctcgtcctgttcgcgtccccctttccccgcgtgtgcgttggccggctggttccggatgagggggttgctgtcggtggaggccgctggcgcggcgtcgtcgtcggcctcggcctcggtgctcaacggcgccgtggactggtggcgcgacgtcaacgagtcgccgctgtggcaggaccgcatcttccacgcgctcgtcgtgctctacggcatcgtctccgacgacgcgctggtccaattgatcagaatcgagtgcagggtgccagaatatgggtgga

SEQ ID NO: 4470 - DNA, 364 bp, Zea mays
  unsure (1)..(364): unsure at all n locations; Clone ID: LIB3061-005-Q1-K1-A1
ggtcttcagaccattagctttatctactccagagcgcagaagaacccgatcgacaccatgagggtgttgctcgttgccctcgctctcctggctctcgctgcgagcgccacctccacgcatacaagcggcggctgcggctgccagccaccgccgccggttcatctaccgccgccggtgcatctgccacctccggttcacctgccacctccggtgcatctcccaccgccggtccacctgccgccgccggtccacctgccaccgncggtccatgtgccgncgccggttcatctgccgncgncaccatgccactaccctactcaaccgncccggcctcagcctcatccccagccacacccatgcccgt

SEQ ID NO: 4471 - DNA, 298 bp, Zea mays
  Clone ID: LIB3061-005-Q1-K1-A10
gagaccaacaagcaacatagaaagtggaatccagtagcaacaacagagcaacaatggcgaccaagatattttccctccttatgctccttgctctttctgcatgtgttgctaacgcgacaattttccctcaatgctcacaagctcctatagcttcccttcttcccccataccttccatcaatgatagcttcagtatgtgaaaacccagctcttcagccctataggctccaacaagcaatcgcagcaagcaacatacctttatcacccttgttgtttcaacaatcgccagccctatcttt

SEQ ID NO: 4472 - DNA, 348 bp, Zea mays
  Clone ID: LIB3061-005-Q1-K1-A11
acgcaacacgcagcatagaaagtggaatccagtagcaacaatagagcaacaatggcgaccaagatactttccctccttatgctccttgctctttctgcatgtgttgctaacgcgacaattttccctcaatgctcacaagctcctatagcttcccttcttcccccataccttccatcaatgatagcttcagtatgtgaaaacccagctcttcaaccctataggctccaacaagcaatcgcagcaagcaacatacctttatcacccttgtttcaacaatcgccagccctatctttggtgcagtcattggtacaaaccatcaaagcacagcagctgcagcaactcgtgcta

SEQ ID NO: 4473 - DNA, 429 bp, Zea mays
  Clone ID: LIB3061-005-Q1-K1-A12
gtcgtgagcaaagctccgtacagccccgccaagtcgttcgatggcatggagtcagcgggaatggagatgactgcggacggcaagcagggcgcaaggcccagtatcttgaaaggttggggagccgcgaagtctgaagtctgaacggtgaaaggctggctgacgctgtggggaggaaggggcagggacgtgctgttggttttattatattggtatttatgttattatatatgtggtagcagcagcgtggaaccgcattaataatggggaccttaaccacctctattttactgtcgttgctttgttgtcgcgtgctaggttgtattctgaagtggattcctcaataccgcataccgtactgctacgcctgttgactttggtacaattgattgatcgttggccacttggtatggaattgccgaccatggtttc

SEQ ID NO: 4474 - DNA, 296 bp, Zea mays
  unsure (1)..(296): unsure at all n locations; Clone ID: LIB3061-005-Q1-K1-A2
tccttgcgcttcttgccctttttgtgagcgcaacanatgcgttcattattccacaatgctcacttgctcctagtgccattataccacagttcctccgaccagttacttcaatgggcttcgaacacctagctgtgcaagcctacaggctacaacaagcgcttgcggcgagcgtcttacaacaaccaattaaccaattgcaacaacaatccttggcacatctaaccatacaaaccatcgcaacacaacagcaacaacagttcctaccagcactgagccaactagatgtggtgaaccct

SEQ ID NO: 4475 - DNA, 413 bp, Zea mays
  unsure (1)..(413): unsure at all n locations; Clone ID: LIB3061-005-Q1-K1-A3
ctaggtgcaacacttgtactcccagacatcagaggaaatgaattaggaaataagcgagaattccaagacatttacaatgtggataagttcgtgaggagcctggatggtgttgtcgaagtaatagaggatatacctgatgaagtgagtgctaagaagccagcagtcatcagagtaccgaaccgtgtgactgaaagcttcatcacaggcaccatccagcccatcttccaaaaaaacaagtacttaagactagcggtcattttctcttccgtaagtttaaggccaaaggagacgaacaacaaggacatggacgcaactgcttgccttgcgatgttcggtggcctcgagctgaagcacgaatattctgaggtggccagaanaatgcntgataggcttcaagaattaagcaagaagtc

SEQ ID NO: 4476 - DNA, 400 bp, Zea mays
  unsure (1)..(400): unsure at all n locations; Clone ID: LIB3061-005-Q1-K1-A4
cagctcttcaaccatataggcttcaacaggcaatcgcagcaggcaccatacctttagcgggcttgttgtttcaacaatcgccagccctatctttggtgcagtcattggtacaaaccatcaggtcacaacagctgcagcaactcgtgctacctctgatcaaccaagtagctctggcaaacctttctccctactctcagcaacaacaatttcttccattcaaccaactgtctacactgaaccctgctgcttatttgcagcaacaactattaccatttagccagctagctactgcctactctcagcaacaacaacttcttccatttaaccaattggccgcactgaaccccgctgcttatttgcagcagcanatactactaccatntagccagctagctgcagc

SEQ ID NO: 4477 - DNA, 417 bp, Zea mays
  Clone ID: LIB3061-005-Q1-K1-A5
atctattaagaccatcctcgattataacttccattaatggagagcccgatccacacggtgagggtttctatcaaggccatcaatctgctaaaaacagataaaaacaatgaatcaactcattcacacaaactgataagagtcacaatcatcatagtcaagagatcactagtgccttgctgatctggatccattaacgctcacagacagtattacaggattctcttcggatcccctaatcatttgtacaaaagcaataacagttcatttgacagagtccaccctgacgaggttcctggtacaccaaggaaggaacttagcatttcagctgttcagatgcttcatttatactaccaaacgaacaattcacaatggccacattataacaagctacttttccatctaactctccaagaaaca

SEQ ID NO: 4478 - DNA, 371 bp, Zea mays
  Clone ID: LIB3061-005-Q1-K1-A6
caggcatgttacctttatcacccttgttcctccaacaaccgacagccctattacaggggttacctttggtgcatttgctggcacaaaacatcaaggcacaacaactacaacaacttgtgctaggaaaccttgctgcctactctcagcaacagcagtttcttacattcaaccaactggctgcattgaactctgctgcttatttgcaacaacaactaccattcagtcagctagctgctgcctacccccagcaatgtcttccattcaaccaactggcagcattgaactctgctgcttatttacaacagcaacagctaccaccattcagacagctagctgatgtgagccctgttgccttcttgacacaacaacag

SEQ ID NO: 4479 - DNA, 425 bp, Zea mays
  Clone ID: LIB3061-005-Q1-K1-A7
ccaactagcaacatagaaagcacaatagtgtaccaacaatggcagccaaaatgattgggcctccttatgctccttggtctttctgcaagtgctgctacggcgaccattttcccgcaatgctcgcaagctcctatagcttcccttcttcccccgtacctctcaccagcggtgtcttcggtatgtgaaaacccaattcttcaaccctacaggatccaacaggcaatcacagctggcatcttacctttatcacccttgttcctccaacaatcatcagccctattacatcagttacctttggtgcatttattggcacaaaacatcagggcacaacaactacaacaacttgtgctagcaaaccttgctgcctactctcagcaacagcagtttcttccattcaaccaactagctgcattgaactctgcttc

SEQ ID NO: 4480 - DNA, 429 bp, Zea mays
  unsure (1)..(429): unsure at all n locations; Clone ID: LIB3061-005-Q1-K1-A8
agcacagcaaggctcgctcgctcgcacacaccaagcaagcaggccgcagcccgcaggcgtctcacaggctctccgccgttccccaacgcgctttccccggcgccatggccaggctggcgctagcgctcctcctgctgctggccgtggcggcatccgcgtgggccggcgccggcgcgagccacctcgatctgggcctgggcttcctctcctccggggaccgccggcgggaatgccgcggcacggtggccgagtgcctggacgaggaggagggcctggacctgggggcggggcccgcgtccgtggagtcccaccgccgcgcgctctacggcggcggcggcggcggcgggtacatcagctacggcgcgctgcggcgggacaacgtgccctggctccgncgcggcgccagctactacaactggcggcccgggg

SEQ ID NO: 4481 - DNA, 328 bp, Zea mays
  unsure (1)..(328): unsure at all n locations; Clone ID: LIB3061-005-Q1-K1-A9
atcgggatgtcaagccagaaaatctactgcttacttctgatgggcacatcaagattgctgactttggtagtgtgaagcctacaagggatactcctatcaaagttctcccaaattcaactactgaaagggcctgtacatttgttggaaccgctgcatatgtaccacctgaggtcctgaactctgccccagcaacctttggaaatgatttatgggcattgggatgcacactgtaccaaatgctntctggctcttcgccatttaaagatgctagtgaggtggtaaatttccagagaatcattgcaagggacctcaaatttccagagtattt

SEQ ID NO: 4482 - DNA, 431 bp, Zea mays
  unsure (1)..(431): unsure at all n locations; Clone ID: LIB3061-005-Q1-K1-B1
caacaagcatcatacaaagtggaattcagtatcaacaatagagcaacaatggcgaggaagatactttccctacttatgctccttgctctttctgcatgtgttgctaacgcgacaattttccctcaatgctcacaagctcctatagcttcccttcttcccccataccttacatcaatgatagcttcagtatgtgaaaacccagctcttcaaccctataggctccaacaagcaatcgcagcaagcaacatacctttatcacccttggttcaacaatcgccagccctatctttggagcagtcattggtacaaaccatcaatgcacagcagctgcagcaactagtgctacctgtgatcaaccaagtagctctggcaaacctttctccctactatgagcaacaacaatttcttncattcaaccaactatctacact

SEQ ID NO: 4483 - DNA, 122 bp, Zea mays
  Clone ID: LIB3061-004-Q1-K1-H2
gcgtcctgagaccaactagcaacatagaaagcacaatagtgtaccaacaatggcagccaagatatgttgcttccttaagctgcctgggccttcttcaagttcctgttaccgcaaccattttc

SEQ ID NO: 4484 - DNA, 387 bp, Zea mays
  Clone ID: LIB3061-004-Q1-K1-E6
cttagagatgcaaagttgcaattcaaagatattgatgaggttattcttgttggtggctcaactagaataccagctgttcaggagcttgtcaagaaaatgacaggaaaggaccccaatgtgacagtcaaccctgatgaggttgttgcacttggagcagctgtgcaggctggagtactgtctggcgatgttagcgacattgtacttcttgatgtgacccccttgtccctaggtttggagacactgggtggtgtcatgacccaaattatcccaacgaatacaaccttggctaacttaaaatccgaaggtttcttaacagcaacttattgccaaactaatgttgaaatcaatggtcttcaaggagaaagaaaagttggtagaaaccaccag

SEQ ID NO: 4485 - DNA, 437 bp, Zea mays
  Clone ID: LIB3061-004-Q1-K1-E8
ctccatgaaggagatcaaatagttgtttgtggcatgcagggacccattgtgacaactgtcagggctttgttaacaccacacccaatgagagagcttcgagttaagggcacctacatacatcataaggagatcagagctgcacaaggagtcaaaatatctgctcagggtctcgaacatgcaattgcagggacagccctttacgtgttaggacctgatgatgatttagacaaactgaatgaagctgttatggaagagatgacacgggttaggagccggattgacaggagtggtgaaggtgtctatgtacaggcatctacccttgggtctttggaagctctcactgagttcttgaagagccctgctgtgaatattcccttctgtgatttcagtatagggccagtgcataagaaggatgttatgaaggctaatgtcatgct

SEQ ID NO: 4486 - DNA, 340 bp, Zea mays
  Clone ID: LIB3061-004-Q1-K1-E9
gccggagtacgcgctggcggggggcgtgagcggatggaacgcggcggtgctggaggcggccatggcgttcgggctcatgtacgcctactttgcgacggtgatggacaaagcgcggagggtccgcgccggcgccggagcgctggcggcgccgctcgccgtggggctcctggcgggggctaacgtgctggcctgcggcgcgctggagggcgccgtgatgaatccggcgcgcgcgttcgggcccgccgtcgtgggctcccgtcgctggagacaccaatgggtgtactgggtggggcccatggtcggcgccggcctctccggcgtcgtctacgagcacctcgtc

SEQ ID NO: 4487 - DNA, 367 bp, Zea mays
  unsure (1)..(367): unsure at all n locations; Clone ID: LIB3061-004-Q1-K1-F10
cagtagtgtaccaacaatggcagccaaaatattttgcctccttatgctccttggtctggctggagtgctgctacggcgaccattttcccgcaatgctcgcaagctcctatagcttcccttcttcccccgtacctctcaccagcggtgtcttcggtatgtgaaaaccccaattcttcaaccctacaggatccaacaggcaatcgcagctggcatcttacctttatcacccttgttcctccaacaatcatcagccctattacaacagttacctttggtgcanttattggcacanaacatcagggcacaacaactacaacaacttgtgctagcaaaccttgctgcctactctcagcaacagcagtttctt

SEQ ID NO: 4488 - DNA, 369 bp, Zea mays
  Clone ID: LIB3061-004-Q1-K1-F11
ccaaaccaccaatccggttgcattctttgggtttgctcacagcgcacacaaaggcatgttactgctgggaatggtggctggcactattagcgtctccggctcttgagtgatctccaagggaagtgaagtgatgggggagtgcgaggacggcaaggagtacaggtgctgggaggagctgctgccggacgcgctgggcctcatcttccgcaacctgccgctgcaggaggtgctcaccgtcctgccgcgggtgtgcaagtcctgggggcggatggtggccggcccctactgctggcaggagatcgacatcgaggagtggagccagcagcagggcaagcccgagcagatcgcccgcatggtcgagctactcgt

SEQ ID NO: 4489 - DNA, 321 bp, Zea mays
  Clone ID: LIB3061-004-Q1-K1-F12
atggacgcgttcttctcggcctcctccgcgtcggcgccctacggctacggcgccggcggatggagctacgactcgctcaagaacttccgccagatcacccctgccgtccagacccgcgcaattagcatttcgtatttttttaaaaatatatatcagtcgctggtttcgtgcgttccagaaattctcctgcgggttgcgtgtagctgatgcgtaattccctgacgtaatctatgattcgcgcgcgtcgtgttccttgcatttagaactgcaactgtgcggatgccaccgattcgattgattcgtcactttaagaacatgatc

SEQ ID NO: 4490 - DNA, 343 bp, Zea mays
  Clone ID: LIB3061-004-Q1-K1-F2
aacaacaagaagttcatgttcaacaacatcaacaacaaccgcagcaccaacaacaacagcaacaacaacagcaccaacaacaacatcaatgtgaaggccaacaacaacatcaccaacaatcacaaggccatgtgcaacaacacgaacagagccatgagcaacaccaaggacagagccatgagcaacaacatcaacaacaattccagggtcatgacaagcagcaacaaccacaacagcctcagcaatatcagcagggccaggaaaaatcacaacagcaacaatgtcattgccaggagcagcaacagactacaaggtgcagctataactactatagcagtagctc

SEQ ID NO: 4491 - DNA, 408 bp, Zea mays
  unsure (1)..(408): unsure at all n locations; Clone ID: LIB3061-004-Q1-K1-F4
atttgcagcaacaactattaccattcagccagctagctactgcctactctcatcaacagcaacgtcttccatttaaccaattggccgcactgaacctcgctgcttatttgcagcagcaaatattactaccatttagccagctagctgcagcaagccgtgcttccttcttgacacagcaacagttgctgcctttctaccagcagtttgcggctaaccccgcaaccctcttacaactacaacaattgttgccctttgtccaacttgctttgacanacccagcagncttctaccaacacacatcattggggggggcctcttttaaaatggttaataagtggaaatcaataataaaagtttttggatgatgtatgtggccaaccagaaattagagttacatttccagattct

SEQ ID NO: 4492 - DNA, 199 bp, Zea mays
  Clone ID: LIB3061-004-Q1-K1-F6
gtcgccttcttacaacaacagcaattgctgccatttagccaactcgctttgacgaatcgctaccaccttattgcatcagcccaccattggtggtaccatcttctagattttttatgctttatactgtaataataaatttctcatactgatatgtgcaacttctcagtaataaaagattagagatctatattttaagttc

SEQ ID NO: 4493 - DNA, 435 bp, Zea mays
  Clone ID: LIB3061-004-Q1-K1-F8
actagccatggtgaaccctgccgcctacctacaacagcaacaactgctttcatctagcccgctcgctgtggccaatgcacctacatacctgcaacaagaattgttgcaacagattgtaccagctctaactcagctagctgtggcaaaccctgttgcctacttgcaacagctgcttccattcaaccaactaactatgtcgaactctgttgcgtacctacaacagcgacaacagttacttaatccattggcagtggctaacccattggtcgctgccttcctacagcaggcacaaatggctgcaatccaaccggttcttttggatgaatccggccttggcaggaacaacccaatggttgaggttgccatcttttagattacatatgagatgtactcgataatggtgccctcataccggcatgtgtttcctagaaataa

SEQ ID NO: 4494 - DNA, 237 bp, Zea mays
  Clone ID: LIB3061-004-Q1-K1-G10
aaagcaagatcatttacttttcttttaaaaaacctttcatttacctattttattaattatttccttccccttaaccttatccttccttccaaaattccccctgccatttgattcaaccccccttaaccaaatccttatcacccgaatttaacaataacttttttttttcttccatgcttaattccaaaaccattgtttaaccggtgtcccttttaaagaatccaagctaactacccc

SEQ ID NO: 4495 - DNA, 191 bp, Zea mays
  Clone ID: LIB3061-004-Q1-K1-G11
tcagtgactgactactgtaataccagagatcgaacaacttggtcctgcaggtcaagaggagagttttgagcatttgggggccgggggcaagagagagagagagagccatggcggcagaccagcagccgcaattgcaggaggagatgaacgattctgccatacgttgcatcaatgaccgtttaagtttgcga

SEQ ID NO: 4496 - DNA, 373 bp, Zea mays
  unsure (1)..(373): unsure at all n locations; Clone ID: LIB3061-004-Q1-K1-G2
cgctcttcacctcgggtttcttgacctcggccttaggcacggtgaccgtgagcacgcggttcgccagcccggcttccacctgctccgtcctggcgttctccgggagccgcaagcgcctcgtgaacgggacgctgctgcgctcgacgcggtgccacctctcgttcttgtcctnctncttgctgtgctgcccgttgatgaccagcaagttgccgtcctncacctcgaccttgacctnctncttctttacgcangggaggtcggccttgaacacgtgcgcctcgggcgtctccttccagtcgatgcccgcgatggcgaaggcggcggtgtcacggtcgcctgacgacgcgacgacggacgggacgagggaccggaa

SEQ ID NO: 4497 - DNA, 359 bp, Zea mays
  unsure (1)..(359): unsure at all n locations; Clone ID: LIB3061-004-Q1-K1-G4
gaccaactagcaacatagaaagcacattagtgtaccaacaatggcagccaaaatatggtgctgccttatgctccttggtctttctgcaagtgttgctaccgcaaccattttcccacaatgctcacaagctcctatagcttcccttcttcccccatacctctcaccagcggtgtcttcaatgtgtgaaaccccaattgttcaaccctacaggatccaacaggcaatcgcaacaggcatcttaccattatcaccctngttcctncaacaaccgtcagccctattacagcagttacctttggtccatttggtggcccaaaccatcagggcccaacacctccaacacctgggcctaccaaacc

SEQ ID NO: 4498 - DNA, 373 bp, Zea mays
  Clone ID: LIB3061-004-Q1-K1-G6
caacagttgctgcaacagattgtaccagctctgactcagctagctgtggcaaaccctgctgcctacttgcaacagctgcttccattcaaccaactgactgtgtcgaactctgctgcgtacctacaacagcgacaacagttacttaatccactagcggtggctaacccattggtcgctgccttcctacagcagcaacaattgctgccatacaaccagttctctttgatgaaccctgccttgttgtggcagcaacccatcgttggaggtgccatcttttagattacatatgagatgtactcgataatggtgccctcatagcggcatgtgtttcctagaaataatcaatatattgattgagatttatctcgatata

SEQ ID NO: 4499 - DNA, 122 bp, Zea mays
  unsure (1)..(122): unsure at all n locations; Clone ID: LIB3061-004-Q1-K1-G9
gatgcaaaccatggacatggctttggcgtctaaagcctcccctccgccatggaatgcgaccgncgccgagcagccaattccaaagcgtgacaaagccgctgcaaatgattcaacatacctta

SEQ ID NO: 4500 - DNA, 357 bp, Zea mays
  Clone ID: LIB3061-004-Q1-K1-H10
atgtataccaactaccaacatacatagtgaagtacactagcaacatcttagcaccaatggcagccaagatttttgcgctccttgccctccttgctctttcagcaagtgttgctaccgcgactattattccacaatgctcacaacaatacctctctccagtgatagccgcgagatttgaatacccatctatacaatcctacaggctacaagaggccatcacagcaagcatcttacggtcgttagcattgaccgtccaacaaccatatgccctattgcaacaaccatccttagtgaatctgtatctccaaagaatcacagcacaacaactacaacaacggttgcttccaacaattaatc

SEQ ID NO: 4501 - DNA, 399 bp, Zea mays
  Clone ID: LIB3061-004-Q1-K1-E4
caccaagcgaagcacattagcaacaacctaacaacaatggctaccaagatattatcccgccttgcgcttcttgcgctttttgcgagcgcaacaaatgcgttcattattccacaatgctcacttgctccaagttccattattacacagttcctcccaccagttacttcaatgggcttcgaacacccagctgtgcaagcctataggctacaacaagcaattgcggcgagcgtcttacaacaaccaatttcccagttgcaacaacaatccttggcacatctaacaatacaaaccatcgcaacgcaacagcaccaccatttcctaccagaattgacccacttacccttggggaaccttgccgctaactggcacaagaagtggctggcttaaacccaattggtt

SEQ ID NO: 4502 - DNA, 263 bp, Zea mays
  Clone ID: LIB3061-004-Q1-K1-H11
gagacgcacacggtccatagaaagtgttatgcaagggtgctatcagtgcaacaacgtcgaacgggatatgtgctatgagtacgctaattgctatgtctgcatgtgttgctaaggcgacaatgatatctgaatggtcactatcaccgatagctaacgttctactgtcataactgcgatgaacgagagcatcattatgaggcaaccgagatgttaagacgtatcagatctaacaagctgccgtagcgggtagcatagcttcataa

SEQ ID NO: 4503 - DNA, 356 bp, Zea mays
  Clone ID: LIB3061-004-Q1-K1-C12
cggacgcgtgggcggacgcgtggggtcacaaccctcgacctgccccctactccaactagtggaggcgccgatccatcaggttctgatcgattcttctgccccgatccgcagcggcaagcggagatgaactgcgagacctgtcagctgaaagaactggagctggaactgacggagatcagggatgttctgcgctgtattttgcacaccatattcttgcatagaaccctcagcctggttcgccccaaagatgttgactgtgatttcctcgatattacttatgtacaatgtggtctaccggaactagaaacggaagttgacgaaaagatagaccagttcagtgcatgggtggagaaaca

SEQ ID NO: 4504 - DNA, 439 bp, Zea mays
  Clone ID: LIB3061-004-Q1-K1-C2
gttgaaggcttgggctgcatcagaaggaatccagtacgaggacttgagacagctctgtgctgatcctagagcaacagctgctgtcctggctgatatggattccattgcgaaggaagcacagctgagaggtttcgagtttgctaaagcggttactcttgttgctgagccgttcacattggataatggccttctcaccccaacattcaaggtcaagaggccgcaagccaaagcatactttgcaaaagagatctcagacatgtatgcacggttgctagagacagagttagctaggtcgaaattgtaacttgtgcggtatcaggaaaaaggcccatcatacaagcgtacaggagattggattctgcattttttatttccactcacgaaataagtagtaaaatcttttactgatacgggaaatacggatcatgccatgctccgg

SEQ ID NO: 4505 - DNA, 328 bp, Zea mays
  Clone ID: LIB3061-004-Q1-K1-C4
gcagcattgaactctcctgcttatttacagcagcaacaactactaccattcagccagcgagctggtgtgagccctgctaccttcttgatacaaccacagttgttgccgttctaccagcacgctgcgcctaacgctggcaccctcttacaactgcaacaattgctgccattcaaccaacttgctttgacaaacccagcagcgttctaccaacaacccatcattggtggtgccctcttttagatttcttatgagttatagttcaataataaagttttttgtctgatgtttgtggcttcccagaaataagaaggtacatttctagattctt

SEQ ID NO: 4506 - DNA, 355 bp, Zea mays
  unsure (1)..(355): unsure at all n locations; Clone ID: LIB3061-004-Q1-K1-C6
gacgccgtcatggagccggttgttgctggcagcaacacggtagtagctgttgcgcaaggtgagttgcaaacaatgaacgtgcagcagcccgctgatgttgccggacccagcgagggggtggcggcgatctccaaaggggggaaggtagggccgaaccggtgcagcgcctgcacgaagagggttggacttactggattcaactgccggtgtgggaacttgtactgcgcacttgaccgctactacgacaagcacgactgcgagttcgactaccggactgctgtcagtgacgccattgccaaggctaatccngcggtgaaggcagacaagctcgacatgatctatggggggttcccta

SEQ ID NO: 4507 - DNA, 430 bp, Zea mays
  Clone ID: LIB3061-004-Q1-K1-C8
attttgagcattcagaaacacaccaagcgaagctacctagcaacgacttaacaacaatggctaccaagatattagccctccttgcgcttcttgccctttttgtgagcgcaacaaatgcgttcattattccacaatgctcacttgctcctagtgccattataccacagttcctccgaccagttacttcaatgggcttcgaacacctagctgtgcaagcctacaggctacaacaagcgcttgcggcgagcgtcttacaacaaccaattaaccaattgcaacaacaatccttggcacatctaaccatacaaaccatcgcaacacaacagcaacaacagttcctaccagcactgagccaactagatgtggtgaaccctgtcgcctacttgcaacagcaggtgcttgcatccaacccacttgctctggcaaacgt

SEQ ID NO: 4508 - DNA, 420 bp, Zea mays
  Clone ID: LIB3061-004-Q1-K1-C9
tgaaaatccaattcttctaccctacaggatccaacaggcaatcgcagcaggcaggttagctttatcacccttgttcctccaacaatcatcagccctattacagcagttacctttggtgcatttattggcacaaaacatcagggcacaacaactacaacaactcgtgctagcaaaccttgctgcctactctcagcaacagcagttacctttggtgcatttgttggcacaaaacatcagggcacaacaactacaacaactcgtgctagcaaaccttgctgcctactctcagcaacaacagtttctgccattcaaccaactagctgcattgaactctgctgcttatttgcagcaccaacaactactaccattcagccagctagctgctgcctacccccggcaatttcttccattcaaccaact

SEQ ID NO: 4509 - DNA, 287 bp, Zea mays
  Clone ID: LIB3061-004-Q1-K1-D10
ggcgtcggcatcgcacagtgacacggccatcggcactcaactcactccacaggcttcggttcatgatcatcatcatcaccgtcgtcatagccatggccgcgcgtcaccacgccccgcacctactcgcgatgctcatgctctcagcggcggccggcttcttctccgtggcctccgacgagcgcgacctcgacgcagccaacccgctcgcggtcgcggtcgcggagcccgacgctggccgaaacaacgacaacaacaacccttccgagcctaactactactgctaccat

SEQ ID NO: 4510 - DNA, 397 bp, Zea mays
  Clone ID: LIB3061-004-Q1-K1-D11
ctcacttgctcctagtgccattattccacagttcctcccaccagttacttcaatgggcgtcgaacatccagccgtgcaagcctacaggctacaactagcgcttgcggcgagcgccttacaacaaccaattgcccaattgcaacaacaatccttggcacatctaaccctacaaaccactgcaacgcaacaacaacaacaacaacagtttctgccatcactgagccacctagccgtggtgaaccctgtcacctacttgcaacagcagctgcttgcatccaacccacttgctctggcgaacgtagctgcataccagcaacaacaacagctgcaacagtttatgccagtgctcagtcaactagccatggtgaaccctgtccggttacctacaactactttc

SEQ ID NO: 4511 - DNA, 384 bp, Zea mays
  Clone ID: LIB3061-004-Q1-K1-D12
gcagcatagaaagcacaatagtgtaccaacaatggcagccaaaatattttgcttccttgtgctccttggtctttctgcaagtgctgctaccgcaaccattttcccacaatgctcacaagctcctatagcttcctttcttcccccatacctctcaccagcggtgtcttcagtatgtgaaaacccaattcttcaaccctacaggatccaacaggcaatcgcagcaagcatcttacctttatcacccttgttccttcaacaaccggcaaccctattacagcagttacctttggtgcatttgttggcacaaaacatcaaggcacaacaacttcaacaacttgggctaagaaaccttgctggctactctcagcaacagcagtttctttc

SEQ ID NO: 4512 - DNA, 423 bp, Zea mays
  Clone ID: LIB3061-004-Q1-K1-D2
gcgagcctcgtaccggcgcagccatggcggaggagcccgccgttgtcgtggcctcctgcagctgacgaggttgacctcgggaacctcatggcgtacgatccgtcgcatcacgtcgccaccgcctccagggaggagctgagacaggagtgcctgcggaagggtacagagctggcgcaggcggtggccgacgtcctcttcgcgctgccgcccaacgaggaccgcgacggccccattatccacctcccgccgcccaccttcagactcccgcgggagaagcatctacccaagcccaagccaccgaccaagtgggaagctgttgcaaaggcgaaaggaattaccaagcgcaaaaagaacaagcgtgagtgggatgagcaaactcaatcctggaagcggactcatggctatgaccgtgttaatgatgac

SEQ ID NO: 4513 - DNA, 292 bp, Zea mays
  Clone ID: LIB3061-004-Q1-K1-D4
caactagcaacatagaaagcacaatagtgtaccaacaatggcagccaaaatattttgcgtccggatgctccttggtctttctgcaagtgctgctacggcgaccattttcccacaatgctcacaagctcctatagcttcccttcttcccccgtacctctcaccagcggtgtcttcggtatgtgaaaacccaattcttcaaccctataggatccaacaggcaatcgcagctggcatcttacctttatcacccttgttcctccaacaatcatcagccctattacagcagttacct

SEQ ID NO: 4514 - DNA, 373 bp, Zea mays
  Clone ID: LIB3061-004-Q1-K1-D6
aaaaaaaaaaaaaaaaaaaaaaaaaaaataaaaaaaaaaaaaaaaaaaaaaaaaagaaagaaaaaaaaaaaatattaaaatatattataataaatttaaatatataaaaataataataaaaaaaaacattttaaaaaaataataaaaaagctactataacttactttattaaaacatacatataaccaaaaatgtaataaaatattagaaaacccaattcttaaaaaaatacaagatccaacattttataagaatcacgcattttacctttatgacacttgttcctccaacaacttttaagcctattacagttagttcctttggtgcattttttaaaacaccatattcagggaaaacttgttttaccaccttt

SEQ ID NO: 4515 - DNA, 402 bp, Zea mays
  Clone ID: LIB3061-004-Q1-K1-D8
attcgtttggagcaaactgctccggtcagcttggccttggggattcagaagaccggttcaagccatgtgttattaggtctctacaaggcatcagaatcacacaagctgcagttggttcgagatgcacaatgcttgtgagtgacacaggaagcgtctactcatttgggaaggaggatttcagggtcgcagaactagttgacggtgctcattttcagatcacaactcctaggattgaggagtcactgaagggtgtgtttgtagttcaagcagccatagggggttacttctctgcagttctgtccagagagggtcgagtgtacaccttctcatggggcaaagccgagaggcttggccacagttcggatccttcagatgtcgagcctcgtcttctccctggactcg

SEQ ID NO: 4516 - DNA, 295 bp, Zea mays
  Clone ID: LIB3061-004-Q1-K1-D9
gcaacatagaaagtggaatccagtagcaacaatagagcaacaatggcgaccaagatactgtccctccttatgctccttgctctttctgcatgtgttgctaacgcgacaattttccctcaatgctcacaagctcctatagcttcccttcttcccccataccttccatcaatgatagcttcagtatgtgaaaacccagctcttcaaccctataggctccaacaagcaatcgcagcaagcaacatacctttatcacccttgtttcaacaatcgccagccctatctttggtgcagtcat

SEQ ID NO: 4517 - DNA, 293 bp, Zea mays
  Clone ID: LIB3061-004-Q1-K1-E10
ctcaccagcggtgtcttcggtatgtgataacccaattcttcaaccctacaggatccaggacgcgatcgcagctggcatcttacctttatcacccttgttcctccaacaatcatcagccctattacaacagttacctttggtgcatttattggcacaaaacatcagggcacaacaactacaacaacttgtgctagcaaaccttgctgcctactctcagcaacagcagattcttccattcaaccaactaggttcattgaactctgcttcttatttgcaacaacgacaactaccat

SEQ ID NO: 4518 - DNA, 370 bp, Zea mays
  Clone ID: LIB3061-004-Q1-K1-E11
ccctgcgtttccttacttcctggtaaagaaagaagcgaagccaggtacttggtgttgagcgcggagagaggagaggcgcagagcatcgacgatggcgagcggcagcatgaagagggagatcagcgagacccacgacaccctccgcttcggcctcaatgccggcgtcaaggccgacctcgcgccgccgcacccgctccagtccagcatccaatcggaggccaagttctgggcggacaagaagaagtttgggacagaggccatctacggatccgccttgaacatccgcaaggatctcgatgcccaaatcctctcaaggttccaaaggccccctggtgctttgccatcatctctgcttggatatgaggcactg

SEQ ID NO: 4519 - DNA, 301 bp, Zea mays
  Clone ID: LIB3061-004-Q1-K1-E2
cccagctcttcagccctataggctccaacaagcaatcgcagcaagcaacatacctttatgcacccttgttgtttcaacaatcgccagccctatctttggtgcagtcattggtacaaaccatcagggcacagcagctgcagcaactcgtgctacctgtgatcaaccaagtagctctggcaaacctttctccctactctcagcaacaacaatttcttccattcaaccaactgtctacactgaaccctgctgcttatttgcagcaacaactattaccattcagccagctagctactggctactc

SEQ ID NO: 4520 - DNA, 420 bp, Zea mays
  Clone ID: LIB3061-004-Q1-K1-C11
cccacgcgtccgtgcgtagagaggatcgtcgaacagaacagcatgaagatgggcatcggtctcgtcgtgtgcctggctctgtcagctgccagcgcctctgcaatgcagatgccctgcccctgcgcggggctgcagggcttgtacggcgctggcgccggcctgacgacgatgatgggcgccggcgggctgtacccctacgcggagtacctgaggcagccgcagtgcagcccgctggcggcggcgccctactacgccgggtgtgggcagccgagcgccatgttccagccgctccggcaacagtgctgccagcagcagatgaggatgatggacgtgcagtccgtcgcgcagcagctgcagatgatgatgcagcttgagcgtgccgctgccgtcagcagcagcctgtacgagccagctctgatg

SEQ ID NO: 4521 - DNA, 392 bp, Zea mays
  Clone ID: LIB3061-003-Q1-K1-H12
caacaaatgcgttcattattccacagtgctcacttgctcctagtgccattattccacagttcctcccaccagttgcttcaatgggcttcgaacatccagccgtgcaagcctacaggctacaactagcgcttgcggcgagcgccttacaacaaccaattgcccaattgcaacaacaatccttggcacatctaaccctacaaaccattgcaacgcaacaacaacaacaacaacagtttctgccatcactgagccacctagccgtggtgaaccctgtcacctacttgcaacagcagctgcttgcatccaacccacttgctctggcgaacgtagctgcataccagcaacaacaacagctgcaacagtttatgccagtgctcagtcaactagccatg

SEQ ID NO: 4522 - DNA, 429 bp, Zea mays
  unsure (1)..(429): unsure at all n locations; Clone ID: LIB3061-003-Q1-K1-H2
acgcaacaagctgccccgcagcaacgaacactaaccttggcagaacgaagctgaagtagttcgttgggaacccagtatggcaaacgcgccgaggatcctggccctcggcctgctgctagcgctcctgtgcgctgccgncggcccggccgncgcgcagaactgcggctgccagcctaacttctgctgcagcaagttcggctactggcggacgaccgacgactactgcggcgacgggtgccagtcgggcccgtgccgctcgggcggcggcggcggcggcggcggaggcggaggcagtggcggtgcgaacgtggctaacgtggtcagcgacgcgttcttcaacggcatcaagaaccaggccgggagcgggtgcgagggcaagaacttctacacccggagcgcgttcctgagcgccgtcaacaagtacccggg

SEQ ID NO: 4523 - DNA, 302 bp, Zea mays
  unsure (1)..(302): unsure at all n locations; Clone ID: LIB3061-003-Q1-K1-H3
gcaacatagaaagtggaatccagtagcaacaatagagcaacaatggcgaccaagatattgtccctccttatgctccttgctctntctacatgtgttgctaacgcgacaattttccctcaatgctcacaagctcctatagcttcccttcttcccccataccttccatcaattatagcttcaatatgtgaaaacccagctcttcaaccatataggcttcaacaagcaatcgcagcaagcaacatacctttatcgcccttgttgtttcaacaatcgccagccctatctttggtgcagtcattggt

SEQ ID NO: 4524 - DNA, 306 bp, Zea mays
  Clone ID: LIB3061-003-Q1-K1-H4
caacatgtgtgaaagagttgctctatctttcttgaatgaatatgtgttttgcatgtttttctgagactgtcttgtcaattcgtttgaagatctgtctatttagtatctacctaaaggataatttggttatctctagagttcatactattcctgaatttcaatcatgcacagacccaacaggggcaaacagtccatgattatttctcaatgtgtgatgtctgagatcaatacattggaaaaacataaaccagattcattgcttgtaaattttaacaaaatgtttgggagaattaacgtgtttttgga

SEQ ID NO: 4525 - DNA, 294 bp, Zea mays
  unsure (1)..(294): unsure at all n locations; Clone ID: LIB3061-003-Q1-K1-H5
attgagaccaactagcaacatagaaagcacaatagtgtaccaacaatggcagccaaaagattttgcttccttatgctccttggtctttctgcaagtgttgctaccgcaaccattttcccacaatgctcacaagctcctatagcttcccttcttcccccatacctctcaccagcggtgtcttcaatgtgtgaaaacccaattgttcaaccctacaggatccaacaggcaatcgcaacaggcatcttaccattatcacccttgatcctncaacaaccgtcagccctaatacagcag

SEQ ID NO: 4526 - DNA, 369 bp, Zea mays
  unsure (1)..(369): unsure at all n locations; Clone ID: LIB3061-003-Q1-K1-H6
gctgtagcaacatagaaagcacaatagtgtaccaacaatggcagccaaaatatggtgcgtccttatgctccttggcctttctgcaagtgctgctaccgcaaccattttcccacaatgctcacaagctcctatagcttcctttcttcccccatacctctcaccagcggtgtcttcagtatgtgaaaacccaattcttcaaccctacaggatccaacaggcaatcgcagcaggcatcttacctttatcacccttgctccttcaacaaccgtcagccctattacagcagttacctttggtgcatttgttggcacanaacatcaaggcacaacaactacaacaacttgtgctaggaaaccttgctgcctactt

SEQ ID NO: 4527 - DNA, 289 bp, Zea mays
  Clone ID: LIB3061-003-Q1-K1-H7
cgcggagggccacgggcacggcgacgcatccggcttccggccctcctgtccccggaggtgaccgccgccgtcttcgtgggcggccataccggccacgatgaatagcatcaagtcggctatcttctccggccatcggtcgcacccccacgtgggggcggcggcggtcccgcagcagcagctggggagcaccgcttcgttccactcgacacccgttctgcagcggaagcacaagacccagtggcacaacagattcaactattatacgagacgtaagaagaacagagaaact

SEQ ID NO: 4528 - DNA, 453 bp, Zea mays
  Clone ID: LIB3061-003-Q1-K1-H8
gacgccacgacccacgcgtcaggtcgcacatatctactatactatactctaggaagcaaggacaccaccgccatggcagcgaagatgcttgcattgttcgctctcctagctctttgtgcaagcgccactagtgcgacccatattccagggcacttgccaccagtcatgccattgggtaccatgaacccatgcatgcagtactgcatgatgcaacaggggcttgccagcttgatggcgtgtcccgtcctgatgctgcaacaactggtggccctaacggttcaaacgaatgccgtgattaatgcccagatgatgaacgctaacatgatgtcaccattgatgatgccgagcatgatgtcaccaatggtcttgccgagcatgatgtcgcaaatgatgatgccacaatgtcactgcgacgccgtctcgcagattatgctgcaacagcagttaccattc

SEQ ID NO: 4529 - DNA, 280 bp, Zea mays
  Clone ID: LIB3061-003-Q1-K1-H9
gtgagagccgtcgccgctgcagtgtccatagccaccgcaggagactgagatggggggttgtgtcaagacccacaagaccaatgcgtacttcaagcgtttccaggtgaagtttcaagaaaaggtcccttggcagaacgacttacaggtcacgattaggctgattaaccaagacaaaaacaagtacaatacacccaaattcagatttggtgggcgatttaccaaccaggaccttacaggacaaattatttttggtaggttagccggggaattgggtcttggt

SEQ ID NO: 4530 - DNA, 292 bp, Zea mays
  Clone ID: LIB3061-004-Q1-K1-A10
ctagttctagatcgcgagccgccgccctttttttttttttttggaaccattctatcgggttgcgattcgcacacggcacacatgtcaagctagcaactgcacactcccaccaaccctgctcctgcgaccacttatatatctgccatcgcccccttattaccaacatagttcaccagattcaccttacactccttgtacttcctccataccggcccaagcaccacgaagatgattcagccgcgtagaccttacgatgagctgtgcacaagactcaccaatgactacccggtgt

SEQ ID NO: 4531 - DNA, 419 bp, Zea mays
  Clone ID: LIB3061-004-Q1-K1-A11
atagtgtaccaacaatggcagccaaaatattttgcttccttatgctccttggtctttgtgcaagtgttgctaccgcaaccattttcccacaatgctcacaagctcctatagcttcccttcttcccccatacctctcaccagcggtgtcttcaatgtgtgaaaccccaattgttcaaccctacaggatccaacaggcaatcgcaacaggcatcttaccattatcacccttgttcctccaacaaccgtcagccctattacagcagttacctttggtccatttggtggcacaaaacatcagggcacaacaactacaacaacttgtgctagcaaaccttgctgcatactctcagcaacatcagtttcttccattcaaccaactggctgcattgaactctgctgcttatttgcaacaacaatta

SEQ ID NO: 4532 - DNA, 288 bp, Zea mays
  Clone ID: LIB3061-004-Q1-K1-A12
agcagagtgcctgtatgcaaaccttctttgttgatttctgattgcctgttcgcgcgctgctgcaaggatggagctccgatgcttaaacagaaaggacctgatcgaggcactggccaaggacatccctgcaggcgcgatccgattcggctgccgcgtcgctgccgtcgctgcggaccccggcggcggtcacggcgccgtcctgacaatggcggacggtactgccatgaaggccaaggtcctgatcgggtgcgagggcacatactccgcggtggccaggtaccttgggct

SEQ ID NO: 4533 - DNA, 368 bp, Zea mays
  unsure (1)..(368): unsure at all n locations; Clone ID: LIB3061-004-Q1-K1-A9
cggacgcgtgggcgcgtcccgagagcgcaaatcattccgcgcgacgcaaaaaccctaggccagccaccgacccctctcatggcaaccaccaccacccaggcgagcctcctcctccagaagcagctaagagatctcgcgaagcacccggtggatgggttctctgctgggctggtcgacgacagcaatgtcttcgagtggcaggtcaccatcatcggaccgnctgacaccctatatgatggagggtacttcaatgcaataatgagcttcccacaaaattacccaaacagcccggcatcagtcagatttacctctgaaatggggcatccaaatgtctatcctgatgggcgggtttgtatctctattcttca

SEQ ID NO: 4534 - DNA, 406 bp, Zea mays
  Clone ID: LIB3061-004-Q1-K1-B10
ccttcttcccccatacctctcaccagcggtgtcttcaatgtgtgaaaacccaattgttgaaccgtacaggatccaacaggcaatcgcaacaggcatcttaccattatcacccttgttcctccaacaaccgtcagccctattacagcagttacctttggtccatttggtggcacaaaacatcagggcacaacaactacaacaacttgtgctagcaaaccttgctgcatactctcagcaacatcagtttcttccattcaaccaactggctgcattgaactctgctgcttatttgcaacaacaattaccattcagccagctagttgctgcctacccccagcaatttcttccattcaaccaactagcagcattgaactctgctgcttatttacagcagcaacaactacta

SEQ ID NO: 4535 - DNA, 433 bp, Zea mays
  Clone ID: LIB3061-004-Q1-K1-B11
tagacccacgcgtccgaactagcaacatagaaagcacaatagtgtaccaacaatggcagctaaaatattttgcggccttatgctccttggtctttctgcaagtgctgctacggcgaccattttcccacaatgctcacaagctcctatagcttcccttcttcccccgtacctctcaccaacggtgtcttcggtatgtgaaaacccaattcttcaaccctacaggatccaacaggcaatcgcagctggcatcttacctttatcacccttgttcctccaacaatcatcagccctattacagcagttacctttggtgcatttattggcacaaaacatcagggcacaacaactacaacaacttgtgctagcaaaccttgctgcctactctcagcaacagcagtttcttccattcaaccaactagctgcattgaactct

SEQ ID NO: 4536 - DNA, 374 bp, Zea mays
  unsure (1)..(374): unsure at all n locations; Clone ID: LIB3061-004-Q1-K1-B12
aacacaccaagcgaagcgcactagcaacgacctaacaacaatggctaccaagatattagccctggttgcgcttcttgccctttttgtgagcgcaacaaatgcgttcattattccacaatgctcacttgctcctagtgccattattccacagttcctcccaccagttacttcaatgggcttcgaacacctagctgtgcaagccaacatgcaacaacaagcgcttgcggcgagcgtcttacaacaaccaattgcccaattgcaacaacaatccttgccacatctaacaatacaagccatcacaacgcaacagcaacaacagttcctaccagcactgagccacctagccatggtgaaccctgccgnctacttgcaag

SEQ ID NO: 4537 - DNA, 372 bp, Zea mays
  Clone ID: LIB3061-004-Q1-K1-B9
cgcaaattgcaccaagaaatccatcgagaggccgtcgacaggggaattaatggcgtcgtcgtctagcagcagccaccgccgcctcatcctcgcagccgccgtcctgctctccgtgctcgcggctgccagcgccagcgccgggacctcctgcgtgccggggtgggccatcccgcacaacccgctcccgagctgccgctggtacgtgaccagccggacctgcggcatcgggccgcgcctcccgtggccggagctgaagaggagatgctgccgggagctggcggacatcccggcgtactgccggtgcacggcgctgagcatcctcatggacggcgcgatcccgccgggcccggacgcgcagctggagggccgcct

SEQ ID NO: 4538 - DNA, 200 bp, Zea mays
  Clone ID: LIB3061-004-Q1-K1-C10
cgcatacaagcggcggctgcggctgccagccaccgccgacggttcatctaccgtcgccggtgcatctgccaccttcggttcacctgccacctccggtgcatctgccaccgccggtccacctgccgccgccggtccacctgccaccgtcggtccatgttgccgcgccggctcatctgccggcgtcaccatgccactaccct

SEQ ID NO: 4539 - DNA, 322 bp, Zea mays
  Clone ID: LIB3061-003-Q1-K1-H11
accacgcgtccgacaaatcattgttgcattgaatatggtcagcaagggctttaatgagcgccttgtgatggtaaataggccagctattggggtcatgttcaagaaaacccttgatgtagttttgcaagtccttgtttcatttcctagcgtgagacctctgcgatctaaggtgatatcgtttctgcatcgtatgatcgagatattaggtatctcagtgcttccatgtattccaatcgcactgaggcaattgcttcttgataacgaagctaaagatatggtaaaaattctcgtattggtaaaccaaattatctgcaaatttaaa

SEQ ID NO: 4540 - DNA, 289 bp, Zea mays
  Clone ID: LIB3061-003-Q1-K1-F2
ctggacgtcagcctagcaattagctcatcgactccagattggagaactcgacaccatgaaggtgctgatcgttgcccttgctctcctggcgctcgctgcgagcgccgcctccagtacaagcggcggctgtggctgccagacaccaccgtttcatctaccgcctccgttctatatgccgcctccgttctatctgccgccgcagcagcagccgcagccatggcaataccccactcaaccaccgcagctaagcccgtgccagcagttcgggatcctgcggcgtcggcagcgt

SEQ ID NO: 4541 - DNA, 252 bp, Zea mays
  Clone ID: LIB3061-003-Q1-K1-F3
gcaacaacccatcattggtggtgccctcttttagatttattattgaactataactcataagaaagctaaaagagggcaccaacaacgcatgattggtgcggacgcgttgttcgactcgaggcttacggactggttcatgcagacgtactagctatctatagtgtgagttatatatgacgacttggttgtatctgtagaagcatcagactgcgaaaacatggcaataccccactttaataccgtagctaaaca

SEQ ID NO: 4542 - DNA, 177 bp, Zea mays
  Clone ID: LIB3061-003-Q1-K1-F4
gttctagatgcgagggccccccgtgtttaatttatatatgggtgtttatggattcatgcttttggacatatggtaggccatttgtgtttaggactgagctgttgttgagtgtttgcgtcatatgcttctatgattaaaaaaaaaaaaaaaaaatataaaaactacaatctatatacc

SEQ ID NO: 4543 - DNA, 426 bp, Zea mays
  Clone ID: LIB3061-003-Q1-K1-F5
tctgctggcactaagtttacatctccagcacctaataaaacagtagatatggtgtctttgcatatggaagttggcacttttggatccagccctactaattcaggcaaggaaaatggttgtgttgctccacatacacctgtcctggagttcacaagaaccaacatatatacagagctaaagctgaagggtgagaaacttgataacaactctgtctcactggttttgcgaatagctgatttgtctggtcatgcaagaaatattcatttcctcttctacttggactctgatacatctttgtctgtagctgctgaaatggttgaacaattggagttagcagactgcgatgttaccttcattgctgattctattgatcttttgatagtgaatcttattccgggttggagacctgtaaatgatgcggcaaca

SEQ ID NO: 4544 - DNA, 419 bp, Zea mays
  unsure (1)..(419): unsure at all n locations; Clone ID: LIB3061-003-Q1-K1-F6
ggctggcaagggtggagagcttacccatgatgagactacaatcataagtggagccttggacctgaccgaaaagactgctgcagaagctatgacaccaattgagtcaactttctcactggatgtggattccaagttggattgggaagcaattggaaaaattcttgcccgtggtcatagtcgtgttcctgtatactctggacaccctagaaacatcattgggctcctatagtcgaagagtctatngactgtccgtgctgaaacggaaaacccaagtagtgctggttcaaatagaaagaattcaaaggttcctttaaaccttcctctggatgaaatactggatgaggttcaaaaaggaaataatcatatggctgctgttgtgaaggcttaacccaaaactgaaccaccccttgacaaaactg

SEQ ID NO: 4545 - DNA, 367 bp, Zea mays
  unsure (1)..(367): unsure at all n locations; Clone ID: LIB3061-003-Q1-K1-F7
gggtgatccgcgctgagaagagatggctaagatcgccgcggcggcggcggcggcgctgtgcttcgcggccctggtggccgtggccgtctgccaaggcgaggtcgagcggcagaggctcagggacctgcagtgctggcaggaggtccaggagagcccgctcgacgcgtgccgccaggtcctcgaccggcagctaaccggcggcggcggcggcggcggcgttggcccgttccggtggggcaccgggctccggatgcggtgctgccagcagctccaggacgtgagccgcgagtgccgctgcgccgncatccggagcatggtcaggggatacgaggaggccatgccgncgctggagaaaggctgttggcca

SEQ ID NO: 4546 - DNA, 87 bp, Zea mays
  Clone ID: LIB3061-003-Q1-K1-F8
cctcactgggatgcaaaattattgtcaatcagctattgatattttggactgccttaccgagatgattgtccgaagatcgcaagctcc

SEQ ID NO: 4547 - DNA, 398 bp, Zea mays
  Clone ID: LIB3061-003-Q1-K1-F9
gttccttaactttttgaagtgcatcaaaggcataagcccgaaccacgttctggagccgctgtgcgctttcgcgagtcccaagccgaagctaataagttcaggtgcacgggagatgctccagctcccagtcccagtgcacactgaggaggaggaggaggagcttcgcttgtctgagatctcgctgcagtgcagaacggcaggatacatgatgtccaacatgtgggcgaacgatgccttcgtaccaaaagctcttggtattcacaagggaacaggttcttcgtggtcaaagtgcaacttccacataccttacacgaacgatatttcgagtgcactgaagtaccatctggatgtgaccaccaaaagctacaggagtctagtttacaacggtgaccatgata

SEQ ID NO: 4548 - DNA, 354 bp, Zea mays
  Clone ID: LIB3061-003-Q1-K1-G1
cgacccactcctactcacgaactagccatatacatacacaattttctttcaatcataacaagcaacttacctttatcacttataatctttcgacggtctccaaccctatctttcctacactcattgctacaaaccatcacaaccacaacatattcagcaactcttgctaccacttatcatccaattagccttcacaaacctttacccctactcttaaaaacaacaatttcttccattcaaccaactcactatacttaacccttctacttatttgcaccaacaacaactactaccattcaaccatctatctacttcctacatttaacatcaacaattttttccatttaaaccaat

SEQ ID NO: 4549 - DNA, 350 bp, Zea mays
  Clone ID: LIB3061-003-Q1-K1-G10
cccataccttccatcaatgaccgctttagtatgtgaaaacccagcccttcaaccctacaggatccagcaagcaatcgcaacaagcaacttacctttatcacacctgttctttcaacaatcgccagccctatctttggtgcagtcattggtacaaaccatcagggcagaacagttgcagcaactcgtgctaccagtgatcagccaagtagctctggcaaacctttccccctactctcagcaacaacaatttcttccattcaaccaactgtctatactgaaccctgctgcttatttgcagcaacaacaactactaccattcagccagctagctactgcctactctcagcagc

SEQ ID NO: 4550 - DNA, 194 bp, Zea mays
  Clone ID: LIB3061-003-Q1-K1-G12
ggattccggctgcgacccagcgtccgggggtccacgccgacgaccttaagcttcgctagaagcgccgtagcccacggtacaagtactactacggccgtggcgaggccgggggcgcgatacccgccctctgctacgccgtcctcgtactgctcctagccgcggggatcaccctgctaatgctctacgacgtgtac

SEQ ID NO: 4551 - DNA, 197 bp, Zea mays
  Clone ID: LIB3061-003-Q1-K1-G2
cttcgggaccggctgtcctaaattattcacaatcatttgtacaagccagtcattgatatagggcgtcttgccaaactcgtgcagatagcgaacaaatagaccgatttaaccgttctagatacaatatttctcctctgagattcaccacaaacataccctgtaggcgctaaagcgcgggttacttacagctataaggc

SEQ ID NO: 4552 - DNA, 211 bp, Zea mays
  Clone ID: LIB3061-003-Q1-K1-G3
caacgaggctgtcctaaattatgcacaattatctttataagccagtcattcataatggccgtagggtcatactcgtccagatagcgaccaaatagactgatctaccagttcgagatactatatttctcctcatagatgcaactcaaacctactttgtacgatctacagcaaggcttactcagtactatgacgcatactatgaatccatcta

SEQ ID NO: 4553 - DNA, 319 bp, Zea mays
  Clone ID: LIB3061-003-Q1-K1-G5
cagcccttcaaccctacaggatccagcaagcaatcgcaacaagcaacttacctttatcagcacctgttctttcaacaatcgccagccctatctttggtgcagtcattggtacaaaccatcagggcagaacagttgcagcaactcgtgctaccagtgatcagccaagtagctctggcaaacctttccccctactctcagcaacaacaatttcttccattcaaccaactgtctatactgaaccctgctgcttatttgcagcaacaacaactactaccattcagccagctagctactgcctactctcagcagcaacaatttc

SEQ ID NO: 4554 - DNA, 361 bp, Zea mays
  Clone ID: LIB3061-003-Q1-K1-G7
atagaaagcacaatagtgtaccaacaatggcagccaaaatattttgcttccttatgctccttggtctttctgcaagtgttgctaccgcaaccattttcccacaatgctcacaagctcctatagcttcccttcttcccccatacctctcaccagcggtgtcttcaatgtgtgaaaacccaattgttcaaccctacaggatccaacaggcaatcgcaacaggcatcttaccattatcacccttgttccttcaacaaccgtcaagcctattaccacaagtacctttgggccaattgggggccccaaaccttaaggcaccaccacctccaccaccttggcctaccaaaccttgctgcatacttta

SEQ ID NO: 4555 - DNA, 385 bp, Zea mays
  unsure (1)..(385): unsure at all n locations; Clone ID: LIB3061-003-Q1-K1-G8
gagaccagcaagcaacatagaaagtagaatccattagcaacaatagagcaacaatggcgaccaagatattttccctccttatgctccttgctctttctacatgtgttgctaacgcgacaattttccctcaatgctcacaagctcctatagcttcccttcttcccccataccttccatcaattatagcttcagtatgtgaaaacccagctcttcaaccatataggcttcaacaagcaatcgcagcaagcaacatacctttatcgcccttgttgtttcaacaatcaccagccctatctttggtgcagtcattggtacagaccatcanggcacaacagctgcagcaactcgtgctacctgtgatcacccaagtagctctggcaaacct

SEQ ID NO: 4556 - DNA, 129 bp, Zea mays
  Clone ID: LIB3061-003-Q1-K1-G9
ttaaaacatcaaatccacaacggagtgccgttaactcctaacagccaattccaaagcctgacaaatccaatccaaatgatccaacatacctaaatcctcatactcatgatactgctctctcaatcattc

SEQ ID NO: 4557 - DNA, 408 bp, Zea mays
  unsure (1)..(408): unsure at all n locations; Clone ID: LIB3061-003-Q1-K1-H1
gaactctgctgcttatttgcaacaacaattaccattcagccagctagttgctgcctacgcccagcaatttcttccattcaaccaactagcagcattgaactctgctgcttatttacagcagcaacaactactaccattcagccagctagctgatgtgagccctgctgccttcttgacacaacaacagttgttgccgttctacctgcacgctatgcctaacgctggcaccctcttacaactgcaacaattgctgccattcaaccaacttgctttgacaaacccaacagtgttctaccaacaacccatcattggtggtgccctcttttagattgcttatgagttatagttcaataatgaaagtttttggatgatgnttgtggcgtcccagaaataagaaagtacatttct

SEQ ID NO: 4558 - DNA, 221 bp, Zea mays
  Clone ID: LIB3061-003-Q1-K1-H10
attgatacgaactagcaacatacatagtgaagtacactagcaacatcttagcaccatgggcagccaaaattttggcattcctggccttcttggtttttcaacaagccgtggttccgggaatattattccacaatggttaacaacaatacctctttccggtgacagccgcgagatttgaatacccaactatacaatcctacaggctacaagaggccatcgca

SEQ ID NO: 4559 - DNA, 431 bp, Zea mays
  Clone ID: LIB3061-003-Q1-K1-F12
ttccgaggctacgcgccacgcgtgcgctggactatttcaaatattactgctggaaacactgatcatacacaggctgtgagtaagagccactatcatggctactacgttgcaactgatcacaaacagcagagtttgatatcaagaaggaggctgcttgggccatctcaaatgctacctctggtggttctcatgagcaaatcaagtacttggtgtctgatggctgcatcaagccattgtgtgaccttcttgtctgacctgatccgagaattgtaacagtttgactgaaagctcttgagaatattcttaaagtagggcagcatgacaagaccatgggtgcaacaggtgacactaacgtcttagctcagatgatcgatgaagcggaaggcctggaacagatcgagaacctacagagccacgataacaatgaaatc

SEQ ID NO: 4560 - DNA, 422 bp, Zea mays
  Clone ID: LIB3061-003-Q1-K1-D6
gctgccgaggcggatgcggatgacccctcctcctccaccccctcgcttccgatggctgtgctcgggggcggtggcggggagggccggagcggggtgccgaacaagctcgtggtggcggccctcgccaccggggaagaggccgcgccggctctctcccccgatacggtggtcgaggtgaatagtgaggaggaggtgccgtacagaatggccgtccacccgcgtggcgatggcgtgttctgtgccttccccaacggctgcaggttgtatcgatgggaatcacaggaaggagagggaccacagaggttggctttggagccggaccaggatgctttagcagagctgaaagatgtcggtttgcagttggccgtatccttcagtggagaaggttcaatacttgctattggtggtgaagatgggtattt

SEQ ID NO: 4561 - DNA, 360 bp, Zea mays
  Clone ID: LIB3061-003-Q1-K1-D7
caactagcaacatagaaagcacaatagtgtaccaacaatggcagccaaaatattttgctgccttatgctccttggtctttctgcaagtgttgctaccgcaaccattttcccacaatgctcacaagctcctatagcttcccttcttcccccatacctctcaccagcggtgtcttcaatgtgtgaaaacccaattgttcaaccctacaggatccaacaggcaatcgcaacaagccatttaccattattaaccttggtccttccaccacccgtaagcctaataccagcagtaaccttgggtcaattggttgccccaaaccttaaggccccaccacctccaccacctggggctaccaaaccttg

SEQ ID NO: 4562 - DNA, 429 bp, Zea mays
  Clone ID: LIB3061-003-Q1-K1-D8
attagcaacaatagagcaacaatggcgaccaagatattttccctccttatgctccttggtctttctacatgtgttgctaacgcgacaattttccctcaatgctcacaagctcctatagcttcccttcttcccccataccttccatcaattatagcttcagtatgtgaaaacccagctcttcaaccatataggcttcaacaagcaatcgcagcaagcaacatacctttatcgcccttgttgtttcaacaatcaccagccctatctttggtgcagtcattggtacaaaccatcaaggcacaacagctgcagcaactcgtgctacctgtgatcaaccaagtagctctggcaaacctttctccctactctcagcaacaacaatttcttccattcaaccaactatctacactgaaccctgctgcttatttgcag

SEQ ID NO: 4563 - DNA, 412 bp, Zea mays
  Clone ID: LIB3061-003-Q1-K1-D9
attgagaccaactagcaacatagaaagcacaatagtgtaccaacaatggcagccaaaagattgtgcctccttatgctccttggtctttctgcaagtgctgctacggcgaccattttcccgcaatgctcgcaagctcctatagcttcccttcttcccccgtacctctcaccagcggtgtcttcggtatgtgaaaacccaattcttcaaccctacaggatccaacaggcaatcacagctggcatcttacctttatcacccttgttccttcaacaatcatcagccctattacatcagttacctttggtgcatttattggcacaaaacatcagggcacaacaactacaacaacttgtgctagcaaaccttgctgcctactctcagcaacagcagtttcttccattcaaccaactag

SEQ ID NO: 4564 - DNA, 402 bp, Zea mays
  unsure (1)..(402): unsure at all n locations; Clone ID: LIB3061-003-Q1-K1-E1
atctattctggcttcccagagggagccagagtctcctgtgatcttctccctgcgcacaacccagccaggatcacgacggcgccccagcgccgncaccctggtcccaccaaatcccctccctacaatctgcgcaatctgcccggtagaatccgtagttctaccagtttcactgtttctgagttccgtgatacttggacgtttgtgaaccgcagaataaaggatgctctcgatcttcagaaaaccttccaagaggccgcatacctcgctgaagccgtgggagcaggcatgggcggcaccgtgcaaggtgttctcaacagggtcttccagaaccgtagcggatgaactttctttnttctcaaacacgtaatggatggactaattccgtcttttgcaagctgcaca

SEQ ID NO: 4565 - DNA, 375 bp, Zea mays
  Clone ID: LIB3061-003-Q1-K1-E10
caggcacaacaacagctgcaacagcttctgccagcgctcagtcaactagccatggtgaggcctgccgcctacctacaacagcaacaactgctttcatctagcccgctcgctgcggccaatgcacctacatacctgcaacaacaattgctgcaacagattgtaccatctctgactcagctagctgtcgcaaaccctgctgcctacttgcaacagctgcttacattcaaccaactgactatgtcgaactctgctgcgtacctacaacagcgaccacagttacttaatgcactagcagtggctaacccattggtcgctgccttgctacagcagcaacaattgctgccatacaaccagttctctttgataaaccctgtc

SEQ ID NO: 4566 - DNA, 296 bp, Zea mays
  Clone ID: LIB3061-003-Q1-K1-E11
tccggttacctttggtgcatttattggcacaaaacatcagggcacaacaactacaacaacttgtgctagcaaaccttgctgcctactctcagcaacagcagtttcttccattcaaccaactaggttcattgaactctgcttcttatttgcaacaacaacaactaccattcagccagctacctgctgcctacccccagcaatttcttccattcaaccaactagcagcattgaactctcctgcttatttacagcagcaacaactactaccattcagccagctagctggtgtgagccct

SEQ ID NO: 4567 - DNA, 310 bp, Zea mays
  unsure (1)..(310): unsure at all n locations; Clone ID: LIB3061-003-Q1-K1-E12
atgcgacggtcgctccgtagaagatgaggccaccgacgacgagcgcggagagggcgaaggtggcggcgacggcgagcgggatgccgcaggagaggatgccgaacttgagctggatggcgtcgaccatggagagcagcaggaagaaggtgcccatggtggagcacccggcggcgagcagcatcatgggctgcgcgaacctgagcacggcgcggcgcctgttcctcggnccggcggcgcgccatgccggcatctnctcgcagtcgtcggacggcgggggcttctggtcggcgtcgccgtaaaagtcgtcggt

SEQ ID NO: 4568 - DNA, 349 bp, Zea mays
  Clone ID: LIB3061-003-Q1-K1-E3
attcccggccagcaagcaacatagaaagtagaatccattatcaacaatttatcttcaatggcgaccaagatattttcccgccttgtgctccttgctctttctacatgtgttgctaacgcgacaattttccctcaatgctcacaagctcctatagcttcccttcttcccccataccttccatcaattatagcttcagtatgtcaaaacccagctcttcaaccatataggcttcaacaagcaatcgcaacaagcaacatacctttaatccccttgttgtttcaacaatcaccaaccctatttttggtgccgtccttggtacaaaccaataaggcacaacaacttcaacaac

SEQ ID NO: 4569 - DNA, 374 bp, Zea mays
  Clone ID: LIB3061-003-Q1-K1-E4
gagcattcagaaacacaccaagcgaagcgcactagcaacgacctaacaacaatggctaccaagatattagcccggcttgcgcttctggccctttttgtgaagcgcaacagatgcgttcattattccacaatgctcacttgctcctagtgccattattccacagttcctcccaccagttacttcaatgggcttcgaacacctagctgtgcaagccaacatgcaacaacaagcgcttgcggcgagcgtcttacaacaaccaattgcccaattgcaacaacaatccttgccacatctaacaatacaagccatcacaacgcaacagcaacaacagttcctaccagcactgagccacctagccatggtgaaccctgccg

SEQ ID NO: 4570 - DNA, 444 bp, Zea mays
  Clone ID: LIB3061-003-Q1-K1-E5
cagcaagcaacatagaaagtagaatccattagcaacaatagagcaacaatggcgaccaagatattttccctccttatgctccttgctctttctacatgtgttgctaacgcgacaattttccctcaatgctcacaagctcctatagcttcccttcttcccccataccttccatcaattatagcttcagtatgtgaaaacccagctcttcaaccatataggcttcaacaagcaatcgcagcaagcaacatacctttatcgcccttgttgtttcaacaatcaccagccctatctttggtgcagtcattggtacaaaccatcagggcacaacagctgcagcaactcgtgctacctgtgatcaaccaagtagctctggcaaacctttctccctactctcagcaacaacaatttcttccattcaaccaactgtctacactgaaccctgct

SEQ ID NO: 4571 - DNA, 447 bp, Zea mays
  Clone ID: LIB3061-003-Q1-K1-E6
ctagcaacatagaaagcacaatagtgtaccaacaatggcagccaaaatattttgcttccttatgctccttggtctttctgcaagtgctgctaccgcaaccattttcccacaatgctcacaagctcctatagcttcctttcttcccccatacctctcaccagcggtgtcttcagtatgtgaaaacccaattcttcaaccctacaggatccaacatgcaatcgcagcaggcatcttacctttatcacccttgttccttcaacaaccgtcagccctattacagcagttacctttggtgcatatgttggcacacaacatcatagcacaacaactacaacaacttgtgctagggaaaccttgctgcctactctcagcaacagcagtttcttccattcaaccaactggctgcattgaactctgctgcctaattgcaacaacaactaccattca

SEQ ID NO: 4572 - DNA, 426 bp, Zea mays
  unsure (1)..(426): unsure at all n locations; Clone ID: LIB3061-003-Q1-K1-E7
ggagatctacctgcactcgctccccgtcaaggagcaccagatcgtcgagaccctggtgcgcggggctcaaggacgaggtcatgaagatcacgcccgtccagaagcagacccgtgccgggcagcgcacccgcttcaaggccttcgtcgttgtcggcgatggcgacggccacgtcggcctgggagtcaagtgcgccaaggaggtggccaccgccatccgcggcgccatcatcctagccaagctctccgtcgtccccgtcaggagggggtactgggggaacaggatcggacaggcccacaccgtgccctgcagggtcaccggcaagtgtggctccgtcactgtgcgcatggtgcccgggcccaggggttctggcatcgtcgccgngcgcgtgcccaagaaggtgctgcagttcgctggcattgaggatg

SEQ ID NO: 4573 - DNA, 406 bp, Zea mays
  Clone ID: LIB3061-003-Q1-K1-E8
gctggcagcagtggaaaggtgataataatgttgatatgcatctctggagggatcacacgacctatcaacaaatgaccaggggtcaagcgtatgaccaatctcggagggacgatacttatcagcaaacatgcagcagaggaacagaaaagttcagcaggcacgcaggactgcaagctaggcagttacaaaccgagacacccgccagccatgtctggcaccaacaacaggggcaagtggcagatgagtttccacaccttgacatcataaacgatttgcttgaggaggaccagatcaacggcagtataccagagtcatttcatcaagattacaatgtgattggcctgccattttcaccaagaggaaacgtgtcatatatgggaatggcttctgttagaagtcctgctcg

SEQ ID NO: 4574 - DNA, 386 bp, Zea mays
  Clone ID: LIB3061-003-Q1-K1-E9
gatgaattacatggaacttgtgcagaaacatgtcgaggacgatgctgatatcactatgtcatgtgctcctgttgatgagagccgagcttctaaaaatgggctagtgaagattgatcatactggacgtgtacttcaattctttgaaaaaccaaagggtgctgatttgaattctatgagagttgagaccaacttgctgagctatgctatagatgatgcacagaaatatccataccttgcatcaatgggcatttatgtcttcaagaaagatgcacttttagaccttgtcaagtcaaaatatactcaattacatgactttggatctggaatccttccaagagctgtacttgatcataacgtgcaagcatgcatttttacgggctattggg

SEQ ID NO: 4575 - DNA, 394 bp, Zea mays
  Clone ID: LIB3061-003-Q1-K1-F10
ccaactagcaacatagaaagcacaatagtgtaccaacaatggcagccaaaatattttgcctccttatgctccttggtctttctgcaagtgctgctacggcgaccattttcccgcaatgctcgcaagctcctatagcttcccttcttcccccgtacctctcaccagcggtgtcttcggtatgtgaaaacccaattcttcaaccctacaggatccaacaggcaatcacagctggcatcttacctttatcacccttgttcctccaacaatcatcagccctattacatcagttacctttggtgcatttattggcacaaaacatcagggcacaacaactacaacaacttgtgctagcaaaccttgctgcctactctcagcaacagcagtttcttccatt

SEQ ID NO: 4576 - DNA, 299 bp, Zea mays
  Clone ID: LIB3061-003-Q1-K1-D5
attttcagcattcaaaaacacaccaagcgaagcgcactagcaacgacctaacaccaatggctaccaagatattagccctccttgcgcttcttgcccttttagtgagcgcaacaaatgcgttcattattccacagtgctcacttgctcctagtgccagtattccacagttcctaccaccagttacttcaatgggcttcgaacatccagccgtgcaagcctacaagctacaactagcgcttgcggcgagcgccttacaacaaccaattgcccaattggaacaacaatccttggcacatcta

SEQ ID NO: 4577 - DNA, 231 bp, Zea mays
  Clone ID: LIB3061-003-Q1-K1-B7
gccccagacaacactcaccgatagcaagtagcgccgccgacgtttcgagagcagagtaggcaagctagccaagcgcgcacctcggtgacctagctagctacctagctagttcaggcgacgatatggcgtctggtcaggagagcaggaaggagctggaccgcaaggctcgcgagggcgagaccgtcgtccccggcgggaccggcggcaagagcgtcgaggcccaagagcacc

SEQ ID NO: 4578 - DNA, 423 bp, Zea mays
  Clone ID: LIB3061-003-Q1-K1-B8
gctataactactatagcagtagctcaaatctaaaaaattgtcatgaattcctaaggcagcagtgcagccctttggtaatgccttttctccaatcacgtttgatacaaccaagtagctgccaggtattgcagcaacaatgttgtcatgatcttaggcagattgagccacaatacattcaccaagcaatctacaacatggttcaatccataatccaggaggagcaacaacaacaaccatgtgagttatgtggatctcaacaagctactcaaagtgcggtggcaatcttgacagcagcacaatacctaccatcaatgtgcggcttgtaccactcatactaccaaaataatccatgcagcagcaatgacattagtggtgtttgcaattgaagaattgtgtctacctagccggtatactcctataacg

SEQ ID NO: 4579 - DNA, 407 bp, Zea mays
  Clone ID: LIB3061-003-Q1-K1-B9
ccaactagcaacatagaaagcacaatagtgtaccaacaatggcagctaaaatattttgcctccttatgctccttggtctttctgcaagtgctgctacggcgaccattttcccacaatgctcacaagctcctatagcttcccttcttcccccgtacctctcaccaacggtgtcttcggtatgtgaaaacccaattcttcaaccctacaggatccaacaggcaatcgcagctggcatcttacctttatcacccttgttcctccaacaatcatcagccctattacagcagttacctttggtgcatttattggcacaaaacatcagggcacaacaactacaacaacttgtgctagcaaaccttgctgcctactctcagcaacagcagtttcttccattcaaccaactagct

SEQ ID NO: 4580 - DNA, 203 bp, Zea mays
  Clone ID: LIB3061-003-Q1-K1-C10
cgaacatccagccgtgcaagcctacaggctacaactagcgcttgcggcgagcgccttagaacaaccaattgcccaattgcaacaacaatccttggcacatctaaccctacaaaccattgcaacgcagcaacaacaacaacaacagtttctgccatcactgagccacctagccgtggtgaacccttgcacctacttgcaacagc

SEQ ID NO: 4581 - DNA, 300 bp, Zea mays
  Clone ID: LIB3061-003-Q1-K1-C12
cccacgcgtccgtgttgacagcctttgtggaaccccgtacccgatggactatgagatggggttgaaacggcttcgaagaacaatgaacgaagatcatgggaaggaggtcgacacatcctcgagttaataacacagcgccattttctcgcaaatccgagattcggaagatcaagtgattggcctgttacctgtttttgctgttgtagataatttatttgtgaaaggtccataggtcatagtctgtccatcgatttgatataccgttgcttggatataaggtaattctgaagttgcaatctg

SEQ ID NO: 4582 - DNA, 423 bp, Zea mays
  unsure (1)..(423): unsure at all n locations; Clone ID: LIB3061-003-Q1-K1-C3
gcggagtgtgccgagagtcatcgtagttatgttcgcctctgcgggcgccgcgccatgtnatgcagtaccggacggcgggcccgcacatgaagccggcgcacccttacccgcgcaaggtggacggcgcggccaagaatcccgcgccggagctcaagctgctggagaagctgcccccgcgcgaccgggatgaagggtcgccgacatcggtgcttgcctcggcgcgcacggcgtcgcgagcggaggtgttaggcagcgcgttcgcgaacagctcgagcgccagcaggtcgctggacctttcagcttccggtttggatgagcgtggtgacggcggcggctcgctggtctcgtcggtggccgcggagcacggctgcgcatcgccatgaacgagagcgccatataccaaggtgctcgttgaagcaaacg

SEQ ID NO: 4583 - DNA, 221 bp, Zea mays
  Clone ID: LIB3061-003-Q1-K1-C4
gctggatgcaaaatgcttcaagtgagcctcatctctttggagtgccgctcaggaaagagttgtttaggtttttgggtctaattctaaaacagctatgaatgttagttttgatctggggttattttctgtgctgtgtcgagagttttggtcatggtatgggaattggggaaaggttgtacgcgagtgtaaatctatgtattatcgcattgtaatcgtgacat

SEQ ID NO: 4584 - DNA, 411 bp, Zea mays
  unsure (1)..(411): unsure at all n locations; Clone ID: LIB3061-003-Q1-K1-C5
ggagttcttctgctggtccgctctggggtacggcctcgacgccatcgacgccaacctcaccggcggcgggccggcctccatcggcggccagtccgcgtccctcaccccgttcatccgcgacgtggccacccagttctgttaccaagaagtcgggcacctcagggcgatcaagcagacggtgaggggcttcccgaggccgttgctggacatcagcgcggccaacttcggcaagatcatcgagcaagcgctgaacgcgacgctggacccgcccttcgacccctacgagaacagcctcaacttcctcgtcgcctcctacatcatccnctacgtcggcctcaccggctacgtcggcgccaaccccaggctcctcacccctcaggccagaaagctgctggcggtgctgctggcggt

SEQ ID NO: 4585 - DNA, 446 bp, Zea mays
  Clone ID: LIB3061-003-Q1-K1-C6
ccaacaagcaacatagaaagtggaatccagtagcaacaacagagcaacaatggcgaccaagatattttcggtccgtatgctccttgctctttctgcatgtgttgctaacgcgacaattttccctcaatgctcacaagctcctatagcttcccttcttcccccataccttccatcaatgatagcttcagtatgtgaaaacccagctcttcagccctataggctccaacaagcaatcgcagcaagcaacatacctttatcacccttgttgtttcaacaatcgccagccctatctttggtgcagtcattggtacaaaccatcagggcacagcagctgcagcaactcgtgctacctgtgatcaaccaagtagctctggcaaacctttctccctactctcagcaacaacaatttcttccattcaaccaactgtctacactgaaccctgctg

SEQ ID NO: 4586 - DNA, 425 bp, Zea mays
  unsure (1)..(425): unsure at all n locations; Clone ID: LIB3061-003-Q1-K1-C7
gagcattcagaaacacaccaagcgaagcacattagcaacaacctaacaacaatggctaccaagatattatccctccttgcgcttcttgcgctttttgcgagcgcaacaaatgcgttcattattccacaatgctcacttgctccaagttccattattacacagttcctcccaccagttacttcaatgggcttcgaacacccagctgtgcaagcctataggctacaacaagcaattgcggcgagcgtcttacaacaaccaatttcccagttgcaacaacaatccttggcacatctaacaatacanaccatcgcaacgcatcagcaacaacaattcctaccagcactgagccacctagccatggtgaaccctgccgcctacttgcaacagcagttgcttgcatcaaacccacttgctctggcaaacgt

SEQ ID NO: 4587 - DNA, 278 bp, Zea mays
  Clone ID: LIB3061-003-Q1-K1-C8
agccgctggctatactacagcacatagtttcttacgtggaacacaacatcaatgggttgggtaatatcatctcttcttgcgcttcttgctctagctacgacctcaactaactgcttacttgttccgcaatactcacttgatccaagctacattctaacactgatcgttctaccagttccatgctctagtactcgatcactctactctgcaactctataatctacgtccctaaattcctttaacagtcttgcagcatccactatcgcaactgcatataa

SEQ ID NO: 4588 - DNA, 271 bp, Zea mays
  Clone ID: LIB3061-003-Q1-K1-D1
gccaccgcccgagagagagagagagggagagtgagagtggggattcaagtttcaaactgactatcgaggggggataggaaggtggtcactcatcggtccacagctagctcgtcgccccccatggctgactggggccccgtggtgatcgcgacggtgctgttcgtgctgctcacgccgggcctgctgttccagctgccggcgcacggccgaatcgtcggcttcggcaccatgcacaccagcggcctcgccatcctcgtccacgccgtcctct

SEQ ID NO: 4589 - DNA, 293 bp, Zea mays
  Clone ID: LIB3061-003-Q1-K1-D10
attgagaccaacatgcaacatagcaagtggaatccagtagcaacattcgagcagcaacggcgaccaagatactttcactacttatgctcctggctctgtcagcatgtcatgctaacgcgacacttctgcttcaatgcttacaagctcctatagctaaccttgttactccataccttccatcaatgatagcttcagtatgtgaaaacctagcttttcaaccatataggctacagcaagctattgcagctagcaacatacctctatcacccttgattcaactatctacagcccta

SEQ ID NO: 4590 - DNA, 373 bp, Zea mays
  Clone ID: LIB3061-003-Q1-K1-D11
gagaccagcaagcaacatagaaagtagaatccattagcaacaatagagcaacaatggcgaccaagatattttccctccttatgctccttgctctttctacatgtgttgctaacgcgacaattttccctcaatgctcacaagctcctatagcttcccttcttcccccataccttccatcaattatagcttcagtatgtgaaaacccagctcttcaaccatataggcttcaacaagcaatcgcagcaagcaacatacctttatcgcccttgttgtttcaacaatcaccagccctatctttggtgcagtcattggtacaaaccatcagggcacaacagctgcagcaactcgtgctacctgtgatcaaccaagtagc

SEQ ID NO: 4591 - DNA, 441 bp, Zea mays
  Clone ID: LIB3061-003-Q1-K1-D12
ctagcaacatagaaagcacaatagtgtaccaacaatggcagccaaaatattttgcctccttatgctccggggtcggtctgcaagtgctgctacggcgaccattttcccgcaatgctcgcaagctcctatagcttcccttcttcccccgtacctctcaccagcggtgtcttcggtatgtgaaaacccaattcttcaaccctacaggatccaacaggcaatcacagctggcatcttacctttatcacccttgttcctacaacaatcatcagccctattacatcagttacctttggtgcatttattggcacaaaacatcagggcacaacaactacaacaacttgtgctagcaaaccttgctgcctactctcagcaacagcaggttcttccattcaaccaactagctgcattgaactctgcttcttatttgcaacaacaacaact

SEQ ID NO: 4592 - DNA, 427 bp, Zea mays
  unsure (1)..(427): unsure at all n locations; Clone ID: LIB3061-003-Q1-K1-D2
caactagcaacatagaaagcacaatagtgtaccaacaatggcaaccaaaatattttgcggccggatgctccttggtctttctgcaagtgctgctaccgcgaccattttcccgcaatgctcacaagctcctatagcttcccttcttcccccatacctctcaccagcggtgtcttcagtatgtgaaaacccaattcttcaaccctacaggatccaacaggcaatcgcagcaggcatcttacctttatcacccttgttcctccaacaaccgtcagccctattacagcagttacctntggtgcatttgttggcacataacatcagggcacaacaactacaacaactngtgctagcaaaccttgctgcctactctcagcaacagcagtttcttacattcaaccaactggctgcattgaactctgctgcttat

SEQ ID NO: 4593 - DNA, 354 bp, Zea mays
  Clone ID: LIB3061-003-Q1-K1-B6
attcagaaacacacctagcgaagcgcactagcaacgacctaacaacaatggctaccaagatattatccctctttgcgcttcttgccctttttgtgagcgcaacaaatgcgttcattattccacaatgctcacttgctcctagtgccattattccacagttcctccctccagttacttcaatgggcttcgaacacccagctgtgcaagcctacaggctacaacaagcgcttgcggcgagcgtcttacaacaaccaattgcccaattacaacaacaatccttggcacatctaaccatacaaaccatcgcaacgcaacagcaacaacaatttctaccagcactgagccaactagctg

SEQ ID NO: 4594 - DNA, 424 bp, Zea mays
  Clone ID: LIB3061-003-Q1-K1-D4
cccacgcgtccgcggacgcgtgggtctcaccagcggtgtcttcggtatgtgaaaacccgattgttaaaacttacaggatccaacaggcaatagcaactggcatgttacctttatcacccttgttcctgcaacaatcatgagccctattacaacagttacctttggtgcatttattggcacagaacataaggggcacaacaactacaacaacttgcggtaacgaaccttggtggcctatcttaagcaccggcggttcttacattcaacccactacggtcattggactctgcttcttattcgcaacaacaacaactaccattcagccacctacctgctgcctacccccagcaatttcttccattcaaccaactagcagcattgaactgtcctgcttatttacagcagcaacaactactaccattca

SEQ ID NO: 4595 - DNA, 342 bp, Zea mays
  Clone ID: LIB3061-002-Q1-K2-H9
gcaacatagaaagcacaatagtgtaccaacaatggcagccaaaatattttgcttccttgggctccttggtctttctgcaagtgctgctaccgcaaccattttcccacaatgctcacaagctcctatagcttcctttcttcccccatacctctcaccagcggtgtcttcagtatgtgaaaacccaattcttcaaccctacaggatccaacaggcaatcgcagcaggcatcttacctttatcacccttgttcctccaacaaccgtcagccctattacagcagttacctttggtgcatttgttggcacaaaacatcaaggcacaacaactacaacaacttgtgct

SEQ ID NO: 4596 - DNA, 399 bp, Zea mays
  unsure (1)..(399): unsure at all n locations; Clone ID: LIB3061-003-Q1-K1-A1
agaaagtagaatccattagcaacaatagagcaccaatggcgaccaagatattttccctccttatgctccttgctctttctacatgtgttgctaacgcgacaattttccctcaatgctcacaagctcctatagcttcccttcttcccccataccttccatcaattatagcttcagtatgtgaaaacccagctcttcaaccatataggcttcaacaagcaatcgcagcaagcaacatacctttatcgcccttgttgtttcaacaatcaccagccctatctttggtgcagtcattggtacanaccatcanggcacaacagctgcagcaactcgtgcttactgggaaccaaccaataacttttgccaacccttcttccttattttaagcaccaccaattcttt

SEQ ID NO: 4597 - DNA, 329 bp, Zea mays
  Clone ID: LIB3061-003-Q1-K1-A10
gagacgcacacgctccatagaacgtgttttgcaagggcaacaacactgcaacaccgtcgaccgacatatgtgctatgattaacgctattgctatgtctgcatgtgtcgctaacacgacaaatatacctgaatggtcactatcacctatagctaacgttctactgccatacacttcgatcaactattgcatcattatgagacaaccgagatgttaagacctatcagatctaacaacatgcgttagcaggtaacatacctatatcacccttggcagcaaaacaatctccagccctatctttagtgcaaccattggttcaaaccattagggg

SEQ ID NO: 4598 - DNA, 387 bp, Zea mays
  Clone ID: LIB3061-003-Q1-K1-A11
gcagcagcagcccttctttttggagcagcaccacaggggagatcgatcaatcaatcaggaagcaaagcgcgcacggcacatgtgggtagctagcaatggcgacgccgtcgaaccctactacttcgagcactcccatagctgcggcggcgcccttattgccagcagagttcaccagattcaccttccgggccttgtacgtacgccggaccggcccaagcagcagggagatgattcatccggggagaccttacgatgagctgggcagaagactcaccagtgactacccggggtacgatggccgtggcttcgacgccgtccttgtcgatcgcatgcaagggatcaccgttctcgtaggtaacgcgcaccaactgttcaccatcgtgttcg

SEQ ID NO: 4599 - DNA, 411 bp, Zea mays
  unsure (1)..(411): unsure at all n locations; Clone ID: LIB3061-003-Q1-K1-A3
cccagctncggcattagaacacccagcgaacccctttacacaacctaacagcaatggctaccaagatattatccttccttgcgcttcttgcgctttttgcgagcgcaacanatgcgttcattattccacaatgctcacttgctccaagttccattattacacagttccttccaccagttacttcaatgggcttcgaacacccagctgtgcaagcctataggctacaacaagcaattgcggcgagcgtcttacaacaaccaatttcccagttgcaacaacaatccttggcacatctaacaatacaaaccatcgcaacgcaacagcaacaacaattcctaccagcactgagccacctagccatggtgaaccctgccgnctacttgcaacagcagttgcttgcatcaaacccac

SEQ ID NO: 4600 - DNA, 415 bp, Zea mays
  Clone ID: LIB3061-003-Q1-K1-A4
aatattttcagcattcaaaaacacaccaagcgaagcgcactagcaacgacctaacaccgatggctaccaagatattagccctccttgcgcttcttgcccttttagtgagcgcaacaaatgcgttcattattccacagtgctcacttgctcctagtgccattattccacagttcctcccaccagttacttcaatgggcttcgaacatccagccgtgcaagcctacaggctacaactagcgcttgcggcgagcgccttacaacaaccaattgcccaattgcaacaacaatccttggcacatctaaccctacaaaccattgcaacgcaacaacaacaacaacaacagtttctgccatcactgagccacctagccgtggtgaaccctgtcacctacttgcaacagcagctgcttgcatc

SEQ ID NO: 4601 - DNA, 199 bp, Zea mays
  Clone ID: LIB3061-003-Q1-K1-A5
gtcagcagcttctgcttgctctggggggaaggagagagagagagcgagagagatctagtagagaggctagctaggtggtcctcgaacgaagatgttggcggtgttcagcgggcaggtggtggaggtgccggcggagctggtggcggcgggcagccggacgccgtcgcccaagacgaaggcgtcgcagctggtggggcgc

SEQ ID NO: 4602 - DNA, 262 bp, Zea mays
  Clone ID: LIB3061-003-Q1-K1-A6
ccatggggtcgtcggaggccgacgaggaccagctcctcaagagcttcctcgcggaggtgagcgaggccgagcgggacaacgaagtgctcaggatacttggttgcttcaagttaaaccccttcgagcatcttaagttgtcttttgattcatcaccagatgaggtgaaaaagcaatataggaagttgtcattgctggtccattctgataaatgccagcattcttaggcacaagaagcttttgcagctctggcgaaagcacaaca

SEQ ID NO: 4603 - DNA, 244 bp, Zea mays
  Clone ID: LIB3061-003-Q1-K1-A7
gcattcagaaacacaccgagcgaagcggactaacaacgacctaacaacaatgggtaccagagatataacccttcttgcacctgttgcccttgatgcgagcgcaacacatgcgttcattattccacaatgctcacttgctcctagtgccattatcacacagttcctgccaccagttacttcaatgggcatcgaacacctatctgtgcaagccaacatgcaacaactagcgctagccgcgagcgtc

SEQ ID NO: 4604 - DNA, 385 bp, Zea mays
  unsure (1)..(385): unsure at all n locations; Clone ID: LIB3061-003-Q1-K1-A8
ggagttgctctgaattgactgaaccatggcggcgacaatggcagtgacgacgatggtgaccaggagcaaggagagctggtcgtcattgcaggtcccggcggtggcattcccttggaagccacgaggcggtggcaagaccggcggcctcgagttccctcgccgggcgatgttcgccagcgtcggcctcaacgtgtgcccgggcgtcccggcggggcgcgacctcggggagcccgaatccaaagtcgtacgggccggcgacaactgggacatcgcgcgccagcttggcgccggcgtttccgggcagcaagccggctgggaggctgangaagaagcagcgaagaagacgaagccgaagggctgcggcagcaagaagcatcagcagctg

SEQ ID NO: 4605 - DNA, 420 bp, Zea mays
  unsure (1)..(420): unsure at all n locations; Clone ID: LIB3061-003-Q1-K1-B1
gggtcttcagaccattagctttatctactccagagcgcagaagaacccgatcgacaccatgagggtgttgctcgttgccctcgctctcctggctctcgctgcgagcgccacctccacgcatacaagcggcggctgcggctgccagccaccgccgccggttcatctaccgccgccggtgcatctgccacctccggttcacctgccacctccggtgcatctcccaccgccggtccacctgccgccgccggtccacctgccaccgccggtccatgtgccgccgccggttcatctgccgncgncaccatgccactaccctactcaaccgncccggnctcagcctcatccccagccacacncatgcccgtgccaacagccgcatncaagcccgtgccagctgcagggaacctgcggcgttggcag

SEQ ID NO: 4606 - DNA, 152 bp, Zea mays
  Clone ID: LIB3061-003-Q1-K1-B11
gcagcatagaaagcacactagcgtaccatcaatggcagtcaaagaatgttgcctccctagcggcttgatcgatctgcaagggctgctacggcgaccattgatccggaatgtctccaagctcatatatccttgctcgatccgatgtacctgtc

SEQ ID NO: 4607 - DNA, 244 bp, Zea mays
  Clone ID: LIB3061-003-Q1-K1-B12
attgagaccaactagcaacatagaaagcacaatagtgtaccaacaatggcagccaaagtgattttgcctccttatgctccttggtctttctgcaagtgctgctacggcgaccattttcccacaatgctcacaagctcctatagcttcccttcttcccccgtacctctcaccagcggtgtcttcggtatgtgaaaacccaattcttcaaccctataggatccaacaggcaatcgcagctggcatc

SEQ ID NO: 4608 - DNA, 166 bp, Zea mays
  Clone ID: LIB3061-003-Q1-K1-B2
gtgcgatttcgatctcgcagccaccttttttttgttctgttgtgtatctagtagttggaggagatatgccgtttggacttgcattggacacgaacctaaggccttaacagattagaacctgggaaggtgaatggaatggccaggtggaaaaattaagtattggggg

SEQ ID NO: 4609 - DNA, 389 bp, Zea mays
  Clone ID: LIB3061-003-Q1-K1-B3
ggccaaagattttcttcccttcttgcagcggaacagaaggcattcggccatcgttgaatatgtttttagtggccatcggttcaaactaacaattcccaaggagacttgtagtatcgccttctcattatctggtgtccgttgtcctggtaaaggcgagccatactcagacgaagctattgctttgatgaggagaaggatacttcaacgagatgtggagatagaggttgaagcagttgataggacaggaacgttcataggttctttgtgggagtccaagaccaacatgggctctgtgcttctggaagctggacttgccaagctgagttcatttggcttggataggacctcagatgcttatatcctaacaagagctgaacagtctgcgaagc

SEQ ID NO: 4610 - DNA, 332 bp, Zea mays
  Clone ID: LIB3061-003-Q1-K1-B4
caactagcaacatagaaagcacaatagtgtaccaacaatggcagccaaaatattttgccgccttatgctccttggtctttctgcaagtgctgctacggcgaccattttcccgcaatgctcgcaagctcctatagcttcccttcttcccccgtacctctcaccagcggtgtcttcggtatgtgaaaacccaattcttcaaccctacaggatccaacaggcaatcgcagctggcatcttacctttatcacccttgttccttcaacaatcatcagccctattacaacagttacctttggtgcatttattggcacaaaacatcaaggcacaacaac

SEQ ID NO: 4611 - DNA, 376 bp, Zea mays
  Clone ID: LIB3061-002-Q1-K2-H8
gcaacatagaaagcacaatagtgtaccaacaatggcagccaaaatattttgcctccttatgctccttggtctttctgcaagtgctgctacggcgaccattttcccgcaatgctcgcaagctcctatagcttcccttcttcccccgtacctctcaccagcggtgtcttcggtatgtgaaaacccaattcttcaaccctacaggatccaacaggcaatcacagctggcatcttacctttatcacccttgttcctccaacaatcatcagccctattacatcagttacccttggtgcatttattggcacataacatcagggcacatcaactacaacaacttgtgctagcaaaccttgctgcctactctcagcaacagcag

SEQ ID NO: 4612 - DNA, 412 bp, Zea mays
  Clone ID: LIB3061-003-Q1-K1-B5
atttaggcgatgccaaagctgtgaacaaaatattttcggagaacgcatttgatgctgttatgcactttgctgctgttgcttatgttggtgagagcacaatggagccactcaggtactaccacaacataacgtcaaacacattgacagttcttgaggcaatggcagcacataatgtaaatactctgatttactcgagtacgtgtgcaacctatggtgaacctgatacaatgccgattgtagaaacaactcctcagaatcctatcaatccatatggtaaggcaaagaagatggcggaggacatcatcttagattttacaaaatcaaagaagaattcaaatatggctgtcatgatcttaagatacttcaacgtgattggatcagacccagagggacggctaggagaagctccaag

SEQ ID NO: 4613 - DNA, 327 bp, Zea mays
  unsure (1)..(327): unsure at all n locations; Clone ID: LIB3061-002-Q1-K2-G11
cgagcaggaggcggacaaggtaagcagcaatcgcaggaaccctagcgccgccgcacccgcaggaatgggtatcgacctcgtcgccggtgggaggaataagaagaccaagcgcactgcgcccaagtctgacgatgtctacctcaagctcctcgtcaagctctaccgtttcttggtcaggaggaccaagagcaatttcaacgctgtcattctcaagaggcttttcatgagtaaaaccaaccgaccaccaatctccatgcgccgncttgtcaaagttatggaaggaaaggagaagaacattgctgtcattggtggcacagtcacagatga

SEQ ID NO: 4614 - DNA, 359 bp, Zea mays
  Clone ID: LIB3061-002-Q1-K2-G12
gacaaaaacaagtacaacacacccaaatacagatttgttgtgcgatttaccaacgaggacatcactgcacaaatcatatctgctagtatagcgggtgatatggttcttgcttctgcctactctcatgagttgccacgatatggtcttgaagttggtctgaccaactatgcagctgcctactgcactggacttctgttggctcgccgtgtgctaaagatccgtggtttggataaggagtatgagggcaatgttgaggccactggtgaggacttctctgttgagccagctgatgagaagaagccattccgtgctctcttggatgttggccttatcaagactaccacagggaaccgggtctt

SEQ ID NO: 4615 - DNA, 188 bp, Zea mays
  Clone ID: LIB3061-002-Q1-K2-G2
gcgcacctccgttcacgaggcggaagcatgagtcgccacccgatcactaagtgggcacagaggtccgacagggtgttcttgacgatagagctgcccgacgcccaggatgtgaagctgaacttgaagcctgaaggccatttcaacttctcagctaagggctcagatgacttgcgctatgagtttgacat

SEQ ID NO: 4616 - DNA, 378 bp, Zea mays
  Clone ID: LIB3061-002-Q1-K2-G3
tcggttcacggaggaagagcaagcagccgcagcatacaacgctcttcaagggcgcttttactctggccgtcctataattgttgagtattctactgtgaccgacttccgtgaagcaacctgtaggcagtttgaggagaacagctgcaaccgtggtggctactgtaatttcatgcatgtgaagcatattggcagggatctcacgaggaagctgtatgggcgttctgcttccaggaggtaccatgggagaagccgaagccgaagcccgtcaccacaaaggaggggccaccgtgaccgtgatgactaccaccaccgtgaccgtgatgactaccgtggtggcggcggtggtggaaggggaagaggtagcaggtatgacaggta

SEQ ID NO: 4617 - DNA, 424 bp, Zea mays
  unsure (1)..(424): unsure at all n locations; Clone ID: LIB3061-002-Q1-K2-G4
tcgaacagaacatgctctttctacagctcgttgaagttttaaattatattggcattcgtgttgtcaagtctgaactaaagcctcagccaaggtggcatgtctgctaaggtgccaaggtactgttatcacatacttaagaggccactgtcaatgaccacacaaacttggttaaattgcatatgggttttcctgtcatcagttctaattcttgtgcattcatattttgaaatgaatgatttaaatgggctacctcacacatgnctttaatggtattcaaggaaccatgttttggttcagaagcttgcatatgcatgacgcatgcagctgacacgcccatatctatccacggggttatattatctgaagattcatatatggataagtgatggtctaagatttggtgacatggattgggaattttggc

SEQ ID NO: 4618 - DNA, 341 bp, Zea mays
  Clone ID: LIB3061-002-Q1-K2-G6
cattcatcccgcgtgctctctctctctctctctctctctctcgggccgtggcgtcgagtgggcgaccgccgccgcccccgtgccgtgcgctctctctctctctcgtgtcgacgggtgggtgggcgaccgtaggccgccgccgccgcctaggccaggtgcccaggtcgaccttcaacagcgacgagcatccaccagatttctacatgagtgtgatcttcctattgtgaattcagacgcaatcaagtatggcttcaatggcaatcattaggagaaggaagtatttcttggatcatgttaacacacctaccatttcatcgtctgctttctttacattccaacat

SEQ ID NO: 4619 - DNA, 313 bp, Zea mays
  Clone ID: LIB3061-002-Q1-K2-G7
ctgcctactctcagcaacaactactaccattcagccagctagctggtgtgagccctgctaccttattgacacaaccacagttgttgccgttctaccagcacgctgcgcctaacgctggcaccctcttacaactgcaacaattgctgccattcaaccaacttgctttgacaaacccagcagcattctaccaacaacccatcattggtggtgccctcttttagatgtcttatgagttatagttcaataataaagttttttgtctgatgtttgtggcttcccagaaataagaaagtacatttctagattcttaaaa

SEQ ID NO: 4620 - DNA, 304 bp, Zea mays
  Clone ID: LIB3061-002-Q1-K2-G8
tcggtggtttgtcaccaattgataccttaactgcggtaaaagctcaacatgtcaaggagagcaacccccactgtggcatagactgcaacgacgttggcaccaccgacatgaatgaacagaacgtcttcgagaccctgattggcaagcagcaacagatcttgcttgccacccaggtggtgaagatgatcctgaagatcgacgatgtcatctgaccgttcgagtactgacagaaagaatgaacgaatggctatgctggatatgcgtaggcggcattggtgatgtgtcgatcggagtacctacttat

SEQ ID NO: 4621 - DNA, 347 bp, Zea mays
  Clone ID: LIB3061-002-Q1-K2-G9
caacaagcaacatagaaagtggaatccagtagcaacaatagagcaacaatggcgaccaagatattttccctccttatgctccttgctctttctacatgtgttgctaacgcgacaattttccctcaatgctcacaagctcctatagcttcccttcttcccccataccttccatcaattatagcttcaatatgtgaaaacccagctcttcaaccatataggcttcaacaagcaatcgcagcaagcaacatacctttatcgcccttgttgtttcaacaatcgccagccctatctttggtgcagtcattggtacaaaccatcaaggcacaacagctgcaacaactcgtgct

SEQ ID NO: 4622 - DNA, 77 bp, Zea mays
  Clone ID: LIB3061-002-Q1-K2-H1
cccgtctcgacccactcgttcgcaccaactatcttcatataaagcacattattgtaccaacaatttcatccataata

SEQ ID NO: 4623 - DNA, 400 bp, Zea mays
  Clone ID: LIB3061-002-Q1-K2-H11
gcagcaccccgatcctgggccagtgcgtcgagttcctgaggcatcagtgcagcccgacggcgacgccctactgctcgcctcagtgccagtcgttgcggcagcagtgttgccagcagctcaggcaggtggagccgcagcaccggtaccaggcgatcttcggcttggtcctccagtccatcctgcagcagcagccgcaaagcggccaggtcgcggggctgttggcggcgcagatagcgcagcaactgacggcgatgtgcggcctgcagcagccgactccatgcccctacgctgctgccggcggtgtcccccactgaagaaactatgtgctgtagtatagccgctggctagctagctagttgagtcatttaacggcgatgattgagtaataatgtgtcacgca

SEQ ID NO: 4624 - DNA, 327 bp, Zea mays
  Clone ID: LIB3061-002-Q1-K2-H12
gcgactgccgccgcggccgtggctgggaaacggtggccggcgccatccttgaggtggtgtgacgatcgacgacgtgcatggcgtggcgcagagctaataataaaagggtagtgtacgcttaccgcgtacgtacgtgtcaccgggcgtggcactctccagtctccagggacccatccaccaagtgctactgctccttcgtagggagacgtgggaataaagagtggtagctgcatgcgcgtacggcggccatggctctccgatgagagagctagctgtgtacgtgtgttcgtgatgttgttccatgcatgacatgtatacgtcttgcct

SEQ ID NO: 4625 - DNA, 357 bp, Zea mays
  Clone ID: LIB3061-002-Q1-K2-H2
tcggacactcttgcgttatccacggaaccctattacaactacaacggctgtcgccctatgtggaacgcgcattgtcagagcgagcggtctactagcagctacacatcataggtggtgacactgcttagatggctcaatagctgtaattcaataataaagcctcttggatgatgtatgttgacagccagaaatccgaagtgacatatccagcaggatccatcaggcaatcgcaacaggcatcttaccattatcacccttgttccttcaacaaccgtcagccctattacagcagttacctttggtccatttggtggcacataacatcatggcacaacaactacaacaacttgtgctagc

SEQ ID NO: 4626 - DNA, 359 bp, Zea mays
  unsure (1)..(359): unsure at all n locations; Clone ID: LIB3061-002-Q1-K2-H3
tcgtacactcgttcgtaccaactagcaacatagaaagcacaatactgtaccaacaatggcggccagaatattttgccttcttatgctccttggtctttctgcaagtgctgctactgagaccattttgccgcaatgctcgcaagctcctatagcttgccttcttaccccgtacctctcaccagcggtgtcttcggtatgtgaaaacccaattcttcaaccctacacgatccaacaggcaatcacagctggcatcttacctttatcacccttgttcctccaacaatcatcagccctattacatcagttaccnttggcgcattcattggcacaaaacatcatggcacaacaactacaacaac

SEQ ID NO: 4627 - DNA, 371 bp, Zea mays
  unsure (1)..(371): unsure at all n locations; Clone ID: LIB3061-002-Q1-K2-H4
tagcaacatacatagtgaagtacactagcaacatcttagcaccaatgggagccaagatttttgcgcctccttgccctccttgctctttcagcaagcgctgctacctcgactttgattccacaatgctcacaacaatacctgtctccggtgacagccgcgggatttcaatacccaactatacaatcctacatggtacaagaggccatccaagcaagcatcttacggtcattagcattaaccctccaacaaccatatgctctattgcaacagccatccttagtgcatctgtatctncaaagaatcgcggcacaacaactacaacaacagttgctaccaacaatcaatcaagtagttgcagcgaaccttgctgc

SEQ ID NO: 4628 - DNA, 376 bp, Zea mays
  Clone ID: LIB3061-002-Q1-K2-H5
ccgaattcccaggcaggcaggtcggcgaggagggcaggaagaccgaagaccgagccgtgcgggggctcgggacgggaacgggacaggaccccaaaatctcagatccttcctgcccgcccgcccgtgcccgtcgacgcgtcgttcttgccggccgcgcctcaccttcgtcctctcctcctccagggggatcggatacgccacaggctgcgcgatggtgctgtgggtcttcggctacggctccctcatctggaaccccggcttcgacttcgacgacaaaatcctcggcttcatcaagggctacaagcgcacctttaatctcgctggcattgaccacagaggcacaccggagcattcggcgaggacctgcacgcttgaa

SEQ ID NO: 4629 - DNA, 382 bp, Zea mays
  Clone ID: LIB3061-002-Q1-K2-H6
taaaggaacagctgcggtatgttggtaggctttttgtaaaggcttcaggaagaccacgggacattctgctgaagttaaggatgttggcaggtttttcacaggatgatgatattgaactttatgaggaaattaagttcgagcccaatgtgatgtgtgaattccttgaccacctgcttttggttcgatctttccaacttggaaacggggatataatttggtttcaaaagccttcaaaaccatatagtgcataacgatatcgaattcctgacgttccattccttttgacgtatatacgtaaccggcaaggtgtgcactttccgtcattggagaagccaaagacgacaaattttgcctgagatgtcaaaaattttcacatatgatc

SEQ ID NO: 4630 - DNA, 369 bp, Zea mays
  Clone ID: LIB3061-002-Q1-K2-H7
gtaccatcaatcatcattcatcttagtagtataggcaccaaatcaaatctgcaacatcaattatctaactccaaaaaccatgaagctggtgcttgtggttcttgctttcattgctttagtatcaagtgtttcttgtacacagacaggcggctgcagctgtggtcaacaacaaagccatgagcagcaacatcatccacaacaacatcatccacaaaaaccacatcatcaaccacaaccacatcatcaccagcagcagcatcaccaacatcatcaagttcacatgcaaccacaaaaacatcagcaacatcaagaagttcatgttcaacatcaacaacaacaaccgcagcaccaacaacaacaacaacaaca

SEQ ID NO: 4631 - DNA, 356 bp, Zea mays
  Clone ID: LIB3061-002-Q1-K2-E6
atattttgagcattcagaaacacaccaagcgaagcgcactagcaacgacctaacaacaatggctaccaagatattagccctccttgcgcttcttgccctttttgtgagcgcaacaaatgcgttcattattccacaatgctcacttgctcctagtgccattattccacagttcctcccaccagttacttcaatgggcttcgaacacctagctgtgcaagccaacatgcaacaacaagcgcttgcggcgagcgtcttacaacaaccaattgcccaattgcaacaacaatccttgccacatctaacaatacaagccatcacaacgcatcagcaacaacagttcctaccagcactgagcc

SEQ ID NO: 4632 - DNA, 333 bp, Zea mays
  unsure (1)..(333): unsure at all n locations; Clone ID: LIB3061-002-Q1-K2-E8
ctcgcttctgagtttggtcgcggttttgcccctcccttcttgaactcctccgctcgatcgaactcagttccgattcggcaggttcattgtgaagttgaggtgggtggtataagcatcgaagagagcatgagcactgccagtggtacaaggcgtgcaccaagaagacagtcgcaagatgggtctgctgataaagtagtggtgatcatcgaagcaacctacccggtggtggggagccgtcgtggaccaccgacccctgttcctggcgcccaaaactcacccattgatgtggaggccatcgaagatgaagttcacgcagtatcntcctcgcgagtg

SEQ ID NO: 4633 - DNA, 344 bp, Zea mays
  Clone ID: LIB3061-002-Q1-K2-E9
gaccaactagcaacatagaaagcacaatagtgtaccaacaatggcagccaaaatattttgcctccttatgctccttggtctttctgcaagtgctgctacggcgaccattttcccacaatgctcacaagctcctatagcttcccttcttcccccgtacctctcaccagcggtgtcttcggtatgtgaaaacccaattcttcaaccctataggatccaacaagcaatcgcagctggcatcttacctttatcacccttgttccttcaacaatcatcaagcctattacaagaattacctttggtgcatttaatggcacaaaacattaaggcacaacaactatcacaac

SEQ ID NO: 4634 - DNA, 358 bp, Zea mays
  Clone ID: LIB3061-002-Q1-K2-F1
tcgattgagaccaactagcaacatagaaagcacaatagtgtaccaacaatggcagccaaaatattttgcttccttatgctccttggtctttctgcaagtgctgctaccgcaaccattttcccacaatgctcacaagctcctatagcttcctttcttcccccatacctctcaccagcggtgtcttcagtatgtgaaaacccaattcttcaaccctacaggatccaacaggcaatcgcagcaagcatcttacctttatcacccttgttcctccaacaaccgtcagccctattacagcagttacctttggtgcatttgttggcacaaaacatcaaggcacaacaactacaacaacttgtgc

SEQ ID NO: 4635 - DNA, 365 bp, Zea mays
  Clone ID: LIB3061-002-Q1-K2-F10
gttggcttctcctgccccttcggttcgggttcgggttcgtgaggttctccggggttcggtttcgtgggtgggcggatcgagatggcggcgtcagatgttgagtaccgctgcttcgtcggcggcctcgcctgcgccacggacgaccactcgctccacaacgccttcagcacctacagctaggtcctcgagtccaagatcatcctcgatcgtaagacgcataagtcccgcggcttctgctacgtcaccttctacacggaagaggcgatgcggaacgccatcgagggcatgaacggctaggagctggacggtcgcaacatcaccgtgaacgatgcccattcccgcagtggacgtcgaagctgtggcgg

SEQ ID NO: 4636 - DNA, 351 bp, Zea mays
  Clone ID: LIB3061-002-Q1-K2-F11
caactagcaacatagaaagcacaatagtgtaccaacaatggcagccaaaatattttgcttccttatgctccttggtctttctgcaagtgttgctaccgcaaccattttcccacaatgctcacaagctcctatagcttcccttcttcccccatacctctcaccagcggtgtcttcaatgtgtgaaaacccaattgttcaaccctacaggatccaacaggcaatcgcaacaggcatcttaccattatcacccttgttccttcaacaaccgtcagccctattacagcagttacctttggtccatttggtggcacaaaacatcaaggcacaacaactaccacaacttgggctaac

SEQ ID NO: 4637 - DNA, 412 bp, Zea mays
  Clone ID: LIB3061-002-Q1-K2-F12
cctttcactacaacctctgccagtcttatgccctatggacccattacatgctcaacaagaatgtatgctactctacttactctacaccacatgagccgttgcgccatacccacattccggataagtattcaggtacatcttctgcactctactgctgcaaattctttctctctctctgtctgtctatctatctgtctaaccctacatgattctacatgcaatcgcatcaggcatcacaccattatcacccttgatcctccaacaaccgtcaggcctattacagcagttacctttggctcatttggtggcacaaaacatcagggcacaacaactacaacaacttgtgctagcaaaccttgctgcgaactcttaacaacagcagttaattccattcaaaccactgggtgtgttg

SEQ ID NO: 4638 - DNA, 365 bp, Zea mays
  Clone ID: LIB3061-002-Q1-K2-F2
atgtcgaccagcacattcgctacttcctgcacgctgttgggcaatgttagaacaacgcaggcctcccagacagcggtgaagagcccttcgtctctaagcttcttcagccaagttacgaaggttccaagcctgaagacctccaagaaactggatgtctccgccatggctgtatacaaggtgaagcttgtcgggcctgaaggtgaagagcacgagtttgatgctccagacgacgcctacatccttgacgcagccgagactgccggtgtggagttgccatactcgtgccgtgctggggcttgctccacctgtgccggcaaaatcgagtctggttcggttgaccagtcggatgggtcctttcttgatga

SEQ ID NO: 4639 - DNA, 346 bp, Zea mays
  Clone ID: LIB3061-002-Q1-K2-F3
tgattatccgccaagaacaaagcaaggtgctcctgttcctggtctactgacaaatgtggagcatgatcagcttgcgttaaatctctgtcgaacattagctttgctgcagcgatattgggatgcactgcagattatcaaccgaaccctcaaacttggaaatgactgcactcactggtgacaaaaaagaggaactcagatccttgggtgctcaaatagcttatagagctccagatcccagtcatggctataagtatgtacgttacgttgctaagcagcacccatattctattgccgcatggaattcctactataaggtggcatcaagaatagaggacaggtctacaca

SEQ ID NO: 4640 - DNA, 289 bp, Zea mays
  Clone ID: LIB3061-002-Q1-K2-F4
caactagcaacatagaaagcacaatagtgtaccaacaatggcagccaaaacattttgcctccttatgctccttggtatttctgcaagtgctgctacggcgaccattttcccgcaatgctcacaagctcctatagcttcccttcttcccccgtacctctcaccagcggtgtcttcggtatgtgaaaacccaattcttcaaccctacaggatccaacatgcaatcgcagctggcatcttacctttatcacccttgctccttcaacaatcatcagccctattacagcagtta

SEQ ID NO: 4641 - DNA, 332 bp, Zea mays
  Clone ID: LIB3061-002-Q1-K2-F5
actgcagctgataccaactatcagtcgcgtagacgcagcgaacgcttgctgctgatctgcagcatcggcagtcgtcttagcattgcatcgactggctgcagtgaacagctgctgtctacttgcaggcacaacatctactaccatgtaatgatcacgctggaagccatgatggcttcttactgcgtcaacatcttctgccattacatctggaagctgtggaaaacgtagatcattccatgcgacaacgtcaatgggtgccactttaccgacagctagtgcgatacatatacgcctgtttgcaacagcaccatttgctagcattctacccacat

SEQ ID NO: 4642 - DNA, 326 bp, Zea mays
  Clone ID: LIB3061-002-Q1-K2-F6
caatagtgtaccaacaatggcagccaaaatattttgcctccttatgctccttggtctttctgcaagtgctgctacggcgaccattttcccgcaatgctcgcaagctcctatagcttcccttcttcccccgtacctatcaccagcggtgtcttcggtatgtgaaaacccaattcttcaaccctacaggatccaacaggcaatcacagctggcatcttacctttatcacccttgttcctacaacaatcatcagccctattacatcagttacctttggtgcatttattggcacaaaacatcacggcacaacaactacaacaacttgtgc

SEQ ID NO: 4643 - DNA, 348 bp, Zea mays
  Clone ID: LIB3061-002-Q1-K2-F7
tttgagcattcagaaacacaccaagcgaagcgcactagcaacaacctaacaacaatggctaccaagatattatccctccttgcgcttcttgcgctttttgcgagcgcaacaaatgcgtccattattccacaatgctcacttgctcctagttccattattccacagttcctcccaccagttacttcaatggccttcgaacacccagctgtgcaagcctataggctacaacaagcgattgcggcgagcgtcttacaacaaccaattgcccaattgcaacaacaatccttggcacatctaacaatacaaaccatcgcaacgcaacagcaacaacagttcctaccagcactg

SEQ ID NO: 4644 - DNA, 360 bp, Zea mays
  Clone ID: LIB3061-002-Q1-K2-F8
gttcaattcaagaaaccagctttagctgttgctacttctagcgctgagcagtctgctaccactgcagaagggatgcggcccaaaatttgagttgcctttgtgaacagcgaggtcgatggcccagattaccccccgaagtaagcgttgagtggcacaccgtgctgtggagctctaaccggtggataatagacaaaaaaggatagtgaggtggtgtatataagaaaagggattctattcgacaatctcttatagggtttgttgcttccttctttctagtgttcagagtcgtcgcaacctgtaatacatggcatgttggtgcttaaatgggtttttttgtgaaatgcattgatgagttgtcgg

SEQ ID NO: 4645 - DNA, 373 bp, Zea mays
  Clone ID: LIB3061-002-Q1-K2-F9
ggtgtctgcaattggaccctccactagactggtttggctcgaaagtcccacgaaccctcgtcagcaaattactgacattaagacaatctcagagatagcacattctcatggtgctcttgttttggttgacaacagcatcatgtctccagtgctctcccgtcctatagaactgggagctgatatcgtgatgcactcggctaccaaatttatagcgggacatagtgatcttatggctggaattcttgcagtgaagggtgagagtttggctaaagaagtaaggtttctgcaaaatgctgaagggtcgggtctggcaccttttgactgctggctttgctttgagggaatcaaaaccatggctctgccggtggagaaa

SEQ ID NO: 4646 - DNA, 349 bp, Zea mays
  Clone ID: LIB3061-002-Q1-K2-G1
ctggacgtcagcctagcaattagctcatcgactccagattggagaactcgacaccatgaaggtgctgatcgttgcccttgctctcctggcgctcgctgcgagcgccgcctccagtacaagcggcggctgtggctgccagacaccaccgtttcatctaccgcctccgttctatatgccgcctccgttctatctgccgccgcagcagcagccgcagccatggcaataccccactcaaccaccgcagctaagcccgtgccagcagttcggatcctgcggcgtcggcagcgtcggcagcccgttcctgggccagtgcgtcgagttcctgaggcaccagtgcagcccggcggcg

SEQ ID NO: 4647 - DNA, 332 bp, Zea mays
  Clone ID: LIB3061-002-Q1-K2-E4
tgagcattcagaaacacacctagcgaatcgcactagcaacgacctaacaacaatggcttccaagacattatccctccttgcgcttcttgccctttttgtgagtgcaacaaatgcgttcattattccacaatgctcacttgctccgagtgccattattccacagttcctccctccagttacttcaatgggcttcgaacacccagctgtgcaagcctataggctacaacaagcgcttgcggcgagcgtcttagaacaaccaattgcccaattacaacaacaatccttggcacatctaaccatacaaaccatcgcaacgcatcagcaacaagcac

SEQ ID NO: 4648 - DNA, 315 bp, Zea mays
  Clone ID: LIB3061-002-Q1-K2-C8
caccgcttcttatcctcagttccaaccccagctcctcagttctcgtcatcgtcctcgcgctcagtgtcatttgcagttcccggtagcagccatggcgtcggtgcagctgtctgggccgcgggtggtggcggctgcgaaaccggctgcgttgggcgggctcctcctgacgccgtcccttgcggtgccaaaggggcggagggccaggggcctcgtggtgagggccgtcacggtcgtgtcacctaagtatacatccataaaaccattgggagacagagtacttgtgaagatcaagacctctgaggctaaatctgatgg

SEQ ID NO: 4649 - DNA, 255 bp, Zea mays
  unsure (1)..(255): unsure at all n locations; Clone ID: LIB3061-002-Q1-K2-C9
cccacgcgtccgcccacgcgtccgccgcacccttgcggactataacatccaaaaggagtctacgctccacctcgtgcttaggctccgcggtggaatcattgagccctctctgcaggcgctcgctcgcaagtacaaccaggacaagatgatctgccgcanatgctatgcacgactgcaccctagggctgtcaactgccgcaggaagaagtgtggtcacagcaaccagctgaggcccaggaagaagatcaagaactg

SEQ ID NO: 4650 - DNA, 352 bp, Zea mays
  Clone ID: LIB3061-002-Q1-K2-D1
tcgtgagaggttcccggtctgccccgagagcatgagggagtacataccctgcctcgacaacgaggatgatatcaagcggctgccctcgacggagcgcggtgagcggtttgagcggcactgccctgccaaggacaagggtctcagctgcctcgtgccggcgcccaacgggtacaaggcgcccatcccctggcctcggagcagagacgaggtctggtttagcaacgtgcctcacacaagattgattgatgacaaaggaggacagaattggatcaccaaggtcaaagataaattcagatttcctggaggcggaactcaattcattcatggagcaaatcaatacctagaccagatc

SEQ ID NO: 4651 - DNA, 336 bp, Zea mays
  Clone ID: LIB3061-002-Q1-K2-D10
ctcctctcctctcgccggcgcatcgcccgactgtcagtcagcctcagccatggccgcggaggaggagcagggcttccgcccgctggacgaggcgtccctgctcgcctacatcaaggccacgccggcgctcgcctcccgcctcggcggcggtggcagtctagactccatcgagatcaaggaggtcggcgacggcaacctcaacttcgtctacatcgtgcagtccgaggccggcgccatcgtcgtcaagcaggcgctcccgtacgtgcgctgcgtgggggactcgtggcccatgacgcgggagcgcgcctacttcgaggccttcacgctgcgggagca

SEQ ID NO: 4652 - DNA, 348 bp, Zea mays
  Clone ID: LIB3061-002-Q1-K2-D11
ttgagaccaactagcaacatagaaagcacaatagtgtaccaacattggcagccaaaatattttgcttccttatgctccttggtctttctgcaagtgttgctaccgcaaccattttgccacaatgctcacaagctcctatagcttcccttcttccaccatacctctcaccagcggtgtcttcaatgtgtgaaaccccaattgttcaaccctacaagatccaacaggcaatcgcaacatgcatcttaccattatcaccctttgttcttcaacaaccgtcagacctattacagcagctacctttggtccatttggtggcacaaaacatcatggcacaacaactacaacaac

SEQ ID NO: 4653 - DNA, 409 bp, Zea mays
  unsure (1)..(409): unsure at all n locations; Clone ID: LIB3061-002-Q1-K2-D2
gcgaggctcaagacgtacgagggcgtcccgccgccgtacgacaagaccaagcgtatggtcatccctgacgctcttaaggttctgaggctacagcctggacacaagtactgcctcctcggcgagctctctaaggaggtcgggtggaactaccatgacaccatcagggaacttgaggagaagaggaaggagaaggccaaggttgcctacgagaggaagaagcaattggccaagctgcgtgtcaaggccgagaaggcagccgaggagaagttggggtctcagttggagattcttgcccctatcaagtactgangagctgtgctttgtcatcagttttggggaacatctagtctttggtttaagtgttcggtaacagtttgtgacagtataatctggtaaaccgtgttatttt

SEQ ID NO: 4654 - DNA, 294 bp, Zea mays
  Clone ID: LIB3061-002-Q1-K2-D3
cctcgggttcggattcggtttcgtgaggttctccggggttcggtttcgttggtgagcggatcgagatggcagcgtctgatgttgagctccgctgcttcgtcagcggcctcgactgggccacggacgaccactccctgcacaacgccttcagcacctacggctaggtcctcgagtccaagatcatcctcgatcgggagacgcagaggttccgcggcttcagcttcgtcaccttctgcacggacgaggcgatgcggaacgccatcgatggcatgaacggcaaggagctggacggtc

SEQ ID NO: 4655 - DNA, 161 bp, Zea mays
  Clone ID: LIB3061-002-Q1-K2-D4
gaacaacccatcatcggtggtgccctcttttacattgctgatgagttatagttcaatagtcaagttactaagacacgcactcaatgatttctgcaacgcgagagcaatcatgcagacagtcagcacagtacatctctcgagtcggtagtccgaatggtcaa

SEQ ID NO: 4656 - DNA, 407 bp, Zea mays
  Clone ID: LIB3061-002-Q1-K2-D5
cgcttcttctgattccgaatctgatagtgaagatgttgatgagctccttggcactgttgcatctgtcaatgttattgaagctactggtgttgctataagtgaacacctctcaaagatgaaacttgatgatgacagccttgcagtgaagactaactcaagttgctcagcagcagaacagcatccagttgattcagtaaaagtacataacaatgcatctgttgtgctgaccaaaaaaatatctgatttatctcttgagtggcgatcagatttatcgaaaactgatgtctggtatgccagttttggatcaaacatgtggagaccaagatttctatgctatattcaaggagggaaggctgagggtatgaatataccatgctgcggatcacgtgacacaagctcaccaaagg

SEQ ID NO: 4657 - DNA, 316 bp, Zea mays
  Clone ID: LIB3061-002-Q1-K2-D6
cctatctttggtgcagtcattggtacaaaccatcagggcagaacagttgcagcaactcgtgctaccagtgatcagccaagtagctctggcaaacctttccccctactctcagcaacaacaatttcttccattcaaccaactgtctatactgaaccctgctgcttatttgcagcaacaacaactactaccattcagccagctagctactgcctactctcagcagcaacaatttcttccatttaaccaattggccgcactgaacccctctgcttatttccagcagcaaatactactaccatttggccagctagctaca

SEQ ID NO: 4658 - DNA, 388 bp, Zea mays
  Clone ID: LIB3061-002-Q1-K2-D7
gcaacatagaaagcacaatagtgtaccaacaatggcagccaaaatattttgcttccttatgctccttggtctttctgcaagtgctgctaccgcaaccattttcccacaatgctcacaagctcctatagcttcctttcttcccccatacctctcaccagcggtgtcttcagtatgtgaaaacccaattcttcaaccctacaggatccaacaggcaatcgcagcaggcatcttacctttatcacccttgttcctccaacaaccgtcagccctattacagcagttacctttggtgcatttgttggcacaaaacatcaaggcacaacaactacaacaacttgtgctaagaaaccttgctgcctactctcagcaacagcagtttcttccattc

SEQ ID NO: 4659 - DNA, 310 bp, Zea mays
  Clone ID: LIB3061-002-Q1-K2-D8
agaccattagctttatctactccagagcgcagaagaacccgatcgacaccatgagggtgttgctcgttgccctcgctctcctggctctcgctgcgagcgccacctccacgcatacaagcggcggctgcggctgccagccaccgccgccggttcatctaccgccgccggtgcatctgccacctacggttcacctgccacctccggtgcatctcccaccgccggtccacctgccgccgccggtccacctgccaccgtcggtccatgtgccgccgacggttcatctgccgtcgtcaccatgccactaccctac

SEQ ID NO: 4660 - DNA, 217 bp, Zea mays
  Clone ID: LIB3061-002-Q1-K2-E1
tgccgttctaccagcacgctgcgcctaacgctggcaccctcttacaactgcaacaattgctgccattcaaccaacttgctttgacaaacccagcagcattctaccaacaacccatcattggtggtgccctcttttagatttcttatgagttatagttcaataataaagttttttgtctgatgtttgtggcttcccagaaataagaaagtacatttct

SEQ ID NO: 4661 - DNA, 339 bp, Zea mays
  Clone ID: LIB3061-002-Q1-K2-E10
attttgagcattcagaaacacacctagcgaagcgcactagcaacgacctaacaacaatggctaccaagatattatccctctttgcgcttcttgccctttttgtgagcgcaacaaatgcgttcattattccacaatgctcacttgctcctagtgccattattccacagttcctccctccagttacttcaatgggcttcgaacacccagctgtgcaagcctacaggctacaacaagcgcttgcggcgagcgtcttacaacaaccaattgcccaattacaacaacaatccttggcacatctaaccatacaaaccatcgcaacgcaacagcaacaacaatttc

SEQ ID NO: 4662 - DNA, 326 bp, Zea mays
  Clone ID: LIB3061-002-Q1-K2-E11
agaaacacacctagcgaagcgcactagcaacgacctaacaacaatggctaccaagatattatccctctttgcgcttcttgccctttttgtgagcgcaacaaatgcgttcattattccacaatgctcacttgctcctagtgccattattccacagttcctccctccagttacttcaatgggcttcgaacacccagctgtgcaagcctacaggctacaacaagcgcttgcggcgagcgtcttacaacaaccaattgcccaattacaacaacaatccttggcacatctaaccatacaaaccatcgcaacgcaacagcaacaacaatttc

SEQ ID NO: 4663 - DNA, 351 bp, Zea mays
  Clone ID: LIB3061-002-Q1-K2-E12
caactagcaacatagaaagcacaatagtgtaccaacaatggcagccaaaatattttgcctccttatgctccttggtctttctgcaagtgctgctacggcgaccattttcccgcaatgctcgcaagctcctatagcttcccttcttcccccgtacctctcaccagcggtgtcttcggtatgtgaaaacccaattcttcaaccctacaggatccaacaggcaatcgcagctggcatcttacctttatcacccttgttcctccaacaatcatcagccctattacaacagttacctttggtgcatttattggcacaaaacatcagggcacaacaactacaacaacttgtgctagc

SEQ ID NO: 4664 - DNA, 397 bp, Zea mays
  Clone ID: LIB3061-002-Q1-K2-E2
gcaacatagaaagtggaatccagtagcaacaatagagcaacaatggcgaccaagatactttccctccttatgctccttgctctttctgcatgtgttgctaacgcgacaattttccctcaatgctcacaagctcctatagcttcccttcttcccccataccttccatcaatgatagcttcagtatgtgaaaacccagctcttcaaccctataggctccaacaagcaatcgcagcaagcaacatacctttatcacccttgtttcaacaatcgccagccctatctttggtgcagtcattggtacaaaccatcaaggcacagcagctgcagcaactcgtgctacctgtgatcaaccaagtagctctggcaaacctttctccctactatcagcaacaacaat

SEQ ID NO: 4665 - DNA, 168 bp, Zea mays
  Clone ID: LIB3061-002-Q1-K2-E3
cgcgagagcaactaatgcgttcattattccacacagctcactagctccgagtgccattattccaccgctcctgcgtatacatgctttcatgcgcttgcaagagacatctgagcaagcctatagggtacgacaagctcttgcagtgagcgtcttatatacaaccaattg

SEQ ID NO: 4666 - DNA, 395 bp, Zea mays
  Clone ID: LIB3061-002-Q1-K2-C7
agaccaactagcaacatagaaagcacaatagtgtaccaacaatggcagccaaaatattttgcctccttatgctccttggtctttctgcaagtgctgctacggcgaccattttcccgcaatgctcgcaagctcctatagcttcccttcttcccccgtacctctcaccagcggtgtcttcggtatgtgaaaacccaattcttcaaccctacaggatccaacaggcaatcacagctggcatcttacctttatcacccttgttcctccaacaatcatcagccctattacatcagttacctttggtgcatttattggcacaaaacatcagggcacaacaactacaacaacttgtgctagcaaaccttgctgcctactctcagcaacagcagtttctttca

SEQ ID NO: 4667 - DNA, 197 bp, Zea mays
  Clone ID: LIB3061-002-Q1-K2-A9
cccacgcgtccgcccacgcgtccgcccacgcgtccggaagtgtgcgaatcacattgttccatcgaaacaactgatcttgggtggggattcaataggccatctggcatcgattctgattaaggtcgttgctctcgaggcagtcagaagagtttctaaagcaagataccccttcatatggaattctgttcaagcattgc

SEQ ID NO: 4668 - DNA, 337 bp, Zea mays
  Clone ID: LIB3061-002-Q1-K2-B1
attttcagcattcaaaaacacaccaagcgaagcgcactagcaacgacctaacaccaatggctaccaagatattagccctccttgcgcttcttgcccttttagtgagcgcaacaaatgcgttcattattccacagtgctcacttgctcctagtgccagtattccacagttcctcccaccagttacttcaatgggcttcgaacatccagccgtgcaagcctacaggctacaactagcgcttgcggcgagcgccttacaacaaccaattgcccaattgcaacaacaatccttggcacatctaaccctacaaaccattgcaacgcaacaacaacaacaaca

SEQ ID NO: 4669 - DNA, 176 bp, Zea mays
  Clone ID: LIB3061-002-Q1-K2-B10
agaatagctgccttgcaattcttgggcttataactgatagtccctccagtcaaatacacatgatattttaaacatgaagattgagctatatggagaactattttcttatctaaaatgtcatgtgaaaatggttggggctagaaacttgtttcacaacaaacaggtctagatcgcga

SEQ ID NO: 4670 - DNA, 242 bp, Zea mays
  Clone ID: LIB3061-002-Q1-K2-B11
agccacacccatgcccgtgccaacagccgcatccaagcccgtgccagctgcagggaacctgcggcgttggcagcaccccgatcctgggccagtgcgtcgagtttctgaggcatcagtgcagcccgacggcgacgccctactgctcggctcatgccagtcgttgccgagcagtgttgcagcactcagcagtggaccgacaccggacagcgactcgctgtctcagcatctgacacacgaacgca

SEQ ID NO: 4671 - DNA, 296 bp, Zea mays
  Clone ID: LIB3061-002-Q1-K2-B12
agcctcgcaacatcgagagcacactgccgtatcaacgatggcaccaactgtatggagcttgcttatgctgcttggtctttatgctggtgctgctaccgcagccattgaggcacaatggtaacaagatggtatagctctattgcttgcctcatacctatcaccagcggtgtcttcagtatgagaaaacccagctgttgaagcctacaggatccaacaagccaatgcatcaggcatctcaccagtataacccttggtactagaacgaccgtgagccctattacaggacttacctttgg

SEQ ID NO: 4672 - DNA, 272 bp, Zea mays
  Clone ID: LIB3061-002-Q1-K2-B2
tcgcctgcgcataggcagacagatacttaacgtagcgtactagctacgaggtgacaccacagagtctcaacagatattccttccttgtgcttgttgctcccatggcgagctcaacgaatgcttacattgtgtcgaaatgatcacttgctcctagtgccattgatagacagtttctcatttcagttacttaaatcgagttccatcgtccagctatgccagcttatactgtaccagacatggacgctgtcaagccgttcgaacaatatattgcc

SEQ ID NO: 4673 - DNA, 331 bp, Zea mays
  Clone ID: LIB3061-002-Q1-K2-B3
tcgagcattcagaaacacaccaagcgaagctacctagcaacgacttaacaacaatggctaccaagatattagccctccttgcgcttcttgccctttttgtgagcgcaacaaatgcgttcattattccacaatgctcacttgctcctagtgccattataccacagttcctccgaccagttacttcaatgggcttcgaacacctagctgtgcaagcctacaggctacaacaagcgcttgcggcgagcgtcttacaacaaccaattaaccaattgcaacaacaatccttggcacatctaaccatacaaaccatcgcaacacaacagcaacaaca

SEQ ID NO: 4674 - DNA, 357 bp, Zea mays
  Clone ID: LIB3061-002-Q1-K2-B5
cagcaagcaacatagaaagtagaatccattagcaacaatagagcaacaatggcgaccaagatattttccctccttatgctccttgctctttctacatgtgttgctaacgcgacaattttccctcaatgctcacaagctcctatagcttcccttcttcccccataccttccatcaattatagcttcagtatgtgaaaacccagctcttcaaccatataggcttcaacaagcaatcgcagcaagcaacatacctttatcgcccttgttgtttcaacaatcaccagccctatctttggtgcagtcattggtacaaaccatcagggcacaacagctgcagcaactcgtgctacctgtgatc

SEQ ID NO: 4675 - DNA, 336 bp, Zea mays
  Clone ID: LIB3061-002-Q1-K2-B6
agctcatcgactccagattggagaactcgacaccatgaaggtgctgatcgttgcccttgctctcctggcgctcgctgcgagcgccgcctccagtacaagcggcggctgtggctgccagacaccaccgtttcatctaccgcctccgttctatatgccgcctccgttctatctgccgccgcagcagcagccgcagccatggcaataccccactcaaccaccgcagctaagcccgtgccagcagttcggatcctgcggcgtcggcagcgtcggcagcccgttcctgggccagtgcgtcgagttcctgaggcaccagtgcagcccggcggcgacgcccta

SEQ ID NO: 4676 - DNA, 313 bp, Zea mays
  Clone ID: LIB3061-002-Q1-K2-B8
agctgccattgccatctactgacctgtgacctccgcatttccaaacagcccgagcgagctagagctagcagagcggcaggcacctccctcctcaaggaacatggcccgcacgcagcagttggcagtagtggcgaccgccgtggtggccttggtgctgctggcggcggcggcgacctcggaggcggccatcagctgcgggcaggtggcgtcggccatcgcgccctgcatctcctacgcgcgcggccagggctcggggccctccgccggctgctgcagcggcgtcaggagcctcaacaacgccgtccgcaccacc

SEQ ID NO: 4677 - DNA, 207 bp, Zea mays
  Clone ID: LIB3061-002-Q1-K2-B9
ccaacagcaacatagaaagtggaatccagtagcaacaatagagcaacaatggcgaccaagatactttccctccttatgctccttgctctttctgcatgtgttgctaacgcgacaattttccctcaatgctcacaagctcctatagcttcccttcttcccccataccttccatcaatgatagcttcagtatgtgaaaacccagctctt

SEQ ID NO: 4678 - DNA, 163 bp, Zea mays
  Clone ID: LIB3061-002-Q1-K2-C1
tcggctatttagggacaaatttggcgcaggagaaatttctactgttgttggagccagcgcgatttctggattcttcgcctcagcatgcagtttgccctttgactatgtgaagacacagattcagaagatgcaacctgatgctaatggcaaagaccctgtgtat

SEQ ID NO: 4679 - DNA, 381 bp, Zea mays
  Clone ID: LIB3061-002-Q1-K2-C10
gcaccgaggtgtttgagctcggtccatcattatatgtcgtagagcttaggaaatcccacggagactctacgttgtatagacagctgtgcgaaaggctctccgatgagctaggtgcctgcaagacagaccagatcgcgaggactgaatcatcgagtgacgacctctcgagcgtcgatggcgaagcgttccctctatctgggttctgatcatattgctttccctgtgttgttttgggaacaggggatgaggaacatgctcgttcctgatgcaattctagattaagatcatgaatatagtgtacaaagccagcggcggcggcggtgcaaattagccaccgggttgaatataaataatatatatatatgatatgttgcatcttct

SEQ ID NO: 4680 - DNA, 185 bp, Zea mays
  unsure (1)..(185): unsure at all n locations; Clone ID: LIB3061-002-Q1-K2-C11
ccgtggccggcgaggcggctgtgttcacggtggtgaaccagtgcccgttcaccgtgtgggccgcgtccgtgccggtgggcggcgggcggcagctgaaccgcggcgagagctggcggatcacggcccccgcggtcacgacggccgcgcgcatctgtgcgcgcacggngtgccagttcgacgcgagc

SEQ ID NO: 4681 - DNA, 315 bp, Zea mays
  Clone ID: LIB3061-002-Q1-K2-C12
ccgtggccggcgaggcggctgtgttcacggtggtgaaccagtgcccgttcaccgtgtgggccgcgtccgtgccggtgggcggcgggcggcagctgaaccgcggcgagagctggcggatcacggcccccgcgggcacgacggccgcgcgcatctgggcgcgcacggggtgccagttcgacgcgagcgggcgcgggagctgccgcacgggggactgcggcggcgtgctgcagtgcactgggtacgggcgcgcgcccaacacgctggcggagtacgcgctgaagcagttcaacaacctcgacttcttcgacatcttcc

SEQ ID NO: 4682 - DNA, 377 bp, Zea mays
  Clone ID: LIB3061-002-Q1-K2-C2
tcggatcaatgatattgagccattctgccaagatgaaattgtgctatatcgacagtgtgctgagaaaagggacaaggaaataagagagcggatgcaaaatagtgaatataaattgggtttttcaatgcccctggaagaagcgaaagagagagctactcaactccaatcagaagtaacactgctagaaaggcgcatgattcttgctagtggacttgagggtatggaaggatttcgccagagatggagcttgcatggacagcttgaagacacaaggaaaaggctagaagcactgaaccatggcatggcaaaacgagagaaccaaagttctacggcggataggacaaaatcttcagctaggaagaagtggttcttttggt

SEQ ID NO: 4683 - DNA, 350 bp, Zea mays
  Clone ID: LIB3061-002-Q1-K2-C3
gaccaactagcatcatacaaagcacaataatgtaccaacaatggcagccaaaatatcgggcctacttatgctccttggtctatctgcaagtgctgctacggcgaccattttaccgcaatgctcgcaagctcctatagcttaccttattgccccgtacctctcaccagcggtgtcttcggtatgtgaaaacccaattcttgaaccctacatgatccaacaggcaatcacagctggcatcttacctttatcacccttgttccttcaacaatcatcagccctattacatcagttacctttggtgcatttattggcacaaaacatcaaggcacaacaactaccacaacttgtgc

SEQ ID NO: 4684 - DNA, 340 bp, Zea mays
  Clone ID: LIB3061-002-Q1-K2-A8
catggagctcgccttgggggccatggccagcttggcccctaagctaggcgacctgctcatggaggagtatgtcgtgcagaagggcctcaagcccgacatcgagtctctctccagggagcttgtgatgatgaaagccgccctcgtcgacgcgtctcgggtaccacctgatcagctcaccgaggtggaaaagctttgggcacgcatggtccgggacctgtcgtatgacatggaggacgccgtcgacgatttcatcctgcgtgtggctggtggtgacgactctgccgctgactcaaaattcttcaagaagacccttgccatggtcaaggacgtgatgtcgatg

SEQ ID NO: 4685 - DNA, 270 bp, Zea mays
  Clone ID: LIB3061-002-Q1-K2-C4
gcgaaatcgccgaaggaaaggagaccccgagacgagcaaggcggcgagggagggcagagaccacgtaccagcgcgcacgcacaatgtcgggagcacagggcgcgcacccggtcggccagacgacgccgacgacgtacgagtcggtgggcggcggggagaaccgcacgcgcacggacctgcggtcgcgggaggaccagtgcgccattcagatcgagaaggtgcaggacaaggtcgacgatgccgcggggcgtggggtagaccacagcacct

SEQ ID NO: 4686 - DNA, 392 bp, Zea mays
  Clone ID: LIB3061-002-Q1-K2-C5
ctttcccccttctcccaattccctccgtcggccgccgctccatcccgtacgaggacaccatgagggagtgcatttcgatccacatcggccaggccggtatccaggtcggaaacgcgtgctgggagctgtactgccttgagcatggcattcaggctgacggtcagatgcccggtgacaagaccattgggggaggtgatgatgctttcaacaccttcttcagtgagactggtgctgggaagcacgtgccccgtgctgtttttgttgaccttgaacccactgtcatcgatgaggtgaggactggcacctaccgtcagctcttccaccctgagcagctcatcagtgggaaggaggatgccgccaacaactttgcccgtggtcactacaccattggc

SEQ ID NO: 4687 - DNA, 268 bp, Zea mays
  Clone ID: LIB3061-002-Q1-K2-C6
atgccactaccctactcaaccgccccggcctcagcctcatccccagccacacgcatgcccgtgccaacagccgcatccaagcccgtgccagctgcagggaacctgcggcgttggcagcaccccgatcctgggccagtgcgtcgagtttctgaggcatcagtgcagcccgacggcgacgccctactgctcgcctcagtgccagtcgttgcggcagcagtgttgccagcagctcaagcaggtggagccgcagcaccggtaccaggcgatc

SEQ ID NO: 4688 - DNA, 282 bp, Zea mays
  Clone ID: LIB3061-002-Q1-K1-D11
ttgagaccaactatcaacatagaataaacaataccgtaccaacaatggcaggcagaatattttgcaaacttatgctccttggtctttctgcaagtgttgctaccgcaaccattttcccacaatgctcacaagctcctatagcttcccttcttcccccatacctctcaccagcggtgtctgcaatgtgtgaaaccccaatagttcaaccctacaagatccatacatgcaatcgcaacaagcattttaccattatcacccttgaacctataacaactcattgcc

SEQ ID NO: 4689 - DNA, 229 bp, Zea mays
  unsure (1)..(229): unsure at all n locations; Clone ID: LIB3061-002-Q1-K1-D9
tcagcattcaaaaacacgccaagcgaatctcactagcaacgtactaacaccaatggctaccaagatatnagcccttcttacaaaagcttgccctcctagttatcgcagcagatgcgttcattataccacagtgctcacttgctcctaatgccattattccacacttcctcccaccagtcactacaatgggctacaaacatcctaccatgcaaacctacaagctacaact

SEQ ID NO: 4690 - DNA, 372 bp, Zea mays
  Clone ID: LIB3061-002-Q1-K1-E11
agaaacacacctatcgaagcgcactaacaacgacctaacaacaatggctaccagggtattattccatatttgcgcttcttgccctttttgtgagcgcaacaaatgcgttcattattccacaatgctcacttgctcctagtgccattattccacagttcctccctccagttacttcaatgggcttcgaacacccagctgtgcaagcctacaggctacaacaagcgcttgcggcgagcgtattacaacaaccaattgcccaattacaacaacaatccttggcacatctaaccatacaaaccatcgcaacgcaacagcaacaacaatttctaccagcactgaaccaactagctgtggtgaaccctgtcgccttac

SEQ ID NO: 4691 - DNA, 283 bp, Zea mays
  Clone ID: LIB3061-002-Q1-K1-E12
cgactagcaacatattaaagcacaatgagtaccaacaatggcagccaaaatagtgggcctctttatactccttggtctttctgcaagtgctgctacggcgaccattttcccgcaatgctcgcaagctcctatagcttcccttcttcccccgtacctctcaccagcggtgtcttctgtatgtgaaaacccaattcttcaaccctacaggatccaacaggcaatcgcagctggcatcttacctttatcacccttgattctacaacaatcttcagtcctattacaa

SEQ ID NO: 4692 - DNA, 204 bp, Zea mays
  Clone ID: LIB3061-002-Q1-K1-E9
gaccaactagcactatagaaagcataaagcgtcccaacaatggcagccaagaaggatttttaaaatgctctaaccctatctgcaagtgctgctaccgcgaccattttcccacaatgctcacaagctcctatagcttcccttcttcccccgtacctctcaccatcagtgtctacagcatgtgaaaacccaattctttaaccctat

SEQ ID NO: 4693 - DNA, 287 bp, Zea mays
  Clone ID: LIB3061-002-Q1-K1-F11
cgactatcaacattataaagccacaataagtacccacaatggcagccaaaataggggctttcttatactccttggtaactctgcaattgttgctaccgcaaccattttcccacaatgctcacaagctcctatagcttcccttcttcccccatacctctcaccaacagtgtcttcaatgagtgaaaacccaactgtccaaccctacaggatccaataagcaattactaccagcttattaccattattacacttaatacttcatacaaccaacatacctattacaacaa

SEQ ID NO: 4694 - DNA, 205 bp, Zea mays
  unsure (1)..(205): unsure at all n locations; Clone ID: LIB3061-002-Q1-K1-F12
cgttccactacaatctctcccaactanagccctatggacccattacatgctcagcaagattgtaaactactctacttactctacaccacatgagccgttgcgccatacccacatcccggataagtattcaggtacatctcctgcactctcctgctgcaaattctttctctctctctctctctctctctatctctatctctctata

SEQ ID NO: 4695 - DNA, 227 bp, Zea mays
  unsure (1)..(227): unsure at all n locations; Clone ID: LIB3061-002-Q1-K1-F9
ggtgtctgcaatttgaccctccactanactggccaggctcgaaagtcccacgaagcctcttttataaaattactgacacccagacaatctcggagatagcacattctcatggtgctcttgttatggttgacaacagcatcatgtctccagtgctcttccgtcctatataactgggagctgatatcgtgaagcactcttctaccagatatctagcaggacttaaagat

SEQ ID NO: 4696 - DNA, 187 bp, Zea mays
  unsure (1)..(187): unsure at all n locations; Clone ID: LIB3061-002-Q1-K1-G11
cgagcaggaggcgttcaaggtaactaaaatcgcaggaaccctagcgccgccgcagcncttttaaaaggtatcgacctcgtcacctgtgggaggaataagaagaccaagcgcactgcgcccaagtctgacgatgtcttcctcaagctcctcgtcttgctctaccgtatctaggtcaagaagactcatt

SEQ ID NO: 4697 - DNA, 197 bp, Zea mays
  Clone ID: LIB3061-002-Q1-K1-G12
gacaaaaacaagttcaacacactcatgaacagacttgttgtgcgatttaccaggcagggacatcacaacacaaatcatatctgctattatagcgggtgatatggttcttgcttctgcctactctcatgagttgccacgatatggtcttgaagttggtctgaccaactattcagctgcctactgcactggacttctgt

SEQ ID NO: 4698 - DNA, 233 bp, Zea mays
  unsure (1)..(233): unsure at all n locations; Clone ID: LIB3061-002-Q1-K1-G9
cgacaagcaacatataaagcggaaataagtacncccaatagagcaacaatggcnagccattatataaaaccctccttatgccccatactctggctacatgtgttgctaacgcgacaattatccctcaatgctcacaagctcctatagcttccctacttaccccataccttccatcaattatagcttcaatatgagaaaacccatcacttcaaccatataggccacaacaagca

SEQ ID NO: 4699 - DNA, 205 bp, Zea mays
  unsure (1)..(205): unsure at all n locations; Clone ID: LIB3061-002-Q1-K1-H11
ggagcaccccgattctgggccagagtancgagtccctgaggcatcagtgcaggccgactgctacgaactactgctggcctcagtgccagtcggtgcggcagcagtgttgccagcagctcatgcaggtggagccgcagcaccggtaccaggcgatcttcggcttggtcctacagtccatccagcagcaatagccgcaaagcggtca

SEQ ID NO: 4700 - DNA, 240 bp, Zea mays
  Clone ID: LIB3061-002-Q1-K1-H12
gcgactgccgccgtggccgtggtagtgaaacggtggccggcgccatccttgagagggtgtttcgaacgacgacgtgcatggcgtgtcgcagagctaataataaaagggtagtgtacgcttaccgcgtacgtacgtgtcaccgggcgtggcactctccagtctccagggacccattcaccatgtgctactgctccttcttagggagacgtgggaataaagattggtagctgcatgcgcgta

SEQ ID NO: 4701 - DNA, 351 bp, Zea mays
  Clone ID: LIB3061-002-Q1-K2-A1
tcggacaaagcgcggagggtccgcgccggcgccggagcgctggcggcgccgctcgccgtggggctcctggcgggggctaacgtgctggcctgcggcgcgctggagggcgccgtgatgaatccggcgcgcgcgttcgggcccgccgtcgtgggctcccgtcgctggagacaccaatgggtgtactgggtggggcccatggtcggcgccggcctctccggcgtcgtctacgagcacctcgtcgccggcccggccgccgaggaggaggaagagcccgcgccgagctgcggcgaccgccgtcgtgcgtagaggactacatgcatgcaggagcagcaggacgtcgtcgtcgttccc

SEQ ID NO: 4702 - DNA, 366 bp, Zea mays
  Clone ID: LIB3061-002-Q1-K2-A10
gttctcttccatcatctgtctgcgagatgagatcgttgtatctcctggatgcccatttgaatgaactatgcggtctaccatctctcttcgggaaacttagcggccttgaaattctcaaccttagcagcaacttcagtgatttgaaagagcttcctccctcgattggtgactagctaaatctgcgtgagcttgacctaagcaacaaccagattcatgctctccctgacacttttggtcggctggataaactggagaagcttaacctagagcagaaccctctagtcattccaccagaagacattgtgaacaacggcgtggatgcagtaaaagagtacatgtcaaaaacgtggctggacatattgctcg

SEQ ID NO: 4703 - DNA, 187 bp, Zea mays
  Clone ID: LIB3061-002-Q1-K2-A11
gaccaactagcaacatagaaagcacaatagtgtaccaacaatggcagccaaaatattttgcctccttatgctccttggtctttctgcaagtgctgctacggcgaccattttcccgcaatgctcgcaagctcctatagcttcccttcttcccccgtacctctcaccagcggtgtcttcggcatgtgaa

SEQ ID NO: 4704 - DNA, 341 bp, Zea mays
  Clone ID: LIB3061-002-Q1-K2-A12
attcagaaacacaccaagcgaagcgcactagcaacaacctaacaacaatggctaccaagatattatccctccttgcgcttcttgcgctttttgcgagcgcaacaaatgcgtccattattccacaatgctcacttgctcctagttccattattccacagttcctcccaccagttacttcaatggccttcgaacacccagctgtgcaagcctataggctacaacaagcgattgcggcgagcgtcttacaacaaccaattgcccaattgcaacaacaatccttggcacatctaacaatacaaaccatcgcaacgcaacagcaacaacagttcctaccagcactg

SEQ ID NO: 4705 - DNA, 181 bp, Zea mays
  unsure (1)..(181): unsure at all n locations; Clone ID: LIB3061-002-Q1-K1-D10
tcgaccccgcgtccgctcctctcctctctccggcgcaactaccgactgccagtcagcctcagccatgncggcatttttatgagcatggcttgcgccctctttacgaggcgtccctgctctcctacatcaatgccactccggctctcgcctccctcctctgctgcttttgctatctagactc

SEQ ID NO: 4706 - DNA, 238 bp, Zea mays
  Clone ID: LIB3061-002-Q1-K2-A2
actcttcttactggcctgttctgaagcagcttgagtctgcagccatgaaagaatattatttcaaggctgatcgtgcgaaaacactctctggtgggtcttctaatctgaagtatcgaaacccaaaatatttgtccatgctcaatcatctaagaatttaccttccacaagtctattccaagctgaataaaattcttttcctggatgaagatataattgtgcacaaggacctaactggact

SEQ ID NO: 4707 - DNA, 336 bp, Zea mays
  Clone ID: LIB3061-002-Q1-K2-A3
accaagccttccggaaccttaaaaggtggattccggtaccaaaattagaccaccattggcggccaaaatgttttccatccttatgctcgttgctctttcggaatgagttgctaacgcgaccatttatcctcaatactcacaagctactatagctgcccttcttactccataccttacatcaatgaccgctttagtatgtgaaaacccagcccttcaaccctacaggatccatctagcaatcgcaacaagcatcttacctttatcacacctgttcttttaacaatcgccagccctatctttggtgcacacattggtacaaaccatcacggcataaca

SEQ ID NO: 4708 - DNA, 351 bp, Zea mays
  Clone ID: LIB3061-002-Q1-K2-A4
ctcctcctcgcgattccaatccacgcacgcctcctccgcttccgcctcgctcaggcttatagtcagtgatggaacacaaggaggcgggctgccagcagccggagggcccaatcctatgcatcaataactgcggcttcttcggcagtgctgcgacgatgaacatgtgctccaagtgccacaaggagatgataacgaagcaggagcaggcccagctggctgccttctccatcgatagcattgtcaatggcggtgacggcgggaaaggacctgtaattgctgcatctgtaaatgcggcagttcctcaagttgagcagaagactattgttgtgcagcccatgcttgtagctgaaa

SEQ ID NO: 4709 - DNA, 246 bp, Zea mays
  Clone ID: LIB3061-002-Q1-K2-A5
tgctcaaaaactctctactacgctcctttctttccccatacttttcaatacctgtgaacaccgactgctataacccatgtattcaatgctacatgacccaacatgcaatatcaactagcatcttacctttatcatccttgatcatacaacaaccgtcaaccctattacagcatttaccttatgcgcatttgctggcacaaaatatattcgtacaacaactacaacatcttgcgctctgaaaccttg

SEQ ID NO: 4710 - DNA, 354 bp, Zea mays
  Clone ID: LIB3061-002-Q1-K2-A6
ggaatccagtagcaacaacagagcaacaatggcgaccaagatattttccctccttatgctccttgctctttctgcatgtgttgctaacgcgacaattttccctcaatgctcacaagctcctatagcttcccttcttcccccataccttccatcaatgatagcttcagtatgtgaaaacccagctcttcagccctataggctccaacaagcaatcgcagcaagcaacatacctttatcacccttgttgtttcaacaatcgccagccctatctttggtgcagtcattggtacaaaccatcagggcacagcagctgcagcaactcgtgctacctgtgatcaaccaagtagctctggc

SEQ ID NO: 4711 - DNA, 385 bp, Zea mays
  Clone ID: LIB3061-002-Q1-K2-A7
gctagctactgcctactctcagcaacaacaacttcttccatttaaccaattggccgcactgaaccccgctgcttatttgcagcagcaaatactactaccatttagccagctagctgcagcaaaccgtgcttccttcttgacacagcaacagttgctgcctttctaccagcagtttgcggctaaccccgcaaccctcttacaactacaacaattgttgccctttgtccaacttgctttgacagaccgagcggcctcctaccaacaacacatcattggtggtgccctcttttagattgcttattagttgtaattcaataataaagttttttggatgatgtatgtggccaaccagaaataagaagttacattttcagattttaatgtg

SEQ ID NO: 4712 - DNA, 438 bp, Zea mays
  Clone ID: LIB3061-001-Q1-K2-H11
agcaacatagaaagcacaatagtgtaccaacaatggcagccaaaatattttgcctccttatgctccttggtctttctgcaagtgctgctacggcgaccattttcccgcaatgctcgcaagctcctatagcttcccttcttcccccgtacctctcaccagcggtgtcttcggtatgtgaaaacccaattcttcaaccctacaggatccaacaggcaatcacagctggcatcttacctttatcacccttgttccttcaacaatcatcagccctattacatcagttacctttggtgcatttattggcacaaaacatcagggcacaacaactacaacaacttgtgctagcaaaccttgctggctactctcagcaacagcagtttcttccattcaaccaactagctgcattgaactctgcttcttatttgcaacaacaacaac

SEQ ID NO: 4713 - DNA, 381 bp, Zea mays
  Clone ID: LIB3061-001-Q1-K2-H12
cgggaacccatccacaattggtagctcgttgatccaaatccaagacctcacgtcaacgcactgtctcgcctgttaattagtcgtcgacgtcgtcgtctatgtccaggctgatggctgccatgctgctcggaggcgcgcgcgtcgccggcgccgcaaagctcaccggtaacggcaacgctgctggcatgcaggctcttcccatgccggcgtgcttccttccgccgcgcccgcaggcagcgacctggacccgcctctgcttgcaggctgcgccaagatcgtcccaagcatacgacaacgcgccggaagaccggagagaaataggggacaagtacaaggacgcggccgatgatgcgaaggacgccaccggggacgccaaggagc

SEQ ID NO: 4714 - DNA, 375 bp, Zea mays
  Clone ID: LIB3061-001-Q1-K2-H2
attcagaaacacacctagcgaaacgcactagccacgacctaactgcagtggctaccaagatattagcatcttcttgcgctacttgccctttttgtgagcgcaacaaatgcgtacattattccacaatgctcacttgctactagtgccattattccacagttcctccgaccagatacttcaatgggcttcgaacacctagctgtgcaagccaacatgcaacaacgagcacttgcggcgagcgtcttacaacaaccaattgcccaattgcaacaacaatccttgccacatctaacattacaagccatcacaactcaacagcaacaacagttcctaccagcactgagccacctagacatggtgaaccatgtcgactac

SEQ ID NO: 4715 - DNA, 426 bp, Zea mays
  unsure (1)..(426): unsure at all n locations; Clone ID: LIB3061-001-Q1-K2-H3
atcggaattcgcaacttctcccacgcggcgaacacggcagagatgatgagctcccgggccggatccatcctcctccgccacgccggctcccgtctcttcaccgcagcggcgatctctccggcggcggcctcgaggccattgctcgccggcggcaatggtgttccggcagtcatgctacggctgatgtccacctcctcccccgccgctcccacggaggcgaaggacgaggcagccaaggcctccaaggtgggaggggacaagaaggcggtggtgatcaacagctactgggggatcgagcaaaacaacaagctagcgcgggacgacggcaccgagtggaagtggacttgctttaggccatgggagacgtacacggcggacacgtncattgacctnaccagacaccatgagcccaagacgctgatggat

SEQ ID NO: 4716 - DNA, 374 bp, Zea mays
  Clone ID: LIB3061-001-Q1-K2-H4
gcaacaagcaagatttacctgcccatcgatcatatcgtcaactggtccggcagttcgcgacagcatgagctccacggagtgcggcggcggcggcggcggcgccaagacgtcgtggcctgaggtggtcggtctgagcgtggaggacgccaagaaggtgatcctcaaggacaagccggacgccgacatcgtggtgctgcccgtcggcttcgtggtgaccgcggattatcgccctaaccgtgttcgcatcttcgtcgacatcgtcgtccagacgccctacatgggctgataatatataagctagccgctatttcctttccttgccccagaacttgaaataaatatatatactatgaaataacgcgggcatgccgaat

SEQ ID NO: 4717 - DNA, 415 bp, Zea mays
  unsure (1)..(415): unsure at all n locations; Clone ID: LIB3061-001-Q1-K2-H5
gtcgaacagaacagcatgaagatggtcatcgttctcgtcgtgtgcctggctctgtcagctgccagcgcctctgcaatgcagatgccctgcccctgcgcggggctgcagggcttgtacggcgctggcgccggcctgacgacgatgatgggcgccggcgggctgtacccctacgcggagtacctgaggcagccgcagtgcagcccgctggcggcggcgccctactacgccgggtgtgggcagccgagcgccatgttccagccgctccggcaacagtgctgccagcagcagatgaggatgatggacgtgcagtccgtcgcgcagcagctgcagatgatgatgcagcttgagcgtgccgctgccgncagcagcagcctgtacgagccagctctgatgcagcagcagcagcagctgctgg

SEQ ID NO: 4718 - DNA, 427 bp, Zea mays
  unsure (1)..(427): unsure at all n locations; Clone ID: LIB3061-001-Q1-K2-H6
gtctttttgtgtgtgtgtgtgtgtctatcaggaaagcattgagtctgactcactatctgctcagcgaaagccattcagattgttcagtatttgcacagttaggtttcccccaacttatgatgcgtttggcatccagcgatgactccggtgttcgagaggcagcattagggggcttgcttgagcttgcaagggacacgacacttggaaataggaatctactagcagaacatgacaggttacgaaggcttctccgtggacgtatggaaagcataaggacgatgactcctgaagatttggatgctgcacgagaagagcggcagcttgttgactcactttggatcacatgctaccatgaacccttcatgctccgcaatgaaagactccttgntctgcctgggaggaatcccttgagcaaccttctgatgtg

SEQ ID NO: 4719 - DNA, 435 bp, Zea mays
  unsure (1)..(435): unsure at all n locations; Clone ID: LIB3061-001-Q1-K2-H7
cccacgcgtccgcccactttcattgagagacgaacacgcgagtagagaatttctcctgcctgctcacgaccgccctctcgccggtcgccggtcgccgctcgcaacgcaagtcggaagaggaatctctccaagctccaatcctccgatcctgccccaacccaagtcccctccaccaggccgcacacctccgccgcccggcgcgaccttgcatccaccagcctgccctctccttcgcgtgaggcggccccggcgaccgcgtcggcagtgcaagaccagaccgaggcttctcccgttggaaggttccagccatggcgagcgccgatctgctgcggaaggaggaggagttctactcctccctctntgattccgcataaagcgacggcgtcaagtcgcgctcgcaggtgattgataggaagattgaatccttcgaggaca

SEQ ID NO: 4720 - DNA, 392 bp, Zea mays
  Clone ID: LIB3061-001-Q1-K2-H8
cctcactggaaagactatcaccctcgaggtggagtcttctgacaccattgacaacgtgaaggccaagatccaggacaaggagggcatccccccggaccagcagcggctcatctttgctggcaagcagctcgaggacgggcgcacacttgccgactacaacatccagaaggagagcaccctccaccttgttctccgcctcaggggaggcatgcagatcttcgtcaagaccctcactggaaagactatcaccctcgaggtggagtcttctgacaccatcgacaacgtcaaggccaagatccaggacaaggagggcatccctccagaccagcagcggctcatttttgccggcaagcagctcgaagacgggcgcacgctggccgactacaacattc

SEQ ID NO: 4721 - DNA, 196 bp, Zea mays
  Clone ID: LIB3061-001-Q1-K2-H9
gacccactcgtacctagcaacatacatagataagcacactatcaacatcttagcaccactgtatacctacatggctaaggctccttgccctccttgctatttcatcaagcgctactaccttgactcttattccacaatgctcacaacaatacctctttccagcgtcactctcatcatttcaatactcaactataca

SEQ ID NO: 4722 - DNA, 141 bp, Zea mays
  Clone ID: LIB3061-002-Q1-K1-A10
cgacccacctcggctcttccatcatcgctgttttagaactgttctcctgatccggttattaacaatcgcgacctctcattcgggaactacgcctgaaactctaacttagcatcatcttcatgattagaaagactacctccc

SEQ ID NO: 4723 - DNA, 284 bp, Zea mays
  unsure (1)..(284): unsure at all n locations; Clone ID: LIB3061-002-Q1-K1-A11
gaccaactagcaactatagaaagcataaagtgtaccaacaatggcagccaaaagtntttcctacaatgctcattggcctttcttcaagtgctgctactgcgaccattttcccgcaatgctcgcaagctcctataacttcccttcttccaccgaacctctcaccagcaatgtcttcagtatgttaaaacccaattcttcaaccctacaggatccaactagcaattacaacttgaatataacctttatcaccctagatcctactacatatatcatccctataacaa

SEQ ID NO: 4724 - DNA, 362 bp, Zea mays
  Clone ID: LIB3061-002-Q1-K1-A12
agtcagaaacacatcaagcgaacgtactagcaacaacctaacaacaatggctacgaagatattataactccttgcagcttcttgcgctttttgcgagcgcaacaaatgcgtccattattccacaatgctcacttgctcctagttccattattccacagttcctcccaccagttacttcaatggccttcgaacacccagctgtgcaagcctataggctacaacaagcgattgcagcgagcgacttacaacaaccaattgcccaattgcaacaacaatccttggcacatctaacaatacaaaccatcgcaacgcaacagcaacaacatgtcctaccatcactgagccacctagccatggtgaac

SEQ ID NO: 4725 - DNA, 255 bp, Zea mays
  Clone ID: LIB3061-002-Q1-K1-A9
gcgggcacgcgtccgttcacgcgtccgtcaacgcgtccggaagtgtgcgaatcacatgggttcattaaaacaactgatcttcggtggagattcaataggccatctggcatcgattctgattaaggtcgtagctctcgaggcagtcagaatagtatctaaagcttgataccccttcatatggaattctatacaagcattgcatattcttgagtgattctccattgagttggatccaaggatgggtaataagaaaaa

SEQ ID NO: 4726 - DNA, 182 bp, Zea mays
  unsure (1)..(182): unsure at all n locations; Clone ID: LIB3061-002-Q1-K1-B10
agaatagctgccttgcaattctaggtgaatataactgatagtcncctccagtcnaaagacactttataaaagtaaacatgaacgattgatctatatgggagaactattttcttatctaaaatgtcatgtgaaaatggttggggctagaaacttgattcacaacaaacaggtctagatcgcga

SEQ ID NO: 4727 - DNA, 256 bp, Zea mays
  unsure (1)..(256): unsure at all n locations; Clone ID: LIB3061-002-Q1-K1-B11
gcgagccacacccatgtccgtgccaactgccgcatccaagcccgtgccagctgcanggaacctgttgcagaaggcagcaccccgatcctgggccagtgcgtcgagtttctgaggcatcagtgcagcccgacggcgacgccctactgctcgcctcagtgccagtcgttgcggcagcagtgttgccagcagctcatgcaggtggagccgcagcaccggtaccaggcgatcttcggctaggacctccagtccatcctgc

SEQ ID NO: 4728 - DNA, 349 bp, Zea mays
  Clone ID: LIB3061-002-Q1-K1-B12
cgactagcaacatatgaaagcacaataagtaccaacaatggcagccaaaatagtggcttccttaaactccttggtctttctgcaagtgctgctaccgcaaccattttcccacaatgctcacaagctcctatagcttcctttcttcccccatacctctcaccagcggtgtcttcagtatgtgaaaacccaattcttcaaccctacaggatccaacaggcaatcgcagcaggcatcttacctttatcacccttgttcctccaacaaccgtcagccctattacagcagttacctatggtgcatttgataggcacaaaacattaaagcacaacaactacaacaacttgagcta

SEQ ID NO: 4729 - DNA, 209 bp, Zea mays
  Clone ID: LIB3061-002-Q1-K1-B9
gcggaacaagcaacatagaaagcggataacaccacccacaatagagcaacaatggcgaccattttaaaggccctggttaccctccttactctggctgcatgtgttgctaacgcgacaatattccctcaatgctcacaagctcctatagcttcccttcttcccccataccttccatcaatgatagcttaagtatgttaaaacccagctct

SEQ ID NO: 4730 - DNA, 126 bp, Zea mays
  Clone ID: LIB3061-002-Q1-K1-C11
gcgtggccggcgatgcggctgtgatcacggtggcgaaccagtgcccgttcaccggatgttctttaaacgtgccggagcgcggcattcggcggctgaaccgcggctagagctggcggatcacggccc

SEQ ID NO: 4731 - DNA, 331 bp, Zea mays
  Clone ID: LIB3061-001-Q1-K2-H10
gtcctcattattattctcactggtcgatctgctaacacaaacagcagcagctcctcctcactagctagccttctctatttttgctactgcaagtgtccaagtctgcgacgacgtccgagatgtcgacggtgagccgtgcatcccttgaccagaagcttgccctcgccaagcgctgctcccgagaggcgactcttgccggagctaaggcggcagcagtggcgactatcgcctccgcgattcccaccctcgcgagcgtgcggatgctgccgtgggccaaggccaacatcaaccccaccggccaggcgctcatcgtcttcacggtggccgggat

SEQ ID NO: 4732 - DNA, 182 bp, Zea mays
  Clone ID: LIB3061-002-Q1-K1-C9
cgcacgcatccgctcacgcgtccgtaacacccccgcggactataacatccaaaaggagtttttaaaagacctcgagcccacgctactcggtggaatcattgaaccctctctgcaagcactcgctcgcaaactacaaccaggacaagacgatcagccgcaaatgcaattcacgactgcaccca

SEQ ID NO: 4733 - DNA, 436 bp, Zea mays
  Clone ID: LIB3061-001-Q1-K2-F5
cttcctttcttcccccatacctctcaccagcggtgtcttcagtatgtgaaaacccaattcttcaaccctacaggatccaacaggcaatcgcagcaggcatcttacctttatcacccttgttcctccaacaaccgtcagccctattacagcagttacctttggtgcatttgttggcacaaaacatcaaggcacaacaactacaacaacttgtgctaggaaaccttgctgcctactctcagcaacagcagtttcttccattcaaccaactggctgcattgaactctgctgcttatttgcaacaacaactaccattcagtcagctagctgctgcctacccccagcaatttcttccattcaaccaactggcagcattgaactctgctgcttatttacaacagcaacagctaccaccattcaaccagctagctgatgtgag

SEQ ID NO: 4734 - DNA, 437 bp, Zea mays
  Clone ID: LIB3061-001-Q1-K2-F6
gaccaactagcaacatagaaagcacaatagtgtaccaacaatggcagccaaaatattttgcctccttatgctccttggtctttctgcaagtgctgctacggcgaccattttcccgcaatgctcgcaagctcctatagcttcccttcttcccccgtacctctcaccagcggtgtcttcggtatgtgaaaacccaattcttcaaccctacaggatccaacaggcaatcacagctggcatcttacctttatcacccttgttcctccaacaatcatcagccctattacatcagttacctttggtgcatttattggcacaaaacatcagggcacaacaactacaacaacttgtgctagcaaaccttgctgcctactctcagcaacagcagtttctttcattcaaccaactagctgcattgaactctgcttcttatttgcaac

SEQ ID NO: 4735 - DNA, 451 bp, Zea mays
  Clone ID: LIB3061-001-Q1-K2-F8
attgagaccaacaagcaacatagaaagtggaatccagtagcaacaatagagcaacaatggcgaccaagatactttccctccttatgctccttgctctttctgcatgtgttgctaacgcgacaattttccctcaatgctcacaagctcctatagcttcccttcttcccccataccttccatcaatgatagcttcagtatgtgaaaacccagctcttcaaccctataggctccaacaagcaatcgcagcaagcaacatacctttatcacccttgtttcaacaatcgccagccctatctttggtgcagtcattggtacaaaccatcaaggcacagcagctgcagcaactcgtgctacctgtgatcaaccaagtagctctggcaaacctttctccctactatcagcaacaacaatttctttcattcaaccaactatctacactgaaccctgctgt

SEQ ID NO: 4736 - DNA, 368 bp, Zea mays
  Clone ID: LIB3061-001-Q1-K2-F9
caacaatggcagctaaaatattttgcctacttatgctccttggtctttctgcaagtgctgctacggcgaccattttcccacaatgctcacaagctcctatagcttcccttcttcccccgtacctctcaccaacggtgtcttcggtatgtgaaaacccaattcttcaaccctacatgatccaacaggcaatcgcagctggcatcttacctttatcaccctagttgctccaacaatcatcagccctattacagcagttacctttggtgcatttattggcacataacatcagggcacaacaactacaacaacttgtgctagccaaccttggtggctactctaagaacagcagtttcttccattcaaccaac

SEQ ID NO: 4737 - DNA, 353 bp, Zea mays
  Clone ID: LIB3061-001-Q1-K2-G1
gcgggctagatgaaagcagttgttgctgttgtaggtaggcggcagggttcaccatggctagttgactgagcgctggcagaaactgttgcagctgttgttgtggccaatgcacctacatacctgcaacaacaattgttgcaacagattgtaccagctctgactcagctagttgtggcaaaccctgctgcctacttgcaacagctgcttccattcaaccaactgactatgtcgaactctgctgcgtacctacaacagcgacaacagttacttaatccactagcagtggctaacccattggtcgctgccttcctacagcagcaacaattgctgccatacaaccagttctctttgat

SEQ ID NO: 4738 - DNA, 326 bp, Zea mays
  Clone ID: LIB3061-001-Q1-K2-G10
gcaacatagaaagcacaatagtgtaccaacaatggcagccaaaatattttgcctccttatgctccttggtctttctgcaagtgctgctacggcgaccattttcccacaatgctcacaagctcctatagcttcccttcttcccccgtacctctcaccagcggtgtcttcggtatgtgaaaacccaattcttcaaccctataggatccaacaggcaatcgcagctggcatcttacctttatcacccttgttccttcaacaatcatcagccctattacagcagttacctttggtgcatttattggcacaaaacatcagggcacaacaac

SEQ ID NO: 4739 - DNA, 439 bp, Zea mays
  unsure (1)..(439): unsure at all n locations; Clone ID: LIB3061-001-Q1-K2-G11
gcaacatagaaagcacaatagtgtaccaacaatggcagccaaaatattttgcttccttatgctccttggtctttctgcaagtgctgctaccgcaaccattttcccacaatgctcacaagctcctatagcttcctttcttcccccatacctctcaccagcggtgtcttcagtatgtgaaaacccaattcttcaaccctacaggatccaacaggcaatcgcagcaggcatcttacctttatcacccttgttcctncaacaaccgtcagccctattacagcagttacctttggtgcatttagtggcacaaaacatcaaggcacaacaactacaacaacttgtgctaggaaaccttgctgcctactctcagcaacaacagtttcttccattcaaccaactggctgcattgaactctgctgcttatttgcaacaacaactacca

SEQ ID NO: 4740 - DNA, 357 bp, Zea mays
  Clone ID: LIB3061-001-Q1-K2-G12
caacaagcaacatagaaagtggaatacagtagcaacaatagagcaacaatggcggccgggatattttccatccttatgctccttgctctttctgcatgtgttgctaacgcgaccatttttcctcaatactcacaagctcctatagctgcccttcttcccccataccttccatcaatgaccgcttcagtttgtgaaaacccagcccttcaaccctacaggctccaacaagcaatcgcaacaagcaacttacctttatcacccctgttctttcaacaatcgccagccctatctttggtgcagtcattggtacaaaccatcagggcacaacagctgcaacaactcgtgctaccagtgatc

SEQ ID NO: 4741 - DNA, 362 bp, Zea mays
  Clone ID: LIB3061-001-Q1-K2-G2
gcgggctagatgaaagcagttgttgctgttgtaggtaggcggcagggttcaccatgggtaggtgactgagcgctggcagaaactgttgcagctgttgttgtggccaatgcacctacatacctgcaacaacaattgtagcaacagattgtaccagctctgactcagctagttgaggcaaaccctgctgcctacttgcaacagctgcttccattcaaccaactgactatgtcgaactctgctgcgtacctacaacagcgactacagctacttaatccactagcagtggctaacccattggtcgctgccttcctacagcagcaacaattgctgccatacaaccagttctctttgataaaccctgt

SEQ ID NO: 4742 - DNA, 428 bp, Zea mays
  Clone ID: LIB3061-001-Q1-K2-G3
tgcagctaaagtcgatgccatcaaggatacactggagaacgatgagcagaaggttggagctgaaatagtaaggagggccctgagctacccacttaaattgattgctaaaaatgccggtgtcaatggcagcgtcgtcactgagaaggtcctttctaacgataacttcaagtatggttacaatgctgctactggacagtacgaggacttgatggctgctggtatcattgatcctactaaggtggtgagatgctgtttggagcatgccgcgtcggtggccaagaccttcctgacatctgatgttgtggtcgtcgatattaaggagccagagtctgcgccccttgctaacccgatggacaactctggctatggatactaatggagatgagatggccaaccccatgggaggaaggtgatcacaattttttttt

SEQ ID NO: 4743 - DNA, 196 bp, Zea mays
  Clone ID: LIB3061-001-Q1-K2-G4
cttacctcctttccacatacctttcaccaacggactcttctctatgttaaaagccaggttttcaaccctacaggatccaacaagcaatttcaattgacatcttacctttatcaccctaattcctacaacatatcattaaccctattacaacaaacacctttggttcatatatttacacaaaacattcattgcccaa

SEQ ID NO: 4744 - DNA, 312 bp, Zea mays
  Clone ID: LIB3061-001-Q1-K2-G5
caacaatggcttccaagacattatccctccttgcgcttcttgccctttttgcgagtgcaacacatgcgtgcatgattccacaatgctcacttgctccgagtgccattattccacagttcctacctcgagcaacttcactgggctctgaacacctagctgtgcaagcctatatgctacatccttcgctcgctgaagcgtcctgattgcgccatctcggcacttacaccatccatgcttgacccagctatctttacaagccatttacctgcatcacccgcgtgctctgatcaactctatgcctttgatccgttg

SEQ ID NO: 4745 - DNA, 411 bp, Zea mays
  Clone ID: LIB3061-001-Q1-K2-G6
cttcccttcttcccccgtacctctcaccaacggtgtcttcggtatgtgaaaacccaattcttcaaccctacaggatccaacaggcaatcgcagctggcatcttacctttatcacccttgttcctccaacaatcatcagccctattacagcagttacctttggtgcatttattggcacaaaacatcagggcacaacaactacaacaacttgtgctagcaaaccttgctgcctactctcagcaacagcagtttcttccattcaaccaactagctgcattgaactctgcttcttatttgcaacaacaacaactaccattcagccagctatctgctgcctacccccagcaatttcttccattcaaccaactgacagcattgaactctcctgctttttacagcagcaacaactact

SEQ ID NO: 4746 - DNA, 441 bp, Zea mays
  Clone ID: LIB3061-001-Q1-K2-G7
tcagcctcatccccagccacacccatgcccgtgccaacagccgcatccaagcccgtgcgcagctgcagggaacctgcggcgttggcagcaccccgatcctgggccagtgcgtcgagttcctgaggcatcagtgcagcccgacggcgacgccctactgctcgcctcagtgccagtcgttgcggcagcagtgttgccagcagctcaggcaggtggagccgcagcaccggtaccaggcgatcttcggcttggtcctccagtccatcctgcagcagcagccgcaaagcggccaggtcgcggggctgttggcggcgcagatagcgcagcaactgacggcgatgtgcggcctgcagcagccgactccatgcccctacgctgctgacggcggtgtcccacactgaagaaactatgtgctgtagtataggccgtggctagctagctagt

SEQ ID NO: 4747 - DNA, 432 bp, Zea mays
  Clone ID: LIB3061-001-Q1-K2-G8
agccaatcgccaagccaagccaagccagaagcggcagcctcgcgcagcggtctggtctctcttgtgggtggtgcccttcttcgccggtggccggaaagggcagtggagtgggaccgctcaaggagaggccggcgtccccaagtctcacttccgccgtccactttccccctgtagggatcgagggaggaaggaaaggaggtgcttcacaatgaaggccctcattcttgtcgggggtttcggaacccgccttcggcctttgactctgagcttcccgaaacccctcgtggattttgcaaacaagcccatgattctgcaccagatcgaagctttgaaagaagttggggtcacagaggtggttttggctatcaactatcgcccagaggtaatgattaatttcttgaaggactttgaggataagcttggcatcacaat

SEQ ID NO: 4748 - DNA, 412 bp, Zea mays
  unsure (1)..(412): unsure at all n locations; Clone ID: LIB3061-001-Q1-K2-F4
cacgcaacaagtacgcaggcagcgcagcctcgagccgtcgccatggcgagcaagcacctcgtcctcgccgcatgcctcctcctcctcctcctcctgcccatcgcctcggtcgccaccgacgtcgactactgcagtaagaaggactacccggtgaaggtgagcggggtgcagatcgtgcccgatccggtcgaacccggcaagcccgccactttcaagatctccgcttctactgataaaaccatcgagaaggggaagctggtcatcgacgtaaagtatttcttcttctacgtgcactcggagacccgcgacatctgcggagagacttcctgcccagcgaccggcgacttcgtgctgtcccaccagcagacgctgncaggcttcacttcgccggggctctacacgatctacatga

SEQ ID NO: 4749 - DNA, 414 bp, Zea mays
  unsure (1)..(414): unsure at all n locations; Clone ID: LIB3061-001-Q1-K2-D8
ccaactagcaacatagaaagcacaatagtgtaccaacaatggcagccaaaatattttgcctccttatgctccttggtctttctgcaagtgctgctacggcgaccattttcccgcaatgctcgcaagctcctatagcttcccttcttcccccgtacctctcaccagcggtgtcttcggtatgtgaaaacccaattcttcaaccctacaggatccaacaggcaatcacagctggcatcttacctttatcacccttgttcctccaacaatcatcagccctattacatcagttacctttggtgcatttattggcacaaaacatcagggcacaacaactacaacaacttgtgctagcanaccttgctgcctactctcagcaacagcagtttcttccattcaaccaactagctgcattga

SEQ ID NO: 4750 - DNA, 288 bp, Zea mays
  unsure (1)..(288): unsure at all n locations; Clone ID: LIB3061-001-Q1-K2-D9
ataagagagatggctttttcaggcaactctttaaggagaaaaacgatgagaaaaaggaaggcagcacaccaagcaagaaagaggaagatgataaaggccataaaaatgcagatgatgataatttctttcgcaggcttttcaaggataagaatgaagaanagaaagggattgttcatgacaggaatgaagatgacaagtgtgaggaaggtgattaaagaaacttcttncgcanattatttaagattaacatgangagaggagaacttgaggacctgataaaaatgatga

SEQ ID NO: 4751 - DNA, 416 bp, Zea mays
  unsure (1)..(416): unsure at all n locations; Clone ID: LIB3061-001-Q1-K2-E1
tgtacttgtaacacttgggtttgaccttaatattaaccatgcctataagcccttggttgaagcaataaggagattcaatattgataaaagaagtccacttcctcaggttgcctggaattttgtaaatgatgggctgcgtacttcgctttgcctgcagtttgagcctcatcatattgcagctggtgctatctatttggctgctaaatttctcaaagtgaatctcccatctgatggtgataagatttggtggcaggattttgatgtcacgccacgacaacttgaagaggttagcagtcaattgctggagttgtatgagcaaaaccgtacaacgcaggcacaatcatcacagggaagtgaaagcgangggagctctgctggtgtgtgtaatcaacgttcaactgtaaagtctgaaacga

SEQ ID NO: 4752 - DNA, 389 bp, Zea mays
  Clone ID: LIB3061-001-Q1-K2-E10
acggcaacatagaaagcacaatagtgtaccaacaatggcagccaaaatattctgcctacttgtgctggttggtcttactgcaagctgctgctacgcgcgactcattgttcccgcaatgctcgcaagctcctatagcttcccttattgcccagtacctcttaccagcggtgtctcaggtatgtgaaaacccaatacttcaaccctacaggatccaacaggcaatcacagctggcatcttacctttatcacccttgttactgcaacaatcatcagccctattacatcacttacctttggtgcatttattggcacaaaacatcacggcacaacaactacaacaacttgtgctagcaaaccttgctgcctacttttagcaacaacagtttctt

SEQ ID NO: 4753 - DNA, 66 bp, Zea mays
  Clone ID: LIB3061-001-Q1-K2-E11
cgccgcggtggcaggttcccgtcgctcgtcgtgtgcgccagcgccggcatgaacgtcgtcttcgtc

SEQ ID NO: 4754 - DNA, 382 bp, Zea mays
  unsure (1)..(382): unsure at all n locations; Clone ID: LIB3061-001-Q1-K2-E12
cccacgcgtccgcctaccccacacagaagcggcggcggcggagcaaacgcaggcgaaggcgagggtgtgagggaaggagcaccagccatggtgcacgtcaacttctaccgcaactatggtaagacgttcaagaaaccaaggcgtccttatgagaaggagcgtcttgatgctgaactgaagctggttggtgagtatgggctgaggtgcaagcgtgagctttggagggtccagtatgcactgagcaggatccgtaatgctgcaaggcacttgctcacccttgacgagaagaacccccgtcgtatcttttgaggtgaggcacttcttcgncgcatgaaccgctatgggctgcttgctgaaggtcagaacaagcttgattatgttc

SEQ ID NO: 4755 - DNA, 395 bp, Zea mays
  unsure (1)..(395): unsure at all n locations; Clone ID: LIB3061-001-Q1-K2-E2
ggcacgtggagccgtagcaccggtcccaggcgatcttcatgtcgatcctccagtgcatgctgcagtagcggccgtaaagcgggctggtcgaggtgctgttggtggcgcagattgcgcatcagctgacggcgatctgcggactgcagtatgcgtgtacatgccgctacactgttgtcgacgttgtgctatactagaagaaactatgtgctgtagaatgagacgctggctatctaagctagatgagtaattgatgcgangaatattgatgaatagtgtgtacacgcatgaccatggttgcgcagcagtagcttgagcagtgtcaccaatgaacaactgcgctggcacaatcatcacatggaagtgcagccgatgtaaacgatgcatgcttacgtact

SEQ ID NO: 4756 - DNA, 366 bp, Zea mays
  Clone ID: LIB3061-001-Q1-K2-E4
accacgcgttcgcccacgcgtccgcgagatctgcaactgcgacaacctacgcgtggtaccgctcgccggcgaccagcagtgcgcgccggccgcttgcaagcggactccggaggcggtcaataccgtaaagcatcagcagcagggcagcgtggtgcctgcttcttccgctccggtcacgacggcagctgctcagtgcatgccatctgcggccacagcagcgcaagccatccgcgtcgcctaggagtcgtcgtcgtacatttcgtgcgcgtgattactagcttgttgacgacgacgccagcgcagggattcagcgcggacggtgacgatacaagcacgatggatcgacgagcgtcgagtcacggtcac

SEQ ID NO: 4757 - DNA, 414 bp, Zea mays
  Clone ID: LIB3061-001-Q1-K2-E5
gatcgccacagccaacaccacccgccgaggcgacgcgacagccgccaggaggaaggaataaactcactgccagccagtgaagggggagaagtgtactgctccgtcgaccagtgcgcgcaccgcccggcagggctgctcatctcgtcgacgaccagtggattaatcggcatggcggctctggccacgtcgcagctcgtcgcaacgcgcgccggcctgggcgtcccggacgcgtccacgttccgccgcggcgccgcgcagggcctgaggggggcccgggcgtcggcggcggcggacacgctcagcatgcggaccagcgcgcgcgcggcgcccaggcaccagcagcaggcgcgccgcggtggcaggttcccgtcgctcgtcgtgtgcgccagcgccggcatgaacgtcgtcttcgtc

SEQ ID NO: 4758 - DNA, 406 bp, Zea mays
  Clone ID: LIB3061-001-Q1-K2-E6
ccaacaagcaacatagaaagtggaatccagtagcaacaatagagcaacaatggcgaccaagatattttccctccttatgctccttgctctttctacatgtgttgctaacgcgacaattttccctcaatgctcacaagctcctatagcttcccttcttcccccataccttccatcaattatagcttcaatatgtgaaaacccagctcttcaaccatataggcttcaacaagcaatcgcagcaagcaacatacctttatcgcccttgttgtttcaacaatcgccagccctatctttggtgcagtcattggtacaaaccatcagggcacaacagctgcagcaactcgtgctacctctgatcaaccaagtagctctggcaaacctttctccctactctcagcaacaacca

SEQ ID NO: 4759 - DNA, 379 bp, Zea mays
  Clone ID: LIB3061-001-Q1-K2-E7
caactagcaacatagaaagcacaatagtgtaccaacaatggcagccaaaatattttgcctccttatgtccttggtctttctgcaagtgctgctacggcgaccattttcccgcaatgctcgcaagctcctatagcttcccttcttcccccgtacctctcaccagcggtgtcttcggtatgtgaaaacccaattcttcaaccctacaggatccaacaggcaatcacagctggcatcttacctttatcacccttgttcctccaacaatcatcagccctattacatcagttacctttggtgcatttattggcacaaaacatcagggcacaacaactacaacaacttgtgctagcaaaccttgctgcctactctcagcaacagc

SEQ ID NO: 4760 - DNA, 425 bp, Zea mays
  unsure (1)..(425): unsure at all n locations; Clone ID: LIB3061-001-Q1-K2-E8
ggaatccgcaacggcggccgtccgcagcgcgtcgctagcccgggcccggcccgcgccgctcgtccacgggcgcgcgcgcggggcgggtcgcgtcgtgggcgctggcctcgccgcgcgcgcccggcggagggcgctcgtcgccgtagcctcccaccaggagcaccacgagccgctcccgccgcgcgcgcaggagggcggcgccgtggctgtggcgacgcaggctgacgaggcggaggtccatgcgaatgacgctccggcggctgctgctgaaacctcgtctccccaactggctgctggcaagacagtgcgtgttcgatttgtgctgaaaaggcagtgcacgttcgggcagagcgtctgccttgtcggcgacgaccctgcgctcggcctctgggatctgtcgaacgcgtntcctttgaagtgggcgg

SEQ ID NO: 4761 - DNA, 260 bp, Zea mays
  Clone ID: LIB3061-001-Q1-K2-E9
gtttatggtttcaaagggacttctaagtaccagctctctgtagctatcaaggatgttagtggccaaaggattggtgaatatgctagtgcctcgggaagtgttgattttgattctgtgctgtgtagaaactgtaagcgccatatagccagccagtctgctcatcttcatgaggcatactgcatgagacacaatgtagcctgctcacatgatgggtgtggagttgtccttcggaagggaagaagcaacagatcatgtgcact

SEQ ID NO: 4762 - DNA, 302 bp, Zea mays
  Clone ID: LIB3061-001-Q1-K2-F1
gagaaaatcgtgaagaccttttagaaactgaaatggcaaggcttaccgttacagaagtgaagcgattaggcactgtctgtccaatgcagtctgcgctttagacttcagactgactgtgtcatatgatctcaaatattgaaccagtgactgccgtgaatatatacaagtactgatgagaagatgaacagcaatgatgggatgaaagatactttgatgccaaacactgactctgcaatattgaatgtgtcaatattcgaagacttgatattatagagcaatcctacaatggccttgtacttata

SEQ ID NO: 4763 - DNA, 84 bp, Zea mays
  Clone ID: LIB3061-001-Q1-K2-F10
gtcctttttctttttgatagtattacgtttaaaactatgtatgaccgaattatttgtcatcctggactcaattctgctgcaacc

SEQ ID NO: 4764 - DNA, 299 bp, Zea mays
  Clone ID: LIB3061-001-Q1-K2-F11
gcggcagtgcgtagagaggatcgtcgaacagaacagcatgaagatggtcatcgttctcgtcgtgtgcctggctctgtcagctgccagcgcctctgcaatgcagatgccctgcccctgcgcggcgctgcatggcttgtacggcgctggcgccggcctgacgacgatgatgggcgccggcggtctgtacccctacgcggagtacctgaggcagccgcagtgcagcccgctggcggcagcgccctactacgccgggtgtgggcagactagcgccatgtaccagtcgctccggcaacagtgct

SEQ ID NO: 4765 - DNA, 301 bp, Zea mays
  Clone ID: LIB3061-001-Q1-K2-F12
cgacccagcgtacccggcagtgcgtatagaggatcgtcgatcagaacagcatgaagatggtcatcgttctcggcgggtgcctggctctgtcagctgccagcacctctgcaatgcagatgccctgcccctgcgcggggctgcatggcttgtaccgcgctggcgccggcctgacgacgatgatgggcgcctgcggtctgtacccctacgcggagtacctgaggcagccgcagagcaccccgctggcggcagcgccctactacgcctgatgttggcagacgagcgccatgtaccattcgttccg

SEQ ID NO: 4766 - DNA, 374 bp, Zea mays
  Clone ID: LIB3061-001-Q1-K2-D7
attttgagcattcagaaacacacctagcgaagcgcactagcaacgacctaacaacaatggctaccaagatattatccctctttgcgcttcttgccctttttgtgagcgcaacaaatgcgttcattattccacaatgctcacttgctcctagtgccattattccacagttcctccctccagttacttcaatgggcttcgaacacccagctgtgcaagcctacaggctacaacaagcgcttgcggcgagcgtcttacaacaaccaattgcccaattacaacaacaatccttggcacatctaaccatacaaaccatcgcaacgcaacagcaacaacaatttctaccagcactgagccaactagctgtggtgaaccct

SEQ ID NO: 4767 - DNA, 436 bp, Zea mays
  Clone ID: LIB3061-001-Q1-K2-F3
atcaccctcattccgacagttccgctagaaggaaaagaagaaaaaaaaactctctttctctctctttcccagccctctctctccctctccacccggccgccaccatgtcaggcctctacagccagggcttctcccctgcaagaaccctctccccccagattaggagcaaccccgacgctgacagccagtacttggccgagcttctcgcggagcatcagaagctggggcccttcatgcaggtgctgccgatatgcagccggctgctcaatcaagaaatcatgcgggtatcaagcatggttcatgaccatggatttagtgatcttgacaggcgccggtttagaagtcctagccctatgtcctcaccaattgtccggcctaatctacatggcaatggatttggtccttggaatgggatgcaccaagagagattgggctt

SEQ ID NO: 4768 - DNA, 440 bp, Zea mays
  unsure (1)..(440): unsure at all n locations; Clone ID: LIB3061-001-Q1-K2-C2
ccaactagcaacatagaaagcacaatagtgtaccaacaatggcagccaaaatattttgcctgcttatgctccttggtctttctgcaagtgctgctacggcgaccattttcccacaatgctcacaagctcctatagcttcccttcttcccccgtacctctcaccagcggtgtcttcggtatgtgaaaacccaattcttcaaccctataggatccaacaggcaatcgcagctggcatcttacctttatcacccttgttcctccaacaatcatcagccctattacagcagttacctttggtgcatttattggcacanaacatcagggcacaacaactacaacaacttgtgctagcaaaccttgctgcctactctcagcaacaacagtttcttncattcaaccaactagctgcattgaactctgcttcttatttgcaacaacaa

SEQ ID NO: 4769 - DNA, 396 bp, Zea mays
  Clone ID: LIB3061-001-Q1-K2-C3
atttgcaacaacaattaccattcagccagctagttgctgcctacccccagcaatttcttccattcaaccaactagcagcattgaactctgctgcttatttacagcagcaacaactactaccattcagccagctagctgatgtgagccctgctgccttcttgacacaacaacagttgttgccgttctacctgcacgctatgcctaacgctggcaccctcttacaactgcaacaattgctgccattcaaccaacttgctttgacaaacccaacagtgttctaccaacaacccatcattggtggtgccctcttttagattgcttatgagttatagttcaataatgaagttttttggatgatgtttgtggcgtcccagaaataagaaagtacatttctag

SEQ ID NO: 4770 - DNA, 412 bp, Zea mays
  Clone ID: LIB3061-001-Q1-K2-C4
gtctccgtctccatctgcgtctacgtctccacaccgtgccgtagctgctgctgtccgtgtccgtcgcctcgaagaagacaactccaacactgttgccgcgtgactgctgaattcgctccacacacacgcgcgaacccagcaaggcaagaacacgaacgagagagagagagagagaggcagggaggggtcatacatgcatcagaccatcacccatggacaaccttaaggagcagcggggccacgatgccgcgggcgccaacagcggcgtctggatgacggtgccggcgttcggtgactgggacaccaagaacggcacgctgtcggactactccatggacttctccaagatccgtgagatgcgcaagcagaacatgaaggagctctcccgcgccagccttggcggtgacgacga

SEQ ID NO: 4771 - DNA, 339 bp, Zea mays
  Clone ID: LIB3061-001-Q1-K2-C5
catatagcggaaatactacagcacataggcagtcaaaatctaacgattacgtgtgctcattggtcttgctgtaagtgctgctactgcaaccattagcacacaatgctaacacgctcatatagctaactatcttatactatacctgtcactagcggtatcttcagcatgagaaaacgcaattctacaactctacaggatccaaaaggcaatcgcagcaggcattttacctttatcaccatcattcttgcaacatccgcaagcattattacagcaactacctttagcgcatgtgcaggcacagaacatcaaggtacaacaactacaactactagagctagg

SEQ ID NO: 4772 - DNA, 386 bp, Zea mays
  Clone ID: LIB3061-001-Q1-K2-C6
aatatagcgagcatacgaaaacacatatatagtagagaactaacaatgacctaggcgcaatggtcaggatgaaattgctggtactggatctacttgctctcaatgcgagtgcgatataagcgcttactatcttacactgcacatttgatcagagtgctattaatcatgagaaaatgcaagtagatactccaacgggattcaaccagccagctgagcaagattataaactacatcacgatcttgcgtcgaacgtccgacagcaacattacagcacatttactacagcacatttatgggcatataacattatggcacaacaccactcagcagtagcgatctgagacccagctaactactctgaatgctatcagctacttgcattaaca

SEQ ID NO: 4773 - DNA, 393 bp, Zea mays
  Clone ID: LIB3061-001-Q1-K2-C7
cccacgcgtccgagaccattagctttatctactccagagcgcagaagaacccgatcgacaccatgagggtgttgctcgttgccctcgctctcctggctctcgctgcgagcgccacctccacgcatacaagcggcggctgcggctgccagccaccgccgccggttcatctaccgccgccggtgcatctgccacctccggttcacctgccacctccggtgcatctcccaccgccggtccacctgccgccgccggtccacctgccaccgccggtccatgtgccgccgccggttcatctgccgccgccaccatgccactaccctactcaaccgccccggcctcagcctcatccccagccacacccatgcccgtgccaacagccgcatccaagcccgt

SEQ ID NO: 4774 - DNA, 433 bp, Zea mays
  unsure (1)..(433): unsure at all n locations; Clone ID: LIB3061-001-Q1-K2-C8
agcggatccagtctgtaccgctcgtcattggccagtttatggagatggtcgacggcaacaacggcatcgtgggctctaccactggcagcaactactacgtgcggatcctcagcaccatcaaccgcgagttgctcaagccgtcagcgtccgtcgcgttgcatcgtcactccaacgctctagtcgacgtgctgccgccggaggccgactccagcatctccttgttgggatcgtcggagaagcccaacgtcacttacaacgatattggaggatgtgacatccaaaagcaagaaatacgggaggcggttgaattacccttgactcatcatgagttgtacaagcagactggtattgatcctncaagaggggtgcttctgtatggtcctccgggtactggcaagaccatgcttgccaaagcagttgcacatcataccac

SEQ ID NO: 4775 - DNA, 298 bp, Zea mays
  unsure (1)..(298): unsure at all n locations; Clone ID: LIB3061-001-Q1-K2-C9
aaagaatttggcatccctgtagaatgccaacgattttgggtatgggcaaaacgacagaactgtacctacagacccagtcgtccattaacctcccaggaggaaacatctactattggggttctcaaagatgcaacagtggcgaagttaccgaattctgaagtacgattgttcttggaggttcatttcagacaggagaaaccaaccaattgctcttggaataccaaagaagatatattactttttcttcaagctctatgatcctgaaaaagaagacctaggatatgtcngccattttttt

SEQ ID NO: 4776 - DNA, 407 bp, Zea mays
  Clone ID: LIB3061-001-Q1-K2-D10
attttgagcattcagaaacacaccaagcgaagctacctagcaacgacttaacaacaatggctaccaagatattagccctccttgcgcttcttgccctttttgtgagcgcaacaaatgcgttcattattccacaatgctcacttgctcctagtgccattataccacagttcctccgaccagttacttcaatgggcttcgaacacctagctgtgcaagcctacaagctacaacaagcgcttgcggcgagcgtcttacaacaaccaattaaccaattgcaacaacaatccttggcacatctaaccatacaaaccatcgcaacacaacagcaacaacagttcctaccagcactgagccaactagatgtggtgaaccctgtcgcctacttgcaacagcaggtgcttgcattc

SEQ ID NO: 4777 - DNA, 426 bp, Zea mays
  unsure (1)..(426): unsure at all n locations; Clone ID: LIB3061-001-Q1-K2-D12
ctttctgcatgtgttgctaacgcgacaattttccctcaatgctcacaagctcctatagcttcccttcttcccccataccttccatcaatgatagcttcagtatgtgaaaacccagctcttcaaccctataggctccaacaagcaatcgcagcaagcaacatacctttatcacccttgtttcaacaatcgccagccctatctttggtgcagtcattggtacaaaccatcaaggcacagcagctgcagcaactcgtgctacctgtgatcaaccaagtagctctggcaaacctttctccctactatcagcaacaacaatttcttccattcaaccaactatctacactgaaccctgctgcttatttgcagcaacaactattaccattcagncagctagctactggctactctcatcaacaacaacttttt

SEQ ID NO: 4778 - DNA, 289 bp, Zea mays
  Clone ID: LIB3061-001-Q1-K2-D2
attgagactaactagcagcatagaaagcacactagtgtaccaacattggcagccaaaatattttgcctcctaatgctcctgggccttccggcaggggctgttacggcgaccattttcctgcatggttagaaggttctaatagcttccttttttccccagaacttctatccatcatagctttagtgttgtgaaacccaaatctttaaacctatcaggttccaccaggcattgacagctggcatataactttataaaccttggttcatccatcgatagtcatatctatgac

SEQ ID NO: 4779 - DNA, 401 bp, Zea mays
  Clone ID: LIB3061-001-Q1-K2-D3
gttcccctctcctgatcgtcctgttcctcacagcagcagccatggcggccgagccggagaagcaggcggcccccgcggcacaggagacggccgtgcacatcgtgtacgttgaccgccccgaggacgccgaccctgaggagttccacatccgcaccctcacccccgtcctcggcagcgaacagaaggccagggacgcagtgctctaccactacaagaacgccgccagcggcttctccgcgaagctcaccccccagcaggtcaaggatctcaaggagcaaccaggtgttctccaggttgtgccgagccagacttaccagctacatggtcctgggtctggcactcaccagggcacgacacacaccttgggccttatgtgaaggcgtatgagaatcaagaagact

SEQ ID NO: 4780 - DNA, 406 bp, Zea mays
  Clone ID: LIB3061-001-Q1-K2-D4
ggcgcatcatctgctgcatcgagcagaacgaggagggtcgaggcaatgatgaccgcgtaacactcatcaaggactaccgtggcgagattgaaactgagctcaccacgatctgtgatggcatcctcaagcttctcgaatctcaccttgaagccgatttcaccgctcccgagtccaatgtctactatctcaagatgaatggcgactactacagatactacgatgagttcaagactgaagctgagagaaaggacgctactgagaacaccatggtggcatacatggctgcacacgacattgctcaggatgatcttgctgcaactcacgctattacgcttggactgacactcaacttgtcagtgatctactatgagattctcaactaaaccgatcgctcatgcaatcttgc

SEQ ID NO: 4781 - DNA, 400 bp, Zea mays
  Clone ID: LIB3061-001-Q1-K2-D5
acagtgtccggcatcttggccccttccccacccttcgccctctcaaggaggccggccacgcctcacactcccgcccgcctccggcgattcatccacccaataaagtatccaaccctaacgatccggatcgccttaccccgcgtcatccacgcgaattgtttcgattatcctcggatttccccgtttttttgtgggtttcctatcttcttcgatcggagtgctagggtttgggcgcgctcggtgggcggcgtactccagggtcatcgttagttggacgggctagggtgctttctcaccgggggaagggaagcgaatccaaacaatggagaagaagaaggtggcgatcccgctggtgtgccacggtcactcgcggccggtggtggatctcttctacagcccc

SEQ ID NO: 4782 - DNA, 393 bp, Zea mays
  unsure (1)..(393): unsure at all n locations; Clone ID: LIB3061-001-Q1-K2-D6
gaagggcggtgcatgggatggtgctccggcgtgattccgaatacgatgtcttcgttggaacatccatcgttaacatgtatgtgaaatgtggtcagatgggcgctgccatgaatgagttctggaggatgccaatccggaatgtggtttcttggacaactgcgattgctggttttgtgcaacaggaggacccagtaaatgcaatgctgctgcttacagaaatgttgcggagtggtgtggcaattaacaagtacacggctacgagcatattgctcgcctgctctcaaacgtccatgatacgggaggctaatcangtgcacggcatgattataaagagcgagctgtacttggatcatgtngtcaaggangctttgatttncacatatgccaatgctg

SEQ ID NO: 4783 - DNA, 381 bp, Zea mays
  Clone ID: LIB3061-001-Q1-K2-C12
gcaacatagaaagcacaatagtgtaccaacaatggcagccaaaatattttgcctccttatgctccttggtctttctgcaagtgctgctacggcgaccattttcccgcaatgctcgcaagctcctatagcttcccttcttcccccgtacctctcaccagcggtgtcttcggtatgtgaaaacccaattcttcaaccctacaggatccaacaggcaatcgcagctggcatcttacctttatcacccttgttcctccaacaatcatcagccctattacaacagttacctttggtgcatttattggcacaaaacatcaaggcacaacaactacaacaacttgtgctagcaaaccttgctggctactctcagcaacagcagtttct

SEQ ID NO: 4784 - DNA, 300 bp, Zea mays
  Clone ID: LIB3061-001-Q1-K2-A5
ggttcgaattcccgggctctctctctcgccccccccccgcataacatcagctgttcactgacaacaagagcctccacgatgtgagcgagtgataaacttctagcactactggccaacgcacagaagtacactgatcctgcaccttaaccgaatggctccaatgactactactataccagtggatgagatcatgatatataacaggcaacaaaaacagcaatgcccaattactgccactaaagctatcaactacacggagactgttaacataccttaccagttactatcgacaacgtccta

SEQ ID NO: 4785 - DNA, 436 bp, Zea mays
  Clone ID: LIB3061-001-Q1-K2-A6
ctagcaacatagaaagcacaatagtgtaccaacaatggcagctaaaatattttgcctgcttatgctccttggtctttctgcaagtgctgctacggcgaccattttcccacaatgctcacaagctcctatagcttcccttcttcccccgtacctctcaccaacggtgtcttcggtatgtgaaaacccaattcttcaaccctacaggatccaacaggcaatcgcagctggcatcttacctttatcacccttgttcctccaacaatcatcagccctattacagcagttacctttggtgcatttattggcacaaaacatcagggcacaacaactacaacaacttgtgctagcaaaccttgctgcctactctcagcaacagcagtttcttccattcaaccaactagctgcattgaactctgcttcttatttgcaacaacaa

SEQ ID NO: 4786 - DNA, 328 bp, Zea mays
  Clone ID: LIB3061-001-Q1-K2-A7
cagccagctagctgatgtgagccctgttgccttcttgacacaacaacagttgttgccgttctacctgcacgctgcgcctaacgctggcaccctcttacaactgcaacaattgctgccattcaaccaacttgctttgacaaacccaacagcgttctaccaacaacccatcattggtggtgccctcttttagattgcttatgagttatacttcaataatgaagttttttggatgatgtttgtggcttcccagaaataagaaagtacatttctagattcttaaaaaaaaaaaaaaaagcaaaaaaagaaacaaaacaaaaaaacacaacaa

SEQ ID NO: 4787 - DNA, 433 bp, Zea mays
  Clone ID: LIB3061-001-Q1-K2-A8
atagaaagcacaatagtgtaccaacaatggcagccaaaatattttgcttccttatgctccttggtctttctgcaagtgctgctaccgcaaccattttcccacaatgctcacaagctcctatagcttcctttcttcccccatacctctcaccagcggtgtcttcagtatgtgaaaacccaattcttcaaccctacaggatccaacaggcaatcgcagcaggcatcttacctttatcacccttgttcctccaacaaccgtcagccctattacagcagttacctttggtgcatttgttggcacaaaacatcaaggcacaacaactacaacaacttgtgctaggaaaccttgctgcctactctcagcaacagcagtttcttccattcaaccaactggctgcattgaactctgctgcttatttgcaacaacaactacc

SEQ ID NO: 4788 - DNA, 211 bp, Zea mays
  Clone ID: LIB3061-001-Q1-K2-A9
gtggttgggtgaattgaactgttgctgcttgataaattgtagggtgaaaacttgcctcgaatctattacacatgtatatgactcatcaaggcacatgtgcacacaagaaacatgtgtattttgttgtgtgcaagttgatgtggttacttccctccaaatatgtaaattccatatataactatccaaacaggatattgaatttgattcatgg

SEQ ID NO: 4789 - DNA, 305 bp, Zea mays
  Clone ID: LIB3061-001-Q1-K2-B10
cggacgcgtgggcctccctcgaaaccctagcatagccactgccttcccgcacgctaggaaggggaagatatgggcgccgaggaggacgccgctgcacgccgcgagcgtctccgcgcccttcgtgccgccaaggaccttctctccacccccgacggcgccccaaccccttccaccgacggagaacaccagtaagatcaccacccccaccacgggaacttccctccttataagaatcaaggcatgctctcgtttttcgtcatggatcaaggcttttcatcactaactcataagaaatggcaaccatg

SEQ ID NO: 4790 - DNA, 232 bp, Zea mays
  unsure (1)..(232): unsure at all n locations; Clone ID: LIB3061-001-Q1-K2-B11
cccacgcgtccggcgagaggttgccagtagtatccgccggtagagcacgccaaggccgacgcctacgatgacggccatggggttctgggtgaccacgctcatctgtctcctcgccggcgtcgccgcatccctgttcacgcttctatgctgcaaccgngggccctccacanacctattccatttgaccttggtgactacagctgtnatctgttgatggatgatgcatgctatc

SEQ ID NO: 4791 - DNA, 186 bp, Zea mays
  Clone ID: LIB3061-001-Q1-K2-B12
gtacgacaccgatagtattaggcgacgccgggtgagaaagcctagcgccgagtccgttagatctccggggcccttgcacgcgcccgatcacgccaccagatgcgtggtcagcgttgccgccgatcgacacccccgacgacgggcgaccgtagcgacgtggaggacaagatcgacccgatgcggggc

SEQ ID NO: 4792 - DNA, 408 bp, Zea mays
  Clone ID: LIB3061-001-Q1-K2-B2
cgcagcgcgagtgcggcgacagccagtcacacactcacactccctcgaccgctctcggccccgtccgcgtcgccgcagggcgaggaggcaatggcggcgggcgggaatggcgccggcggggacaccagggcggccttcgcgcggatctacaagacgctcaaggaggagctgctcaccgacccggccttcgagttcaccgaggagtcacgccagtggatcgaccgcatggttgactacaatgtactcggaggcaagtgtaaccgtgggctctctgtggtcgacagctacaagctgctcaagggcgctgatgctctgggcgaggaggaaacgttccttgcttgcaccctcggctggtgcattgaatggcttcaggctttctttcttgtgcttgatgatatcatggatgac

SEQ ID NO: 4793 - DNA, 426 bp, Zea mays
  Clone ID: LIB3061-001-Q1-K2-B3
tgcagtcattggtacaaaccatcagggcacagcagctgcagcaactcgtgctacctgtgatcaaccaagtagctctggcaaacctttctccctactctcagcaacaacaatttcttccattcaaccaactgtctacactgaaccctgctgcttatttgcagcaacaactattaccattcagccagctagctactgcctactctcagcaacaacaacttcttccatttaaccaattggccgcactgaaccccgctgcttatttgcagcagcaaatactactaccatttagccagctagctgcagcaaaccgtgcttccttcttgacacagcaacagttgctgcctttctaccagcagtttgcggctaaccccgcaaccctcttacaactacaacaattgttgccctttgtccaacttgctttgacag

SEQ ID NO: 4794 - DNA, 428 bp, Zea mays
  Clone ID: LIB3061-001-Q1-K2-B4
gcgaagcgcactagcaacgacctaacaccaatggctaccaagatattagccctccttgcgcttcttgcccttttagtgagcgcaacaaatgcgttcattattccacagtgctcacttgctcctagtgccagtattccacagttcctcccaccagttacttcaatgggcttcgaacatccagccgtgcaagcctacaggctacaactagcgcttgcggcgagcgccttacaacaaccaattgcccaattgcaacaacaatccttggcacatctaaccctacaaaccattgcaacgcaacaacaacaacaacagtttctgccatcactgagccacctagccgtggtgaaccctgtcacctacttgcaacagcagctgcttgcatccaaaccacttgctctggcgaacgtagctgcataccaacaacaaca

SEQ ID NO: 4795 - DNA, 439 bp, Zea mays
  unsure (1)..(439): unsure at all n locations; Clone ID: LIB3061-001-Q1-K2-B6
aatattttgagcattcagaaacacacctagcgaagcgcactagcaacgacctaacaacaatggcttccaagacattatccctccttgcgcttcttgccctttttgtgagtgcaacaaatgcgttcattattccacaatgctcacttgctccgagtgccattattccacagttcctccctccagttacttcaatgggcttcgaacacccagctgtgcaagcctataggctacaacaagcgcttgcggcgagcgtcttagaacaaccaattgcccaattacaacaacaatccttggcacatctaaccatacaaaccatcgcaacgcagcagcaacaagcactgagccacctagccgtggtgaaccctatcgcctacttgcaacaacagctgcttgcattcaacncacttgctttggcaaacgtagctgcataccaacaaca

SEQ ID NO: 4796 - DNA, 390 bp, Zea mays
  unsure (1)..(390): unsure at all n locations; Clone ID: LIB3061-001-Q1-K2-B7
cccacgcgtccgccgcagtccgcaggaccggtcactcggcacgcaggctagcagcacagcagcagccagagccatcccctctcctcgctacgcttcgcttcctcggcgccgattcctcctcctcctcctccaccctcgtccgtccccttccggcgcacgagctcgcccgagatggcgaacgcgagatcgggtgtcgctgtgaacgatgagtgcatgctgaagtttggcgagctgcagtcgaagaggctgcaccgcttcataactttcaagatggacgacaagttcaaggagatagttgtggaccaggtcggngatcgcgctaccagctacgatgacttcacaaacagcctncctgagaatgactgccgatacgcgatctatgatttcgac

SEQ ID NO: 4797 - DNA, 188 bp, Zea mays
  Clone ID: LIB3061-001-Q1-K2-B8
tcactcggctcacactactatcagcacgctatcatccacagccatcccctctcctcactacccttcacttactcgccaccaatatctcctcctactccttcaccctcttccttccactactcactcaccagctctcccaataatcctaactccagatctacatgtcactttcaacaattagcgcatac

SEQ ID NO: 4798 - DNA, 209 bp, Zea mays
  unsure (1)..(209): unsure at all n locations; Clone ID: LIB3061-001-Q1-K2-B9
caaagcggcagtgcgtagagaggatcgtcgaacagaacagcatgaagatggtcatcgttctcgtcgtgtgcctggctctgtcagctgccagcgcctctgcaatgcagatgccctgcccctgcgcggngctgcagggcttgtacggcgctggcgccggcctgacgacgatgatggngcgccgcgggctgtacccctacgcggagtacctg

SEQ ID NO: 4799 - DNA, 444 bp, Zea mays
  Clone ID: LIB3061-001-Q1-K2-C1
agcaacatagaaagcacaatagtgtaccaacaatggcagccaaaatattttgcttccgtatgctccttggtctttctgcaagtgctgctaccgcaaccattttcccacaatgctcacaagctcctatagcttcctttcttcccccatacctctcaccagcggtgtcttcagtatgtgaaaacccaattcttcaaccctacaggatccaacaggcaatcgcagcaggcatcttacctttatcacccttgttcctccaacaaccgtcagccctattacagcagttacctttggtgcatttgttggcacaaaacatcaaggcacaacaactacaacaacttgtgctaggaaaccttgctgcctactctcagcaacagcagtttcttccattcaaccaactggctgcattgaactctgctgcttatttgcaacaacaactaccattca

SEQ ID NO: 4800 - DNA, 443 bp, Zea mays
  Clone ID: LIB3061-001-Q1-K2-A4
caacatagaaagcacaatagtgtaccaacaatggcagctaaaatattttgcctccttatgctccttggtctttctgcaagtgctgctacggcgaccattttcccacaatgctcacaagctcctatagcttcccttcttcccccgtacctctcaccaacggtgtcttcggtatgtgaaaacccaattcttcaaccctacaggatccaacaggcaatcgcagctggcatcttacctttatcacccttgttcctccaacaatcatcagccctattacagcagttacctttggtgcatttattggcacaaaacatcagggcacaacaactacaacaacttgtgctagcaaaccttgctgcctactctcagcaacagcagtttcttccattcaaccaactagctgcattgaactctgcttcttatttgcaacaacaacaactaccatt

SEQ ID NO: 4801 - DNA, 316 bp, Zea mays
  Clone ID: LIB3061-001-Q1-K2-C10
ctccagtccatcctgcagcagcagccgcaaagcggccaggtcgcggggctgttggcggcgcagatagcgcagcaactgacggcgatgtgcggcctgcagcagccgactccatgcccctacgctgctgccggcggtgtcccccactgaagaaactatgtgctgtagtatagccgctggctagctagctagttgagtcatttagcggcgatgattgagtaataatgtgtcacgcatcaccatgggtggcagtgtcagtgtgagcaatgacctgaatgaacaattgaaatgaaaagaaaaaaagtactccatctgttcc

SEQ ID NO: 4802 - DNA, 226 bp, Zea mays
  Clone ID: LIB3061-001-Q1-K1-A9
cgacccatgcgtccggtggttgagtgaattgaactgtagctacttgatcaatcgtagggtgaaaacattggtggaatttataacacatgtatatgactcatcaaggcacatgtgcacacaagaaacatgtgtattatgtagtgagcaagttgaagtggttactatcctccaaatatgtaaattccatatataactattcaaacaggaaattgaatttgattcatgg

SEQ ID NO: 4803 - DNA, 196 bp, Zea mays
  Clone ID: LIB3061-001-Q1-K1-B12
ggccgacaccgcgcgtattaggcgacgtccggtgagaaagcctagcgccgagtcgggggcgtttccagggcccttcgacgcgcccgatcacgcgaccagatgcgtggtcagcgttgccgccgatcgagacccccgacgacgggcgacggtagcgacgtggatgacaagagcgacccgctgctggggcaggacccgc

SEQ ID NO: 4804 - DNA, 202 bp, Zea mays
  Clone ID: LIB3061-001-Q1-K1-B9
cgaagcggcagtgtttagagaggagcgtcgaacagaacagcatgaagatggtcatcggtctcttcaagtgcctggctctgtcagctgccagcgcctctgcaatgcagatgccctgcccctgcgcggggctgcagggcttgtacggcgctggcgccggcctgacgacgatgatgggcgccggcgggctgtacccctacgcgga

SEQ ID NO: 4805 - DNA, 161 bp, Zea mays
  Clone ID: LIB3061-001-Q1-K1-C10
cgccagtccatcctgcagcagcagccgtagaagccgccaggtcgcggggctgttgccgacgcttataaagcagcaagggaccgcgatatgcgggctgcagcaaccgactccatgccccgacgctgctgccggcggagtcccccactgaacaaactatgtgc

SEQ ID NO: 4806 - DNA, 214 bp, Zea mays
  unsure (1)..(214): unsure at all n locations; Clone ID: LIB3061-001-Q1-K1-C12
ggagcacagaaagcacaagagtggacctacaaacgcagacaaaagagagagccnccagacgctccaaggacanccagcaacngctgatacggcgaccatgatcccgcaaagcgcgcaagcaccaatagcgaccctgcagcccccgaacctcacaccagcgagggctacagcaagcgaaaacccaatacgacaaccctacaggaaccaacaggca

SEQ ID NO: 4807 - DNA, 88 bp, Zea mays
  Clone ID: LIB3061-001-Q1-K1-C9
aaacatctactattggggttctcaaagatgcaacagtgtcgatattaccgaattctgaattacgattgttctttgaggttcatttcat

SEQ ID NO: 4808 - DNA, 222 bp, Zea mays
  unsure (1)..(222): unsure at all n locations; Clone ID: LIB3061-001-Q1-K1-D10
gtccgagttggagcatacttaatcacaccaagtgaagccaccgagcaacgactgaacaacaaganctttcaagagattagggctccttgctcttcgtgggctttttgtgagcgcaacaaatgcgtgcattattccacaatgctcacttgctcctagagccagttataccacagttgttgcgaccagatactaggatgggcttaagagctcctagctgtgcaa

SEQ ID NO: 4809 - DNA, 178 bp, Zea mays
  unsure (1)..(178): unsure at all n locations; Clone ID: LIB3061-001-Q1-K1-E12
cgcacgcgtccgcttaccccacacagatacggccgcggcggagcaaacgcaagccagancgtttgtaagagggaaggagccccatcaatggggcacgtcaacttctaccgcaactatggcaagacgttcaagaaaccaatgcgtccttatgataaggagcgtcttgatgctgaactga

SEQ ID NO: 4810 - DNA, 200 bp, Zea mays
  Clone ID: LIB3061-001-Q1-K1-F10
tcccagctaccccccgaccgcacaccaccagagacctcagcaagagaaaacccaaaactcaaaccaaacacgagccaacaggaaagcgcagccggcgaaaaacctggagcaccccaacaccaacaacaagcagcagacccaaaacaacagagaccacaagagcacaaaaagacacagaacaacaaggcacaacaacaaca

SEQ ID NO: 4811 - DNA, 158 bp, Zea mays
  unsure (1)..(158): unsure at all n locations; Clone ID: LIB3061-001-Q1-K1-F11
gcggcagtgcgtatagaggatcgncaatcagaacagcatgaagatgggcatcgnncgcngcttgtaacaggctctgacagctgccaacgcctgtgcaatgcagatgccctgcccctgcacggggctgcaaggcatgtacagcactggcgccggcctga

SEQ ID NO: 4812 - DNA, 102 bp, Zea mays
  Clone ID: LIB3061-001-Q1-K1-F9
acaagcgcctatagcttcccttcttcccccgtacctctcaccaacagtgtcctcggtatttgaaaacccaaaacttttaccctacacgaaccaacaagccaa

SEQ ID NO: 4813 - DNA, 231 bp, Zea mays
  unsure (1)..(231): unsure at all n locations; Clone ID: LIB3061-001-Q1-K1-G10
cacccacgcgtccggcagcatagaaagtacaatagtgcacctacaatggcagccaaaatatcangcctcccgangctcttaggactttcagcaaccgctgctacggcgaccattttcccacaatgctcacaagctcctatagcttcccttcttcccccgtacctctcaccagcggagtcatcggtatgtagaaaacccaaaactgcaacccaataggatccaacaggcaaa

SEQ ID NO: 4814 - DNA, 215 bp, Zea mays
  Clone ID: LIB3061-001-Q1-K1-G11
gcgacatagaaagctcattactggaaatacaacgccagccaaaatatttagcttcctgatgcttctaaaactttctacaagtgctactaccgcaaccattttcccacaatgctcacaagctcctatagcttcctttcttcccccatacctcttaccagcggtgtcttcagtatgttaaaacccaattctacaaccctactagatccaacaagcaa

SEQ ID NO: 4815 - DNA, 140 bp, Zea mays
  Clone ID: LIB3061-001-Q1-K1-G12
taaacgcgaccaaaagtcctcaatactcacaagctcctataactgccctaataaccccatacctaccatcaaagaccactaaaataagtaaaaaccccacccttaaaccctacaagctccaacaagcaaatcacaacaaa

SEQ ID NO: 4816 - DNA, 237 bp, Zea mays
  Clone ID: LIB3061-001-Q1-K1-G9
tggaaagtggaatctagtaccaacaaataagcaacaatggcgaccaacatactgaccgaccttatgcgaaatgctcggactgcatgtgttgcggacgcgacaatcggccctcactgctcacaagctcccatagcttcccttcttcccccataccttccatcaatgatagctacaggatgtgaaaacccagctcttcaacccgataggctccaacaagcaaacgcagctagcaacata

SEQ ID NO: 4817 - DNA, 295 bp, Zea mays
  Clone ID: LIB3061-001-Q1-K1-H10
cccacgcgtacggtccgcattattattctcactggtctaattgctaacacagacagcagcagctcctgctgactagctagacttctctatatttgctactgcaagtgtccaagtctgcgacgacgtccgagatgtcgacggtgagccgtgcatcccttgaccagaagcttgccctcgccaagcgctgctcccgagaggcgactcttgccggagctaatgcggcagcagtggcgactatcgcctccgcgattcccaccctcgcgagcgtgcggatgctgccgtgggccaaggccaa

SEQ ID NO: 4818 - DNA, 412 bp, Zea mays
  Clone ID: LIB3061-001-Q1-K1-A12
agccattctccaatctgaagcgaatcaggagtgcacatctttgttgtagagggcagagtttgctcagctgctgctggacattggagagcgcagtggtggttgtacgcctgaaaggaattctttgtaaatttcccctatatctggttctgttatcatcattattttccttgcgttagacaataatgtcggagaacgaattagcagtaataaaaccagaggtacatcttctgttgcacttcctgttaattagagattaaatgttgcattcttatcttgattgcatcatttgggcctaaatcaactaatcaagtttattggtgaactctgacaggcattgaaaacttatatatggcttcagtgctttgatggctccatacaacaagtggaggaagaagttgccatgttctggcct

SEQ ID NO: 4819 - DNA, 413 bp, Zea mays
  Clone ID: LIB3061-001-Q1-K1-H11
agcaacatagaaagcacaatagtgaactaacaatggcagccaaaatattttgcctggtgatgctccatggtctttctgcaagtgctgctacggcgaccattttcccgcaatgctcgcaagctcctatagcttcccttcttcccccgtacctctcaccagcggtgtcttcggtatgtgaaaacccaattcttcaaccctacaggatccaacaggcaatcacagctggcatcttacctttatcacccttgttcctccaacaatcatcagccctattacatcagttacctttggtgcatttattggcacaaaacatcagggcacaacaactacaacaacttgtgctagcaaaccttgctgcctactctcagcaacagcagtttcttccattcaaccaactagctgcattgaactct

SEQ ID NO: 4820 - DNA, 390 bp, Zea mays
  Clone ID: LIB3061-001-Q1-K1-H12
ccgggaacccatccacaattggtagctcgttgatccaaatccaagacctacgtcaacgcactgtctcgcctgttagattggtcgtcgacgtcgtcgtctatgtccaggctgatggctgccatgctgctcggaggcgcgcgcgtcgccggcgccgcaaagctcaccggtaacggcaacgctgctggcatgcaggctcttcccatgccggcgtgcttccttccgccgcgcccgcaggcagcgacctggacccgcctctgcttgcaagctgcgccaagatcgtcccaggcatacgacaacgcgccggaagaccggagagaaattggggacaagttcaaagacgcggcggaagaggcgaatgacgccacctgggacgccaaggagcacgccaag

SEQ ID NO: 4821 - DNA, 337 bp, Zea mays
  unsure (1)..(337): unsure at all n locations; Clone ID: LIB3061-001-Q1-K2-A1
gcaacatagaaagcacaatagtgtaccaacaatggcagccaaaatattttgcttcctgatgctccttggtctttctgcaagtgttgctaccgcaaccattttcccacaatgctcacaagctcctatagcttcccttcttcccccatacctctcaccagcggtgtcttcaatgtgtgaaaccccaattgttcaaccctacaggatccaacaggcaatcgcaacaggcatcttaccattatcacccttgttccttcaacaaccgtcagccctattacagcagttacctttggtccatttggtggcacaaaacatcanggcacaacaactaccacaactt

SEQ ID NO: 4822 - DNA, 329 bp, Zea mays
  Clone ID: LIB3061-001-Q1-K2-A10
ctagcagccgcccggagctccctctctgcagatctcccttcggagccgccgaggaaccggttcggagagcggtagatggctgaacaggaggccccagtcgcggttgaggcaccaaccccagttcttggggagcctatggacttgatgactgctctgcagctcgtgatgaagaagtcaagtgctcatgacggtcttgtgaagggtctccgggaggctgacaatgccatcgagaagcacgccggtcaactttgcgtgcttgctgaagactgtgaacagccagattacgtcaagttggtgaaggcactctgcgctgagcacaatgttcacct

SEQ ID NO: 4823 - DNA, 259 bp, Zea mays
  unsure (1)..(259): unsure at all n locations; Clone ID: LIB3061-001-Q1-K2-A11
cttcaagcagctatagctagcataattaactcatgggtgcatagagatatgccgncgacgacccatatctatgggtccctccccttgcactgcatcttcttcttcctcctcctcgacctccttcaattattcctagtgtttgcttctcccttccttgacctttgcttggaaccattgatagttacttattgngcatggagcacgtcatctcaatggaggagatccctcggcccttctggagctgctgcagcgcagcgca

SEQ ID NO: 4824 - DNA, 426 bp, Zea mays
  unsure (1)..(426): unsure at all n locations; Clone ID: LIB3061-001-Q1-K2-A2
tgtctnccgacgccgncgctaggctttgcgcctttgcctgcatcactcgctcattcggagcccctctcttcgccggcgtcgtaagaagagatggcagagcgtttgacccgtatcgccatagttagcgaggacaagtgcaagcccaagaagtgccgccaggagtgcaagatgagctgccccgtcgtcaagactgggaagctntgcattgaagtgacttcggcgtcgaaactcgctttcatttctgaggaactgtgcatcggttgtggtatctgtgtaaagaaatgcccatttgatgccattgaaatcatcaaccttgcaaaagacttggaaaaggataccactcaccggtatgggcctaataccttcaagctgcacaggttgcctgtcccgagacctggtcaggttttgggccttggtggaacaaat

SEQ ID NO: 4825 - DNA, 390 bp, Zea mays
  Clone ID: LIB3061-001-Q1-K1-A10
ctagcagccgcccttagctccctcgactcagatctcccttcgcagccgccgaggggcggcttctcagagcggaagatggctgaacaggatgccccagtcgcggttgaggcaccaaccccagttcttggggagcctatggacttgatgactgctctgcagctcgtgatgaagaagtcaagtgctcatgacggtcttgtgaagggtctccgggaggctgccaaggccatcgagaagcacgccgctcagctttgcgtgcttgctgaggactgtgaccagccagattacgtcaagtttggtgaaggcactctgcgctgagcacaatgttcacctggtcactgtacctgccgctcagactcttggctagtgggccgggctttgcaagattgactt

SEQ ID NO: 4826 - DNA, 146 bp, Zea mays
  unsure (1)..(146): unsure at all n locations; Clone ID: LIB3061-001-Q1-K1-E11
ggcggctgcggacttgctcagcatgcgtaccagcgcgcgcgcggcgcccaggcaccggcatcttttagcaccgcgggggcacgntattttcgctcgtcgtgtgcgccagcgccagcatgaacgttgtcttcatcggcgccgagatg

SEQ ID NO: 4827 - DNA, 354 bp, Zea mays
  Clone ID: LIB3061-001-Q1-K2-A12
aagccattctccaatctgaaggcgaaacaaggagtgcacatctttgttgtagagggcagagtttgctcagctgctgctggacattggagagcgcagtggtggttgtacgcctgaaaggaattctttgtaaatttaccctatatctggttctgctatcatcattattttccttgcgttagacaataatgtcggagaacgaattagcagtaataaaaccagaggtacatctgctgttgcacttactgttaattagagattaaatgttgcattcttatcttgattgcatcatttgggcctaaatcaactaatcaagtttattggtgaactcttacaggcattgaaaacttatatttg

SEQ ID NO: 4828 - DNA, 436 bp, Zea mays
  Clone ID: LIB3061-001-Q1-K2-B5
tagaaagcacaatagtgtaccaacaatggcagccaaaatattttgcttccttatgctccttggtctttctgcaagtgctgctaccgcaaccattttcccacaatgctcacaagctcctatagcttcctttcttcccccatacctctcaccagcggtgtcttcagtatgtgaaaacccaattcttcaaccctacaggatccaacaggcaatcgcagcaggcatcttacctttatcacccttgttcctccaacaaccgtcagccctattacagcagttacctttggtgcatttgttggcacaaaacatcaaggcacaacaactacaacaacttgtgctaggaaaccttgctgcctactctcagcaacagcagtttcttccattcaaccaactggctgcattgaactctgctgcttatttgcaacaacaactaccattc

SEQ ID NO: 4829 - DNA, 427 bp, Zea mays
  unsure (1)..(427): unsure at all n locations; Clone ID: LIB3061-001-Q1-K2-D1
aagcaacatagaaagtggaatccagtagcaacaatagagcaacaatggcgaccaagatactttccctccttatgctccttgctctttctgcatgtgttgctaacgcgacaattttccctcaatgctcacaagctcctatagcttcccttcttcccccataccttccatcaatgatagcttcagtatgtgaaaacccagctcttcaaccctataggctccaacaagcaatcgcagcaagcaacatacctttatcacccttgtttcaacaatcgccagccctatctttggtgcagtcattggtacaaaccatcaaggcacagcagctgcagcaactcgtgctacctgtgatcaaccaagtagctctggcaaacctttcntcctactatcagcaacaacaatttcttccattcaaccaactatctacact

SEQ ID NO: 4830 - DNA, 271 bp, Zea mays
  Clone ID: LIB3061-001-Q1-K2-E3
taaaaaaaaaaaaaaaaaaaaaaaaaataaaaaaaaaaaaaaaaaaaaaaaaaaaaaagggaagaaaaaaaaaaaaaaaaaaaaaaaaaaaaaaaaaaaaaattaaaaaaaaaaaaatgaataaaaaaagaaaaaaatatataaacttaaaaaaaaaaaaaaaatagataaaaaaaaaatgaaaagggggtgccctttttaagaaattatatatttgtgccgtgtcctgagaaaatctaacttttttaataggcccctgaaatataaattg

SEQ ID NO: 4831 - DNA, 434 bp, Zea mays
  Clone ID: LIB3061-001-Q1-K2-G9
tagaaagtggaatccagtagcaacaatagagcaacaatggcgaccaagatactttccctgcttatgctccttgctctttctgcatgtgttgctaacgcgacaattttccctcaatgctcacaagctcctatagcttcccttctttcaccataccttccatcaatgatagcttcagtatgtgaaaacccagctcttcaaccctataggctccaacaagcaatcgcagcaagcaacatacctttatcacccttgtttcaacaatcgccagccctatctttggtgcaatcattggtacaaaccatcaaggcacatcaactgcaacaactcgtgctacctgtgatcaaccaagtaacttttggcaacctttcttcctactatcagcaacaacaatttctttcattcaaccaactatctacactgaacccttctgctta

SEQ ID NO: 4832 - DNA, 408 bp, Zea mays
  unsure (1)..(408): unsure at all n locations; Clone ID: LIB3061-002-Q1-K2-B4
tagcaacatacatagtgaagtacactagcaacatcttagcaccaatggcagccaagatttttgccatccttgccctccttgctctttcagcaagcgttgctaccgcgactattattccacaatgctcacaacaatacctctctccggtgacagccgcgagatttgaatacccaactatacaatcctacaggctacaagaggccatcgcagcaagcatcttacggtcgttagcattgaccgtccaacaaccatatgccctattgcaacaaccatccttaatgaatctatatctccaaagaatcgcagcacaacaactacaacaacagttgcttncaacaatcaatcaagtagttgcagcgaaccttgctgcttacctncagcaacaacaatttcttccattcaatcaac

SEQ ID NO: 4833 - DNA, 51 bp, Zea mays
  Clone ID: LIB3061-002-Q1-K2-E5
tgaacattcataaatcacacctatccattctcacaatcaccaacacaacaa

SEQ ID NO: 4834 - DNA, 357 bp, Zea mays
  Clone ID: LIB3061-002-Q1-K2-E7
aagcgaagcgcactagcaacgacctaacaccaatggctaccaagatattagccctccttgcgcttcttgcccttttagtgagcgcaacaaatgcgttcattattccacagtgctcacttgctcctagtgccattattccacagttcctcccaccagttacttcaatgggcttcgaacatccagccgtgcaagcctacaggctacaactagcgcttgcggcgagcgccttacaacaaccaattgcccaattgcaacaacaatccttggcacatctaaccctacaaaccattgcaacgcatcaacaacaacaacaacagtttctgccatcactgagccacctagccgtggtgaaccctg

SEQ ID NO: 4835 - DNA, 327 bp, Zea mays
  Clone ID: LIB3061-002-Q1-K2-G10
acagcagttacctttggtgcatttgttggcacaaagcatcaaggcacaacaactacaacaacttgtgctacgaaaccttgctgcctactctcagcaacagcaggttcttccattcaaccaactggctgcattgaactatgctgcttatttgcaacaacaactaccattcagtcagctagctgctgcctacccccagcaatttcttccattcaaccaactggcagcattgaactctgctgcttatttacaacagcaacagctaccaccattcagccagctagctgatgtgagccctgttgccttcttgacacaacaacagttgttgcc

SEQ ID NO: 4836 - DNA, 328 bp, Zea mays
  unsure (1)..(328): unsure at all n locations; Clone ID: LIB3061-003-Q1-K1-A2
ccctcaacaagtcatctatattcaagattaaaactcactatgaatgcaatggccaaccgttctcaaacgagctcagatttctcagcagaatacatattgaacttagcgcaattgaaccgaaagaaaaaaagaagggcctacaaagagaatgacgggtgctntccttcgttccacgagcagggggggtgggggcttttgaaaaaacaaacaccgagctctttcttttcctagctgcaattagtgtccagggagaaagggctgaaactggacaaactggctggcacatggtaaccaatgggtctctaaaatctgaattccgggtcaacgt

SEQ ID NO: 4837 - DNA, 313 bp, Zea mays
  Clone ID: LIB3061-003-Q1-K1-C1
cagcagttacctttggtgcatttattggcacaaaacatcagggcacaacaactacaacaacttgtgctagcaaaccttgctgcctactctcagcaacagcagtttcttccattcaaccaactagctgcattgaactctgcttcttatttgcaacaacaacaactaccattcagccagctacctgttgcctacccccaacaatttcttccattcaaccaactggcagcattgaactctcctgcttatttacagcagcaacaactactaccattcagccagctagctggtgtgagccctgctaccttcttgacac

SEQ ID NO: 4838 - DNA, 174 bp, Zea mays
  Clone ID: LIB3061-003-Q1-K1-G11
aagcaaaggcgcttgactttcatgtaagaaaacatgtcatttactattttgtttatttattacatacacatcaacctaggcatacatgcgagagtcgcgctgtcatgtggatcaagcacacatgatcagaggcctgacgaccggagtgtagcatcagctctctctctcttgcat

SEQ ID NO: 4839 - DNA, 51 bp, Zea mays
  Clone ID: LIB3061-004-Q1-K1-E12
cagaaataagaaagtacatttctagattctaataagcaaaaaccacgttct

SEQ ID NO: 4840 - DNA, 406 bp, Zea mays
  Clone ID: LIB3061-005-Q1-K1-E5
tattgataccaactagcaaaatacatagtgaagtacactagcaacatcttagcacggatgggagccaagattgtttccctccttgccctccttgctctttcagcaagcgctgctacctctactattattccacaatgctcacaacaatacctctctccggtgacagccgcgggatttcaacacccaactatacaatcctacatgctacatgaggccatcgtagcaagcatcttacggtcattagcattaaccctccaacagccatatgccctattgcaacaaccatccttagtgcatctgtatctccaaagaatcgcgacacaacaactacaacaacagttgctaccaacaatcaatcaagcacaacaactactaccatttaaccaacttgtcgggagccctgatg

SEQ ID NO: 4841 - DNA, 369 bp, Zea mays
  Clone ID: LIB3061-005-Q1-K1-F1
tagttactcccccacaaccatgaaccttcatgctgctgaatttgtgcctggaaaaagttcgcaacaatctgatgtggctgacagagaacccagtcctgataatcatgtggccaatcctgatctggatgttgtatcgcagaccacagatgaagtgaaggctgaaacacctgccactgaaaaggcaggtcaagttgagaaagtcgtttcaggtaaaggaaaggaaaacagagggaaagacatcgtgagaaactcatacaaaacagaacttgcaaggcaaattttgctcagtttcattgtaaagtcagtgcatgacagtttaggttccgcccaagctgaaccagaaaggaagccaagtggatcagatgaagc

SEQ ID NO: 4842 - DNA, 359 bp, Zea mays
  Clone ID: LIB3061-005-Q1-K1-G9
tattattgagaccaactagcaacatagaaagcacaatagtgtaccaacaatggcagcgaaaatattttgcctccttatgctccttggtctttctgcaagtgctgctacggcgaccattttcccacaatgctcacaagctcctatagcttcccttcttcccccgtacctctcaccagcggtgtcttcggtatgtgaaaacccaattcttcaaccctataggatccaacaggcaatcgcagctggcatcttacctttatcacccttgttcctccaacaatcatcagccctattacagcagttacctttggtgcatttattggcacaaaacatcagggcacaacaactacaacaacttgtgc

SEQ ID NO: 4843 - DNA, 431 bp, Zea mays
  Clone ID: LIB3061-007-Q1-K1-A3
ctgaggggttccccgtccccggccgtactggtgccaacccagctctccggtgcgcccgcgacccctgctcccgtcgtcagggtggcggcgccgcgcggagtcgcctcgccgtccgctggcgccgcgtgcagggccgcgggcaaggggaaggaggtgctcagcggggtcgtgttccagcccttcgaggagatcaagggggagctcgccctcgtgccccagtccccagacaagtcgctcgcgcgccacaagttcgtcgatgactgcgaggccgccctcaacgagcagatcaacgtggagtacaacgcctcgtatgcataccactccctcttcgcctatttcgaccgcgacaacgtggctctcaaaggatttgccaagttcttcaaggaatccagcgacgaggagagggagcacgctgaaaagctcatggagta

SEQ ID NO: 4844 - DNA, 323 bp, Zea mays
  Clone ID: LIB3061-007-Q1-K1-H1
aagcacagcacagtaccgtcccagccatggctgacaaaatgcctcgtcatgctacgcggcctggccgcaagggctgcgccggtaaccataccatcacaacgcacagatgctacgatagcatagcttcctttcttgcaccgcacatcaaaccagccgtggctacgggaaaacccaacccaacaaccctacccgacccgacccgccatgccagcacagatggcaccttaaccacactagcctcgccaacactactcagacctatcacagcacataccttacctgcagtgaatggatcggcacatcacatcacagcacctccacca

SEQ ID NO: 4845 - DNA, 417 bp, Zea mays
  Clone ID: LIB3061-008-Q1-K1-D11
aagcatctcaacacatcatcttcaacttctcctaccagcactgagccaactagatgtggtgaaccctgtcgcctacttgcaacagcaggtgcttgcatccaacccacttgctctggcaaacgtagctgcataccaacaacaacaacaattgcaacagtttctgccagcgctcagtcaactagccatggtgaaccctgccgcctacctacaacagcaacaactgctttcatctagccctctcgttgtgggtaatgcacctacatacctgcaacaacaattgctgcaacagattgtaccagctctgactcagctagctgtggcaaaccctgctgcctacttgcaacagctgcttccattcaaccaactgactgtgtcgaactctgctgcgtacctacaacagcgacaacagttacttaa

SEQ ID NO: 4846 - DNA, 239 bp, Zea mays
  Clone ID: LIB3061-008-Q1-K1-G10
taccattcagccagttagtttgtgttattcctgctaccttcttgacacaaccacagttgttgccgttctaccagcacgctgcgcctaacgctggcaccctcttacaactgcaacaattgctgccattcaaccaacttgctttgacaaacctagcagtgttctaccaacaacccatcattggtggtgccctcttttagatttcttatgagttatagttcaataataaagttttttgtctg

SEQ ID NO: 4847 - DNA, 381 bp, Zea mays
  Clone ID: LIB3061-009-Q1-K1-C3
gacggaaactagtgtgtgatgttgatctagcagcggaataataatgagtcaactggggccggttggtctagggatttgcaattgctttgagtgcctgtaccggtcaaacgttgctcccctcctacatacgggtgaacacatgaagcatgcaatgtagctgtttggagcattactgtgctctgagagaattgatctctgtaaatacatcattgatgcatacaaaaaattatgggtcgagcacggtgatgagctgagcctggagtatgctggctcttatgctttgaaaggggatctagtgagatatggaaggcacacattggctggactcattaaagatggcatgattgctctttcaagatattattcgaataattttcatga

SEQ ID NO: 4848 - DNA, 368 bp, Zea mays
  Clone ID: LIB3061-009-Q1-K1-H12
tatcaacagagcagctatccagttgcagtgctcacttttaccgtaacaaactcaggacatacaggtgctgatgtgactttgctttgtacatgggctaactctgttggtggaaaatctgaactcaccggatatcattccaactccagtatgatagaaaaggatggtgttcatggcatactattacatcacagaacagcagatggtcaaccacatgtaacttttgtgatagcagcacacgagaaagaggatatccttatatctgaatgtccttactttgtgatatctgggagctccgcatctgatgaattcacagctaaagatatgtggaattctgtgaaagagcatggatcttttgatcatcttgatcc

SEQ ID NO: 4849 - DNA, 295 bp, Zea mays
  Clone ID: LIB3061-009-Q1-K1-H4
aagcaatcacccgagcaaagcagtgcttagagacgatccagcggcatttcgcattcgacgagactaagcgccgccatctgatccgacacgcagcgcaatggcggcgggactgaagaggccgtcgttcgggacgcgggcgtggcggctgctgctgctggcggtgctgtgggcgcggaagggcggcgcggcgcacagcctgcgcctgcgcctgctccgcacgctccgccgccacggtcacggcctcgccggcctgggctgttcgcgcggttaccggctccgctgcagcgagcgcgag

SEQ ID NO: 4850 - DNA, 456 bp, Zea mays
  Clone ID: LIB3061-010-Q1-K1-A12
tattattgagaccaactagcaacatagaaagcacaatagtgtaccaacaatggcagccgaaatattttgcctccttatgctccttggtctttctgcaagtgctgctacggcgaccattttcccgcaatgctcgcaagctcctatagcttcccttcttcccccgtacctctcaccagcggtgtcttcggtatgtgaaaacccaattcttcaaccctacaggatccaacaggcaatcacagctggcatcttacctttatcacccttgttcctccaacaatcatcagccctattacatcagttacctttggtgcaattattggcacaaaacatcagggcacaacaactacaacaacttgtgctagcaaaccttgctgcctactctcagcaacagcaggttcttccattcaaccaactagctgcattgaactctgcttcttatttgcaacaacaacaact

SEQ ID NO: 4851 - DNA, 433 bp, Zea mays
  unsure (1)..(433): unsure at all n locations; Clone ID: LIB3061-010-Q1-K1-B11
taccagagatcgaacaacttggtcctgcagctcaagaagagagttttgtgcgtttgggggccgggggcaagagagagagagagagccatggcggcggaccagcagccgcagctgcaggaggagatgaacgacgctgccggcggcggcctcaggctgcctccagggttccgcttccacccgagcgacttcgagattgtcagcttctacctcaccaacaaggtgctcaacacgcgcttcacctgcaccgncatcacggaagccgacctaaacaagattgagccatgggaccctccgagcaaagcaaaaatggcgagaaaggagtggtacttcttctaccagaaggaccgcaagtacccgacggggctgagggcgaaccgggccaccgaggccggttactggaaggcgacgggcaaggacaaggaggtctacaacg

SEQ ID NO: 4852 - DNA, 438 bp, Zea mays
  unsure (1)..(438): unsure at all n locations; Clone ID: LIB3061-010-Q1-K1-F9
tagcaacatagaaagcacaatagtgtaccaacaatggcagccaaaatatttggcttccggatgctccttggtctttctgcaagtgctgctaccgcaaccattttcccacaatgctcacaagctcctatagcttcctttcttcccccatacctctcaccagcggtgtcttcagtatgtgaaaacccaattcttcaaccctacaggatccaacaggcaatcgcagcaggcatcttacctttatcacccttgttcctccaacaaccgtcagccctattacagcagttacctttggtgcatttgttggcacaaaacatcaaagcacaacaactacaacaactngtgctaggaaaccttgctgcctactctcagcaacagcagtttcttccattcaaccaactggctgcattgaactctgctgcttatttgcaacaacaacta

SEQ ID NO: 4853 - DNA, 385 bp, Zea mays
  Clone ID: LIB3061-011-Q1-K1-C5
tagaaagcacaatagtgtaccaacaatggcagccaaaatattttgcttccttatgctccttggtctttctgcaagtgctgctaccgcaaccattttcccacaatgctcacaagctcctatagcttcctttcttcccccatacctctcaccagcggtgtcttcagtatgtgaaaacccaattcttcaaccctacaggatccaacaggcaatcgcagcaggcatcttacctttatcacccttgttcctccaacaaccgtcagccctattacagcagttacctttggtgcatatgttggcacataacatcaaggcacatcaactacaacaacttgtgctaggaaaccatgatgcctactctgaacaacagcaggtggtaccattcaac

SEQ ID NO: 4854 - DNA, 416 bp, Zea mays
  Clone ID: LIB3061-011-Q1-K1-F6
tagcaacatagaaagcacaatagtgtaccaacaatggcagccaaaatattttgcctgcttatgctccttggtctttctgcaagtgctgctacggcgaccattttcccacaatgctcacaagctcctatagcttcccttcttcccccgtacctctcaccagcggtgtcttcggtatgtgaaaacccaattcttcaaccctataggatccaacaggcaatcgcagctggcatcttacctttatcacccttgttcctccaacaatcatcagccctattacagcagttacctttggtgcatttattggcacaaaacatcagggcacaacaactacaacaacttgtgctagcaaaccttgctgcctactctcagcaacaacagtttcttccattcaaccaactagctgcattgaactctgc

SEQ ID NO: 4855 - DNA, 422 bp, Zea mays
  Clone ID: LIB3061-011-Q1-K1-H9
cccacgcgtccgaagcaacatagaaagtggaatccagtagcaacaacagagcaacaatggcgagcaagatattttccctccttatgctccttgctctttctgcatgtgttgctaacgcgacaattttccctcaatgctcacaagctcctatagcttcccttcttcccccataccttccatcaatgatagcttcagtatgtgaaaacccagctcttcagccctataggctccaacaagcaatcgcagcaagcaacatacctttatcacccttgttgtttcaacaatcgccagccctatctttggtgcagtcattggtacaaaccatcaaggcacagcagctgcagcaactcgtgctacctgtgatcaaaccagtaactctggcaaacctttctccctactctcagcaaccacaatttcttcca

SEQ ID NO: 4856 - DNA, 423 bp, Zea mays
  Clone ID: LIB3061-012-Q1-K1-C10
tagcaacatataaagcacaatagtgtaccaacaatggcagccaaaatattttgcttcgttatgctccttggtctttctgcaagtgctgctaccgcaaccattttcccacaatgctcacaagctcctatagcttcctttcttcccccatacctctcaccagcggtgtcttcagtatgtgaaaacccaattcttcaaccctacaggatccaacatgcaatcgcagcaggcatcttacctttatcacccttgttcctccaacaaccgtcagccctattacagcagttacctttggtgcatttgttggcacagaacatcaaggcacaacaactacaacaacttgtgctaggaaaccttgctgcctactctcagcaacagcagtttcttccattcaaccaactggctgcattgaactctgctgcttat

SEQ ID NO: 4857 - DNA, 335 bp, Zea mays
  Clone ID: LIB3061-013-Q1-K1-D7
tagcaacatagaaagcacaatagtgtaccaacaatggcagccaaaatattttgcctccttatgctccttggtctttctgcaagtgctgctacggcgaccattttcccgcaatgctcgcaagctcctatagcttcccttcttcccccgtacctctcaccagcggtgtcttcggtatgtgaaaacccaattcttcaaccctacaggatccaacaggcaatcagacctattacatcagttacctttggtgcatttattggcacaaaacatcagggcacaacaactacaacaacttgtgctagcaaaccttgctgcctactctcagcaacagcagtttc

SEQ ID NO: 4858 - DNA, 366 bp, Zea mays
  unsure (1)..(366): unsure at all n locations; Clone ID: LIB3061-013-Q1-K1-F3
aagcacaatagtgtaccaacaatggcagccaaaatattttgcctccttatgctccgtgggatttctgcaagtgctgctacggcgaccattttcccgcaatgctcacaagctcctatagcttcccttcttcccccgtacctctcaccagcggtgtcttcggtatgtgaaaacccaattcttcaaccctacaggatccaacaggcaatcgcagctggcatcttacctttatcacccttgttcctccaacaatcatcagccctattacagcagttacctttggtgcatttattggcacanaacatcagggcacagcaactacaacaacttgtgctagcaaaccttgctgcctactctcagcaacagcag

SEQ ID NO: 4859 - DNA, 403 bp, Zea mays
  Clone ID: LIB3061-013-Q1-K1-F9
aagcaacatagaaagtggaatccagtatcaacaatagagcaacaatggcgaccaagagactttccctccttatgctccttgctctttctgcatgtgttgctaacgcgacaattttccctcaatgctcacaagctcctatagcttcccttcttcccccataccttccatcaatgatagcttcagtatgtgaaaacccagctcttcaaccctataggctccaacaagcaatcgcagcaagcaacatacctttatcacccttgtttcaacaatcgccagccctatctttggtgcagtcattggtacaaaccatcaaggcacagcagctgcagcaactcgtgctacctgtgatcaaccaagtagctctggcaaacctttctgcctactatcagcaacaacaatttct

SEQ ID NO: 4860 - DNA, 431 bp, Zea mays
  Clone ID: LIB3061-014-Q1-K1-B1
cagcatagaaagcacaatagtgtaccaacaatggcagccaaaatattttgcctccgtatgctccttggtctttctgcaagtgctgctacggcgaccattttcccacaatgctcacaagctcctatagcttcccttcttcccccgtacctctcaccagcggtgtcttcggtatgtgaaaacccaattcttcaaccctataggatccaacaggcaatcgcagctggcatcttacctttatcacccttgttcctccaacaatcatcagccctattacagcagttacctttggtgcatttattggcacaaaacatcagggcacaacaactacaacaacttgtgctagcaaaccttgctgcctactctcagcaacaacagtttcttccattcaaccaactagctgcattgaactctgcttcttatttgcaacaaca

SEQ ID NO: 4861 - DNA, 425 bp, Zea mays
  Clone ID: LIB3061-014-Q1-K1-E2
aagcgcactagcaacgacctaacaaccaagggctttccaagacattatccttccttgggctggttgcccttttggggagtgcaccaaatgcgttcattattccacaatgctcacttgctccgagtgccattattccacagttcctccctccagttacttcaatgggcttagaacacccagctgtgcaagcctataggctacaacaagcgcttgcggcgagcgtcttagaacaaccaattgcccaattacaacaacaatccttggcacatctaaccatacaaaccatcgcaacgcagcatcaacaagcactgagccacctagccgtggtgaaccctatcgcctacttgcaacaacagctgcttgcatccaacccacttgctttggcaaacgtagctgcataccaaccacaacaacagttgcaacag

SEQ ID NO: 4862 - DNA, 431 bp, Zea mays
  Clone ID: LIB3061-014-Q1-K1-F2
aagcatcatagacagtagaatccattagcatcattagagcaccaatggcgaccaagatagtttccctccttatgctccttgctctttctacatgtgttgctaacgcgacaattttccctcaatgctcacaagctcctatagcttcccttcttcccccataccttccatcaattatagcttcagtatgtgaaaacccagctcttcaaccatataggcttcaacaagcaatcgcagcatgcaacatacctttatcgcccttgttgcttcaacaatcaccagccctatctttggtgcagtcattggtacaaaccatcagggcacaacagctgcagcaactcgtgctacctgtgatcaaccaagtagctctggcaaacctttctccctactctcagcatcaacaatttcttccattcaaccaactgtctacactg

SEQ ID NO: 4863 - DNA, 435 bp, Zea mays
  Clone ID: LIB3061-015-Q1-K1-B9
tagaaagcacaatattgtaccaataatggcagccaaaatattttgcctcattatgctccttggtctttctgcaagtgctgctacggcgagcattttcccgcaatgctcacaagctcctatagcttcccttcttcccccatacctctcaccagcgatgtcttcagtatgtgaaaatccaattcttctaccctacaggatccaacaggcaatcgcagcaggcatcttacctttatcacccttgttcctccaacaatcatcagccctattacagcagttacctttggtgcatttattggcacaaaacatcagggcacaacaactacaacaactcgtgctagcaaaccttgctgcctactctcagcaacagcagttacctttggtgcatttgttggcacaaaacatcagggcacaacaactacaacaactcgtgctagc

SEQ ID NO: 4864 - DNA, 368 bp, Zea mays
  Clone ID: LIB3061-015-Q1-K1-D7
atggtggttggacttttttttttacaccattatttttacgggtaaatttatggtattgggaacaggtcaagaacaacggaagggaggaggggggagaacatgacaaattggagccgtgcacgaacaccaacgaaaacaaatggggggacgatagaccctatggggatggacgaattgttaattgccaattattattgaaccatgctagactgaaagtgagaaggggccatgccccgggggggcgggatggggccctgcgcgatcctcgacgtcctttggcccggctactccatagaggaggacagggactgcacgtactacgcggaattaccgtacgcaaaccactcgctggtggctgcaggctacga

SEQ ID NO: 4865 - DNA, 437 bp, Zea mays
  Clone ID: LIB3061-015-Q1-K1-D9
aagcaacatagaaagtggaatccagtagcaacaacagagcaacaatggcgaccaagatattttccctccttatgctccttgctctttctgcatgtgttgctaacgcgacaattttccctcaatgctcacaagctcctatagcttcccttcttcccccataccttccatcaatgatagcttcagtatgtgaaaacccagctcttcagccctataggctccaacaagcaatcgcagcaagcaacatacctttatcacccttgttgtttcaacaatcgccagccctatctttggtgcagtcattggtacaaaccatcagggcacagcagctgcagcaactcgtgctacctgtgatcaaccaagtagctctggcaaacctttctccctactctcagcaacaacaatttcttccattcaaccaactgtctacactgaaccct

SEQ ID NO: 4866 - DNA, 290 bp, Zea mays
  Clone ID: LIB3061-016-Q1-K1-G5
ttcggtccgaggactcagactcaaggatcgcgggactatggatccagaaagtgaatcgccgttggcgatgcattcgatgagctgaacattcctagtatgggaggtgcatgtgtgtattgagctaaagtccgatgtcggtcttatggcagatggtgcggtactgctggcacttggactactgccatgcttgcgcgatcatttgaacaatgtacgacatcagcacaatgctctggaacgccagggtattcggtctagatgatacacgcttacatactcgtgcgtgcaagctt

SEQ ID NO: 4867 - DNA, 324 bp, Zea mays
  Clone ID: LIB3061-016-Q1-K1-G6
ttcgctccgaggactcagtttaaattatcgagagatcaagcatccagagagtgagtcaccgttagagatgcatctgttgcgctgaacatagcgagtatgggaggtgcatgtctatatgttagataatgtctgatgtgggccagatgagacagatgtgcgggagggctggcacctgcaatactgtcatgctggagcgatcatttgaacactgtacgtcatcagcataatgctatggaacgcccggatatacggtctggatgatccgagcttacatactcgtacgtgcaagcttatattgctactaaagcatcatgtaactgccat

SEQ ID NO: 4868 - DNA, 238 bp, Zea mays
  Clone ID: LIB3061-017-Q1-K1-C7
taagcccgtgccagcagttcggatcctgcggcgtcggcagcgtcggcagcccgttcctgggccagtgcgtcgagttcctgaggcaccagtgcagcccggcggcgacgccctacggctcgccacagtgccaggcgctgcagcagcagtgctgccaccagatcaggcaggtggagccgctgcaccggtaccaggcgacatacggtgtggtcctgcagtccttcctgcagcagcagccgcc

SEQ ID NO: 4869 - DNA, 380 bp, Zea mays
  unsure (1)..(380): unsure at all n locations; Clone ID: LIB3061-017-Q1-K1-G10
cgttgtcgtgcgcgcgaaattgctcgctccccactatcgtcgtttcctcgtgcccgctggtcgtgcgcccctgcagctccctattcggcaaaatgtgtggaccagtgctcatcgcgtgttgggaagatcggcaccgatgttcttgccaaatattgattgtttgattntggggagatcgacgcacgcatggtgttcgatgaatggctcaaaccggatagccttgtcgaaatcatagctccgagtcgattcggacatggtacgtgaattaaccacgcgatgcggagaaccagaactgatcgaccacaagatggtgctgatgaacggaactggagatggacagacgaagcaagtatcgggacaaaggatggtcttcaagtgat

SEQ ID NO: 4870 - DNA, 390 bp, Zea mays
  Clone ID: LIB3061-017-Q1-K1-H12
acgcgtccgcagcagtgcgacaagcaagatttacctgcccatctatcatatcgtcaactggtccggcagttcgcgacaccatgagctccacggagtgcggcggcggcggcggcggcgccaagacgtcgtggcctgaggtggtcgggctgagcgtggaggacgccaagaaggtgatcctcaaggacaagccggacgccgacatcgtggtgctgcccgtcggctccgtggtgaccgcggattatcgccctaaccgtgtccgcatcttcgtcgacatcgtcgcccagacgccccacatcggctgataatatataagctagccgctatttcctttccttgccccagaacttgaaataaatatatatacgatgaaataacgcgggcatgccgaat

SEQ ID NO: 4871 - DNA, 438 bp, Zea mays
  Clone ID: LIB3061-018-Q1-K1-E1
aagcaacatagaaagtggaatccagtatcaacaatagagcaacaatggcgaccaagagattttgcctccttatgctccttgctctttctacatgtgttgctaacgcgacaattttccctcaatgctcacaagctcctatagcttcccttcttcccccataccttccatcaattatagcttcaatatgtgaaaacccagctcttcaaccatataggcttcaacaagcaatcgcagcaagcaacatacctttatcgcccttgttgtttcaacaatcgccagccctatctttggtgcagtcattggtacaaaccatcagggcacaacagctgcagcaactcgtgctacctctgatcaaccaagtagctctggcaaacctttctccctactctcagcaacaacaatttcttccattcaaccaactgtctacactgaaccctg

SEQ ID NO: 4872 - DNA, 401 bp, Zea mays
  Clone ID: LIB3061-020-Q1-K1-A12
tctggatcgcaacaacttgcctatactttcgcgcaccgtacatggaaaaactatgcctggtgtcttgcccatatcggcggctctggttaatgatgcaaacaaggcatctagacggactgaacattgcaagaccccaagtgttcttcttatactaccaacaagagagctggccaatcaggtgcacgctgactttcagttttatggtgcaacatttgggctctctgcatgttgcgtgaatgggggatcaccttatcggcctcaagaaatggcattgagaacaggtgaggctattgttagtgcaactcctggtcgtgtcaaggattccatcgctaaaggaactttcaatttgaaatgcttgaaattccgtagtcttgatgaatctgaagagatgctaaacatgg

SEQ ID NO: 4873 - DNA, 364 bp, Zea mays
  Clone ID: LIB3061-020-Q1-K1-A5
tatgattgagaccagcaagcaacatagatagtagaatccattagcaacaatagagcaacgatggcgaccaagatattttcccttcttatgcttcttgctctttctacatggggtggtaacgcgacaaatttcccttaatggtcacaagcttctatagcttgccttctttccccatacctttcatcaattattggttcaacatgtgaaaacccaacttttcaaccatattggcttcaacaagcaatcgcaggaagcaacatacctttatcggccttggtgtttcaacaatcaccaaccctatctttggtgcagtcattggtacaaaccatcaggggacaacagcttcagcaacttgtggtacctg

SEQ ID NO: 4874 - DNA, 431 bp, Zea mays
  Clone ID: LIB3061-020-Q1-K1-B2
atggattcgcattcgtcctattcgtattcgccatcggcgcaggaccgaacccgatccgggaggcctaactaaccctaggaggcatgcggcggcggggatggtgtactacgcgctggtggtgggcgcggagctggatggcctcaccaacctgcagccccgccacggctgcgacgaccccaacttaccctactacctcaagctcaagtgcgagaactgccgcgaggtcaccgtcaagtccacctacgtcaccctcagcgagcaagtcgacctgcccaaaggacacggcgccgctcacctcgtccagaagtgcaagctttgtgggagagatggaacaattgtgatgattcctggtcaggggacaccacttactattgagcagagccagaaagaggagaagacttgcttgatggtgtttgactgcataggctatg

SEQ ID NO: 4875 - DNA, 435 bp, Zea mays
  Clone ID: LIB3061-021-Q1-K1-A12
tactgattcacacaccactatgattgatggtttgggtgttgctggctggggggttggtggtatagaagcggaggctacaatgcttggtcagccaatgagcatggttttgcctggtgttgttggcttcaagttaactgggaagttacggagtggtgtcacggccactgatcttgttcttacagtaacacaaatgctaaggaaacatggtgttgttggcaaatttgttgaattctatggtgaaggtatgggtaagctgtctttagctgacagggccacaattgcgaacatgtcaccagaatatggagctaccatgggcttctttcctgtggaccatgtgacattggattaccttaaactgacaggccgcagtgatgaaactgtgtcaatgattgaagcatacctgcgagccaataaaatgtttgtggactacaatga

SEQ ID NO: 4876 - DNA, 352 bp, Zea mays
  Clone ID: LIB3061-021-Q1-K1-A9
gcaacatagagagcacaatagagtaccatcaaggctactaaaatattttgcctccttatgctccttggtctttctgcaagtgctgctacggcgaccattttcccacaatgctcacaagctcctatagcttcccttcttcccccgtacctctcaccaacggtgtcttcggtatgtgaaaacccaattcttcaaccctacaggatccaacaggcaatcgcagctggcatcttacctttatcacccttgttcctacaacaatcatcagccctattacagcagttacctttggtgcatttattggcacaaaacatcatggcacaacaactacaacaaacttgggctagcaaacctt

SEQ ID NO: 4877 - DNA, 406 bp, Zea mays
  Clone ID: LIB3061-022-Q1-K1-A6
aagcaacatagaaagtagaatccattatcaacaatagagcaacaatggcgaccaagatattttccctccttatgctccttgctctttctacatgtgttgctaacgcgacaattttccctcaatgctcacaagctcctatagcttcccttcttcccccataccttccatcaattatagcttcagtatgtgaaaacccagctcttcaaccatataggcttcaacaagcaatcgcagcaagcaacatacctttatcgcccttgttgtttcaacaatcaccagccctatctttggtgcagtcattggtacaaaccatcaaggcacaacagctgcagcaactcgtgctacctgtgatcaaccaagtagctctggcaaacctttctccctactctcagcaacaacaatttct

SEQ ID NO: 4878 - DNA, 347 bp, Zea mays
  Clone ID: LIB3061-022-Q1-K1-F4
tagcaacatagaaagcacaatagtgtaccaacaatggcagccaaaatattttgcctccttatgctccttggtctttctgcaagtgctgctacggcgaccattttcccgcaatgctcgcaagctcctatagcttcccttcttcccccgtacctctcaccagcggtgtcttcggtatgtgaaaacccaattcttcaaccctacaggatccaacaggcaatcacagctggcatcttacctttatcacccttgttcctccaacaatcatcagccctattacatcagttacctttggtgcatttattggcacaaaacatcagggcacaacaactacaacaacttgtgctagc

SEQ ID NO: 4879 - DNA, 418 bp, Zea mays
  Clone ID: LIB3061-023-Q1-K1-A5
aagcaagtgaatgctgcaatgacaacatgccacagtctgaacttggatgggttggtgatcattggaggtgtgacctccaattcagatgctgcacagcttgcggagacccttattcagaataactgtaagaccaaggttgttggtgtgccagtttcattgaatggtgacctcaagaaccagtttgttgaaacaacagttggatttgatacagtatgtaaggttaattcacagcttgtaagcaatgtttgtcttgatgcgatctcagctggaaagtactattattttgttcgtctgatgggacgaaaagcatctcatgttgcctttgaatgtgcacttcagtcacacccaaacatgctcatcttaggcgaggaggtagcattgtcaaaactcacactgatggaaattataagcaagatat

SEQ ID NO: 4880 - DNA, 425 bp, Zea mays
  Clone ID: LIB3061-023-Q1-K1-E3
ctgtctcaaggacagtatgctgaagatctcctcgagcgtgcaggaatgacgaactggaaacctgttgccacccctgccgacacccaacagaaggcatccgctggcgatggcatactgctcgacgacgccacttcataccgtagtatcgtcggcgccctgcagtacttgacgatcacccgtccggacattgcctacgccgtgcagcaggtgtgtctccacatgcacgcgccgcgggacgtgcatctcaccatgctcaagcgtattctccggtacatcaagggcaccatccacttcggcatccagctgcgcactgcctcgccttcgacgatcactgcatactccgacgccgactgggcaggctgccccgacacacggcgctctacatcgggtttctgcatcttcttcggcaactccctcgtctcatg

SEQ ID NO: 4881 - DNA, 429 bp, Zea mays
  Clone ID: LIB3061-023-Q1-K1-E5
tagcaacatagaaagcacaatagtgtaccaacaatggcagccaaaatattgtgcttgcttatgctccttggtctttctgcaagtgttgctaccgcaaccattttcccacaatgctcacaagctcctatagcttcccttcttcccccatacctctcaccagcggtgtcttcaatgtgtgaaaccccaattgttcaaccctacaggatccaacaagcaatcgcaacaggcatcttaccattatcacccttgttcctccaacaaccgtcagccctattacagcagttacctttggtccatttggtggcacaaaacatcagggcacaacaactacaacaacttgtgctagcaaaccttgctgcatactctcagcaacatcagtttcttccattcaaccaactggctgcattgaactctgctgcttatttgcaa

SEQ ID NO: 4882 - DNA, 440 bp, Zea mays
  Clone ID: LIB3061-023-Q1-K1-F2
tagcaacatagaaagcacaatagtgtaccaacaatggcagccaaaatattttgcctccttatgctccttggtctttctgcaagtgctgctacggcgaccattttcccacaatgctcacaagctcctatagcttcccttcttcccccgtacctctcaccagcggtgtcttcggtatgtgaaaacccaattcttcaaccctataggatccaacaggcaatcgcagctggcatcttacctttatcacccttgttcctacaacaatcatcagccctattacagcagttacctttggtgcatttattggcacaaaacatcagggcacaacaactacaacaacttgtgctagcaaaccttgctgcctactctcagcaacaacaagttcttccattcaaccaactagctgcattgaactctgcttcttatttgcaacaacaacaact

SEQ ID NO: 4883 - DNA, 437 bp, Zea mays
  unsure (1)..(437): unsure at all n locations; Clone ID: LIB3061-023-Q1-K1-F6
aagcaatcgaaaagcaaccctgcaagtgcaggcaaagagagggcgcgacgaaacagatccaatccaatggcgatggcaccgtccgcagcatgcgtcgtctcgttccccgcccgcccggcggcgtccacggccgggccccgcgccgccgcgggcgccggggcggtccacgctttcgcggggtcggcggagggcgccaagtggtgggcgccgctgctggggtggtccgagaaggccgactacctggaggccccggccccggcgccggcggtggcgcaggacgaggcgccgcggatgcagttcgtgggggtgatgacggaggagaaggccccggagctgcaggcgcggatggcgcagacggagtccttncacgacgccatgtaccactccgccatcgggtcgcgcctcgcacgctcctcnctaggttggtgcgcgcgcgg

SEQ ID NO: 4884 - DNA, 411 bp, Zea mays
  Clone ID: LIB3061-023-Q1-K1-H1
caccctcccgggccgccttctcttctccagcgtccgatctcccactcccctccctcaccgcagctctcccacctacgccctccccccgcacgcgctcgccacctcgccctcccctccacgttgctcgcacccgcgcttatataagtgcaggaggagctcatggcggaagctccggcgagccctggcggcggcggcgggagccacgagagcgggagccccaggggaggcggaggcggtggcagcgtcagggagcaggacaggttcctgcccatcgccaacatcagtcgcatcatgaagaaggccatcccggctaacgggaagaccatcccggctaacgggaagatcgccaaggacgctaaggagaccgtgcaggagtgcgtctccgagttcatctccttcatcactagcgaa

SEQ ID NO: 4885 - DNA, 423 bp, Zea mays
  Clone ID: LIB3061-023-Q1-K1-H10
atggagaccaactagcaacatagaaagcacaatagtgtaccaacaatggcagccaagatattttgcctccttatgctacttggtctttctgcaagtgctgttacggtgaccattttccctcaatgctcgcaagctcctatagcttgccttcttccaccgtacctctcaccagcggtgtcttccgtatgtgaaaacccaattcttcaaccctacaggatccaacaggcaatcgcagctggcatcttacctttatcacccttgttactccaacaatcatcagccctattacaacagttacctttggtgcatatattggcacaaaacatcagggcacaacaactacaacaacttgtgctagcaaaccttgctgcctactctcagcaacagcagtttcttccattcaaccaactaggttcattgaac

SEQ ID NO: 4886 - DNA, 281 bp, Zea mays
  Clone ID: LIB3061-023-Q1-K1-H12
tagcaacatagaaagcacattagtgtaccaacaatggcagccaaaatattttgcctgcttatgctccttggtctttgtgcaagtgctgctacggcgaccattttcccgcaatgctcgcaagcttgtatagcttaccttcttccctcgtacctatcaccaacggtgtcttcggtatgtgaaaacccatttcttcaaccctacaggatccaacaggcaatcacagctgccatttaaccttaataaccctggttcttccaccaataataagccctataacatca

SEQ ID NO: 4887 - DNA, 181 bp, Zea mays
  Clone ID: LIB3061-023-Q1-K1-H7
tagcatcatagaaagcacagtagtgttccaacaatggcaggcaaaatattgtgccgtgctaatccatgtagtccttgatgaaagtgctgttacggcgaccattttcatacatggctaacaggctccaactgctacggttcttcttctgaacttttaactagcggaactttcgtattttgaa

SEQ ID NO: 4888 - DNA, 422 bp, Zea mays
  Clone ID: LIB3061-024-Q1-K1-C12
tagcaacatagaaagcacaatagtgtaccaacattggcagccaaaatattttgcctggttaggctccttggtctttctgcaagtgctgctacggcgaccattttcccacaatgctcacaagctcctatagcttcccttcttcccccgtacctctcaccagcggtgtcttcggtatgtgaaaacccaattcttcaaccctataggatccaacaggcaatcgcagctggcatcttacctttatcacccttgttcctccaacaatcatcagccctattacagcaattacctttggtgcatttattggcacaaaacatcaaggcacaacaactacaacaacttgtgctagcaaaccttgctgactactctcagcaacaacagtttcttccattcaaccaactagctgcattgaactctgcttctta

SEQ ID NO: 4889 - DNA, 269 bp, Zea mays
  Clone ID: LIB3061-024-Q1-K1-C2
tagaaagcacaatagtgtaccaacaatggcagccaatattttgcttccttatgctccggggtgtttctgcaagtgttgctaccgcaaccattttcccacaatgctcacaagctcctatagcttcccttcttcccccatacctctcaccagcggtgtcttcaatgtgtgaaaacccaattgttcaaccctacaggatccaacaggcaatcgcaacaggcatcttaccattatcacccttgttcctccaacaacccgtcaagccctattac

SEQ ID NO: 4890 - DNA, 333 bp, Zea mays
  Clone ID: LIB3061-025-Q1-K1-G3
caaggctgggaaagtgaagcttgctgatttcggactcgctgcacgggtcactaatggtgagaaagtgtttggtgttgctgggagccctgcatatgtggcacctgaagttctttctggaagctattcggagaaggttgatatatggcgtgcctgtgtgctactacatgtacttctatgtgcgtcactttcatttcaagggggctctttgtacgcttcttgctagtccatgcagtcgcaataaggatcttacctttatcacacctggtctttaaacaatcttcatgcatatttttggtgctgccattggtccaaatcataatggcggatcagttt

SEQ ID NO: 4891 - DNA, 442 bp, Zea mays
  Clone ID: LIB3061-025-Q1-K1-G4
gacggacgcgcgtctccggtcccgtccgtaataacactgatccgatccacgccggccggcgatggagctcatcaagtccagggcgaccgtgtgcgcgctcctcctggcgctgctcctgctctcacactacgacggcgggacgacgacgacgatggtggcggaggcccgggtgtgcatgggcaagagccagcaccactcgttcccctgcatctccgaccgcctctgcagcaacgagtgcgtcaaggaggacggcgggtggaccgccggctactgccacctccgctactgcaggtgccagaaggcgtgctaagcaaagctcttcaaacacccttggcttgccagaactgaactctagtagtactaagtaacacccttggctagctgtgcacaacctacgtaccgtgcatgcatgtaatgtggtgtcatgtaacgtgacagcaat

SEQ ID NO: 4892 - DNA, 392 bp, Zea mays
  Clone ID: LIB3061-026-Q1-K1-C11
tagcaacatacaaagcacaatattgtaccaacaatggcagccaaaatattgcgcctggttatgctactaggacttactgcaagtagctgctacagcaaccattttcccgcaatagctagcaagctcctatagctttccatcttcacccggacctttcaccagcagcgtcttcagaatgacaaaacccaattctttaaccctacatgatccaacaagcaatagcagcttgcatcttacctctatcacccgtggtcctcctacaatcataagccctattacaacagttacctaaggagcatttattggcacagaacatcagggcacaacaactacgacaaccagtgctagcataccatgctgactactctcagcaacagcagtttcttccattc

SEQ ID NO: 4893 - DNA, 404 bp, Zea mays
  Clone ID: LIB3061-026-Q1-K1-C7
gcagctagctgactgaatggtagttgttgcctacccccagcaatttcttccattcaacggactggcagcattgaactctgctgcttatttacaacagcaacagctaccaccattcagccagctagctgatgtgagccctgttgccttcttgacacaacaacagttgttgccgttctacctgcacgctgcgcctaacgctggcaccctcttacaactgcaacaattgctgccattcaaccaacttgctttgacaaacccaacagcgttctaccaacaacccatcattggtggtgccctcttttagattgcttatgagttatacttcaataatgaagttttttggatgatgtttgtggcttcccagaaataagatagtacatttctagattcttaaaagatagaat

SEQ ID NO: 4894 - DNA, 402 bp, Zea mays
  Clone ID: LIB3061-026-Q1-K1-G11
tagcaacatagaaagcacaatagtgttccaacaatggcagctaaaatattttgcctcgttatgctccttggtctttctgcaagtgctgctacggcgaccattttcccacaatgctcacaagctcctatagcttcccttcttcccccgtacctctcaccaacggtgtcttcggtatgtgaaaacccaattcttcaaccctacaggatccaacaggcaatcgcagctggcatcttacctttatcacccttgttcctccaacaatcatcagccctattacagcagttacctttggtgcatttattggcacaaaacatcagggcacaacaactacaacaacttgtgctagcaaaccttgctgcctactctcagcaacagcaagttcttccattcaaccaactagct

SEQ ID NO: 4895 - DNA, 77 bp, Zea mays
  Clone ID: LIB3061-027-Q1-K1-A10
gtcgaacggtagtagtattcgagccagctttctacaacaagcccagctttattcgtgagagaacatcatgtgcttac

SEQ ID NO: 4896 - DNA, 366 bp, Zea mays
  Clone ID: LIB3061-027-Q1-K1-D2
tattgagaccaacatgcaacatagaatgtggaatccagtagcaacaacagagcaacaatggcgaccaagatattttccctccttatgctccttgctctatctgcatgtgttgctaacgcgacaattttccctcaatgctcacaagctcctatagcttcccttcttcccccataccttccatcaatgatagcttcagtatgtgaaaacccagctcttcagccctataggctccaacaagcaatcgcagcacgcaacatacctttatcacccttgtagtttcaacaatcgccagccctatctttggtgcagtcattggtacaaaccatcatggcacagcaactgcaccaacttgtgctacctgtgatc

SEQ ID NO: 4897 - DNA, 437 bp, Zea mays
  Clone ID: LIB3061-027-Q1-K1-D9
aagcaacatagaaagtagaatccattagcaacaatagagcaacaatggcgaccaagatattttccctccttatgctccttgctctttctacatgtgttgctaacgcgacaattttccctcaatgctcacaagctcctatagcttcccttcttcccccataccttccatcaattatagcttcagtatgtgaaaacccagctcttcaaccatataggcttcaacaagcaatcgcagcaagcaacatacctttatcgcccttgttgtttcaacaatcaccagccctatctttggtgcagtcattggtacaaaccatcagggcacaacagctgcagcaactcgtgctacctgtgatcaaccaagtagctctggcaaacctttctccctactctcagcaacaacaatttcttccattcaaccaactgtctacactgaaccct

SEQ ID NO: 4898 - DNA, 443 bp, Zea mays
  Clone ID: LIB3061-028-Q1-K1-B6
tagcaacatagaaagcacaatagtgtaccaacaatggcagctaaaatattttgcctccttatgctccttggtctttctgcaagtgctgctacggcgaccattttcccacaatgctcacaagctcctatagcttcccttcttcccccgtacctctcaccaacggtgtcttcggtatgtgaaaacccaattcttcaaccctacaggatccaacaggcaatcgcagctggcatcttacctttatcacccttgttcctccaacaatcatcagccctattacagcagttacctttggtgcatttattggcacaaaacatcagggcacaacaactacaacaacttgtgctagcaaaccttgctgcctactctcagcaacagcagtttcttccattcaaccaactagctgcattgaactctgcttcttatttgcaacaacaacaactacc

SEQ ID NO: 4899 - DNA, 442 bp, Zea mays
  Clone ID: LIB3061-029-Q1-K1-B12
aagcaagcccctttatgtagctcttgcacagcgtaaagatgacagaaaggcaaagctacaggcacagttttcacaaatgcgtcctgttgcaatggcaccttcagtaggtcctcgcatgcccatgtttccacctagtgttcctggagttggtcagcagctgttttatggtcagccacctccagccttcatcaaccctcaggctggatttgctttccagcaacctatgatgcctggtatgaggcctggtggtccaatgccgaactttatgatgcctatggttcagcagggacagcaaccgcaacgtcctgctggtaggcgtgctgggtctggtggaatgcagcagcccatgccaatgggtagtcagcaacagatattccctagaggtggtcgtggctaccgctatgctactggacgtggaatgcctgatcctggcatgcataat

SEQ ID NO: 4900 - DNA, 451 bp, Zea mays
  Clone ID: LIB3061-029-Q1-K1-H8
catctagcaacatagaaagcacaatagtgtaccaacaatggcagccaaaatattttgcctccttatgctccttggtctttctgcaagtgctgctacggcgaccattttcccgcaatgctcgcaagctcctatagcttcccttcttcccccgtacctctcaccagcggtgtcttcggtatgtgaaaacccaattcttcaaccctacaggatccaacaggcaatcacagctggcatcttacctttatcacccttgttcctacaacaatcatcagccctattacatcagttacctttggtgcatttattggcacaaaacatcagggcacaacaactacaacaacttgtgctagcaaaccttgctgcctactctcagcaacagcagtttcttccattcaaccaactagctgcattgaactctgcttcttatttgcaacaacgacaactaccattc

SEQ ID NO: 4901 - DNA, 420 bp, Zea mays
  Clone ID: LIB3061-030-Q1-K1-A10
tagcaacatagaaagcacaatagtgtaccaacaatggcagccaaaatattttgcctgcttatgctccttggtctttctgcaagtgctgctacggcgaccattttcccacaatgctcacaagctcctatagcttcccttcttcccccgtacctctcaccagcggtgtcttcggtatgtgaaaacccaattcttcaaccctataggatccaacaggcaatcgcagctggcatcttacctttatcacccttgttcctccaacaatcatcagccctattacagcagttacctttggtgcatttattggcacaaaacatcagggcacaacaactacaacaacttgtgctagcaaaccttgctgcctactctcagcaacaacagtttcttccattcaaccaactagctgcattgaactctgcttct

SEQ ID NO: 4902 - DNA, 358 bp, Zea mays
  Clone ID: LIB3061-030-Q1-K1-B4
cagcagttgcaacagttgttgccgattttcatccaacacgccatggagaaccctatgacggatttaaaacaccgacggcttcttacatctagcccgctcgctatgggcaatgcacctacatacctgcaacaacagttgttgcaacaacagttgctgcaacaaattgtaccagctcttactcagctagctgtggcaaaccctgctgcctacttgcaacaactacttctatttttcctactgactgtgtcgaactctgctgcgtacctacaacagcgacaacagttacttaatccactatcggaggctaacccattggtcgctgccttcctacagcttcaacaattgcttgccatacaac

SEQ ID NO: 4903 - DNA, 430 bp, Zea mays
  Clone ID: LIB3061-030-Q1-K1-C3
aagcacaatagtgtaccaacaatggcagccaaaatattttgcctccttatgctccggggggtttctgcaagtgctgctacggcgaccattttcccacaatgctcacaagctcctatagcttcccttcttcccccgtacctctcaccagcggtgtcttcggtatgtgaaaacccaattcttcaaccctataggatccaacaggcaatcgcagctggcatcttacctttatcacccttgttcctccaacaatcatcagccctattacagcagttacctttggtgcatttattggcacaaaacatcagggcacaacaactacaacaacttgtgctagcaaaccttgctgcctactctcagcaacaacagtttcttccattcaaccaactagctgcattgaactctgcttcttatttgcaacaacaacaactac

SEQ ID NO: 4904 - DNA, 419 bp, Zea mays
  Clone ID: LIB3061-031-Q1-K1-A4
gacagcatccattccacagtcaccagagcactagagcagagcaacaactgacaagagcagagcgagatcgtcgtcagcgagctcagcagagagccagatacgagagagaggatggcggacatcgcgttgctggtggcggagcagttcgagaagacggcaaggcgaggcgcccccggcggggacagcggcagcggcagcgggaccggcggcgagacgaggaacttcggggccgtggccaaggtgtggagctcgtgggtggagtccgcctccgccgccgcgtccggggtcagattcaccgtcgcggtgcagctggagcccaagaccgggctcgcgctggccgtcgtcgacggcctcttctccgcctagcttcctgcctgcatgcttccatgtcttcctcctgagcagtgccagtggtcgag

SEQ ID NO: 4905 - DNA, 439 bp, Zea mays
  Clone ID: LIB3061-031-Q1-K1-B5
tagaaagcacaatagtgtaccaacaatggcagctaaaatattttgcctccttatgcgccttggtctttctgcaagtgctgctacggcgaccattttcccacaatgctcacaagctcctatagcttcccttcttcccccgtacctctcaccaacggtgtcttcggtatgtgaaaacccaattcttcaaccctacaggatccaacaggcaatcgcagctggcatcttacctttatcacccttgttcctccaacaatcatcagccctattacagcagttacctttggtgcatttattggcacaaaacatcagggcacaacaactacaacaacttgtgctagcaaaccttgctgcctactctcagcaacagcagtttcttccattcaaccaactagctgcattgaactctgcttcttatttgcaacaacaacaactaccattc

SEQ ID NO: 4906 - DNA, 445 bp, Zea mays
  Clone ID: LIB3061-031-Q1-K1-B8
tattgagaccagcaagcaacatagaaagtagaatccattagcaacaatagagcggcagatggcgaccaagatattttccctccttatgctccttgctctttctacatgtgttgctaacgcgacaattttccctcaatgctcacaagctcctatagcttcccttcttcccccataccttccatcaattatagcttcagtatgtgaaaacccagctcttcaaccatataggcttcaacaagcaatcgcagcaagcaacatacctttatcgcccttgttgtttcaacaatcaccagccctatctttggtgcagtcattggtacaaaccatcagggcacaacagctgcagcaactcgtgctacctgtgatcaaccaagtagctctggcaaacctttctccctactctcagcaacaacaatttcttccattcaaccaactgtctacactg

SEQ ID NO: 4907 - DNA, 441 bp, Zea mays
  Clone ID: LIB3061-031-Q1-K1-C7
tagcaacatagaaagcacaatagtgtaccaacaatggcagccaaaatattttgcttccttatgctccttggtctttctgcaagtgctgctaccgcaaccattttcccacaatgctcacaagctcctatagcttcctttcttcccccatacctctcaccagcggtgtcttcagtatgtgaaaacccaattcttcaaccctacaggatccaacaggcaatcgcagcaggcatcttacctttatcacccttgttcctccaacaaccgtcagccctattacagcagttacctttggtgcatttgttggcacaaaacatcaaggcacaacaactacaacaacttgtgctaggaaaccttgctgcctactctcagcaacagcagtttcttccattcaaccaactggctgcattgaactctgctgcttatttgcaacaacaactacca

SEQ ID NO: 4908 - DNA, 432 bp, Zea mays
  Clone ID: LIB3061-032-Q1-K1-B8
tagcaacatagaaagcacaatagtgtaccaacaatggcagccaaaatattttgcttgcttatgctccttggtctttctgcaagtgttgctaccgcaaccattttcccacaatgctcacaagctcctatagcttcccttcttcccccatacctctcaccagcggtgtcttcaatgtgtgaaaccccaattgttcaaccctacaggatccaacaggcaatcgcaacaggcatcttaccattatcacccttgttcctccaacaaccgtcagccctattacagcagttacctttggtccatttggtggcacaaaacatcagggcacaacaactacaacaacttgtgctagcaaaccttgctgcatactctcagcaacatcagtttcttccattcaaccaactggctgcattgaactctgctgcttatttgcaacaa

SEQ ID NO: 4909 - DNA, 429 bp, Zea mays
  Clone ID: LIB3061-032-Q1-K1-C11
aagcaacatagaaagtagaatccattagcaacaatagagcaacaatggcgaccaaggtattttccctccttatgctccttgctctttctacatgtgttgctaacgcgacaattttccctcaatgctcacaagctcctatagcttcccttcttcccccataccttccatcaattatagcttcagtatgtgaaaacccagctcttcaaccatataggcttcaacaagcaatcgcagcaagcaacatacctttatcgcccttgttgtttcaacaatcaccagccctatctttggtgcagtcattggtacaaaccatcatggcacaacagctgcagcaactcgtgctacctgtgatcaaccaagtagctctggcaaacctttctccctactctcagcaacaacaatttcttccattcaaccaactgtctacac

SEQ ID NO: 4910 - DNA, 337 bp, Zea mays
  Clone ID: LIB3061-033-Q1-K1-B8
tagaaagcacaatagtgtaccaacaatggcagccaaaatattttgcttccttatgctgcttggtctttctgcaagtgttgctaccgcaaccattttcccacaatgctcacaagctcctatagcttcccttcttcccccatacctctcaccagcggtgtcttcaatgtgtgaaaccccaattgttcaaccctacaggatccaacaggcaatcgcaacaggcatcttaccattatcacccttgttcctccaacaaccgtcagccctattacagcaattacctttggtccatttgggggcaccaaacaatcaggcacaacaactaccaccaacttgtgct

SEQ ID NO: 4911 - DNA, 421 bp, Zea mays
  Clone ID: LIB3061-033-Q1-K1-G10
tagcaacatagaaagcacaatagtgtaccaacaatggcagccaaaatattttgcctcgttatgctccttggtctttctgcaagtgctgctacggcgaccattttcccgcaatgctcgcaagctcctatagcttcccttcttcccccgtacctctcaccagcggtgtcttcggtatgtgaaaacccaattcttcaaccctacaggatccaacaggcaatcgcagctggcatcttacctttatcacccttgttcctccaacaatcatcagccctattacaacagttacctttggtgcatttattggcacaaaacatcagggcacaacaactacaacaacttgtgctagcaaaccttgctgcctactctcagcaacagcagtttcttccattcaaccaactaggttcattgaactctgcttctt

SEQ ID NO: 4912 - DNA, 342 bp, Zea mays
  Clone ID: LIB3061-033-Q1-K1-H9
aagccacaccaaacccgcgttcatcgacggacgagctcgccggcgagagagcgactgagatggaggcggcggcagcggcggccggcgtggagctgggctcttcgaagccccagatcgcgacgcaggcggagatggcggaggcccgggtgccgctcgcctaccgcgaccagtgcgcgcacctcctcatcccgctcaacaagtgccgcgtcgccgagttctacctcccctggaagtgcgagcccgagcgccacgcctacgagaagtgccagtacgagctcgtcatggagcggatgctccagatgcagaagatccgcgaggcgcatgagaccaaggtcaagggcg

SEQ ID NO: 4913 - DNA, 414 bp, Zea mays
  Clone ID: LIB3061-034-Q1-K1-C11
tagcaacatagaaagcacaatagtgtaccaacaatggcagccaaaatattgtgcctccttatgctccttggtctttctgcaagtgctgctacggcgaccattttcccgcaatgctcgcaagctcctatagcttcccttcttgccccgtacctatcaccagcggtgtcttcggtatgtgaaaacccaattcttcaaccctacaggatccaacaggcaatcacagctggcatcttacctttatcacccttgttcctgcaacaatcatcagccctattacatcagttaccttcggtgcatatattggcacataacatcagggcacaacaactacaacaacttgtgctagcaaaccctgctggctactctcaacaacagcagtttcttgcattcaaccaactagctgcattgaactct

SEQ ID NO: 4914 - DNA, 325 bp, Zea mays
  Clone ID: LIB3061-034-Q1-K1-E11
tattttgagcattcagaaacacaccaagcgaagcgcactagcaacgacctaacaacagtggctaccaagatattagccctccttgcgcttcttgccctttttgtgagcgcaacaaatgcgttcattattccacaatgctcacttgctcctagtgccattattccacagttcctcccaccagttacttcaatgggcttcgaacacctagctgtgcaagccaacatgcaacaacaagcgcttgcggcgagcgtcttacaacaaccaattgcccaattgcaacaacaatccttgccacatctaacaatacaagccatcacaacgcaac

SEQ ID NO: 4915 - DNA, 414 bp, Zea mays
  Clone ID: LIB3061-034-Q1-K1-E6
tagcaacatagaaagcacaatagtgtaccaacaatggcagccaaaatattttgcctgggtatgctccttggtctttctgcaagtgctgctacggcgaccattttcccacaatgctcacaagctcctatagcttcccttcttcccccgtacctctcaccagcggtgtcttcggtatgtgaaaacccaattcttcaaccctataggatccaacaggcaatcgcagctggcatcttacctttatcacccttgttccttcaacaatcatcagccctattacagcagttacctttggtgcatttattggcacaaaacatcagggcacaacaactacaacaacttgtgctagcaaaccttgctgcctactctcagcaacaacagtttcttccattcaaccaactagctgcatttgactct

SEQ ID NO: 4916 - DNA, 397 bp, Zea mays
  Clone ID: LIB3061-035-Q1-K1-B8
tagctttatctactccagagcgcagaagaacccgatcgacaccatgagggtgttgctcgttgccctcgctctcctggctctcgctgcgagcgccacctccacgcatacaagcggcggctgcggctgccagccaccgccgccggttcatctaccgccgccggtgcatctgccacctccggttcacctgccacctccggtgcatctcccaccgccggtccacctgccgacgccggtccacctgccaccgccggtccatgtgccgacgccggttcatctgccgccgccaccatgccactaccctactcaaccgccccggactcagcctcatccccagccacacccatgcccgtgccaacagccgcatgcaaacccgtgccagctgcagggaacctgcggc

SEQ ID NO: 4917 - DNA, 439 bp, Zea mays
  unsure (1)..(439): unsure at all n locations; Clone ID: LIB3061-035-Q1-K1-C3
tagctagcgaacaccctgggggatttttggttgtggaattattgagggaaaggattttggttaattccaaccgggaaattcctaattaatgccaggttaatgttgccagttccaaaagtcggcctactgccaaggacttcattcaagttgagatccttgtggagaaagaatcacanagaggcattatactagggaaggatggcaaaagcataaagatgctggcaaccgcatcgaggcttgacatcgaggactttctacagaagaaagtctaccttgaggtggaagtcaaagtgaaggaaaactggcggcaggacgagcgactcctgaagcggtatggctacggcggcgagatccaagcgctgtgactgtgactgtgactatgaccggtgcgctctagctcactgtcagctgccgcgagcgtggaatgacctggtttttt

SEQ ID NO: 4918 - DNA, 82 bp, Zea mays
  Clone ID: LIB3061-035-Q1-K1-E7
aacaggggtaccaatatgatagatactactgctactgagtataattttgttttcatatgcatccttacagacgattgcactt

SEQ ID NO: 4919 - DNA, 432 bp, Zea mays
  unsure (1)..(432): unsure at all n locations; Clone ID: LIB3061-035-Q1-K1-F5
tagcaacatacatagtgaagtacactagcaacatcttagcaccaatgggagccaagatgtttgccctccttgccctccttgctctttcagcaagcgctgctacctcgacttttattccacaatgctcacaacaatacctctctccggtgacagccgcgggatttcaatacccaactatacaatcctacatggtacaagaggccatccaagcaagcatcttacggtcattagcattaaccctccaacaaccatatgctctattgcaacagccatccttagtgcatctgtatctccaaagaatcgcggcacaacaactacaacaacagttgctaccaacaatcaatcaagtagttgcagcgaaccttgctgcttacctncagcaacaacagtttcttccattcaatcaactagcttgggtgaaccctgctatct

SEQ ID NO: 4920 - DNA, 413 bp, Zea mays
  Clone ID: LIB3061-036-Q1-K1-B6
aagcaacatacctttatcacccttgtttcaacaatcgccagccctatctttggtgcggtcattggtacaaaccatcaaggcacagcagctgcagcaactcgtgctacctgtgatcaaccaagtagctctggcaaacctttctccctactatcagcaacaacaatttcttccattcaaccaactatctacactgaaccctgctgcttatttgcagcaacaactattaccattcagccagctagctactgcctactctcatcaacaacaacttcttccatttaaccaattggccgcactgaacctcgctgcttatttgcagcagcaaatattactaccatttagccagctagctgcagcaagccgtgcttccttcttgacacagcaacagttgctgcctttctaccagcagtttg

SEQ ID NO: 4921 - DNA, 429 bp, Zea mays
  unsure (1)..(429): unsure at all n locations; Clone ID: LIB3061-036-Q1-K1-E1
tagctgtatctactccagagcgcagaagaacccgatcgacaccatgagggtgttgctgcgggccctcgctctcctggctctcgctgcgagcgccacctccacgcatacaagcggcggctgcggctgccagccaccgccgccggttcatctaccgccgccggtgcatctgccacctccggttcacctgccacctccggtgcatctnccaccgccggtccacctgccgncgccggtccacctgccaccgncggtccatgtgccgccgccggttcatctgccgncgncaccatgccactaccctactcaaccgccccggcctcagcctcatccccagccacacccatgcccgtgccaacagccgcatncaagcccgtgccagctgcagggaacctgcggcgttggcaagaccccgatcctgggccagtgcgt

SEQ ID NO: 4922 - DNA, 444 bp, Zea mays
  Clone ID: LIB3061-036-Q1-K1-G11
aagcacaatagtgtaccaacaatggcagccaaaatattttgcttccttatgctccttggtcttgctgcaagtgctgctaccgcaaccattttcccacaatgctcacaagctcctatagcttcctttcttcccccatacctctcaccagcggtgtcttcagtatgtgaaaacccaattcttcaaccctacaggatccaacaggcaatcgcagcaggcatcttacctttatcacccttgttcctccaacaaccgtcagccctattacagcagttacctttggtgcatttgttggcacaaaacatcaaggcacaacaactacaacaacttgtgctaggaaaccttgctgcctactctcagcaacagcagtttcttccattcaaccaactggctgcattgaactctgctgcttatttgcaacaacaactaccattcagtcagctagct

SEQ ID NO: 4923 - DNA, 428 bp, Zea mays
  Clone ID: LIB3061-038-Q1-K1-C11
tatagttcaataataaatctaaaagaggtcaccaccaaagattgcctgcttatgctaggcggtttttctgcgtgggctgctactgccaccatgatccagcaatgcatttaagctgctataactacccttcttcctccgtacctcttatcagcgatgtcttcattatgataaaacctaattattcaaccctacaggatccaacaggcagtcacagctggcatcttaccttcatcacccttgttcctcctacaaccatcatcagtattacatcaattacctctggtgcatttattgtcacagcacatcatgacacaactactactacaacttgtgctagcaaacctcgctgcctactatcatcaacagcagcatattacattcaaccaactagctgcattgaactctgcttcttattagcaacaacaaca

SEQ ID NO: 4924 - DNA, 427 bp, Zea mays
  Clone ID: LIB3061-038-Q1-K1-F6
tagcaacatagaaagcacaatagtgtaccaacaatggcagccaaaatattttgcttccgtatgctccttggtctttctgcaagtgttgctaccgcaaccattttcccacaatgctcacaagctcctatagcttcccttcttcccccatacctctcaccagcggtgtcttcaatgtgtgaaaccccaattgttcaaccctacaggatccaacaggcaatcgcaacaggcatcttaccattatcacccttgttcctccaacaaccgtcagccctattacagcagttacctttggtccatttggtggcacaaaacatcagggcacaacaactacaacaacttgtgctagcaaaccttgctgcatactctcagcaacatcagtttcttccattcaaccaactggctgcattgaactctgctgcttatttgc

SEQ ID NO: 4925 - DNA, 417 bp, Zea mays
  Clone ID: LIB3061-038-Q1-K1-G11
taggcaccaaatcaaatctgcaacatcaattatctaactccaaaaaccatgaagctggtgcttgtggttcttgctttcattgctttagtatcaagtgtttcttgtacacagacaggcggctgcagctgtggtcaacaacaaagccatgagcagcatcatcatccacaacaacatcatccacaaaaacaacaacatcaaccaccaccacaacatcaccagcagcagcaacaccaacaacaacaagttcacatgcaaccacaaaaacatcagcaacaacaagaagttcatgttcaacaacaacaacaacaaccgcagcaccaccaccaacaacaacaacaacagcaccaacaacaacatcaatgtgaaggccaacaacaacatcaccaacaatcacaaggccatgtgcaacaacacgaa

SEQ ID NO: 4926 - DNA, 288 bp, Zea mays
  Clone ID: LIB3061-038-Q1-K1-G4
tagaaagcacaatagtgtaccaacaatggcagccaagatattttgcttccttatgctccgtggtctttctgcaagtgttgctaccgcaaccattttcccacaatgctcacaagctcctatagcttcccttcttcccccatacctctcaccagcggtgtcttcaatgtgtgaaaccccaattgttcaaccctacaggatccaacaggcaatcgcaacaggcatcttaccattatcacccttgttccttcaacaaccgtcagccctattacagcagttacctttggtcca

SEQ ID NO: 4927 - DNA, 421 bp, Zea mays
  Clone ID: LIB3061-038-Q1-K1-H9
taaactgttagctaaggactcaccttatggtgataatctggactacatctacactgagcttcctgctgcgctgtctcatgtgcataaactctcgataacctcgggtctcttcgtttttgatcagctgcaagggttttccaaaacctcagccagattcatcaatctgaggcatctgaccatgtatttgcctctttatggggaacctaagtcaattagtgggattcttcgcttggcctacctactggaattggccccagctctagaagaattggaattgcatgtgaatggcggtgacgtggatgttgggtgggcactcagagggaatatgttaccgtactcacacaataggctcaagagggtccttatttcaggagccagtgtatgggaggggctaatggagctggcatactacatttttcgg

SEQ ID NO: 4928 - DNA, 443 bp, Zea mays
  unsure (1)..(443): unsure at all n locations; Clone ID: LIB3061-039-Q1-K1-B3
aaggcagtgaacatcttattaccttgacactgcaaacattgactgaagattcaaatccctcagctgacctagttgctgctgttaaacaattatataataccaagctgaaggatgcatctattctgattcccttactgccttcatttccaaaggaggaggtattgcctatatttcctaggctagttgatctcccgcttgagagattccaagacgtacttgctcggatattgcagggaactgctcatactggtccagcattgactcctgctgaagttctcattgcaattcatgatattaaccctgaaaaagataaagttgccctaaaaaaggtcacggatgcttgcacggcttgctttgagcaacgcacggtatttactcagcangttttggagaagtcacttaatcaattggttgacagaataccaattcctcttctttttatg

SEQ ID NO: 4929 - DNA, 425 bp, Zea mays
  Clone ID: LIB3061-039-Q1-K1-B8
taccaacatacatagtgaagtacactagcaacatcttagcaccaatggcagccaagatttttgcgctccttgccctccttgctctttcagcaagtgttgctaccgcgactattattccacaatgctcacaacaatacctctctccagtgatagccgcgagatttgaatacccatctatacaatcctacaggctacaagaggccatcacagcaagcatcttacggtcgttagcattgaccgtccaacaaccatatgccctattgcaacaaccatccttagtgaatctgtatctccaaagaatcacagcacaacaactacaacaacggttgcttccaacaattaatcaagtagttgcagcgaaccttgctgcttaccttcagcaacaacaatttcttccattcaatcaactagctggggtgaaccct

SEQ ID NO: 4930 - DNA, 445 bp, Zea mays
  unsure (1)..(445): unsure at all n locations; Clone ID: LIB3061-039-Q1-K1-F5
taccaactagcaacatacatagtgaagtacactagcaacatcttagcaccaatgggagccaagatttttgccctccttgccctccttgctctttcagcaagcgctgctacctcgacttttattccacaatgctcacaacaatacctctctccggtgacagccgcgggatttcaatacccaactatacaatcctacatggtacaagaggccatccaagcaagcatcttacggtcattagcattaaccctccaacaaccatatgctctattgcaacagccatccttagtgcatctgtatctccaaagaatcgcggcacaacaactacaacaacagttgctaccaacaatcaatcaagtagttgcagcgaaccttgctgcttacctncagcaacaacagtttcttccattcaatcaactagctggggtgaaccctgctatctacttgc

SEQ ID NO: 4931 - DNA, 431 bp, Zea mays
  Clone ID: LIB3061-039-Q1-K1-H10
gacggggctgagggcgaaccgggccactgaggcgggttattggaaggcgaccggcaaggacaaggaggtctacaacccctttgcagcggaagggctgctgctggtcggcatgaagaagacgctcgtgttctacaaaggcagggctcccaggggtgacaaaaccaactgggtgatgcacgagtacaggctcgaaggcagcggtaggctccctgctagtcctgcatccgcatccggctcagccaccaacatcgctgcggccatgatgaaagcttcagcttcggcttgcaaggatgagtgggtggtctgtcgtgtgttcaacaagaccaccgggatcaagaagacggctgcgccggcataccaggtggccatggccggtgctgagatggatcagaatcagaacaacattccggccatccccatccccatgccgc

SEQ ID NO: 4932 - DNA, 359 bp, Zea mays
  unsure (1)..(359): unsure at all n locations; Clone ID: LIB3061-040-Q1-K1-G5
tattttcagcattcaaaaacacaccaagcgaagcgcactagcaacgacctaacaccaatggctaccaagatattagccctccttgcgcttcttgcccttttagtgagcgcaacaaatgcgttcattattccacagtgctcacttgctcctagtgccattattccacagttcctcccaccagttacttcaatgggcttcgaacatccagccgtgcaagcctacaggctacaactagcgcttgcggcgagcgccttacaacaaccaattgcccaattgcaacaacaatccttggcacatctaaccctacaaaccattgcaacgcancaacaacaacaacaacagtttctgccatcactgag

SEQ ID NO: 4933 - DNA, 365 bp, Zea mays
  Clone ID: LIB3061-040-Q1-K1-H3
cccacgcgtccgaagcaacatacctttatcgcccttgttgtttcaacaatcgccagcccgatcggtggtgcagtcattggtacaaaccatcagggcacaacagctgcagcaactcgtgctacctctgatcaaccaagtagctctggcaaacctttctccctactctcagcaacatagaaagtggaatccagtagcaacaatagagcaacaatggcgaccaagatattttccctccttatgctccttgctctttctacatgtgttgctaacgcgacaattttccctcaatgctcacaagctcctatagcttcccttcttcccccataccttccatcaattatagcttcaatatgtgaaaacccagc

SEQ ID NO: 4934 - DNA, 120 bp, Zea mays
  Clone ID: LIB3061-040-Q1-K1-H4
gcgggcacggcagcagttgctacctctttatcctttcctaccgcaagccaagctctctgtctgggactaccctacagcacgatcggagtccaagtccattccatccatacccactcgaca

SEQ ID NO: 4935 - DNA, 330 bp, Zea mays
  Clone ID: LIB3061-041-Q1-K1-C7
aagcaacatagaaagtggaatacagtagcaaaaatagagcaacaatggcggccaagatattttccatccttatgctccttgctctttctgcatgtgttgctaacgcgaccatttttcctcaatactcacaagctcctatagctgcccttcttcccccataccttccatcaatgaccgctttagtatgtgaaaacccagcccttcaaccctacaggatccagcaagcaatcgcaacaagcaacttacctttatcacacctgttctttcaacaatcgccagccctatctttggtgcagtcattggtacaaaccatcagggcagaacagttgc

SEQ ID NO: 4936 - DNA, 342 bp, Zea mays
  Clone ID: LIB3061-041-Q1-K1-D1
aagcaacatagaaagtggaatacagtagcaaaaatagagcaacaatggcggccaagagattgtccatccttatgctccttgctctttctgcatgtgttgctaacgcgaccatttttcctcaatactcacaagctcctatagctgcccttcttcccccataccttccatcaatgaccgctttagtatgtgaaaacccagcccttcaaccctacaggatccagcaagcaatcgcaacaagcaacttacctttatcacacctgttctttcaacaatcgccagccctatctttggtgcagtcattggtacaaaccatcagggcagaacagttgcaagcaacttcgt

SEQ ID NO: 4937 - DNA, 341 bp, Zea mays
  unsure (1)..(341): unsure at all n locations; Clone ID: LIB3061-041-Q1-K1-E1
tattattgagaccaacaagcaacatagaaagtggaatacagtagcaaaaatagagcagcaatggcggccaagatattttccatccttatgctccttgctctttctgcatgtgttgctaacgcgaccatttttcctcaatactcacaagctcctatagctgcccttcttcccccataccttccatcaatgaccgctttagtatgtgaaaacccagcccttcaaccctacaggatccagcaagcaatcgcaacaagcaacttacctttatcacacctgttctttcaacaatcgccagccctatctttggtgcagtcattggtacaaaccatcagnggcagaac

SEQ ID NO: 4938 - DNA, 322 bp, Zea mays
  unsure (1)..(322): unsure at all n locations; Clone ID: LIB3061-041-Q1-K1-H1
tagcaacatagaaagcacaatagtgtaccaacaatggcagccaaaatattttgcttcgttatgctccttggtctttctgcaagtgttgctaccgcaaccattttcccacaatgctcacaagctcctatagcttcccttcttcccccatacctctcaccagcggtgtcttcaatgtgtgaaaacccaattgttcaaccctacaggatccaacaggcaatcgcaacaggcatcttaccattatcacccttgttcctccaacaaccgtcagccctattacagcagttacctttggtccatttggtggcacanaacatcagggcac

SEQ ID NO: 4939 - DNA, 439 bp, Zea mays
  Clone ID: LIB3061-042-Q1-K1-E8
tcccgggtaccggtattatgatcctgcaacatgcagccttcacttcgaaggactcctggaagacctcggttctgctccttgaggttcaatggtactgctgcatgcctgtgctcacaaccctactggagtagatcctaccatcgaacagtgggaacagattaggcagctgatgagatcaaaatcactgcttccgttctttgacagtgcctatcaaggctttgcaagtggaagtcttgacaaagatgctcagtcagtgcgtatgtttgttgctgatggtggtgaacttctcatggctcagagctacgctaagaacatgggattgtatggagagcgtgttggcgctttgagcattgtatgtaaaagtgccgatgtagctgttaaggttgaaagtcaactcaaacttgtcatcaagcctatgtattcaaacccttctcttcat

SEQ ID NO: 4940 - DNA, 382 bp, Zea mays
  Clone ID: LIB3061-043-Q1-K1-D1
tagcaacatataaagcacaatagtgaaccaacaatggcagccaaaatattatgcctggggatgctccttgatctgggtgcaagtgcttctactgcgaccattttatcacaatgctcacaagcttctatagcttcccttattccctcgtatatctcaccagcggtgtcttcggtatgtgaaaacccaattcttcaaccctatacgatccaacaggcaatcgcagctggcatcttacctttatcacccatgttcctacaacaatcatcagccctattacagcacttaccattggtgcatttattggcacaaaacatcacaccacatctactaccacaacttgtgctagcaaaccttgctacctactctcatcatcaacagtctc

SEQ ID NO: 4941 - DNA, 435 bp, Zea mays
  Clone ID: LIB3061-043-Q1-K1-E6
gagcattggtcgatactggccaacaaatctggctccacagagcggttgcgtcaggtgttgcaactatagaggagcctacagttcaagcaaatgcctcaagaagtgtggccagccatcacagactttgtaccatgttccccgttcgtttctccaaccaggcagcaatgatctagtccttttcgagcattttggtggtgacccaagcaagatatcctttgtgatgaggcagacaggaagtgtgtgcgcacaagtatcagaggcacatccagcccaaattgatagttggagttctcaacagccgatgcatagatatggacctgcacttcgcctggaatgcccaaaagaaggccaggtcatcagcagcatcaagtttgcaagctttgggacaccgagtggcacatgtggaagctacagccatggcgaatgcaacagcac

SEQ ID NO: 4942 - DNA, 435 bp, Zea mays
  unsure (1)..(435): unsure at all n locations; Clone ID: LIB3061-043-Q1-K1-F1
tatagaccacagccagtcagccacatcactagctatctgtgcagaggcaatggcgtcgaaggttgagctggtggtggaggtcaagtccccggctgacaagctgtgggcggcgctgcgtgactcgacggagctgttccccaagatcttccccgagcagtacaagagcatcgagaccgtcgagggcgacggcaagtcggccggcaccgtccgcctcctcaagtacaccgaggcggtgccgatgctgacgttcgccaaggagaagcttgagacggcggacgacgagaacaaggtggtgtcgtacagcgtggtggacggcgagctggcggacttctacaagaacttcaagatcacgctgaaggttgactccgccaangcgganggcgagggcggcgccgtcgtcagctgggccatggagttcgacaaggccaacgacca

SEQ ID NO: 4943 - DNA, 235 bp, Zea mays
  unsure (1)..(235): unsure at all n locations; Clone ID: LIB3061-044-Q1-K1-A12
tagaaagtggaatccaatagcaacaatagaacaacaatggcgaccaaagatctttcccggcttatgctccttgctctntctgcatgtgttgctaacgcgacaattttccctcaatgctcacaagctcctatagcttcccttcttcccccataccttccatcaatgatagcttcagtatgtgaaaacccagctcttcaaccctatangctccaacangcaatcgcagcaagcaaca

SEQ ID NO: 4944 - DNA, 396 bp, Zea mays
  Clone ID: LIB3061-044-Q1-K1-A2
cacgggacaggcatggcgagccgcgagcggcagcacacccgcagctacgactacgactgcgagcacctcgtgctcgacccggcgtctctgggcgtgccgtgggccgacccggccgccgtggagatcccgccgcagctcctcgccgcgctcggggagtacctctccggctccgcggcccgcggggacgtcgaggcggaggcggacgacgagttcatgatgcacgagttcaaggtgcggcggtgcgcgcgcgcgcggagccacgactggacggcgtgcccctacgcgcacccgggcgaggccgcgcggcgccgggacccgcgccgcgtcgcctacgcgggggagccgtgcccggacttccggctgccgccgggcgccgtcaccggcgcgtgcccgcgc

SEQ ID NO: 4945 - DNA, 397 bp, Zea mays
  Clone ID: LIB3061-044-Q1-K1-B7
aagcaacatagaaagtggaatccagtatcaacaatagagcaacaatggcgaccaagatgctttccctccttatgctccttgctctttctgcatgtgttgctaacgcgacaattttccctcaatgctcacaagctcctatagcttcccttcttcccccataccttccatcaatgatagcttcagtatgtgaaaacccagctcttcaaccctataggctccaacaagcaatcgcagcaagcaacatacctttatcacccttgtttcaacaatcgccagccctatctttggtgcagtcattggtacaaaccatcaaggcacagcagctgcagcaactcgtgctacctgtgatcaaccaagtagctctggcaaacctttctccctactatcagcaacaaca

SEQ ID NO: 4946 - DNA, 334 bp, Zea mays
  Clone ID: LIB3061-044-Q1-K1-D5
tagcaacatcttagcaccaatggcagccaagatttttgcgctccttgccctccttgctgtttcagcaagtgttgctaccgcgactattattccacaatgctcacaacaatacctctctccagtgatagccgcgagatttgaatacccatctatacaatcctacaggctacaagaggccatcacagcaagcatcttacggtcgttagcattgaccgtccaacaaccatatgccctattgcaacaaccatccttagtgaatctgtatctccaaagaatcacagcacaacaactacaacaacggttgcttccaacaattaatcaagtagttgcagcg

SEQ ID NO: 4947 - DNA, 419 bp, Zea mays
  unsure (1)..(419): unsure at all n locations; Clone ID: LIB3061-044-Q1-K1-F9
tagccctccttgcgcttcttgcccttttagtgagcgcaacaaatgcgttcattattcgacagtgcgcacttgctcctagtgccattattccacagttcctcccaccagttacttcaatgggcttcgaacatccagccgtgcaagcctacaggctacaactagcgcttgcggcgagcgccttacaacaaccaattgcccaattgcaacaacaatccttggcacatctaaccctacanaccattgcaacgcatcatcaacaacaacaacagtttctgccatcactgagccacctagccgtggtgaaccctgtcacctacttgcaacagcagctgcttgcatccaacccacttgctctggcgaacgtagctgcataccagcaacaacaacagctgcaacagtttatgccagtgctcagtcaa

SEQ ID NO: 4948 - DNA, 79 bp, Zea mays
  Clone ID: LIB3061-045-Q1-K1-C1
tatgttctctggcgttcatgcgcgtgtgttcttgagctctgaagtctgaaatgaaaagatctgcgatcggattcgtatt

SEQ ID NO: 4949 - DNA, 443 bp, Zea mays
  Clone ID: LIB3061-045-Q1-K1-E3
tagcaacatagaaagcacaatagtgtaccaacaatggcagctaaaatattttgcctcgttatgctgcttggtctttctgcaagtgctgctacggcgaccattttcccacaatgctcacaagctcctatagcttcccttcttcccccgtacctctcaccaacggtgtcttcggtatgtgaaaacccaattcttcaaccctacaggatccaacaggcaatcgcagctggcatcttacctttatcacccttgttcctccaacaatcatcagccctattacagcagttacctttggtgcatttattggcacaaaacatcagggcacaacaactacaacaacttgtgctagcaaaccttgctgcctactctcagcaacagcagtttcttccattcaaccaactagctgcattgaactctgcttcttattgcaacaacaacaactacca

SEQ ID NO: 4950 - DNA, 450 bp, Zea mays
  Clone ID: LIB3061-045-Q1-K1-E4
ttctgctgcagcgcctccgccgccgccgccgcatctaacgcagttccctccgccgcagcccgaggcaagatggttctccagaacgacattgatctgctcaacccgccggcagaactcgagaagctcaagcacaagaaaaagagactcgtccagtcgcccaactccttcttcatggatgttaagtgccaggggtgcttcagcataaccactgttttcagccactcccagactgttgttgtgtgccctggctgccaaactgtcctctgccaacccacaggaggaaaggcaaggctcactgagggctgctctttccgcaggaagggagactagagcggatgtggtcttcaagttttgctctatgccagatactagcgtcatgaactgcctttagctaagattttccataagttgttctcgagcagctatgtgttgcatgttggctacttccaa

SEQ ID NO: 4951 - DNA, 374 bp, Zea mays
  Clone ID: LIB3061-045-Q1-K1-E9
aagctgaacttggagacacacacgaatttcagaacataagctcatccctagcatcaagggcatctacgataacatgaatgattccacttcttcagcttaaggctagaacaacaaatgaccacataatacactaattacaactacctccaagattctttaatacacaatgaaaccgacaaattactttaatcaacttctaacacagaactttgcactaactatttactgcatcaaccaacatggtccatcatctcaatacatccaatatcataattgcaacagcaatactcagcacatccaactttaccgaccattgtaactaaacatacacgtcatttcctaccataactgatccacctatcaattacctacat

SEQ ID NO: 4952 - DNA, 456 bp, Zea mays
  unsure (1)..(456): unsure at all n locations; Clone ID: LIB3061-045-Q1-K1-F4
tagcaacatagaaagcacaatagtgtaccaacaatggcagccaaaatattttgcttgcttatgctgcttggtctttctgcaagtgctgctaccgcaaccattttcccacaatgctcacaagctcctatagcttcctttcttcccccatacctctcaccagcggtgtcttcagtatgtgaaaacccaattcttcaaccctacaggatccaacaggcaatcgcagcaggcatcttacctttatcacccttgttcctccaacaaccgtcagccctattacagcagttacctttggtgcatttgttggcacanaacatcaaggcacaacaactacaacaacttgtgctaggaaaccttgctgcctactctcagcaacagcagtttcttccattcaaccaactggctgcattgaactctgctgcttatttgcaacaacaactaccattcagtcagctagct

SEQ ID NO: 4953 - DNA, 446 bp, Zea mays
  Clone ID: LIB3061-046-Q1-K1-C1
tagcaacatagaaagcacaatagtgtaccaacaatggcagccaaaatattttgcctcgttatgcgccttggtctttctgcaagtgctgctacggcgaccattttcccgcaatgctcgcaagctcctatagcttcccttcttcccccgtacctctcaccagcggtgtcttcggtatgtgaaaacccaattcttcaaccctacaggatccaacaggcaatcacagctggcatcttacctttatcacccttggtccttcaacaatcatcagccctattacatcaggtacctttggtgcatttattggcaccaaacattaaggcacaacaacttccaccacctgggctagccaaaccttgctgcctactttcaggcacagcagtttcttccattcaaccaactagctgcattgaactctgcttcttatttgcaacaacaacaactaccat

SEQ ID NO: 4954 - DNA, 289 bp, Zea mays
  Clone ID: LIB3061-046-Q1-K1-D3
aagcaacatagaaaggggaatccagtagcaacaacagagcaacaatggcgaccaagagattttcggttcttatgctccttgctctttctgcatgtgttgctaacgcgacaattttccctcaatgctcacaagctcctatagcttcccttctttccccatacctttcatcaatgatagcttcagtatgtgaaaacccaacttttcagccctataggcttcaaccagcaatcgcaacaagccacatacctttattaaccttggtggttcaaccatcggcaggcctattttt

SEQ ID NO: 4955 - DNA, 419 bp, Zea mays
  Clone ID: LIB3061-046-Q1-K1-D8
aacggttgcttccaacaattaatcaagtagttgcagcgaaccttgctgctgaccttgagcaacaacaatttcttccattcaatcaactagctggggtgaaccctgctgcttacttgcaggcacaacagctactaccattcaaccaacttgtcgggagccctgctgccatcttattgcagcaacagttgctgccattccgtctacaagttgttgcaaacattgctgctttcttgcaacaacaacaattgctgccattttacccacaggttgtgggaaacattaacgccttcttgcaacaacaacaattgctgccattctacccacaggatgtggcaaacattgtcgccttcttacaacaacagcaattgctgccatttagccaactcgctttgacgaatcctaccaccttattgcatcag

SEQ ID NO: 4956 - DNA, 442 bp, Zea mays
  Clone ID: LIB3061-047-Q1-K1-B4
tagagggttcattttcggtcctcctatcgctttagccatcggcgcaaaatttgtgcctttgaggaagccgaagaagttgccaggcgaggtgatctccgaagagtattctttggaatatggaactgacaagatagaaatgcatgttggagctgtacaggccaacgaccgggctcttgtagtcgatgatcttattgctaccggtggaacactctgtgcagctgtcaaacttattgaacgtgttggagcaaaggttgttgagtgtgcttgtgtcattgaattgccagaactgaagggtcgagacaagcttggggacaggccagtttttgtccttgtggaagcagacgcctgagcggaatttgggaattctcagagagtttggtgccgtcgatgctccctctctggagacaacacagtttcccatgttaccatgttggctaatttc

SEQ ID NO: 4957 - DNA, 408 bp, Zea mays
  Clone ID: LIB3061-047-Q1-K1-F3
tagcaacatagaaagcacaatagtgtaccaacaatggcagccaaaatattttgcctcctgatgctgcttggtctttctgcaagtgctgctacggcgaccattttcccgcaatgctcgcaagctcctatagcttcccttcttcccccgtacctctcaccagcggtgtcttcggtatgtgaaaacccaattcttcaaccctacaggatccaacaggcaatcacagctggcatcttacctttatcacccttgttcctccaacaatcatcagccctattacatcagttacctttggtgcatttattggcacagaacatcagggcacaacaactacaacaacttgtgctagcaaaccttgctgcctactctcagcaacagcagtttctttcattcaaccaactagctgcattg

SEQ ID NO: 4958 - DNA, 438 bp, Zea mays
  unsure (1)..(438): unsure at all n locations; Clone ID: LIB3061-048-Q1-K1-B8
tacctgttgatgagcttttcccctcaggagaatttccagagggcgaaatccaacaatacaaggatgacaatctgtggagaacaactagtgaggaaaagagggacctggaacgactgcaaaagccaatatacaactctgttcgccaagcagcagaagttcatagacaggtgcggaaatatatgaggagcatcataaaacctggaatgttaatggttgatctatgtgagacattggaaaacatggtccggaaacttatcaaggagaatggactgcaagctggcattgcttttccgactggatgctccttgaattgggttgcagctcactggactccaaatgcgggcgacaaaactgtgctacaatatgatgatgtgatgaagcttgattntggaacacatatagatggttacattgttgattgtgcatttactggtgcat

SEQ ID NO: 4959 - DNA, 441 bp, Zea mays
  Clone ID: LIB3061-048-Q1-K1-E8
aagcacaatagtgtaccaacaatggcagataaaatattacgcctccttatgcgccttgggctttatgcaagtgctgctacggggaccattttcccacaatgctcacaagctcctatagcttgccttcttcccccgtacctctcaccaacggtgtcttgggtatgtgaaaacccaattctgcaaccctacaggatccaacaggcaatcgcagatggcatactacctttatcacccttgttcctgcaacaatcatgatgcctattacagcaattacctttggtgcatttattggcacataacatcagggcacatcagctacatcaacttgtgctagcaaaccttgctgcctactctcagcaacagcaagctcttccattcaaccaactagctgcattgaactctgctgcttatttgcaacaacagcaactaccattcagtcag

SEQ ID NO: 4960 - DNA, 298 bp, Zea mays
  Clone ID: LIB3061-048-Q1-K1-G3
aacagctgcttccattcaaccaactgactgtgtcgaactctgctgcgtacctacaacagcgacaacagttacttaatccactagcagtgcctaacccattggtcactgccttcctacagcagcaacaattgctaccatacagccagttctctttgatgaaccctgccttgtcgtggcagcaacccatcgttggaggtgccatcttttagattacatatgagatgtaatcgataatggtgccctcataccggcatgtgtttcctagaaataatcaatatattgattgacatttatctcg

SEQ ID NO: 4961 - DNA, 451 bp, Zea mays
  Clone ID: LIB3061-049-Q1-K1-A3
caactagcaacatagaaagcacaatagtgtaccaacaatggcagccaaaatatttcgcttcctgatgctgcttggtcttactgcaagtgctgctaccgcaaccattttcccacaatgctcacaagctcctatagcttacttacttcccccatacctctcaccagcggtgtcttcagtatgtgaaaacccaattcttcaaccctacaggatccaacaggcaatcgcagcaggcatcttacctttatcacccttgttgcgcaacaaccgtcagccctattacagcagttacctttggtgcatttgttggcacaaaacattcaggcacaacaactacaacaacttgtgctaagaaaccctgcttgctactctcagcaacagcagtttcttccattcaaccaactggctgcatcgaactctgctgcttatttgcaacatcaactaccattcagtc

SEQ ID NO: 4962 - DNA, 453 bp, Zea mays
  Clone ID: LIB3061-049-Q1-K1-A7
tagcaacatagaaagcacaatagtgtaccaacaatggcagccaaaatattttgcttccttatgcgccttggtctttctgcaagtgttgctaccgcaaccattttcccacaatgctcacaagctcctatagcttcccttcttcccccatacctctcaccagcggtgtcttcaatgtgtgaaaccccaattgttcaaccctacaggatccaacaagcaattgcaacaagcattttaaccatattaaccttggttcttccaacaaccgtaagccttattacagcagttaccttgggtccatttggtggcacaaaacatcagggcacaacaactacaacaacttgtgctagcaaaccttgctgcatactctcagcaacatcagtttcttccattcaaccaactggctgcattgaactctgctgcttatttgcaacaacaattaccattcagccagct

SEQ ID NO: 4963 - DNA, 458 bp, Zea mays
  Clone ID: LIB3061-049-Q1-K1-D3
tatcagtaccatcaatcatcattcatcttagtagtataggcaccaaatcaaatctgcaacatcggttaggtaactccaaaaaccatgaagctggtgcttgtggttcttgctttcattgctttagtatcaagtgtttcttgtacacagacaggctgctgcagctgtggtcaacaacaaagccatgagcagcaacatcattcacaacaacatcatccacaaaaaccaccacattaaccaacaacacaaccttaccaagagcagcaaccccaaccaccaccaggtcacatgccaccaccaaaaccttagcaaccaccagaaattcatggtcaacaaccaccaccaccaccggagtatcaccatcaacaacaaccaccaccgcgccaacaaccacattaatgtgaaggccaacaacaacattaccaacaatcacaaggccatgtgcaacaacacgaacagag

SEQ ID NO: 4964 - DNA, 449 bp, Zea mays
  Clone ID: LIB3061-049-Q1-K1-D7
aagcaacatagaaagcacaatccattagcaacaatagagcaacaatggcgaccaagatggttggcgtgcttatgctccttgctctttctacatgtggtgctaacgcgacaatgttccctcaatgctcaccagctcctatcgctttccttctttccccataccttccattaattataggtttaatatgtcaaaacccaagtcttcaaccatataagcttcaacaagcaatcatattcagccacatacctttattgcccttggtggttcaacaatcaccaggcctatctttggtgcaaacattggtacaaaccatcagggcacaacagctgcagcaactcgtgctacctgtgatcaaccaagtaactctggcaaacctttctccctactctcagcgacaacaattttcttccattcaaccaactgtctacactgaaccctgctgcttattt

SEQ ID NO: 4965 - DNA, 455 bp, Zea mays
  Clone ID: LIB3061-049-Q1-K1-E1
tattttcagcattcaaaaacacaccaagcgaagcgcactagcaacgacctaacaccaatggctgccaagatattagccctccttgcgcttcttgcccttttagtgagcgcaacaaatgcgttcattattccacagtgctcacttgctcctagtgccattattccacagttcctcccaccagttacttcaatgggcttcgaacatccagccgtgcaagcctacaggctacaactagcgcttgcggcgagcgccttacaacaaccaattgcccaattgcaacaacaatccttggcacatctaaccctacaaaccattgcaacgcaacaacaacaacaacaacagtttctgccatcactgagccacctagccgtggtgaaccctgtcacctacttgcaacagcagctgcttgcattcaacccacttgctctggcgaacgtagctgcataccagcaaca

SEQ ID NO: 4966 - DNA, 198 bp, Zea mays
  Clone ID: LIB3061-049-Q1-K1-E2
aagctgcatgaagtgtgtaactcagtgactgcagcaggacagcagcggctaatagaagcctatggcgcggtatactacctgcgcatggagatagtgtagtgaacgctgtcaagacgtctttaatgcaagagagattagatagctggtgttggctgccatgcgatcctatgatgatggctggcttattggaaaacctat

SEQ ID NO: 4967 - DNA, 445 bp, Zea mays
  Clone ID: LIB3061-049-Q1-K1-G7
tagcaattagctcatcgactccagattggagaactcgacaccatgaaggtgctgatcgttgcccttgctctcctggcgctcgctgcgagcgccgcctccagtacaagcggcggctgtggctgccagacaccaccgtttcatctaccgcctccgttctatatgccgcctccgttctatctgccgccgcagcagcagccgcagccatggcaataccccactcaaccaccgcagctaagcccgtgccagcagttcggatcctgcggcgtcggcagcgtcggcagcccgttcctgggccagtgcgtcgagttcctgaggcaccagtgcagcccggcggcgacgccctacggctcgccacagtgccaggcgctgcagcagcagtgctgccaccagatcaggcaggtggagccgctgcaccggtaccaggcgacatacggtgtggtcctgc

SEQ ID NO: 4968 - DNA, 465 bp, Zea mays
  Clone ID: LIB3061-050-Q1-K1-B8
aagcaacatagaaagtagaatccattagcaacaatagagcaacaatggcgaccaagatagtttgcgctccttatgctccttgctctttctacatgtgttgctaacgcgacaattttccctcaatgctcacaagctcctatagcttccctatttcccccataccttccatcaattatagcttcagtatgtgaaaacccagctcttcaaccatataggcttcaacaagcaatcgcagcaagcaacatacctttatcgcccttgttgtttcaacaatcaccagccctatctttggtgcagtcattggtacaaaccatcagggcacaacagctgcagcaactcgtgctacctgtgatcaaccaagtagctctggcaaacctttctccctactctcagcaacaacaatttcttccattcaaccaactgtctacactgaaccctgctgcttatttgcagcaacaactatta

SEQ ID NO: 4969 - DNA, 372 bp, Zea mays
  Clone ID: LIB3061-050-Q1-K1-E1
tagaaagcacaatagtgtaccaacaatggcatctaaaatattttgcctccttatgctccttggtctttctgcaagtgctgctacggcgaccattttcccacaatgctcacaagctcctatagcttcccttcttcccccgtacctctcaccaacggtgtcttcggtatgtgaaaacccaattcttcaaccctacaggatccaacaggcaatcgcagctggcatcttacctttatcacccttgttcctccaacaatcatcagccctattacagcagttacctttggtgcattaattggcacaaaacatcagggcacaccacctccaacaacttgtgctagcaaaccttgctgcctactttaagcaccagcagtt

SEQ ID NO: 4970 - DNA, 445 bp, Zea mays
  Clone ID: LIB3061-050-Q1-K1-F5
tagcaacatagaaagcacaatagtgtaccaacaatggcagacaaaatattctgcttgcggatgggccttggtctttctgcaagtgttgctaccgcaaccattttcccacaatgctcacaagctcctatagctgtccttcttaccacatacctctcaccagcggcgtcttcaatgtgtgaaaccccaattgttcaaccctacaggatccaacaggcaatcgcaacaggcatcttaccattatcacccttgatcctccaacaaccgtcagccctattacagccgttacctttggtccatttggtggcacaaaacatcacggcacaacaactaccacaacttgtgctaacaaaccttggtgcatactcttaagaacatcaatttatttcattcaaccaactggctgcattgaactctgctgcttatttgcaacaacaattaccattca

SEQ ID NO: 4971 - DNA, 433 bp, Zea mays
  Clone ID: LIB3061-051-Q1-K1-C11
aagcaacatagaaagtggaatacagtagcaacaatagagcaacaatggcggccaagggattttccatccttatgctccttgctctttctgcatgtgttgctaacgcgaccatttttcctcaatactcacaagctcctatagctgcccttcttcccccataccttccatcaatgaccgcttcagtttgtgaaaacccagcccttcaaccctacaggctccaacaagcaatcgcaacaagcaacttacctttatcacccctgttctttcaacaatcgccagccctatctttggtgcagtcattggtacaaaccatcagggcacaacagctgcaacaactcgtgctaccagtgatcagccaagtagctctggcaaacctttctccctactctcagcaacaacaatttcttccattcaaccaactgtctacactgaa

SEQ ID NO: 4972 - DNA, 337 bp, Zea mays
  unsure (1)..(337): unsure at all n locations; Clone ID: LIB3061-051-Q1-K1-C2
tagcaacatagaaagcacaatagagtaccaacaatggcaggcaaaatattatgcctccgtatgctccttggtctttctgcaagtgctgctacagcgaccattgacccgcaatgctcgcaagctcctatagctgcccttatatacccgtacctctcaccaccggtgtcttcagtatgtgaaaacccaattcttcaaccctacaggatccaacaggcactcgcagctggcatcttacctttatcacccttgttcctgcaacaatcatgagccctactacaacagttaccttcggtgcatgtattggcacacaacatganggcacaacaactaccacaac

SEQ ID NO: 4973 - DNA, 438 bp, Zea mays
  Clone ID: LIB3061-051-Q1-K1-D10
tacgatctgacgctcatcccacatcagtagtcgaccaagcacaagcagcagagccgggcggaatatgtggacgatcaggaaggtggcgacgccgcaggtggccgtcctcctgctgctcctcatcgtcgttgcgcaggaggcggcgccgttggcggaggcgcgcgtgtgccggcgccggagcgcgggcttcaagggggtctgcatgtccgaccacaactgcgcgcaggtgtgcttgcaggagggctacggcggcggcaactgcgacggcatcatgcgccagtgcaagtgcatcagggagtgctagctagctaggctctaggatctagcaagctagctatatcggcctttaattaaattaataaggatcgacgtcgtggccggtcgctaaatatgtactactatacggttacactacatgcaataatgcaccacatgtac

SEQ ID NO: 4974 - DNA, 399 bp, Zea mays
  Clone ID: LIB3061-051-Q1-K1-E1
aagcaatcgcagcaagcaacatacctttatcgcccttgttgtttcaacaatcaccaggcctggctttggtgcagtcattggtacaaaccatcagggcacaacagctgcagcaactcgtgctacctgtgatcaaccaagtagctctggcaaacctttctccctactctcagcaacaacaatttcttccattcaaccaactgtctacactgaaccctgctgcttatttgcagcaacaactattaccatttagccagctagctactgcctactctcagcaacaacaacttcttccatttaaccaattggccgcactgaaccccgctgcttatttgcagcagcaaatactactgccatttagcgagctagctgcagcaagtcgtgccttcttcttgacacagc

SEQ ID NO: 4975 - DNA, 448 bp, Zea mays
  Clone ID: LIB3061-051-Q1-K1-E4
tagaaagcacaatagtgtaccaacaatggcagccaaaatattttgcctccttatgctccttggtctttctgcaagtgctgctacggcgaccattttcccgcaatgctcgcaagctcctatagcttcccttcttcccccgtacctctcaccagcggtgtcttcggtatgtgaaaacccaattcttcaaccctacaggatccaacaggcaatcacagctggcatcttacctttatcacccttgttcctccaacaatcatcagccctattacatcagttacctttggtgcatttattggcacaaaacatcagggcacaacaactacaacaacttgtgctagcaaaccttgctgcctactctcagcaacagcagtttcttccattcaaccaactagctgcattgaactctgcttcttatttgcaacaacaacaactaccattcagccagcta

SEQ ID NO: 4976 - DNA, 344 bp, Zea mays
  unsure (1)..(344): unsure at all n locations; Clone ID: LIB3061-051-Q1-K1-G4
tagatccccgggctccacgcctccacaaccatccgtcccgatcccgaccagctttgagatcgcgatggcggacggccgctgctgcaccttcctggagatcctcttcgccatcatcctcccgnccctcggcgtcttcctccgattcggctggctgcagaatagagttctgcaatctgcctgctgctcacaatccttggctacgtccccggaatcatctacgcgatctatgtccttgttgctctcgactctgaccagcacgagagggaatactacacccttgcttagagcatctggttgtgccaggcgggcctgcacagttgagtcgaaatcagtattttttttct

SEQ ID NO: 4977 - DNA, 418 bp, Zea mays
  Clone ID: LIB3061-051-Q1-K1-H7
tagcaacatagaaagcacaatagtgtaccaacaatggcagccaaaatattttgcttgcttatgctccttggtctttctgcaagtgttgctaccgcaaccattttcccacaatgctcacaagctcctatagcttcccttcttcccccatacctctcaccagcggtgtcttcaatgtgtgaaaccccaattgttcaaccctacaggatccaacaggcaatcgcaacaggcatcttaccattatcacccttgttcctccaacaaccgtcagccctattacagcagttacctttggtccatttggtgggcacaaacatcagggcacaacaactacaacaacttgtgctagcaaaccttgctgcatactctcagcaacatcagtttcttcccattcaaccaactggctgcattgaactctgct

SEQ ID NO: 4978 - DNA, 453 bp, Zea mays
  unsure (1)..(453): unsure at all n locations; Clone ID: LIB3061-052-Q1-K1-A4
taaatgacgtgttcgagatcatctccccattgttcttgtctgaggcattgaagaaatgggacattaagaaggaagatctttctttgatcttagaaggcctcaggggacgggcagatccagatttgaagattatagcgatgactttgaagaatgcatcatatacctcagggtttcacgctggttacaaaaccatgcagaatcgtggtctaaacggctgacccacttaggtcccagtctctcaattgcatggtttgatacaagaaacaggaatctgattttacatatttgtatgctgttgaatgaagtcaacatattatgtttgatgctctcgttctatctatgacgtatgctcttttttgtgtatgtgtggatttgcctttttctctctctgagagatcaaatggganatttcaccataccgtgcagtgttccatagaatatgtatttacaaga

SEQ ID NO: 4979 - DNA, 465 bp, Zea mays
  Clone ID: LIB3061-052-Q1-K1-B11
aagcaacatagaaagtggaatccagtagcaacaatagagcaacaatggcgaccaaggtattttccgtccttatgctccttgctctttctacatgtgttgctaacgcgacaattttccctcaatgctcacaagctcctatagcttcccttcttcccccataccttccatcaattatagcttcaatatgtgaaaacccagctcttcaaccatataggcttcaacaagcaatcgcagcaagcaacatacctttatcgcccttgttgtttcaacaatcgccagccctatctttggtgcagtcattggtacaaaccatcagggcacaacagctgcagcaactcgtgctacctctgatcaaccaagtagctctggcaaacctttctccctactctcagcaacaacaatttcttccattcaaccaactgtctacactgaaccctgctgcttatttgcagcaacaactattac

SEQ ID NO: 4980 - DNA, 433 bp, Zea mays
  Clone ID: LIB3061-052-Q1-K1-B4
tagaaagcacaatagtgtaccaacaatggcagccaaaatattttgcctccttatgctgcgtggtctttctgcaagtgctgctacggcgaccattttcccgcaatgctcgcaagctcctatagcttcccttcttcccccgtacctctcaccagcggtgtcttcggtatgtgaaaacccaattcttcaaccctacaggatccaacaggcaatcacagctggcatcttacctttatcacccttgttcctccaacaatcatcagccctattacatcagttacctttggtgcatttattggcacaaaacatcagggcacaacaactacaacaacttgtgctagcaaaccttgctgcctactctcagcacagcaagttctccattcacccactagctgcatgaactctgttcttaattgaacaacaacactaccattca

SEQ ID NO: 4981 - DNA, 452 bp, Zea mays
  Clone ID: LIB3061-052-Q1-K1-G6
tagcaacatagaaagcacaatagtgtaccaacaatggcagccaaaatattttgcctgcttatgctccttggtctttctgcaagtgctgctacggcgaccattttcccgcaatgctcgcaagctcctatagcttcccttcttcccccgtacctctcaccagcggtgtcttcggtatgtgaaaacccaattcttcaaccctacaggatccaacaggcaatcgcagctggcatcttacctttatcacccttgttcctccaacaatcatcagccctattacaacagttacctttggtgcatttattggcacaaaacatcagggcacaacaactacaacaacttgtgctagcaaaccttgctgcctactctcagcaacagcagtttcttccattcaaccaactaggttcattgaactctgcttcttaattgcaacaacaacaactaccattcagcca

SEQ ID NO: 4982 - DNA, 270 bp, Zea mays
  Clone ID: LIB3061-053-Q1-K1-A8
aaaaaaaaatatttaaaaaaaaataaaaaaaaaatttaaaaatcaaaaatgtaaaaattaacataaaaaaattttaatcgggagtaaaaaaaaaacaaatttaataatccataattaaaaaaaaacaaaatttaaaaaataataataaaaaacgataaaagtttaaaaaaaaaataccttggaactttatagttgcaaaaaacaatgggtttaagaggaacaagggagggaaaaaacctcaattaggaaaaagggttttaaaaaatttaa

SEQ ID NO: 4983 - DNA, 400 bp, Zea mays
  Clone ID: LIB3061-053-Q1-K1-D4
aagcgagaaaattgttcctctgattgatagcgaactgtacaatcgctctgattttatggcggagtacaaggatgccaaattctttgtaataaagtcctacaccgaggaccatgtacataggagcattaagtataaagtttgggccagcacagccagcgggaacaggaagctggattctgcttaccatgcagccaaagagaaagaagagcattgccctattttcttgtttttctcagtaagaacagctcatctcctttggttttttgctattttccttcgagggaaaaaaagagtaccataccatatgggggtttgaacctttaattagatgggctaaagggttttcgatttttgtaatttcttttatgaataattggtccttttatagggtaatggaaat

SEQ ID NO: 4984 - DNA, 337 bp, Zea mays
  Clone ID: LIB3061-053-Q1-K1-E10
ggaataccccccgcgacccacacatccgggcacacgcactgtctcacccacatctttccactaatccgccaccgcaacactaaggtccctttcaacacttacctgccccgcaacatctcacactccttctcccaccccctcgcccccaacaaatactccacatacaacaagtcccaccctaacacgcccccctccaccatctcttcactccatcaccaccatacccctcgtcttatccacttaatccatcaccactacctccctcgctattcacggcactcgttcaccaaactccgcacttcccctcacttcacttcattcaaaacctcctctttct

SEQ ID NO: 4985 - DNA, 357 bp, Zea mays
  unsure (1)..(357): unsure at all n locations; Clone ID: LIB3061-053-Q1-K1-G12
tagaaagcacaatagtgtaccaacaatggcagccaaaatatttcgcctccttatgctccttggtctttctgcaagtgctgctacggcgaccattttcccgcaatgctcgcaagctcctatagcttcccttcttcccccgtacctctcaccagcggtgtcttcggtatgtgaaaacccaattcttcaaccctacaggatccaacaggcaatcacagctggcatcttacctttatcacccttgttcctccaacaatcatcagccctattacatcagctacctttggtgcatttattggcacanaacatcagggcacaacaactacaacaacttgtgctagcaaaccttgctgcctactc

SEQ ID NO: 4986 - DNA, 422 bp, Zea mays
  Clone ID: LIB3061-054-Q1-K1-A8
tacttattttttttttttgaacgaacggggaccatttatgccaatatataaagatgcaaaattaagagtcacaagtaactttgaaagaaaatacaacattaaccaagggactacaaaggtggcttagatgaggtctccgaatgacacttaggtccttttcagcgtttgccacacggcgacacccaacttggggcctttgaaacccttctgaacagcacccttcatgtgcgccttgtgggacttggacacctcaaccttcttagacttcttctcatccttggtcttcttgatgcgctccttgatctcacgaagagcaacttgtttagcagcatcttggacttcaggcttttcagctctgcttttctggatcacttccaaggaagcacccacattggaccttgagtatggcttcttggtggcgc

SEQ ID NO: 4987 - DNA, 345 bp, Zea mays
  Clone ID: LIB3061-054-Q1-K1-B2
acaactgcaacaattgctgccattcaaccaacttgctttgacaaaccgaacagtgttctaccaacaacccatcattggtggtgccctcttttagattgcttatgagttatagttcaataatgaagttttttggatgaaaaaaaaattaaaaaaaaaaaaaaaaaaaaaaacaaaaaaaattaaaaatatttaaaaattattaataaataaaacattaaaataaccccccttaaacttcttaataaaaagcctacttttcataattttccaatttttctttaattccacttccccttaaaactttccaaaaaaatatacccaaaaaaaaaaaaggggggccctttt

SEQ ID NO: 4988 - DNA, 412 bp, Zea mays
  Clone ID: LIB3061-054-Q1-K1-E11
tattgagaccagcaagcaacatagaaagtagaatccattagcaacaatagagcaacaatggcgaccaagatattttcccttcttatgctccttggtctttctacatggggtggtaacgccacaatttttccttaatggttacaagcttctataggttcccttctttccccatacctttcatcaattatagcttcagtatgtgaaaacccagctcttcaaccatataggcttcaacaagcaatcgcagcaagcaacatacctttatcgccctttgttgttcaacaatcaccagccctatctttggtgcagtcattggtacaaaccatcagggcacaacagctgcagcaactcgtgctacctgtgatcaaccaagtagctctggcaaaccttttctcctactctcagcaacaac

SEQ ID NO: 4989 - DNA, 431 bp, Zea mays
  Clone ID: LIB3061-054-Q1-K1-F5
aagcaacatagaaagtggaatccagtagcaacaatagagcaacaatggcgaccaagatactttccctccttatgctccttgctctttctgcatgtgttgctaacgcgacaattttccctcaatgctcacaagctcctatagcttcccttcttcccccataccttccatcaatgatagcttcagtatgtgaaaacccagctcttcaaccctataggctccaacaagcaatcgcagcaagcaacatacctttatcacccttgtttcaacaatcgccagccctatctttggtgcagtcattggtacaaaccatcaaggcacagcagctgcagcaactcgtgctacctgtgatcaaccaagtagctctggcaaacctttctccctactatcagcaacaacaatttcttccattcaaccaactatctacactgaac

SEQ ID NO: 4990 - DNA, 431 bp, Zea mays
  Clone ID: LIB3061-054-Q1-K1-G7
aagcaacatagaaagtagaatccattagcaacaatagagcaacaatggcgaccaagatgttttccctccttatgctccttgctctttctacatgtgttgctaacgcgacaattttccctcaatgctcacaagctcctatagcttcccttcttcccccataccttccatcaattatagcttcagtatgtgaaaacccagctcttcaaccatataggcttcaacaagcaatcgcagcaagcaacatacctttatcgcccttgttgtttcaacaatcaccagccctatctttggtgcagtcattggtacaaaccatcaaggcacaacagctgcagcaactcgtgctacctgtgatcaaccaagtagctctggcaaacctttctccctactctcagcaacaacaatttcttccattcaaccaactgtctacactg

SEQ ID NO: 4991 - DNA, 438 bp, Zea mays
  Clone ID: LIB3061-055-Q1-K1-A12
tagaaagcacaatagtgtaccaacaatggcagccaaaatattttgcctccttatgctccttggtctttctgcaagtgctgctacggcgaccattttcccgcaatgctcgcaagctcctatagcttcccttcttcccccgtacctctcaccagcggtgtcttcggtatgtgaaaacccaattcttcaaccctacaggatccaacaggcaatcacagctggcatcttacctttatcacccttgttcctccaacaatcatcagccctattacatcagttacctttggtgcatttattggcacaaaacatcaaggcacaacaactacaacaacttgtgctagcaaaccttgctgcctactctcagcaacagcagtttcttccattcaaccaacttacttgcattgaactctgcttcttatttgcaacaacaacaactaccat

SEQ ID NO: 4992 - DNA, 364 bp, Zea mays
  Clone ID: LIB3061-055-Q1-K1-A2
aagcaacatagaaagtggaatccagtatcaacaacagagcaacaatggcgaccaagaggttttgcctccttatgctccttgctcgttctgcatgtgttgctaacgcgacaattttccctcaatgctcacaagctcctatagcttcccttcttcccccataccttccatcaatgatagcttcagtatgtgaaaacccagctcttcagccctataggctccaacaagcaatcgcagcaagcaacatacctttatcacccttgttggttcaacaatcgccagccctatctttggtgcagtcattggtacaaaccatcaaggcacagcagctgcagcaactcgtgctacctgtgatcaaccaagtagc

SEQ ID NO: 4993 - DNA, 156 bp, Zea mays
  Clone ID: LIB3061-055-Q1-K1-B6
tagcacatcaaacaagtggcgacagactaagatttgtgagggtgatccgcgcggagagtagatggctaagatcgccgcggcggcggcggcggcgctgtgcttcgcggccctggtggccgtggccgtctgccaaagcgaggtcgagcggcagaagct

SEQ ID NO: 4994 - DNA, 402 bp, Zea mays
  Clone ID: LIB3061-055-Q1-K1-D2
tagcaacatagaaagcacaatagtgtaccaacaatggcagccaaaatattttgcctccgtatgctccttggtctttctgcaagtgctgctacggcgaccattttcccgcaatgctcgcaagctcctatagcttcccttcttcccccgtacctctcaccagcggtgtcttcggtatgtgaaaacccaattcttcaaccctacaggatccaacaggcaatcacagctggcatcttacctttatcacccttgttcctccaacaatcatcagccctattacatcagttacctttggtgcatttattggcacaaaacatcagggcacaacaactacaacaacttgtgctagcaaaccttgctgcctactctcagcaacaggcagttcttccattcaaccaactagct

SEQ ID NO: 4995 - DNA, 327 bp, Zea mays
  Clone ID: LIB3061-056-Q1-K1-E8
gcggctgccagacaccgccaacggtacatgtaccgtcctcggtgcatctgccagctggggttcacctgccatcgtgggtgcatctcccaccgccgcaccagctgtcgcagccattactgctgccaccgtcggtgcatgtgccgccgccggatcatctgacgccgcagccatgccactaccgtacttagctggcccagcctcagactcatcccgagtcgcacccatgcccgtgccaacaggcgcatacaagcccatgccagctgcacggtacctgcggcgttggcagcaccctaatcctgggccagttcctcaagtttctgatgcgtc

SEQ ID NO: 4996 - DNA, 442 bp, Zea mays
  Clone ID: LIB3061-058-Q1-K1-E10
tattgagaccagcaagcaacatataaagtagaatccattatcaacaatagagcagcaagggcgaccaagatattttgcctgcttatgctccttgctctttctacatgtgttgctaacgcgacaattttccctcaatgctcacaagctcctatagcttcccttcttcccccataccttccatcaattatagcttcagtatgtgaaaacccagctcttcaaccatataagcttcaacaagcaatcgcagcaagcaacatacctttatcgcccttgttgtttcaacaatcaccagccctatctttggtgcagtcattggtacaaaccatcatggcacaacagctgcagcaactcgtgctacctgtgatcaaaccaattgctctggcaaacctttctccctactctcagcaacaacaatttcttccattcaaccaactgtctacac

SEQ ID NO: 4997 - DNA, 431 bp, Zea mays
  Clone ID: LIB3061-058-Q1-K1-E6
aagcaacatagaaagtggaatacagtagcaacaatagagcaacaatggcggccaagagattttccatccttatgctccttgctctttctgcatgtgttgctaacgcgaccatttttcctcaatactcacaagctcctatagctgcccttcttcccccataccttccatcaatgaccgattcagtttgtgaaaacccagcccttcaaccctacaggctccaacaagcaatcgcaacaagcaacttacctttatcacccctgttctttcaacaatcgccagccctatctttggtgcagtcattggtacaaaccatcaaggcacaacagctgcaacaactcgtgctaccagtgatcagccaagtagctctggcaaacctttctccctactctcagcaacaacaatttcttccattcaaccaactgtctacactg

SEQ ID NO: 4998 - DNA, 480 bp, Zea mays
  Clone ID: LIB3061-059-P1-N6-A10
agaaatgtacctttcttatttctgggacgccacaaacatcatccaaaaaacttcattattgaactataactcataagcaatctaaaagagggcaccaccaatgatgggttggtggtagaaaaactggtgggtttgtcaaagcaaggttggttgaatggcagcaattgttgcagttgtaagaaggtgccagcgttaggcaaagcgtgcaggtagaacggcaacaactggtggtgggtcaagaaggcagcagggctcacatcagctagctggctgaatggtagtagttgttgctgctgtaaataagcagcagagttcaatgctgctagttggttgaatggaagaaattgctgggggtaggcagcaactagctggctgaatggtaattggttgttgcaaataagcagcagagttcaatgcagccagttggttgaatggaagaaactgatgttgctgagagtatgcagcaaggtttgctagcac

SEQ ID NO: 4999 - DNA, 333 bp, Zea mays
  Clone ID: LIB3061-059-P1-N6-A4
agaatctggaaatgtaacttcttatttctggttggccacatacattatccaaaaaactttatttttgaattacaactaataagcaatctaaaagagggccccaccaatgatgtgttgttggtaggaggcccctgggtctgtcaaagcaagttggacaaagggcaacaattgttgtagttgtaagagggttgcggggttagccgcaaactgctggttgaaaggcagcaactgttgctgtgtcaagaaggaagcacggtttgctgcagctagctggctaaatgggagtagtatttgctgctgcaaataagcagcggggttcagggcggccaattg

SEQ ID NO: 5000 - DNA, 557 bp, Zea mays
  Clone ID: LIB3061-059-P1-N6-A5
ggaaatataacttcttatttctaggaggccacatacatcagccaaaaaacttcattattgaattacaactaataagcaatctaaaagagggcaccgccaatgatgtgttgttggtagaaggctgctgggtttgtcaaagcaagttggacaaagggcagcaactgttgcagttgtaagagggttgcggggttagccacaaactgctggtagaacggaagcacttgttgttgtgtcaagaaggaagcggggcttgttgtagctagctggccaaatggtagtagtatttgctgctggaaataagcagaggggttcagtgcggccaattggttaaatggaagaaattgttgctgctgagagtaggcagtagctagctggctgaatggtagtagttgttgttgctgcaaataagcagcagggttcagtatagacagttggttgaatggaagaaattgttgttgctgagagtagggggaaaggtttgccagagctacttggctgatcactggtagcacgagttgctgcaactgttctgccctgatggtttgtaccaatgactg

SEQ ID NO: 5001 - DNA, 101 bp, Zea mays
  Clone ID: LIB3061-059-P1-N6-A9
ggaaatgtaacttcttatttctaggaggccacatacatcagccaaaaaacttcattattgaattacaactaataagcaatctaaaagatggcaccgccaat

SEQ ID NO: 5002 - DNA, 445 bp, Zea mays
  Clone ID: LIB3061-059-P1-N6-B10
cagataattaactttattattggaatctaactcataagatatctaaaagatgggccccaccaatgatgggttgttggtagaacctgctgggtttgtcaaagcaagttggttgaatggcagcaattgttgcagttgtaagatggtgccagcgttaggcgcaacgtgctggtagaaccggcaaaactgggggttgggtcaagaaggtagcagggctcacaccagctagctggctgaatggtagtagttgttgctgctgtaaataagcaggagagttcaatgctgctagttggttgaatggaagaaattgctgggggtaggcagcaggtagctggctgaatggtaggtgtttgttgttgcaaataagaagcagagttcaatgaacctagttggttgaatggaagaaactgctgttgctgagagtaggcagcaaggtttgctagcacaa

SEQ ID NO: 5003 - DNA, 476 bp, Zea mays
  Clone ID: LIB3061-059-P1-N6-B12
atccatggttaagtatcgcctccggctcggatagaaacaaacatactactagttcacaatcgcccacaaacgacaaagccagaactgataacgacaacatttacagccatacgtgctggcccttattgacggcgacgaatgatctcctttaggcagacgcagacgcaggcgcaggcgcggcatgcttctcgatctgggccaggagctcgtccttcctggcacccacgatggtcgcgaccgtcttgccgttcttgacgaagtggaaggtcggcatcgcctcgacctcgtaggccgcggtgacttcctgttgggagagaggaggaaacagcgtcatcagtacactgtaacggaaagggggaacccggtgaatcgctcgctagctgtcgggacaccgtgctcaccttcacttcgtccacgtccaccttcaggaagacgacctgagtgaacttcttgggcgtgttcgacgaacagtgggg

SEQ ID NO: 5004 - DNA, 415 bp, Zea mays
  Clone ID: LIB3061-059-P1-N6-B2
agaaatgtactttcttatttctgggaagccacaaacatcagacaaaaaactttattattgaactataactcataagaaatctaaaagagggcaccaccaatgatgggttgttggtagaatgctgttgggtttgtcaaagcaagttggttgaatggcagcaattgttgcagttgtaagagggtgccagcgttaggcgcagcgtgctggtagaacggcaacaattgtggttgtgtcaagaaggtagcagggctcacaccagctagctggctgaatggtagtagttgttgctgctgtaaataagcaggagagttcaaagctgtcagttggttgaatggaagaaattgctgggggtaggcagcagatagctggctgaatggtagttgtttgttgttgcaaataagaagcagagttcaat

SEQ ID NO: 5005 - DNA, 85 bp, Zea mays
  Clone ID: LIB3061-059-P1-N6-B3
ggtcaaccagactgaattaaaaggaaaccagtcttttgccaggtatacataacaatattagtcagcacttcaaatttgaaagttt

SEQ ID NO: 5006 - DNA, 524 bp, Zea mays
  Clone ID: LIB3061-059-P1-N6-B4
acacaacatagccaacatgcaaatcattttagaactgaccagatgcagaggcaggaattctcgaggcgggctacacaagtgtgcaccgtgcactgcaatgcccaacaacaagattgtagcagcaaacatggaagagaaagggcgcggggggcaaggcagcagttccgcatgacgaggttaccgcggtttacaatcttcctgatacccaaccgtagggaaccccccctagatcttgtcgagcttgtctgccttcaccaccggattagccttggcaatggcgtccctggcagcagtccggtagtcgaacttgcagtcgtgcttgtcggagtagcggtggagtgcgcagtacaagttcccacaccggcagttgaatcccgtaagtccaaccctcttcctgcaggcgctgcaccggttcggccctaccttccccctttggagatcgccgccaccccctcgctgggtccggcaacatcagcgggctgttgcacgttcattgtttgcaactcaacttgggcaacagctac

SEQ ID NO: 5007 - DNA, 445 bp, Zea mays
  Clone ID: LIB3061-059-P1-N6-B5
agaaatgtactttcttatttctgggacgccacaaacatcatccaaaaaacttcattattgaactataactcataagcaatctaaaagagggcaccaccaatgatgggttgttggtagaacactgttgggtttgtcaaagcaaggtggttgaatggcagcaattgttgcagttgtaagaaggtgccagcgttaggcatagcgtgcaggtagaacggcaacaactgttgttgtgtcaagaaggcagcagggctcacatcagctagctggctgaatggtagtagttgttgctgctgtaaataagcagcagagttcaatgctgctagttggttgaatggaagaaattgctgggggtaggcagcaactagctggctgaatggtaaattgttgttgcaaataagcagcagagttcaatgcagccaagttggttgaatggaagaaactgatg

SEQ ID NO: 5008 - DNA, 477 bp, Zea mays
  Clone ID: LIB3061-059-P1-N6-B6
tccaccaacgaggcgatgctggtcatcgaggcctaccgcacgctgcgcgaccgcgggccctacccggccgaccaggtcgtcaaggacctcgccggcgccttcgccttcgtcgtcttcgacagccgctccggcgccgtcttcgccgccctcggcgccgccgacgccgggggagcgccggtgccgctgtactggggcgtcgcggccgacgggtccgcggtgatcaagcgacgaccgggacctggtcaagcgcggctgcggcaagtcctacgcgcccttccccgcgggctgcatgttccacagcgacggagggctcaagagcttcgagcaccccatgaacaggctcaaggccatgccgcgcgtcgacagcgagggcgccatgtgcggcgccaccttcaaggtcgacaccttcaccaagaatcaactccatgccccgtgttggcagcgccgccaactgggccgcctgggacgaagccatct

SEQ ID NO: 5009 - DNA, 69 bp, Zea mays
  Clone ID: LIB3061-059-P1-N6-C1
ttttttttttttttttttttttttttttttttttttttttttttttttttttttttttgtttttttttt

SEQ ID NO: 5010 - DNA, 443 bp, Zea mays
  Clone ID: LIB3061-059-P1-N6-C10
aaaaaaaaaaaaaggaccttaaaaattggggggccccaaaaaaaaaaaaaaaaaaacttaaagagggaaccaaaaccaaaaagcaattaaaaaaggggcccccccaaaggggggggggggggaaaaaacgggggagtttggaaaaaaaaggggggggaaggggaaaaatgggtgcagttgaaaaagggggccaacgttagggaaagggggcagggaaaacggcaacaactgttggggggtaaaaaagggaaaagggctaaaaaaaactagcggggtgaaggggaaaagttgggggtgctgaaaaaaaacgggaaaattcaatggcgctaggggggaaaaaggaaaaaaaaggggggggggggcaaaaacaagcggggcgaaaggaaaaggggggtgcaaaaaaacggcaaaatccaatgcccccagtggggtgaaaggaaaaa

SEQ ID NO: 5011 - DNA, 443 bp, Zea mays
  unsure (1)..(443): unsure at all n locations; Clone ID: LIB3061-059-P1-N6-C3
attattggaacctataactcaataagaaatctataaagagtggcccaccaccaatggatgtggttggttgggtaggaatgcctgttggggtttggtcataagcaaggttgngttgatatgggcagcaattggttggcatgttgtaaggaggggtgcccagcggttagggcccagcgtgctggtagaacgcaaaattgtggttgggtcaagaaggtagcagggctcacaccagctagctggctgaatggtagtagttgttgctgctggaaataagcagggagaggtcaaaggctgcagttggttgaatggaagaaattgctgggggtaggcagcagatagctggctgaatggtagttggntgttgttgcaaataagaagcagagttcaatgcagctaggttggttgaatggaagaaactgttgttgctgagagtaggcagcaag

SEQ ID NO: 5012 - DNA, 480 bp, Zea mays
  Clone ID: LIB3061-059-P1-N6-C5
atcccgcagctcatggagatggtggaggacgtgcagatcgttctgctgggcacgggcaagaagaagttcgagcgcatgctcatgagcgccgaggagaagttcccaggcaaggtgcgcgccgtggtcaagttcaacgcggcgctggcgcaccacatcatggccggcgccgacgtgctcgccgtcaccagccgcttcgagccctgcggcctcatccagctgcaggggatgcgatacggaacgccctgcgcctgcgcgtccaccggtggactcgtcgacaccatcatcgaaggcaagaccgggttccacatgggccgcctcagcgtcgactgaacgtcgtggagccggcggacgtcaagaaggtggccaccacattgcagcgcgccatcaaggtggtcggcacgccggcgtcgaggagatggtgaggaactgcatgtccaagatctctcctggaagggccctgcaagactgggagaacgtgct

SEQ ID NO: 5013 - DNA, 550 bp, Zea mays
  unsure (1)..(550): unsure at all n locations; Clone ID: LIB3061-059-P1-N6-C6
ccaaacatcctttttccctatatattattcctttccatttcaatggttcattcaggtcattgctcacactgccacccatggtgatgggtgacactccgttactcatcgccgctaaacgagtgaactagctatagccctataggtagctagtcagcggctccattacattattactacagtacatagtttcctcagtagtagacaccgccggcagctgcgttgcaagggcagggacctggctgctgcagctgcagaccgcacatcgccgtcagctgctgcgctacctgggccgccatcagcgccgcgagctcgccctgcggctgctgctgcaggaaggactgcaggaccacaccgtatgtcgcctggtaccggtgcagcggctccacctgcctgatctggtggcagcactgctgctgcagcgcctggcactgtggcgagccgtanggcgtcgccgccgggctgcactggtgcctcaggaactcgacgcactggcccaggaacgggctgccgacgctgccgacgccgnaggatccgaactgctggcacgggc

SEQ ID NO: 5014 - DNA, 381 bp, Zea mays
  unsure (1)..(381): unsure at all n locations; Clone ID: LIB3061-059-P1-N6-D11
aaaaaaaaaaaaaaaaaaaaaaaaaaaagggtgggttttttttttttttttttccaaaaaaaaaaaaaaaaaaaaaaataaattttttttttccaaacccccggggggggggggggggttttttttttttattaataaaaaaaaaaaaaaaaaaaaaaattaactcctccccccccccccaaaggagggaggggggggaaagggggttgcccccccccccccccccctcttttttttttttttttgtgggggggggcggcgcgcccaaaaaaaaaaaaaaaaaaaaaaaaggagggggnnnttntngggnttttttttttaaaaaaaacaaaaaaataaaaaaaaaaaaaaaaaaaanaaaaggcgggggggggggggggg

SEQ ID NO: 5015 - DNA, 387 bp, Zea mays
  unsure (1)..(387): unsure at all n locations; Clone ID: LIB3061-059-P1-N6-D12
ccccccccccccctttttnttttttttgaaaaaaaaaaaaaaanngggggggggggggcccccccacccccccccccccccccccccccccccccccgcgcggggggggggggggggagaaataaaataatattattattttttnnnnnnnnnnnaaaaaaaaaaaaaaaaaaaaaaagggggggggggggggggggcgggggccccgacgccacaaaaccaaaaaacanaagggnnnnggggnttttccccccccccccccccccccccccccccccncccgnggggggggggggggggggggtgtttttttatattnataaaaaccccccccccccccccncctctttttttttttttttttttcttcccccccccccccccccc

SEQ ID NO: 5016 - DNA, 537 bp, Zea mays
  Clone ID: LIB3061-059-P1-N6-D2
gaaaataaaaaagtaaaaggataaagaaaacaaattcctgcatgcatcaaactgactattcttcatgtcacttgccgcatgacggccaagttctctgtttccatttttttactcctctcttgtaacaaactaccccactgtacagtagtagccgcatgcacaaaaattaccgcagtaacagtgaaaaacacccactgcatcatctgccacctgtctctgtctccttgttctctttaaccgctcgatcgatctcttattacccttcacgtgccgttttcaccgcatcgattcaaccactccgtgaagaccccaagcttttgagggttcttattaattaccctaacgaatcaataaataaccatatcaccaccaatattttttttactgtaacatctaagagggcgaccactgtaactagcgcagcaacgaatggagaaatgggagggtgggcaacagcgacgacgacacgacatggatcgaggggtggctacgacctgcatgaagaattggagaatcgccggaaatagaaggaagggg

SEQ ID NO: 5017 - DNA, 414 bp, Zea mays
  Clone ID: LIB3061-059-P1-N6-D3
ggttggtgtgtttcatcatcaatttctactctcctttccacaatacaaatgccatccacggccatagttggtttcgaattacatgcatacatacatcacacacggcctcactcatcaaaacaaaacaataaaataaataaacaaataaataaatagtttcaagaactgcagctacgtctatgtgcgtggccacctttgcacgacactgacccggtcacaaacgcacgcacgcactctgcgtgcgctctgctggcggctgctgccctgcccactcaaaattgtgctgctatatgttggcaaggtctacccgacgttcgccacaaatggcaccagcccgcttgtgatccctcttgcgcccaagcgcgcaggtatcaagaactcgcccaagcagcagccggggtgttctgcagcgct

SEQ ID NO: 5018 - DNA, 408 bp, Zea mays
  Clone ID: LIB3061-059-P1-N6-D5
agaaatgtactttcttatttctgggaagccacaaacatcagataaaaaactttattattgaactataactcataagaaatctaaaagagggcaccaccaatgatgggttgttggtagaacactgctgggtttggcaaagcaagttggttgaatggcagcaattgttgcagttgtaagagggtgccagcgttaggcgcaacgtgctggtagaacggcaacaactggggttgggtcaagaaggtagcagggctcacaccagctagctggctgaatggtagtagttgttgctgctgtaaataagcaggagagttcaatgctgctagttggttgaatggaagaaattgctgggggtaggcagcaggtagctggctgaatggtagttggtgggtgttgcaaataagaagcaga

SEQ ID NO: 5019 - DNA, 484 bp, Zea mays
  unsure (1)..(484): unsure at all n locations; Clone ID: LIB3061-059-P1-N6-D6
agaaatgtactttcttatttctgggaagccacaaacatcagacaaaaaactttattattgaactataactcataagaaatctaaaagagggcaccaccaatgatgggttgttggtagaatgctgttgggtttgtcaaagcaagttggttgaatggcagcaattggtgcagttgtaagagggtgccagcgttaggcgcagcgtgctggtagaacggcaacaattgtggttgtgtcaagaaggtagcagggctcacaccagctagctggctgaatggtagtagttgttgctgctgtaaataagcaggagagttcaaagctgtcagttggttgaatggaagaaattgctgggggtaggcagcagatagctggctgaatggtagttggttgttgttgcaaataagaagcagagttcaatggcagctagttggttgaatggaagaaaactgtntgttgctgagagttaggcagcaagggttgctagcac

SEQ ID NO: 5020 - DNA, 484 bp, Zea mays
  unsure (1)..(484): unsure at all n locations; Clone ID: LIB3061-059-P1-N6-D8
ctagaaatgtactttcttatttctgggaagccacaaacatcagacaaaaaactttattattgaactataactcataagaaatctaaaagagggcaccaccaatgatgggttgttggtagaacgctgctgggtttgtcaaagcaagttggttgaatggcagcaattgttgcagttgtaagagggtgccagcgttaggcgcaacgtgctggtagaacggcaacaactgtnggttgtatcaagaaggtagcagggctcacaccagctagctggctgaatggtagtagttgttgctgctgtaaataagcaggagagttcaatgctgccagttggttgaatggaagaaattgctgggggtaggcagcaggtagctggctgaatggtnagttgttggtgttgcaaataagaagcagagttcaatggcagctagttggttgaatggaagaaactgctgttgctgagagtaggcagcaaggtttgctagcac

SEQ ID NO: 5021 - DNA, 218 bp, Zea mays
  Clone ID: LIB3061-059-P1-N6-E1
ggaaatgtaacttcttatttctaggaggccacatacatcagccaaaaaacttcattattgaattacaactaataagcaatctaaaagatggcaccgccaatgatgtgttgttggtagaaggctgctgggtttgtcaaagcaagttggacaaagggcagcaactgttgcagttgtaagagggttgcggggttagccacaaactgctggtagaacggaag

SEQ ID NO: 5022 - DNA, 456 bp, Zea mays
  Clone ID: LIB3061-059-P1-N6-E10
cgacttgaataatcttatattgactctccaaaacgggccaattttcgtgcacaaacgggcagaaccacgttacgcactaaattccatcttttcgctttgaaatggggtagcgatacatcacagcaggttcttgggtcacggcgccacaaaatgcacatgccggtcatgtctcatggattagtcagcaagtggggaaaaagcttagccatcacaaggcaaccggtcctcctaaaactccattgtacatatgagatattccctctcgaaaatcaggaactcctgcaactgctgctggctgaacaaatgcatcattccagactcggctgaaccaactaactcaacaagttcgtcacatttatctagagagtaatctagatcatcaccagccgcggagagtgcgatacatgcctgcatagatcttagaattgtttcaggaaggcagcacctccgacacag

SEQ ID NO: 5023 - DNA, 210 bp, Zea mays
  Clone ID: LIB3061-059-P1-N6-E3
aaaaaactagaaaaaaaaaagaatggaaacgaaaaaaaaaaaaaaaaaaaaaaaaaaaaaaaaaaaggaaaaaagggaaaaaaaaaaaaaaaaaaaaaaaaaaaaaaaaaaaaaaaaagaagaaaaagaaaaaaaaaaaaaaaaaaaaaaaaaaaaaaacttaaaaaaagacagccggaacggggaaaaaggtgagtctaaaattttaaa

SEQ ID NO: 5024 - DNA, 463 bp, Zea mays
  Clone ID: LIB3061-059-P1-N6-E8
aaaaccccaatcaatatattgattatttctaggaaacacatgcccctatgagggccccattatcgagtccatctcatatgtaatctaaaagatggcccccccaacgatgggttgctgccacaacaaggcagggttcatcaaaaaaaactggttgtatggcaacaattgttgctgctgtaggaaggcaaccaccaatgggttagccaccgctaggggattaagtaactgttgtcgctgttgtaggtccccaccaaagttcgacacaatcagttggttgaatggaaccagctgttgcaagtaggcagcagggtttgccacagctagctgagtcaaagctggtacaatctgttgcaacaactgttgttgcaggtatgtaggtgcattaaccacagcgagagggctagatgaaatcaattgttgctgttgtaggtaggcggcagggttcaccatggctagttgactg

SEQ ID NO: 5025 - DNA, 283 bp, Zea mays
  Clone ID: LIB3061-059-P1-N6-E9
aaatctcaaccaatatattgattatttctaggaaacacatgccggtatgagggcaccattatcgagtacatctcatatgtaatctaaaagatggcacctccaacgatgggttgctgcctcgacaagacaggattcatcaaagagaaccggttgtatggcagcaattgttgctgctgtaggaaggcagcgaccaatgggttagccactgccaatggattaagtaactgttgtcgctgttgtaggtacgcaacagagttcgacatagttagttggttgaatggaa

SEQ ID NO: 5026 - DNA, 471 bp, Zea mays
  Clone ID: LIB3061-059-P1-N6-F10
aaaataaaaaaaatgttttttaataaattgttaaaaacaaaaaaaaaaatgtaagggattggattgcataaaacggggaaaggaaaaaaaacgaaagggatacccaattcttgaaataaaaaaacaaataaagtgaaccaagccgcaaatataatttagggaaagggagggggacaagccgcccatcgtaggttgggtttgtgggggagaaaaaaatgacacccaagtttgagttggttgttcaaaaccaaaaaaagaaaaaggctggtggtggattgcttgctgaattaaggggggaaccacctgacaaaaagggtgggaaaatggttggggaaaaaactggcaaaaacctggaaaaaattggggggaaaaaaacaaaaaaataacgggggggattaaacgcccccgaagaaaaggaaaaaaacaagggcaaaactggcgccaaaaaaaataaagacaaattttccaaaa

SEQ ID NO: 5027 - DNA, 581 bp, Zea mays
  Clone ID: LIB3061-059-P1-N6-F11
atcgagataaatctcaatcaatatattgattatttctaggaaacacatgtcggtatgagggcaccattgtcgagtacatctcatatgtaatctaaaagatggcacctccaacgatgggttgctgcaaggcagggttcatcaaagagaactggttgtatggcagcaattgttgttgctgctgcaggaaggtagcgaccaatgggttagccactgccaatggattaagtaactgttgtcgctgttgtaggtacgcagcagagtttgacacagccagttggttgaatggaagcaactgttgtaagtaggcagcagggtttgccacagctagctgagtcagagctggtacaatttgttgcagcaactgttgttgtaggtacgtaggtgcattgcccaccgcgagcgggctagatgaaagtagttgtaggtagacggcagggttcaccatggctagttgactgagcactggcataaactgttgcagctgtttgttgttgctggtatgcagctacgttcgccagagcaagtggggttggatgcaagcagctgctgttgcaagtaggtgacagggttcaccacggcta

SEQ ID NO: 5028 - DNA, 368 bp, Zea mays
  Clone ID: LIB3061-059-P1-N6-F4
acacatctggatcttttaatcatttcgggacttggatgaaaatcaaagttgagttggtattactactttacataggcacgagcacaagtgcatgatatgtacaaccgtcgatgggtccacagtccccagatgatacgagctcgctcacagggacatggggcagcagacctcggggggctttgctatttgatctttaccatcaagcactgggtccccgagccatcgggctccacctcgccgagttgtagctgctgcaagcgctgatgctcgactccctcattttcatctcagatataccactgttgcaaatgtttgcaaacgctctcatgtacttcatgccggactgggtaagtgaaccccactgggac

SEQ ID NO: 5029 - DNA, 399 bp, Zea mays
  Clone ID: LIB3061-059-P1-N6-F5
caaacaacaaacttattcatgatttgtcatagttctgggtagtacgcacacacaacacaaccggtccattattaaaccaacactgacacgaacagcagatacttcgacaacctccatatggagagggcaccagacgacgcaggcacatcggcagcttaaacgacccatgacttactgaccaccacggagacggagcacaaggtggagggtgctctccttttggatgttgtagtctgctagggtgcggccatcctccagctgtttgccggcgaagatcagacgctgctggtccggggggatgccctccttgtcctggatcttcgccttcacattgtcgatggtgtccgagctctcaacctccagggttatggtttttccagtcagggtcttcacaaagat

SEQ ID NO: 5030 - DNA, 414 bp, Zea mays
  unsure (1)..(414): unsure at all n locations; Clone ID: LIB3061-059-P1-N6-F9
acacccgggttttttttttttagtaatatataggatgacagatatagttgatccaaagcaggtaatggaaatacaaaggttcataaaaaggtttgctgcaacttctagggcagcttataacagtacatactagcagcacaaatggttaaggaacaggggggggggaaacgcatcttgcgcccgaacgctcgacttcctgtcaagcgggtcttaccataccaaggttacacgatccatcnatgcaataccattggaggttcttgttttgtagacgcaaacccagccgatctatatgacagacccatcgttgatgggtgcattcttaaagatcaccacnattccagaccttatgtaaaacccttctatggggggaaaaggcttttggaagcccttactggtggggatcaccacatt

SEQ ID NO: 5031 - DNA, 359 bp, Zea mays
  Clone ID: LIB3061-059-P1-N6-G12
ggttaaaaaaataataataaattgatgtttttttttttaaaacaaaattttttttttttaattattaggaaaaacaatttttttttttaaaaaaaaaattatttttttttttggttaagggttttttgggggggggggggggggacagccccccctcctggggggggttggtggccgctcaaaaaatcccatccccccttgggggggggggggggacccccccccccccccgggggggggggggggccccccccgggattggggggccccccctttgtcgaattggggggggaaatttttggggccaaatcccccaaaaaaatgaaaaacgtgggggggagagcgcggggggaattggg

SEQ ID NO: 5032 - DNA, 454 bp, Zea mays
  Clone ID: LIB3061-059-P1-N6-G2
cgagataaatctcaaccaatatattgattttttttaggaaacacatgccggtttgagggccccattatcgagtacatctcatatgtaatctaaaagatggcccccccaatgatgtgttgttggtaaaaggctgctgggtttgtcaaagcaagttggacaaagggcagcaactgttgcagttgtaagagggttgcggggttagccacaaactgctggtagaacggaagcaattgttgttgtttcaaaaaggaagtggggcttgttgtacctagctggccaaatggtagtagtatttgctgctggaaataagcagaggggttcagtgcggccaattggttaaatggaaaaaattgttgctgctgagagtaggcagtacctagctggctgaatggtagtagttggttgttgttgtaaataagcagcagggttcagtgtaaacagttggttgaatgga

SEQ ID NO: 5033 - DNA, 458 bp, Zea mays
  Clone ID: LIB3061-059-P1-N6-G4
ctagaaatgtactttcttatttctgggacgccacaaacatcatccaaaaaacttcattattgaactataactcataagcaatctaaaagagggcaccaccaatgatgggttgttggtagaacactgttgggtttgtcaaagcaagttggttgaatggcagcaattgttgcagttgtaagagggtgccagcgttaggcatagcgtgcaggtagaacggcaacaactgttgttgtgtcaagaaggcagcagggctcacatcagctagctggctgaatggtagtagttgttgctgctgtaaataagcagcagagttcaatgctgctagttggttgaatggaagaaattgctgggggtaggcagcaactagctggctgaatggtaatttgttgttgcaaataagcagcagagttcaatgcagccagttggttgaatggaagaaactgatgttgctgagagta

SEQ ID NO: 5034 - DNA, 424 bp, Zea mays
  Clone ID: LIB3061-059-P1-N6-G5
aatctagaaatgtactttcttatttctgggaagccacaaacatcagacaaaaaactttattattgaactataactcataagaaatctaaaagagggcaccaccaatgatgggttgttggtagaatgctgttgggtttgtcaaagcaagttggttgaatggcagcaattgttgcagttgtaagagggtgccagcgttaggcgcagcgtgctggtagaacggcaacaattgtggttgtgtcaagaaggtagcagggctcacaccagctagctggctgaatggtagtagttgttgctgctgtaaataagcaggagagttcaaagctgtcagttggttgaatggaagaaattgctgggggtaggcagcagatagctggctgaatggtagttggttgttgttgcaataagaagcagagttcaatgcagc

SEQ ID NO: 5035 - DNA, 555 bp, Zea mays
  Clone ID: LIB3061-059-P1-N6-G9
atctatacacaaacttacacatatatattagaactatactactttactggtcttaatattattggtggtgtatcatacaatactttattgtcgtttttagagtttaagaaagggaagacgaacaacctcaacctttaaaaagttcacagtacctattcttcttattggtgaaacgatagaataccaacggcgaaagaaaacatcataaatggcagatgaagcctccgaagaaaccggcagcccccactgcgagggtgtccagccggccgggcccggcggcgatcagctgtggttgtggtcgttgtgcggcgctgccggtgccgccatcgcctgctgcctgataaccgtgtcctcgagggattggaggttgcaccgaacgatggtgtccacgaagatgcgcgtctcctccacggtgttccccggcggcacgtccaccacataggactcgacgaccatggtgagcggcccgccctctgaggccgcctcgtgcacggtggtcacggagcggtagttggcgaggcggtggtcgccgcccaggatccggaagctgatcac

SEQ ID NO: 5036 - DNA, 579 bp, Zea mays
  Clone ID: LIB3061-059-P1-N6-H10
atcgagataaatctcaatcaatatattgattatttctaggaaacatcatgtcggtatgagggcaccattgtcgagtacatctcatatgtaatctaaaagatggcacctccaacgatgggttgctgcaaggcagggttcatcaaagagaactggttgtatggcagcaattgttgttgctgctgcaggaaggtagcgaccaatgggttagccactgccaatggattaagtaactgttgtcgctgttgtaggtacgcagcagagtttgacacagccagttggttgaatggaagcaactgttgtaagtaggcagcagggtttgccacagctagctgagtcagagctggtacaatttgttgcagcaactgttgttgtaggtacgtaggtgcattgcccaccgcgagcgggctagatgaaagtagttgtaggtagacggcagggttcaccatggctagttgactgagcactggcataaactgttgcagctgttgttgttgctggtatgcagctacgttcgccagagcaagtgggttggatgcaagcagctgctgttgcaagtaggtgacagggttcaccacggct

SEQ ID NO: 5037 - DNA, 579 bp, Zea mays
  Clone ID: LIB3061-059-P1-N6-H11
aacaattagatgtcacaaattattcagcatgatgattcatgaagcccaatattttccataacacacgacgggcatacagttgaagcttgcacaacacatgacagcgactagagcgcccagccactctagcgcagctgaaacttaaccataacagactgactggtaactattgttgctgatgctgcatgtaggcatctaccaatgggttagccactgccaatgaattaagtatctagtctggagtggtgatggtcccccacaaagttcgccacaacctgcttggcgaatggaagcagctgatggaagtacgcaggacggtttgccacacctagctgagccaaagctggtacaatttgctgcatcatctggagatgtacgtacggacgtgcattgcccaccgtgagcggcctacatgaaagtagttgtaggtagacggcagggttcaccatggctagttgactgagcactggcataaactgttgcagctgttgttgttgctggtatgcagctacgttcgccagagcaagtgggttggatgcaagcagctgctgttgcaagtaggtgacagggttcaccacg

SEQ ID NO: 5038 - DNA, 300 bp, Zea mays
  Clone ID: LIB3061-059-P1-N6-H2
aaaaagaaaccaccacgcgggggaaggcaaacagacggaaccgaaacaggggaagacagcacagataagcatgccgaggcaaccaggtacctacccaagctggcttgtcgccctatgacaaaggttaacgcccgagggttacagaaagtgcaacacaacacgagcacacaggcgcccggcacgccagtggtacgggcaagtagcgacacagcaccaggggctgacaaagtcatgagcctggacacatcaacgcgaagagtccacatctggacccaaagagcactcagagcgcaaggcagg

SEQ ID NO: 5039 - DNA, 546 bp, Zea mays
  Clone ID: LIB3061-059-P1-N6-H4
aaaatctggaaatgtaacttcttatttctggttggccacatacatcatccaaaaaactttattattgaattacaactaataagcaatctaaaagagggcaccaccaatgatgtgttgttggtaggaggccgctcggtctgtcaaagcaagttggacaaagggcaacaattgttgtagttgtaagagggttgcggggttagccgcaaactgctggtagaaaggcagcaactgttgctgtgtcaagaaggaagcacggtttgctgcagctagctggctaaatggtagtagtatttgctgctgcaaataagcagcggggttcagtgcggccaattggttaaatggaagaagttgttgttgctgagagtaggcagtagctagctggctgaatggtaatagttgttgctgcaaataagcagcagggttcagtgtagacagttggttgaatggaagaaattgttgttgctgagagtagggagaaaggtttgccagagctacttggttgatcacaggtagcacgagttgctgcagctgctgtgccctgatggt

SEQ ID NO: 5040 - DNA, 333 bp, Zea mays
  unsure (1)..(333): unsure at all n locations; Clone ID: LIB3061-059-P1-N6-H7
atcgagataaatctcaatcaatatattgattatttctaggaaacacatgccgctatgagggcaccattatcgagtacatctcatatgtaatctaaaagatggcacctccaacgatgggttgctggcacaacaaggcagggttcatcaaagagaactggttgtatggcagcaattgttgctgctgtaggaaggcagcgaccaatgggttagccaccgctagtggattaagtaactgttgtcgctgttgtaggtacacagcagagttcgacacaancagggggctgaatggaagcagaagaagcaagtgggcatcagagttggccacagctagct

SEQ ID NO: 5041 - DNA, 568 bp, Zea mays
  Clone ID: LIB3061-059-P1-N6-H9
agaaatgtactttcttatttctgggacgccacaaacatcatccaaaaaacttcattattgaactataactcataagcaatctaaaagagggcaccaccaatgatgggttgttggtagaacactgttgggtttgtcaaagcaagttggttgaatggcagcaattgttgcagttgtaagagggtgccagcgttaggcatagcgtgcaggtagaacggcaacaactgttgttgtgtcaagaaggcagcagggctcacatcagctagctggctgaatggtagtagttgttgctgctgtaaataagcagcagagttcaatgctgctagttggttgaatggaagaaattgctgggggtaggcagcaactagctggctgaatggtaattgttgttgcaaataagcagcagagttcaatgcagccagttggttgaatggaagaaactgatgttgctgagagtatgcagcaaggtttgctagcacaagttgttgtagttgttgtgccctgatggtttgtgccaccaaatggaccaaaggtaactgctgtaatagggctgacggttgttggaggaaca

SEQ ID NO: 5042 - DNA, 369 bp, Zea mays
  Clone ID: LIB3061-060-P1-N6-A2
atagagaaacaaaaaaaaagaaaagtaatgataaagggaaaaaaaaaaaaattaactgaaaaaaataaaaaagcaaaataagtttttctaaaaaaaagataaaaaaaaaaaatgggcctaaccaaaaaaaccagttaaaaaaaggtaaaactaaaatataaaattatgcttaaaaaaaaaaaaaaattatgggtgcaaaaaaaaaaagccaccccaatatataaaaatacatggtttaaaaaattttgaaaaaaacccaagtgaaaaaaaaaataaaaaattgggttttaaaaaaaaagtttaaaaagaaatggaaatttaaattttcaatgttaaaaaaataattttgcctggaaataaaaccttttt

SEQ ID NO: 5043 - DNA, 480 bp, Zea mays
  unsure (1)..(480): unsure at all n locations; Clone ID: LIB3061-060-P1-N6-A5
agaaatgtactttcttatttctgggaagccacaaacatcagacaaaaaactttattattgaactataactcataagaaatctaaaagagggcaccaccaatgatgggttgttggtagaatgctgctgggtttggcaaagcaagttggttgaatggcagcaattgttgcagttgtaagagggtgccagcgttaggcgcagcgtgctggtagaacggcaacaactgtggttgtgtcaagaaggtagcagggctcacaccagctagctggctgaatggtagtagttgttgctgctgtaaataagcaggagagttcaatgctgtcagttggttgaatggaagaaattgctgggggtaggcagcagatagctggctgaatggtagntgtntgttgttgcaaataagaagcagagttcaatgcagctagttggttgaatggaagaaactgctgttgctgagagtaggcagcaagggttgctagcac

SEQ ID NO: 5044 - DNA, 577 bp, Zea mays
  Clone ID: LIB3061-060-P1-N6-A7
agaatctggaaatgtaacttcttatttctggttggccacatacatcatccaaaaaactttattattgaattacaactaataatcaatctaaaagagggcaccaccaatgatgtgttgttggtaggaggctgctgggtttgtcaaagcaagttggacaaagggcaacaattgttgtagttgtaagagggttgcggggttagccgcaaactgcttgtagaaaggcagcaactgttgctgtgtcaagaaggaagcacgacttgctgcagctagctcgctaaatggcagtagtatttgctgctgcaaataagcagcggggttcagtgcggccaattggttaaatggaagaagttgttgttgctgagagtaggcagtagctagctggctaaatggtaatagttgttgctgcaaataagcagcagggttcagtgtagacagttggttgaatggaagaaattgttgttgctgagagtagggagaaaggtttgccagagctacttggttgatcacaggtagcacgagttgctgcagctgttgtgccctgatggtttgtaccaatgactgcacaaagatagggctg

SEQ ID NO: 5045 - DNA, 431 bp, Zea mays
  Clone ID: LIB3061-060-P1-N6-A9
ctggaaatgtaacttcttatttctggttggccacatacatcatccaaaaaactttattattgaattacaactaataagcaatctaaaagagggcaccaccaatgatgtgttgttggtaggaggccgctcggtctgtcaaagcaagttggacaaagggcaacaattgttgtagttgtaagagggttgcggggttagccgcaaactgctggtagaaaggcagcaactgttgctgtgtcaagaaggaagcacggtttgctgcagctagctggctaaatggtagtagtatttgctgctgcaaataagcagcggggttcagtgcggccaattggttaaatggaagaagttgttgttgctgagagtaggcagtagctagctggctgaatggtaatagttgttgctgcaaataagcagcagggttcagtgtagacagt

SEQ ID NO: 5046 - DNA, 512 bp, Zea mays
  Clone ID: LIB3061-060-P1-N6-B11
cgagataaatgtcaatcaatatattgattatttctaggaaacacatgccggtatgagggcaccattatcgattacatctcatatgtaatctaaaagatggcacctccaacgatgggttgctgccacgacaaggcagggttcatcaaagagaactggctgtatggtagcaattgttgctgctgtaggaaggcagtgaccaatgggttaggcactgctagtggattaagtaactgttgtcgctgttgtaggtacgcagcagagttcgacacagtcagttggttgaatggaagcagctgttgcaagtaggcagcagggtttgccacagctagctgagtcagagctggtacaatctgttgcagcaattgttgttgcaggtatgtaggtgcattacccacaacgagagggctagatgaaagcagttgttgctgttgtaggtaggcggcagggttcaccatggctagttgactgagcgctggcagaaactgttgcaattgttgttgttgttggtatgc

SEQ ID NO: 5047 - DNA, 532 bp, Zea mays
  Clone ID: LIB3061-060-P1-N6-B12
aagaatctagaaatgtactttcttatttctgggaagccacaaacatcagacaaaaaactttattattgaactataactcataagaaatctaaaagagggcaccaccaatgatgggttgttggtagaacgctgctgggtttgtcaaagcaagttggttgaatggcagcaattgttgcagttgtaagagggtgccagcgttaggcgcagcgtgctggtagaacggcaacaactgtggttgtatcaagaaggtagcagggctcacaccagctagctggctgaatggtagtagttgttgctgctgtaaataagcaggagagttcaatgctgccagttggttgaatggaagaaattgctgggggtaggcagcaggtagctggctgaatggtagttgttgttgttgcaaataagaagcagagttcaatgcagctagttggttgaatggaagaaactgctgttgctgagagtaggcagcaaggtttgctagcacaagttgttgtagttgttgtgccctgatgttttgtgccaataaatg

SEQ ID NO: 5048 - DNA, 439 bp, Zea mays
  Clone ID: LIB3061-060-P1-N6-B3
ccacccaaaaaccttctttttggaagtttacctcataaccaatctaaaagggggcccccccaatgatgggttgggggtaaacccctgtggggtttgccaaaccaggtgggttgaagggcaccaattgttgcagttgaaagaggggcccagcgttaggcccaccgggcaggtaaaacggcaccacctgttgtggggtcaagaaggcaacagggctcacatcacctagctggctaaatgggggaagctgttgctgttgaaaataaccagcaaagttcaatgctgccagtgggttgaagggaaaaaattgctgggggtgggcagcacctacctgactgaagggtagttgttgttgcaaataaccagcagagttcaatgcacccagttggttgaatggaaaaaactgctgttgctgaaagtaggcaccagggttccctacccc

SEQ ID NO: 5049 - DNA, 579 bp, Zea mays
  unsure (1)..(579): unsure at all n locations; Clone ID: LIB3061-060-P1-N6-B4
aattaattgttttcgtgtctcttttaactttgttatcttctaaactttaaagcaggggataataatttttctatgttatatatttgatacctccatgtataaattatataatatttggtgtatgggatgaggcctccatatcagatttcatcctagggcccccaaaattcaggaacctcgctgtgcccatgcagtgtgggaaaagatgcgcgcttcctgtaatcctgtgtgctgacggcgtgcgtgcatatataagcaccgcggaacgacagagatttcaaattttgaaatggtcaaatctaacaccggatgttgtgaggaagaatctcagtgtcctcccaatagacaaatatggacacattgtcactgtgctacatcaaatggatctttcagttaccacacctttaccggaagttcgggcaaatccctaagtacgatccggaagtccaccaccttgaatcctncccctttcctcccttcttcttccctccaccaaaatccaattggagacatgcaccaacgcgacgtaaatccgagcgggaaagaatgacaccttggagagagggcttgaggaggggg

SEQ ID NO: 5050 - DNA, 380 bp, Zea mays
  unsure (1)..(380): unsure at all n locations; Clone ID: LIB3061-060-P1-N6-B6
gtacaagagatacaggttgtcttacaagttaatctttttatatttctatgtcaagccagacaagaggagctttgtgaatcctgcataaactttcccctgctccttcacgagagcagacaaccagacaaactagcttctaatgcacgggggcccctgaatcacaaaaaaaagctgttaatgcaacaatctgaacgagctacatttaaataaggccccacatacaaagatgacgacgaggaggagaaccaaaaggagcaaaaacaccactgaaccaatcctgtgcaccccctccgatacttctcaaggatggccctggcactctagtcacatggacgatgggctgcatgccatcacgaacatnctgcctcgtctactccgtg

SEQ ID NO: 5051 - DNA, 606 bp, Zea mays
  Clone ID: LIB3061-060-P1-N6-B7
ctctctcttcccccccctccccccccccttttttttttttaggtttttttttttttttttttcctagatctcaatgaatattgctcattgatccaactgtatctcttttacaatatctatccagatgtatctggttagactgctaaaattcccagtccagatttgtatgtaaactctgcaaaggaattattttcatctcaaaatgaatcttcccccaacccaaaaagaaaaagaaacttaacagttgacttctttgatgactggtatatattctactacctctgaacctttccctcatacaatgtgctcgaaagcagcctcgtgtgaggaaacagcttcaacaccatccaagaacatacagagatttgcaggctttctattgcaacatacactctctaacatacggatgtgagatattcacataccgctcccatatatacttgtaacggcgaatagccagcttcagccacggtttcatgttttccgttatagtgcacaacagcagcactctcaatcaaacggtcatctatgtctacatcatacccaagacccaagacatgccatcctgcggtctaggggctccaccaggccgtaaaatgtcaaaag

SEQ ID NO: 5052 - DNA, 355 bp, Zea mays
  Clone ID: LIB3061-060-P1-N6-B8
gagagaaaaagggacctgtttatattggggaaggcacaaacaaacgccaaaaaactttaaggggggaggaaaccccaaaaacagagcaaaaaggggccccccccatggtgggctgtgggaaaaaccccgggggggaggccaaaccaagggggggggaaggcaacaatcggggcagcgggaagagggggcccgcacaaggcccaccgggccggtaaaaccgcaccccccgggggggggccaaaaagggaacagggctcacaacaactacctgggtgaaagggggaagccgttgccgctggaaaaaaccagcaggcttcaatgccgcccggtgggtgaaaggaacaaaatgctgggg

SEQ ID NO: 5053 - DNA, 484 bp, Zea mays
  Clone ID: LIB3061-060-P1-N6-B9
ctagaaatgtcctttcttatttctgggaagccacaaacatcagacaaaaaactttattattgaactataactcataagaaatctaaaagagggcaccaccaatgatgggttgttggtagaatgctgctgggtttgtcaaagcaagttggttgaatggcagcaattgttgcagttgtaagagggtgccagcgttaggcgcagcgtgctggtagaacggcaacaactgtggttgtgtcaagaaggtagcagggctcacaccagctagctggctgaatggtagtagttgttgctgctgtaaataagcaggagagttcaatgctgtcagttggttgaatggaagaaattgctgggggtaggcagcagatagctggctgaatggtagttgtttgttgttgcaaataagaagcagagttcaatgcagctagttggttgaatggaagaaactgctgttgctgagagtaggcagcaaggtttgctagcacaa

SEQ ID NO: 5054 - DNA, 595 bp, Zea mays
  Clone ID: LIB3061-060-P1-N6-C10
agaaatgtactttcttatttctgggaagccacaaacatcatccaaaaaacttcattattgaactataactcataagcaatctaaaagagggcaccgccaatgatgggttgttggtagaacgttgttgggtttgtcaaagcaagttggttgaatggcagcaattgttgcagttgtaagagggtgccagcgttaggcgcagcgtgcaggtagaacggcaacaactgttgttgtgtcaagaaggcaacagggctcacatcagctagctggctgaatggtggtagctgttgctgttgtaaataagcagcagagttcaatgctgccagttggttgaatggaagaaattgctgggggtaggcagcagctagctgactgaatggtagttgttgttgcaaataagcagcagagttcaatgcagccagttggttgaatggaagaaactgctgttgctgagagtaggcagcaaggtttcctagcacaagttgttgtagttgttgtgccttgatgttttgtgccaacaaatgcaccaaaggtaactgctgtaatagggctgacggttgttggaggaacaagggtgataaaggtaagatgcctgctg

SEQ ID NO: 5055 - DNA, 460 bp, Zea mays
  Clone ID: LIB3061-060-P1-N6-C12
aataacaaaaaaccggccccagttctttttggcactggaaacattccaatttttattcctaatagtttttatcattttggaaacaaacccccgagatttttgggagcccacgtaagagctccgttattttggatttgcccccccacagaacaaatgctggcccttgcacgtggcgccaactaatttttttttttttaaccctggtagctagtactggtcccccccggaaaaaatgctccactccgggggctccgacagccggcacattatgggaaaccccggggggtactcccgggcctttgaaagcctaacgcggccaatccttggcccgggggtgccgggacaacacgggggatacatctgcgttgggtatccctttcctgcccggttgaaggggtagtaataccccccttgttctttttttttttcttggggggggggtttttgtttccccccccat

SEQ ID NO: 5056 - DNA, 385 bp, Zea mays
  Clone ID: LIB3061-060-P1-N6-C2
ggggaaaaagaccatggggcagggcaaaacagttttggaaatgctggcccctgcccaaacagggatttttgctgctcaggccggggggcaaattaataatccaaaccttaggccgacgtacgagtccggatttttgctggtcggactaaacagttttgtcgtcagggccccccaaaacaaacaaaccaaccaaccaaccctggatgtgtttttgaaatgagatgagatgggttattcagtacaacgggatcgatgcgcttccttaaccgaggggggctttactggatgcaagacgggttagtcattagcggtctcctccgatcaggggtttagcaaaaactacccgagcagcagggcatgtgcctccaggaatgcgaattaattt

SEQ ID NO: 5057 - DNA, 441 bp, Zea mays
  Clone ID: LIB3061-060-P1-N6-C5
ctcaacctggcaacattaaaactcgaatagcatggcccacaggaaatcgatggcttttgccagcagtgatgacatgagaactgcaagtcgatgtaaaacgcaatgcaaagggattttgggatttggatccgacacttcaaagctccataactcactagaactgaatccaaaaataatcccagcacaggcaatcagtagctggggccccagaacgaccacttcttggctggctttccagatgcaaagcacagggtaccttctggaagttctggctgctcaaatggagaacacaatgttttcgcagctccaagttccccttttggccgagtttttacatctttctaaattccctcctcatcacaccatggagccaagatcaactttttgttattcagagcagttgtgaattcatcccaagtgttcacgacatgaacacaggca

SEQ ID NO: 5058 - DNA, 447 bp, Zea mays
  unsure (1)..(447): unsure at all n locations; Clone ID: LIB3061-060-P1-N6-C6
gcaacacaagtttcattctattattatatgaacaaggcaacaggttgcctcacaagtcacaacttttagatttctatgtcaagccagacaagaggagcattgtgaatcctgcataaactttcccctgctccttcacgagatcagacaaccaggcaaactagctactaatgcactgatacccctgaatcacaaatagtagctgctaatgcaacaatctgaacgagctacatttccataatcctacaaatacaaagatgacgacgaggaggagaaccaaaaggagcaaccgcaccactgaaccaatctgtgcagcctctcctttccttctcaaggatggcactgccactctagtcacatggacgctgtgctgcatgccatcacgaacatcctgcctcgtctnctccgtgcgccgctgcctgagattgcctccatgatgcagctcaccat

SEQ ID NO: 5059 - DNA, 437 bp, Zea mays
  Clone ID: LIB3061-060-P1-N6-C9
gcgtatagtgcagcaacccattatttactttatttgcctccacctacattcatgtatatcatccagtgtacacaaggcactcaaggccacaccataccaactcacaaacaagtatagtactgctagctagtctacagtctgcgccgtgcacggataatttcatagttcatactgctcagcgcacgctcacaactcacccatgcgctacgcgaggagccccctggcgatgcggccgtctgcgccctgaggaaagaagcctccatgctgtgcggagttaccggtgccgtacacgatgccgaggatctcctccggcgtccggtcgtatgcgagcgacatgtggtcgccagcgatgatgttccccacagtcagtccctcggtcccgagctcgggcgccaccaccaggccctagtccttcacgcccctacttcgcagcgagt

SEQ ID NO: 5060 - DNA, 483 bp, Zea mays
  Clone ID: LIB3061-060-P1-N6-D12
agaatctagaaatgtactttcttatttctgggacgccacaaacatcatccaaaaaacttcattattgaactataactcataagcaatctaaaagagggcaccaccaatgatgggttgttggtagaacactgttgagtttgtcaaagcaagttggttgaatggcagcaattgttgcagttgtaagagggtgccagcgttaggcatagcgtgcaggtagaacggcaacaactgttgttgtgtcaagaaggcagcagggctcacatcagctagctggctgaatggtagtagttgttgctgctgtaaataagcagcagagttcaatgctgctagttggttgaatggaagaaattgctgggggtaggcagcaactagctggctgaatggtaattgttgttgcaaataagcagcagagttcaatgcagccagttggttgaatggaagaaactgatgttgctgagagtatgcagcaaggtttgctagcac

SEQ ID NO: 5061 - DNA, 512 bp, Zea mays
  Clone ID: LIB3061-060-P1-N6-D3
gcaacaaagaggaccacatgagttgtattaaaagacatgactagtctactgagccggcccttatataacaagacatttgcaaacttctaaggcacagttggaaatctagtttcatactgaacaaacgacagtcataagccataacctcaatttccatatttcttcggttctctagagaacagtcttattgcttttctccacccactaatgacatctttttttaacggaaagtgggtaaaagaaacatgaacaagaactaaacgataaccatagcacactattctttgtctacaaaagctgactctgcaagatcgatggcccgagctagtgcagcagccttattctcgcattcacgttgttcgtcatctgggctactgtcggcaacaatgcctgcaccagcctgaagatgagcgacccactcccgacgcctatctgcgtctttgtatgagtacatcgggttgtggctcggcgctgttgagaataccatggtgcggagagaaagtgcaatttgc

SEQ ID NO: 5062 - DNA, 334 bp, Zea mays
  Clone ID: LIB3061-060-P1-N6-D6
aaaaacggacaaattattttttggaaaaattcgaattttttttcccgaaatttttttttatttttgaaaaaaacaaaatttgtaccccaagtaaaaaattccccttttttaattttcaacccaaaaaaaaaaatttttttttttgaaacttgccccaaatttttttttttttaaaaatggaagttattactggtccccccaaaaaaaaaaattcaacttttgtggcttaaaaaaccggaaaattattgaaaaccccgggggttttttccgggtttttaaaaaactaaacggggctattttttgcccgttggttccgaaaaaaaaaagggaaaaa

SEQ ID NO: 5063 - DNA, 474 bp, Zea mays
  Clone ID: LIB3061-060-P1-N6-E11
catccaaaaaactttattattgaattacaactaataatcaatctaaaagagggcaccaccaatgatgtgttgttggtaggaggctgctgggtttgtcaaagcaagttggacaaagggcaacaattgttgtagttgtaagagggttgcggggttagccgcaaactgcttgtagaaaggcagcaactgttgctgtgtcaagaaggaagcacgacttgctgcagctagctcgctaaatggcagtagtatttgctgctgcaaataagcagcggggttcagtgcggccaattggttaaatggaagaagttgttgttgctgagagtaggcagtagctagctggctaaatggtaatagttgttgctgcaaataagcagcagggttcagtgtagacagttggttgaatggaagaaattgttgttgctgagagtagggagaaaggtttgccagagctacttggttgatcacaggtagcacgag

SEQ ID NO: 5064 - DNA, 602 bp, Zea mays
  unsure (1)..(602): unsure at all n locations; Clone ID: LIB3061-060-P1-N6-E12
aataaaattcgcaaacattggaatgattggtttatttcggtgcctgactacgccacaccaatacattacagaggaacattacaacgcatgcattgccggtagatggatactctagggtctaggcaaagctgcttgaaatgcagatgtactaactagttgtcgtctccgtaggcgagaaaccggtagcgctcctcgtacgggccgtcgaagtagaggtcggcctcgaaccagcgcgggtacctgaccagatccccggccacgaagtgcatgtagtcgtcgccgtggacagcgccggcggggatgaccttcacctccccggacacgatgtacacgagctggtcgacctgccagtcccacggcatccggcaccggccacccgtgcgccacgacgaccacgtctccatgacccgcagcgcctccatccgtgcccgcgccacctcgcctcgctccacgcgcaccttgtacacgtcctccatgggacgccccagcagcgcgccgncaccgnctgctgccgncgccgttcgtatccttacacctcttcggctactgatgctaggaagactaggaggcagcctgtgcgccgcggggagcacgagatggaa

SEQ ID NO: 5065 - DNA, 436 bp, Zea mays
  Clone ID: LIB3061-060-P1-N6-E2
aaaaaaaaaaaccttttcccaaaaaaaaaatcccttccaattaaaaggggtaatggggggaatggcaaaaacggccacccaggggggggggggaaactcggttactaatggccgttaaaggggggaactagctttagccctaagggggggtgggaaggggccccattaaattattaccacaggaaatagttccctaaaaagaaaaaacccccggaagttgttttaaaggggaagggacctggttgttgaaattgaaaaccgaaaattgccggaaggtggtggcctaccggggccgcaataagggccggaagctccccctggggttgttgttgaagaaaggactgcaaaaccacaccgtatgtcccctggaaccggggaagggggtccacctgcctaattggggggaaaaattgttgctgaaacccctggaattggg

SEQ ID NO: 5066 - DNA, 367 bp, Zea mays
  Clone ID: LIB3061-060-P1-N6-E3
aacacaagaacaaatccggatcccctttaattattggtccggatgaacgatccgagaaatgcattcatcttcttggtgggcttattattcaaacatatgagctagctacaagctcattcctcatgcactatgctcttcgcagttacttggagggcatcgttccgccgccgagaatccaggggcattcggggaccccgctgatgggggccaggttgcactcggcctccgtgacgaggggggcggggaatcccctttgcacctcccgggggcagcccggcaggtcctttaggggggcctccagctgcgcgtccgggcccggggggatcgcgccctccatgaggatgctcagcgccgtgcaccggcagta

SEQ ID NO: 5067 - DNA, 74 bp, Zea mays
  Clone ID: LIB3061-060-P1-N6-E4
cagaaatatattagattgagatttatctcgatatattgattatttttaggaaacacatgccctcatagcggcat

SEQ ID NO: 5068 - DNA, 313 bp, Zea mays
  Clone ID: LIB3061-060-P1-N6-E8
ggaaatataaccttcttatttctaggaggccaccatacatcagccataaaacttcattattgaattacaactaataagcaatctaaaagatggcaccgccaatgatgtgttgttggtagaagactgctgggtttggcaaagcaagttggaaaaagggcagcaacctggttgcagttgtaagaaggttgcgaggttaaccacaaactggctggtagaacggaacacttggtgttgtgtcaaaggaagaaagcggggcttgttgtagctagctggccaaatggtagtagatttgctgctggaaaaagcagagggg

SEQ ID NO: 5069 - DNA, 544 bp, Zea mays
  unsure (1)..(544): unsure at all n locations; Clone ID: LIB3061-060-P1-N6-E9
cgaataaccggcgccagtactatctggcaacattcccatatttattccgcatagttattatcattattgtaacacgcgacaatgcgagcccacgtcagaactacgccattctggacttgcacgcgcacagtacacatgctgcgtcttgcacctcgcgccgactcgcattttttttaaccatggtagctagtactggtcgccgccggagaagatgctgcactcctgtggctccgacagccggcacatcatcggcaaccccgcggcgtactcccgggccttcgtaagcctcacgcggccgatccttggcccggtggtgccgggacgacacggtggatacatctgcgtttggtatccctctcctgcccggctgcaggggtagtagtagcccccctgtcctcctctcctggcgggggggggggttgcttgcgncgnccccatggccaccagcctttctccagcggcggcatggcctcctcgtatcccctgaccatgctccggatggcggcgcagcggcactcgcggctcacgtcctggagctgctggc

SEQ ID NO: 5070 - DNA, 531 bp, Zea mays
  Clone ID: LIB3061-060-P1-N6-F1
ccagccaacacttttgttggaacttccaaattactggggcatatccgggaaaaaaacaatttttttttttacaacagccatttggcacagaaaacaacattgctggatggttgctggggccctaaactcgaatggcagcatggatggggcccaaatgttgtatgaccaatgcttgagaggttggatgtgcggttcaaattcagcggggaatagatcaagagggaccctggggatcatctcgaagctggggaatgttatcactgcggcgggggtcgcccgcaatagatttggggcgcatccactgtagaagccagccacaccctttttatgataaacctttctgatgcagtctactacacccttgtatctagcatcaaagggcgctcgctggttttgcagccttgaccgaacaacctaatgaggatatgtcaatgttgatgcagctactttagccagagacgacgcaacagcaacatcaccaaaactaaatgcttctacaggagtattatctcgctcagccagataagcttt

SEQ ID NO: 5071 - DNA, 379 bp, Zea mays
  unsure (1)..(379): unsure at all n locations; Clone ID: LIB3061-060-P1-N6-F12
ggggnnnnnnnnttttttttnttgttttgggtgttttttttgggttttttnnnttgggggggggnnnnggggggggtttgggtttttttttttttttttttgngggggaaaaatttgggttttgggggttttttttgggtttttgggtttttttttnannnnggttttttggnggntttttgggtttttttttttttttaaaaaaaaattttttaaaaagaggnaaaaaaaaatttttttttaaaattaatgggtaaaagttttaaaaaaattatggggataaaaaaanagggggtttttaatgggtttttaaggtgtggggggaggaaaaatttttttaaaggaanttttttttttaaatttttttaaaaaatttaaa

SEQ ID NO: 5072 - DNA, 381 bp, Zea mays
  Clone ID: LIB3061-060-P1-N6-F5
aagaatctagaaatgactttcttatttctgggaagccacaaacatcagaccaaaaaactttattattgaactataactcataagaaatctaaaagagggcaccaccaatgatgggttgttggtagaacgctgctgggtttgtcaaagcaaggtggttgaatggcagcaattgttgcagttgtaagaaggggccagcgttaggcgcaacgtgctggtagaacggcaaccaactgtggttgtatcaagaaggtagcagggctcacaccagctagctggctgaatggtagtagttgttgctgctgtaaataagcaggagagttcaatgctgccagttggttgaatggaagaaattgctgggggtaggcagcaggtagctggctg

SEQ ID NO: 5073 - DNA, 457 bp, Zea mays
  Clone ID: LIB3061-060-P1-N6-F6
gcagatagagagctcgtttttcattagaattccgtttgggtcatgtcccactcttttgttcagacagactaaactagatgaagctgacttacccagaaaagatacctaaacaactggtttggaaagagctaggaggtcctcggcatgctatgggttgaaatccaactaaatcccctcatcaaattctgcatccagaaccagcagcattcgccagatactacaaccaactaaatcccctcatcgaattctgcatccagaatcagcagcattcgccagatatccagtgccatcaatcatcatcttatttcacgacaacatggttggcccctttctcctcctgttggttgcccacgccgtccttatggaccatctcccagaaagaaatccggaggacagtctcgtatcctggcatcttggcgtagcccgggaagtagttgatggtcatgaccagatagcg

SEQ ID NO: 5074 - DNA, 464 bp, Zea mays
  unsure (1)..(464): unsure at all n locations; Clone ID: LIB3061-060-P1-N6-F8
accgagggaacatacagctgcttcattattcattcaggtcgaacaaagtggctcagccccgtcgttttattattattattacgatgattattattactgcatgctagctagctcgtactagtcagtagtaaactcttggtttcgcgagggtgcgacgccgagcatttattggggacgagctagcaggagctgctggcctagcaagtgaggttgggccctgggtcgacgcggagctgctggcagtactgcttgtagtagccgacgcgcgcgttcatctgnggcggggttgttcccgttgcactcgagggcgccgttgatggccctgatggtggcgccgaagccctgcggcatcaggcggtgcacgttgttcatccagaaccagagcgccgtcttgaacgcgatcacggcgtcctgcgccaccctgttggggtcggcgagcccgttgaggccgatgtccctcccgg

SEQ ID NO: 5075 - DNA, 597 bp, Zea mays
  Clone ID: LIB3061-060-P1-N6-G12
aagaatctagaaatgtactttcttatttctgggaagccacaaacatcatccaaaaaacttcattattgaagtataactcataagcaatctaaaagagggcaccaccaatgatgggttgttggtagaacgctgttgggtttgtcaaagcaagttggttgaatggcagcaattgttgcagttgtaagagggtgccagcgttaggcgcagcgtgcaggtagaacggcaacaactgttgttgtgtcaagaaggcaacagggctcacatcagctagctggctgaatggtggtagctgttgctgttgtaaataagcagcagagttcaatgctgccagttggttgaatggaagaaattgctgggggtaggcagcagctagctgactgaatggtagttgttgttgcaaataagcagcagagttcaatgcagccagttggttgaatggaagaaactgctgttgctgagagtaggcagcaaggtttcctagcacaagttgttgtagttgttgtgccttgatgttttgtgccaacaaatgcaccaaaggtaactgctgtaatagggctgacggttgttggaggaacaagggtgataaaggtaagatgc

SEQ ID NO: 5076 - DNA, 556 bp, Zea mays
  unsure (1)..(556): unsure at all n locations; Clone ID: LIB3061-060-P1-N6-G4
agaaatgtactttcttatttctgggaagccacaaacatcagacaaaaaactttattattgaactataactcataagaaatctaaaagagggcaccaccaatgatgggttgttggtagaacgctgctgggtttgtcaaagcaagttggttgaatggcagcaattgttgcagttgtaagagggtgccagcgttaggcgcagcgtgctggtagaacggcaacaactgtggttgtatcaagaaggtagcagggctcacaccagctagctggctgaatggtagtagttgttgctgctgtaaataagcaggagagttcaatgctgccagttggttgaatggaagaaattgctgggggtaggcagcaggtagctggctgaatggtagttgttggttgttgcaaataagaagcagagttcaatgcagctagttggttgaatggaagaaactgctgttgctgagagtaggcagcaaggtttgctagcacaagttgttgttagttgttgtgccctgatgttttgtgccaataaatgcancaaagggtaactgatgtaataggggct

SEQ ID NO: 5077 - DNA, 402 bp, Zea mays
  Clone ID: LIB3061-060-P1-N6-G5
agcagcataaacagtacacggaccaagttaccgtatcacacgtacaaattcaccccacaagtacaggaaactgtccctgtccctgtcacatgatcaaagggtagggacacttattcatgggtttatcttattatctatggaacgctgaagagtacggctttgacgcgccagcacagcacagcacagccacgtataggcgccgctcagtgctgtccgggcagcttctccttgatcttgtccataatgcctttcttctcgccggtgccctcggtgccggtggcgtaggcgccgccggtgtgtccctgctgcccgtaggcgctgccggtgtgtccctgctgcccataggcgccgccggtcgtcgccgtggcgtgctggtcgtccttgtggcctccgggcagcttc

SEQ ID NO: 5078 - DNA, 544 bp, Zea mays
  Clone ID: LIB3061-060-P1-N6-G7
agaatagcaacagagggatttgggtttcagtatatagcaatcacaaaaccaaagcaggtactgttacaagcagatcaggacctcactctctgtccccagactcaatataccaacaaaccacatacttacccagcaacaaccagttcacattctaactgacccactgatcaacagtttccaagtaacccaattattacccagagaaagggcgaagaagaagatgaaacaataataataataataccggactcccctataacggacactaccggactcccctataacggacactggactagtaacttattgaacgcacctctcgacgaccaaaacggtatgaatgaatgaataggcaggcacctgctgcgtccattgcgacgacacgttgtagacacacggcgggtaacttttgattacaatatacgaacaaatgaagggttatgaacagatcctaggcatatatggcggatggcgtgaattggcggcccatggatgtaacctgcaagtttgactgactgctgccctgggacaacttctgcgtgcc

SEQ ID NO: 5079 - DNA, 586 bp, Zea mays
  unsure (1)..(586): unsure at all n locations; Clone ID: LIB3061-060-P1-N6-G9
gaataaaaaccttatgcgctcctttcgactttatatagcattcagctaattgttgagtcaatcacaggagaagttcgcgaaaaactatctctatcaactccatgctagatagcctatagtaacaatcccaacacaaaaaaggaacaatttgttcactccttaacgccaaccttgctcaacacatggccatgcatcaatcacccctcaattgctatctgtgaagtctgcgtcaatgacatccccatcattctgcgttggtccggtaccaggcgtaggtccggcctcagcaccaggagtaggcccagcagcactggcaccaggctggttatacattgcctggccaatctgcatcacctcctggttcagagcagccatggcatctttcatactctgtgttgatccaccagaaatggcgtctttgagctcctggagcttcacatccaccttctctttcacaggagcggngactttgtcgccaagctccttcagttgcttctcagtctggtagaccactgagtccggctggtttttggtgtcgattgcatctctcttctctttgtcctccttggcaaacttatcggcttct

SEQ ID NO: 5080 - DNA, 216 bp, Zea mays
  unsure (1)..(216): unsure at all n locations; Clone ID: LIB3061-060-P1-N6-H1
ggttccatcaaacaataatatacaaagcatacaacaacatacagctacgtacgtacatgcacatgtgatggacatagacatccaaccgaggcgatcatctatggttttgacatgcatccacgtacggtttacattntctgtggtcgaagagagctgcgccatgcacccacggtgggtgtgtaggggaaaagaaaaagtnattctaatctacatgac

SEQ ID NO: 5081 - DNA, 409 bp, Zea mays
  Clone ID: LIB3061-060-P1-N6-H10
cgtgaaactatatatttaaatagcacaatcactagtacatcgaggacgattagcacgcgcgcgcgacggctagcttatattagagcgcgtcatcagcctagcagtttattttttataaatgcatacatgcagacatggatggcatcatctctggtgcttgtgcttgtgctgactgactgactggctggctgggctctatgactgatgaggtcgacggatgtgtcatatatatatctgatctcatcatggcctgaagaaagccgggtgggggcgtccggtgccctggaaggaggtgttcttgaggtgctccggagcttcctcgaacgagtggcgcctcgccagcgacaggatcttcttgtcggcggcgatgaagtaggccatcccggccaccgtggagacgatgagcgcc

SEQ ID NO: 5082 - DNA, 481 bp, Zea mays
  Clone ID: LIB3061-060-P1-N6-H7
catccaaaaaactttattattgaattacaactaataagcaatctaaaagagggcaccaccaatgatgtgttgttggtaggaggccgctcggtctgtcaaagcaagttggacaaagggcaacaattgttgtagttgtaagagggttgcggggttagccgcaaactgctggtagaaaggcagcaactgttgctgtgtcaagaaggaagcacggtttgctgcagctagctggctaaatggtagtagtatttgctgctgcaaataagcagcggggttcagtgcggccaattggttaaatggaagaagttgttgttgctgagagtaggcagtagctagctggctgaatggtaatagttgttgctgcaaataagcagcagggttcagtgtagacagttggttgaatggaagaaattgttgttgctgagagtagggagaaaggtttgccagagctacttggttgatcacaggtagcacgagttgctgc

SEQ ID NO: 5083 - DNA, 606 bp, Zea mays
  unsure (1)..(606): unsure at all n locations; Clone ID: LIB3061-060-P1-N6-H9
gagacagcaagacgaaaccagtgatttcacttcaccagtggtcaattaacaacagtagatgcagtagcagtcaaaagcagtacacatacaaaacataaatacacctcacagcattagttaaataagttactcctccttctgccttattattatttcatacatatatatatgcactaggggttaattccagcactggaagacatattacttgctttttcaggtggaaaggattcgagctttccacagagcatcatcagaagattcagcgaagctatccacttgagtccacaacttgacaccattgagggcattcagatacgctggtgaggaacttcggcgcctctcctacttctttacaccattttaggggggnggggatgaatgatcttggctggtacaagtacatatataacacattcgacacaaggaaagaaaaccaccttcagtcagtagcctccactccaccaggcactttatagtcacgtaggtgcaagtgtgttgctgcgcaggccagcgctgccgccaccggcttgcaaggaaagagttggacctcggtgtgtgctcgcctggcttacgaggccggagtcaaggaacactactatgact

SEQ ID NO: 5084 - DNA, 361 bp, Zea mays
  unsure (1)..(361): unsure at all n locations; Clone ID: LIB3061-059-P1-K6-A4
taccggtaccgcgtnaattcccgggcccaattggccgcactgnaaccccgctgcttatttgncagcagcaatactactaccatttagccagctagctgcagcaaaccgtgcttccttcttgacacagcaacagttgctgcctttctaccagcagtttgcggctaaccccgcaaccctcttacaactacaacaattgttgccctttgtccaacttgctttgacagacccagcggcctcctaccaacaacacatcattggtggtgccctcttttagattgcttattagttgtaattcaataataaagttttttggatgatgtatgtggccaaccagaaataagaagttacatttccagattct

SEQ ID NO: 5085 - DNA, 100 bp, Zea mays
  unsure (1)..(100): unsure at all n locations; Clone ID: LIB3061-059-P1-K6-A9
ttggcggtgccatcttttagnatgcttattagttgtaattcaataatgaagttttttggctgatgtatgtggcctcctagaaataagaagttacatttcc

SEQ ID NO: 5086 - DNA, 509 bp, Zea mays
  unsure (1)..(509): unsure at all n locations; Clone ID: LIB3061-059-P1-K6-B10
cccgggntcgcccagcgtccggtgccatttttggcacaaaacatcaggcacaacaactacaacaacttgtgctagcaaaccttgctgcctactctcagcaacagcagtttcttccattcaaccaactaggttcattgaactctgcttcttatttgcaacaacaacaactaccattcagccagctacctgctgcctacccccagcaatttcttccattcaaccaactagcagcattgaactctcctgcttatttacagcagcaacaactactaccattcagccagctagctggtgtgagccctgctaccttcttgacacaaccacagttgttgccgttctaccagcacgttgcgcctaacgctggcaccctcttacaactgcaacaattgctgccattcaaccaacttgctttgacaaacccagcagtgttctaccaacaacccatcattggtggtgccctcttttagatttcttatgagttatagttcaataataaagttttttatctg

SEQ ID NO: 5087 - DNA, 344 bp, Zea mays
  unsure (1)..(344): unsure at all n locations; Clone ID: LIB3061-059-P1-K6-C1
cccgggntcgcccagcgtccgggaggtctngttctaaattaaatatcgtgcttgttgttatcagatcgctgtggaatccantgattttgggtgttgcttgtgagaatattctgatgttttgtttttttaaaaaaaatacaggaatgtcttctctaaaaaaaaaaaaaaaaaaaaaaaaaaaaaaaaaaaaaaaaaaaaaaaggaaaaaaaaaaaaaaaaaaaaaaaaaattaaaaaatgaatgaataaggaataaataaattaattaaatattagataaataaatttaaatgagtggnattttaattaattatttaattgaatggaaaatattttgaaatttaa

SEQ ID NO: 5088 - DNA, 541 bp, Zea mays
  Clone ID: LIB3061-059-P1-K6-D11
cacataccaggaactgagagcgagggggacgctggtggcagcgtaactaccatagctggctgccacgggctggggatgcacagctggggcgctgcgcgcgcaggacggtcacatgaatacccccttagacaacacacgccccggcggctacccgctctagtatacctggagtagcagcagggctggaccctgaccggggagctcgtctacttcaacctgtgggcagcgcgcccactagaaaccaacccatacggctgcagtcctgccaacattatatgaggatgacggacgtacataatgttatgaatgatcttattatgataataaagcttgagcgtgccgctatcgacatatacaacctgactagagctagtctctgaaggcagcgagtagcaccaggtgttggcatatcgagggattaacctcatggatctgattatagatgagaacatgccaggcttgggtgtgctatagcattaccagttgtaccatttctatataaaggcctgctacattttcggtggcaatgcgacgtactact

SEQ ID NO: 5089 - DNA, 405 bp, Zea mays
  Clone ID: LIB3061-059-P1-K6-D12
cccgggctcgcctcatgccagtcgttgcggcagcagtgttgccagcgctcaggcggtggagccgcagcaccggtaccaggcgatcttcggcttggtcctccagtccatcctgcagcagcagccgcaaagcggccaggtcgcggggctgttggcggcgcagatagcgcagcaactgacggcgatgtgcggcctgcagcagccgactccatgcccctacgctgctgccggcggtgtcccccactgaagaaactatgtgctgtagtatagccgctggctagctagctagttgagtcatttagcggcgatgattgagtaataatgtgtcacgcatcaccatgggtggcagtgtcagtgtgagcaatgacctgaatgaacaattgaaatgaaaagaaaaagtattgttcc

SEQ ID NO: 5090 - DNA, 606 bp, Zea mays
  Clone ID: LIB3061-059-P1-K6-D5
acaatagtgtaccaacaatggcagccaaaatttttgcctccttatgctccttggtctttctgcaagtgctgctacggcgaccattttcccgcaatgctcgcaagctcctatagcttcccttcttcccccgtacctctcaccagcggtgtcttcggtattgtgaaaacccaattcttcaaccctacaggatccaacaggcaatcgcagctggcatcttacctttatcacccttgttcctccaacaatcatcagccctattacaacagttacctttggtgcatttattggcacaaaacatcagggcacaacaactacaacaacttgtgctagcaaaccttgctgcctactctcagcaacagcagtttcttccattcaaccaactaggttcattgaactctgcttcttatttgcaacaacaacaactaccattcagccagctacctgctgcctacccccagcaatttcttccattcaaccaactagcagcattgaactctcctgcttatttacagcagcaacaactactaccattcagccagctagctggtgtgagccctgctaccttcttgacacaaccacagttgttgccgttctaccagcacgttg

SEQ ID NO: 5091 - DNA, 627 bp, Zea mays
  unsure (1)..(627): unsure at all n locations; Clone ID: LIB3061-059-P1-K6-E6
atggccttcgcagggnagcctccatgccatggagggnatatacgtagtgttatataaaactaccgtttaaacgatgtttaaactacgtttaaacgtcaaaactctaattagaggttgaaatcacgttttagcgttttggcgttctaaactgtaaaacgcagtgttttatgcattttagaccattagctatttttgggcccggtcaattagttacttttggggttcaatccagctcatggttgaagttttggtaagccactaacctctctgttttggtatttaacttcatattattgtctgaaattatgatatattggtatttttcctatgttgtttaaaactacgtttaaacaaagtttaaacgtttaaaagtcaaaatttcacccatgagcggttcaacgttttatcgttttaataagcttgggatatacaacgagcactaggcgacgcgaccagtgatcagcaattacctcagaagtacatcctattctactgtactaagagttttattcatcctgtctagtgatggtgtatgattggtgttgctatactttttgtttggaccaaacgtctttgacatgattttctattttttcaacagtgtccacagcaaaattagagcaatgg

SEQ ID NO: 5092 - DNA, 621 bp, Zea mays
  Clone ID: LIB3061-059-P1-K6-E7
gtcgcccagcgtccggtgaaacccactttcacccttaggctccaacaagcaatcgcagcaagcaacatacctttatcacccttgttgtttcaacaatcgccagccctatctttggtgcagtcattggtacaaaccatcagggcacagtagctgcagcaactcgtgctacctgtgatcaaccaagtgggggtggcaaacctttctccctactttcagcaacaacaatttcttccattcaaccaactgtctacactgaaccctgctgcttatttgcagcaacaactattaccattcagccagctagctactggctactctgagcaacaacaactttttccatttaaccaattggccgtactgaaccccgttgcttatttgcagcagcaaatactactaccatttagtcagctagttgcagcaaaccgtgctttcttgttgacacagcaacagttgctgcctttttaccagcagtttgtgggtaaccctgaaaccgttttacaactacaacaattgttgcccttttgttcaacttgttttgacagaccgagcggccttttaccaacaacacattattggtggtgccctattttagattgctttattagttgtaattaaataata

SEQ ID NO: 5093 - DNA, 657 bp, Zea mays
  Clone ID: LIB3061-059-P1-K6-G12
tatcagtaccatcaatcatcattcatcttagtagtataggcaccaaatcaaatctgcaacatcaattatctaactccaaaaacctgaagctggtgcttgtggttcttgctttcattgctttagtatcaagtgtttcttgtacacagacaggcggctgcagctgtggtcaacaacaaagccatgagcagcaacatcatccacaacaacatcatccacaaaaacaacaacatcaaccaccaccacaacatcaccagcagcagcaacaccaacaacaacaagttcacatgcaaccacaaaaacatcagcaacaacaagaagttcatgttcaacaacaacaacaacaaccgcagcaccaacaacaacaacaacaacaacagcaccaacaacaacatcaatgtgaaggccaacaacaacatcaccaacaatcacaaggccatgtgcaacaacacgaacagagccatgagcaacaccaaggacagagccatgagcaacaacatcaacaacaattccagggtcatgacaagcagcaacaaccacaacagcctcagcaatatcagcagggccaggaaaaatacaacagcaacaatgtcattgccaggagcagcaacagactacaaggtgcagctataactactatagcagtagctcaaatctaaa

SEQ ID NO: 5094 - DNA, 379 bp, Zea mays
  unsure (1)..(379): unsure at all n locations; Clone ID: LIB3061-059-P1-K6-H3
aaaaaggtagtagggggtaatataaggtgggggccttcggccggctgcgggatgggaaaaangtcgtgggggccggtgaggggggtagattagttatttgtggtgctttgttggtttcctttatatgtgtgggggggggggggaggttttgtttttatttngaagtggagtgaattgactgagatttctgtaagttggtttgctagtgtgctaataggggattgttggagaggaatngtaaagaggtcgttttattcgagttaaggaagttatggaacacaaggagggtgggtgctaggtctttgagggaccgatgctgtgtattaataattgtggattgtttgggagatggggtactatgaacatgtgctgtaagtgc

SEQ ID NO: 5095 - DNA, 546 bp, Zea mays
  Clone ID: LIB3061-018-Q1-K1-D2-SP6A
aaaacaagcacaaaagcaattgaccagactgtaagatcaactatcctgtatgtctttttccagcatgtaccacaacaaagaaatgcctagggtagttaacatctacggccaaattgaaaagtattgtttggttgatcagctgagtcagtaataggaggccagcagctccaagattttattgcctgctctttttgtagctgcaatcagggcacttgtagggctttatctgttctgcttttgctggggttatcctcacacatttgccgtggaaccaccgctcacaaatgtcgcatccaatccagaactcacttgagttgtagagaccactgcaagaaccacaaagggtttcgctgtggtcttcatcattctcatacctacattcaccaactgccactcttgagttctttatctttccatcatttgatcgcttcgttgagtgcctggatttgctgctgttatcaacaccaggattattctcccttcccttccgggcagccattatttcatacacagatggatgatcattaatcatgttgaataatcgct

SEQ ID NO: 5096 - DNA, 601 bp, Zea mays
  Clone ID: LIB3061-018-Q1-K1-D2-T7A
gcccgaaccagcgctcgggatccaacttcgccagggacgcatgaggcgtcgcgactggctctcgctcgtcgccgtacactctgacgcttggctcgtctccgtcgcattcttcttcgccgccaaactcaacggcaacgacaggaagcgattattcaacatgattaatgatcatccatctgtgtatgaaataatggctgaccggaaggaagggagaataatcctggtgttgataacagcagcaaatccaggcactcaacgaagcgatcaaatgatggaaagataaagaactcaagagtggcagttggtgaatgtaggtatgagaatgatgaagaccacagcgaaaccctttgtggttcttgcagtggtctctacaactcaagtgagttctggattggatgcgacatttgtgagcggtggttccacggcaaatgtgtgaggataaccccagcaaaagcagaacagataaagcactacaagtgccctgattgcagctacaaaaagagcaggcaataaaatcttggagctgctggcctcctattactgactcagctgatcaaccaaacaatacttttcaatttggccgtagatgttaactacccta

SEQ ID NO: 5097 - DNA, 596 bp, Zea mays
  Clone ID: LIB3061-021-Q1-K1-D2-T7A
ccggccgaattccggtcgcccacgcgtcgaatcgagcaagcaacatacctttatcgcccttgttgtttcaacaatcaccagccctatctttggtgcagtcattggtacaaaccatcagggcacaacagctgcagcaactcgtgctacctgtgatcaaccaagtagctctggcaaacctttctccctactctcagcaacaacaatttcttccattcaaccaactgtctacactgaaccctgctgcttatttgcagcaacaactattaccatttagccagctagctactgcctactctcagcaacaacaacttcttccatttaaccaattggccgcactgaaccccgctgcttatttgcagcagcaaatactactgccatttagcgagctagctgcagcaagtcgtgcttccttcttgacacagcaacagttgctgcctttctacaagcagtttgcggctaaccccgcaaccctcttacaactacaacaattgttgccctttgtccaacttgctttgacaaacccagcagcctcctaccaacaacacatcattggtggtgccctcttttagattgattattagttgtaattcaataat

SEQ ID NO: 5098 - DNA, 514 bp, Zea mays
  unsure (1)..(514): unsure at all n locations; Clone ID: LIB3061-078-Q1-N6-A1
ggggggggggngnnnnnnnnnngggggngggggggggggnnnnngnggggggggggggggggggggggggggggggggggggggggggggggggggggggggggggggggggggggggggggggggggggggggggggggggggggnggggggggggggnngggggggngggggggggggggggggggggggggggggggggggggggggggnggggtgggggggggggggggggggggggggggggggggggggggggggggggggggggggggggggggggggggggggggggggggggggggtggggggggggnnggggngggggggggggggggggggggggnggggggggggggggggggggnngnggggggggggggnggggggggggggggggggggggggggggggggggnnnnnggggngggggggggggggggggggggggggggggggggggggggggggggngnnggggggggggggggggggggggggggngngggggggg

SEQ ID NO: 5099 - DNA, 399 bp, Zea mays
  unsure (1)..(399): unsure at all n locations; Clone ID: LIB3061-078-Q1-N6-A5
gggggggggggggggggggggngggggggggggggggggggggggggggggggggggggnggggggggggggggggggggggggggggngggggggggggggggggggggnggggggggggggggnggggggggggggggggggggnnggnggggngggggggggggggggggggggggggggggggggggggggggggtgttgggggggggggggggggggggggnggggtgggtgggggggggggggggggggggggggggggggggggggggggggggggggggtgggggggggggggggggggggggggggggggggggggggggggggggggggggnggggggggggggggggtgggggggggggggggggggggggggggggggggggggggg

SEQ ID NO: 5100 - DNA, 369 bp, Zea mays
  unsure (1)..(369): unsure at all n locations; Clone ID: LIB3061-078-Q1-N6-A6
ggggggggggggggggggggnnnggggggggggggggggggggggnnnnnnngggggggggggggnggggggggggggggngggggggggtgggggggggggggggggggggggntgtgggggggggggggttggtgggggtgggggggggggggggggggggggggggggggggggggggggggggggggggggggggggggggggggggggggggggggggggggnggtgggggggggggtgtgggggggngtttgtttggggggggggggggggggggggggnngggggggggggtggggggggggggtggggggggggggggggggggggggggtgggggggggggggggngggggggggggggg

SEQ ID NO: 5101 - DNA, 362 bp, Zea mays
  unsure (1)..(362): unsure at all n locations; Clone ID: LIB3061-078-Q1-N6-A8
gggggggggggggggngggggnngngggggggggggggggggggggggggggggggggggggggggggggggggggggggggggggggggggggggggggggggggggggggggggggggggggggggggggggggggggggggggggggggggggggggggggggggggggggggggggggggggggggggtggggggggggggggggggnggggggggggggggggggggggnggggggggggggggggggggggggggggggggggggggggggggggggggggggggggggggggggggggggggggggggggggggggggggggggggtggtggggggggggggggggggggggggg

SEQ ID NO: 5102 - DNA, 439 bp, Zea mays
  unsure (1)..(439): unsure at all n locations; Clone ID: LIB3061-078-Q1-N6-B2
gggggggggggggngngggggggggggggggggggggnggggggggggggggggggggggggnnnnngggggggggggggggggggggggggggnggggggggggggggggggggggggggggggggggggggggggggggggggggggggggggggggggggggggggggggggggggggggggggggggggggggggggggggggggggggggngggggggggggggggggggggggggggggggggggggggggggggggggggggggggggggnggggggggggggggggggnggggggggggggggggnnnggggggggggggggggggggggggggggggggggggggggggggggggggggggggggggggggggggngggggggggggggggggggggggggggggggggggggggggggggggggggggg

SEQ ID NO: 5103 - DNA, 401 bp, Zea mays
  unsure (1)..(401): unsure at all n locations; Clone ID: LIB3061-078-Q1-N6-B6
ggggggngnngggggggggnnggggggggggggngggggggggggggggggggggggggggggggggggggggggggggggggggggggggggggtnnnngtggggtgggggggggggngggtgggggggggggggggggggggggggggggtgggggggggggggggtggggggtggggggggggggggggggggggggggggggggggtgggggggggggggggggggggggggggggggggtgggggggggggggggggggggggtgggggggtgggnngggggggggggggggggggtgggggggggggggggggggggggggggggtggtggggggggggttggggttgggggggggggggggggggggtgggggggggggggggggggggggggg

SEQ ID NO: 5104 - DNA, 395 bp, Zea mays
  unsure (1)..(395): unsure at all n locations; Clone ID: LIB3061-078-Q1-N6-C6
ggggggggggggggggnnnnnnngggggggggggggggggggggggggggggggggggggggggggggggggggggggggggggggggggggggggggggtgggggggggggggggggnnnngnggggggggggggggngggggggggggggggggggggggggggggggggggggggggggggggggggggggggggggggggggtggggggggggggggggtggggggggggggggtngggggggggggggnngggggggggggggggggggggggggggggggggggggtttggtggggggggggggggggggggggggggggggtggggggnggggggggggggggggnggggggggggtggggggggggggggggggggggggggggggc

SEQ ID NO: 5105 - DNA, 419 bp, Zea mays
  unsure (1)..(419): unsure at all n locations; Clone ID: LIB3061-078-Q1-N6-C8
ggggggggggggggggggggngggggggngggnnggggggggggggggggggggggggggggggggggggggggggggngngngnnngggggggggggggggggggnggggggggggggggggggggggggggggggggggggnnnggngggggggngngggggggggggggggggggggnnggggggggggggggggggggggggggggggggggggggggggggggggggggggggggtgggnggggggggggggggggggggggggggggggggggggggggggggggggggggggggggggngggggggggggggggtgggggggggggggggggggggggggggggggnggggtgggggggggtggggggggggggggggggggggggtgggggtgtgggnggggggggggggg

SEQ ID NO: 5106 - DNA, 432 bp, Zea mays
  unsure (1)..(432): unsure at all n locations; Clone ID: LIB3061-078-Q1-N6-D4
ggggggggggggggngnnnnnggggggggggggggggggggggggggggggggggggggggggggggggggggggngggggggggggggggggggggggggggggggggggggggggggggggggggnngggggggtnggggggggggggggggggnggggggggggggggggggggggngggggggggggggggtggtgggggggggggggggggggtgtgtgggggtggggggggtggggggggggttgggggtggggggggggggggggggggggggtgtgggggggggtgggggggggggggggggggggggggggggtggggtggggggggggggggggggggggggggggggggggggtgggggggggggggggtgggggggggggggtggnnnntnggtggtgggggggtnnggggggggggggg

SEQ ID NO: 5107 - DNA, 546 bp, Zea mays
  unsure (1)..(546): unsure at all n locations; Clone ID: LIB3061-078-Q1-N6-D5
ggggggnnnnnnnntttttttggggggggggggggggggggggtttttttnnnnnnnnnnnnnnnnnnnnntttnntttntntgggggggggggggggggggggggnggggggggggggnggngggtggggggggggggggggnntnggggggtgngggggggtggnggngngggggggggggggggggggggggggggggggggggggggggtgggggtgggnggggggggtggggggtggggggggggggggggggggggtggggggggggggggggggggggtgggggggggggggggggggggggggggggggggggggtgggtgggggggtggggggggtggggggggggggggggggggggggggggggtggtgggtggggggggggggggggggggggggggggtgtgggggggggggggggggggggggggggggggggggggggggtggggggggggggggggggggggggggggggggggggggggggggggggggggggggggggtgggggggggtgggggngggtggggggggt

SEQ ID NO: 5108 - DNA, 308 bp, Zea mays
  Clone ID: LIB3061-078-Q1-N6-D6
gggggggggggggggggggggggggggggggggggggggggggggggggggggggggggtgggggggggggggggggggggggggggggggggggggggggggggggggggggggggggggggggggggggggtggggggggggggggggggggggggggtggggggggtggggggggggggggggggggggggggggtgggtggggggggggggggggggggggggggggggggggggggggggggggggtgggggggggggggggggggggggggggggggggggggggggggggggggggcgggg

SEQ ID NO: 5109 - DNA, 378 bp, Zea mays
  unsure (1)..(378): unsure at all n locations; Clone ID: LIB3061-078-Q1-N6-E3
gggggggggggggggggggggtgggggggggggggggggggggttntgggggggggggggggggggtgggggggggggggggggggggggggggggggggggggggggggggggnngggtggggggggggggggggggggggggggggggggggggnnggggggggggggggggggggggggggggggtggggggggggggggggggggnggggggggtggggggggggggggggtnggggggggggggggggggggtgggggtggggggggggggggggggggggggggggggtggggggtgggggggggggggggggggggggnggtgggggggggggggggtggggggggggggggggggggggggggggggggg

SEQ ID NO: 5110 - DNA, 369 bp, Zea mays
  unsure (1)..(369): unsure at all n locations; Clone ID: LIB3061-078-Q1-N6-E4
ggggggggggggggggggnnngggggnggggggggggggngggggggggggggggggggggnggggggggggggggggggggggggggggggggggnggggggnntttgggggggggggggggggggggggggggggggggggggggggggggggggggggggggggggggggggggggggggggggggggggggggggggggggggggggggnntggtgggtggggggggnggggggggggggggggggggggggggggggggggggngtgngggggggggggggggggggggggggggggggggtggggggggnnggggggggggggggggtggggggggggggggggggggggggggggggggggg

SEQ ID NO: 5111 - DNA, 494 bp, Zea mays
  unsure (1)..(494): unsure at all n locations; Clone ID: LIB3061-078-Q1-N6-G12
gggggggggggggggggggtttttttccggggggggggggtttggggggggnnnnnnnnnnnnnntnnnnnnnggtgggggggggggggggngggngcccggccncggggtggggggggtgggggggggggggggggggggggggggggggtgggggggggggggggggggggggggggggggggggggggggggggggtgggngggggggggggggggggggggggggggggtggggggggggggggggggggggggggggttggggggggcgggggggtggggggggggggggggggggggtggggggggggggggggggggggggggggggggggggggggtggggggggtggntngtgggggggggggggggtgggggggggggggggggggggggggggggggggggggggntgtgggggggggtgttcggggnnggggggggggggggggggtngtggggtggggggggggggggggggggggggggg

SEQ ID NO: 5112 - DNA, 403 bp, Zea mays
  unsure (1)..(403): unsure at all n locations; Clone ID: LIB3061-078-Q1-N6-G4
ggggggggtgggggggggggggggggggtgggngggggggggggggggtgtgtgggggggggggggggggggggggggggggggggggggggggggggggggggggggggttgggggggggggggggggggggggggggggggggggggggggggggggggggtgggggggggggtggggggggggggggggggtggggggggggggggggggggtgggggggggggggggggggggggggggggggggggggggggggtgggggggggtgggggggggggggggggggggggggttnggggggggggtgggggggggggggggggggggggggggggggggggtnggggggtgtgggggggggggggggggggggggggtgggggggggggggggggggggg

SEQ ID NO: 5113 - DNA, 303 bp, Zea mays
  unsure (1)..(303): unsure at all n locations; Clone ID: LIB3061-079-Q1-N6-A10
aaaaaaaaatattttttgtttaaanggggggggnnnnnntttttttttggntgggggggggggggggggtggtggggagggaagggaaaaaaaattttttttttttttttttttnggggggggnnngnattttttttgggggggggggggggggtggggngggggngggggggggggggggggggggttggggggggggggggggggggggggggggggggggggggggggggggggggggggggggggggggggggggggggggggggtgggggggggggatgggntggtgggggggggggg

SEQ ID NO: 5114 - DNA, 487 bp, Zea mays
  unsure (1)..(487): unsure at all n locations; Clone ID: LIB3061-079-Q1-N6-A2
atgttttttccctttcaggataataaatnacaattcagcggctcagtttatttaaaaaacacacgagcaaacaaaaaaagcatgctttttaaaacggactacaaaatgcagcaataaaatagataaaacagggtagctaagacatctccttgaatcttgccatggccttcttctggatgatggttttgtagctgtccccggcttgggcttcaagggatggatcaggcttccgctgctgacttcccagtccagccctggcgtcgacggattttgcctggactggttccttgataccgctggcatcctttccgagacccagtccctcctgccaccccatgttgcgtagaatgcggttgcccacattgctttcatcgattgctctatcagcggtaataacttcatagttttcgctgttgccaatttcaccactggaacgttcacccacaccaggagggaaacggcatcgacccctatctcacttgaaccc

SEQ ID NO: 5115 - DNA, 515 bp, Zea mays
  Clone ID: LIB3061-079-Q1-N6-A3
atatcgagataaatctcaatcaatatattgattatttttaggaaacacatgccgctatgagggcaccattatcgagtacatctcatatgtaatctaaaagatggcaccaccaacgatgggttgctgccacgacaaggcagggttcatcaaagagaactggttgtatggcagcaattgttgctgctgtaggaaggcagcgaccaatgggttagccaccgctagtggattaagtaactgttgtcgctgttgtaggtacgcagcagagttcgacacagtcagttggttgaatggaagtagttgttgcaagtaggcagcagggtttgccacagctagctgagtaagagctggtacaatttgttgcagcaactgttgttgcaacaactgttgttgcaggtatgtaggtgcattgcccatagcgagcgggctagatgaaagaagttgttgctgttgtaggtaggcgatagggttcaccatggctagttgactgagcgctggcagaaactgttgcaactgtt

SEQ ID NO: 5116 - DNA, 477 bp, Zea mays
  Clone ID: LIB3061-079-Q1-N6-A9
agaaatgtgcttttttatttgtgggaagcgccaaacatcaggcaaaaaactttatttttgaactttaactcataagaaatctaaaagagggcaccatcaatggttggctgttcggggtaacgctggtgggttagacaaagctagttggttgaattggatgcattgttgcagttgtaagaaggcaaccagttaagggctcaatagtggttgtagaaactgaacaactgtggtgtggttacgcaggttagagggtctcaaccagcttgttggctggaaggaactggtggaagctggcagcaggtttcgccacagttcgatgcttcagagctggtacattgtgataaatccttgggggttgcaggtttttaagtgcgttaacggcatcgggagggctggcacaaaagcagcaggggctaatgcctgtaggcggttgggttcaacatggtttttttactgagcgctggcaaaaagtgttgc

SEQ ID NO: 5117 - DNA, 449 bp, Zea mays
  unsure (1)..(449): unsure at all n locations; Clone ID: LIB3061-079-Q1-N6-B1
ggggggggggnnnntttggggggggggggggttttgggggggngnnttttttttntgtggggggggggggtggggggggggggggggggtggggggggggggggggggggggtgggggggggggggggggggggggggggggggggggggggggggggggggggnggggggnggggggtgggggggggggggtgggggggggggggggggggggggggggggggtggggggggggggggggggggggggngggggtgtggggggggggggggggtggggggggggggggtgggggggggggggggggggggggggggggggggggggggggggggggggggggnggtggggggggggggggggggggggggggggggggggggggggggggggggggggggggggggggtngggggggggggggggggggtgngggggggggggggggg

SEQ ID NO: 5118 - DNA, 482 bp, Zea mays
  Clone ID: LIB3061-079-Q1-N6-B10
caagtaacgacccacaagccatgtacgaactaaacacaatgttttacatacggagtttatgcttacaggcgtgatgccgtagtcaggattgaggattgcgcgcttggtgcaaatctagatgtacatacaggctgccgaggaatcaggccctcacggatagatgtcaatatggccaaacggcgctagctagcctcaacaagtttcgaagaccactatggcacacttaaaaacaagcttcagcttcaggaaactggtggtgacagatttaatacactatctaggttacaatgactgatactgcggtacaggcagttccgaggatgttgcaattttgaggcaccaggtacggttacttggcagctggagaactcatgccttttccacttgctcttccttttcctggagaaggttctccctgttgtcgtgggcccagaagccacgcacatttataagcatgctggcgacagtcccaccttgcttgc

SEQ ID NO: 5119 - DNA, 525 bp, Zea mays
  unsure (1)..(525): unsure at all n locations; Clone ID: LIB3061-079-Q1-N6-B2
ggggggggggnggnnnngtgggggggggggggggtgggggggggggggggggggggggggggggggggggggttttgttttgggtgtgngggnggggnngggggggggggggggggggggggggggttttttggntnggnttttnggggggntggggggggggggggggngnngngnttgggggggnggggggggggngggggggggggggngggggggggggggggggggggggggggggggggggggggggggggggggggggtggggggggggggggggggggggggggggggggggggggggggggggggggggggggggggggggggggggggggggngggggggggggggggggtgggggggggggggggggggggggggggggtgtgggggggggggggggggggggggggggtggggggggggggggngggggggggggggggtgggggggtgggggggggggggggggggggggggggggggggggggggtggggggttggggggggggggggggg

SEQ ID NO: 5120 - DNA, 555 bp, Zea mays
  Clone ID: LIB3061-079-Q1-N6-B4
cagaaattatcgagataaatctcaatcaatatattgattatttctaggaaacacatgtcggtatgagggcaccattgtcgagtacatctcatatgtaatctaaaagaggcacctccaacgatgggttgctgcaaggcagggttcatcaaagagaactggttgtatggcagcaattgttgttgctgctgcaggaaggtagcgaccaatgggttagccactgccaatggattaagtaactgttgtcgctgttgtaggtacgcagcagagtttgacacagccagttggttgaatggaagcaactgttgtaagtaggcagcagggtttgccacagctagctgagtcagagctggtacaatttgttgcagcaactgttgttgtaggtacgtaggtgcattgcccaccgcgagcgggctagatgaaagtagttgtaggtagacggcagggttcaccatggctagttgactgagcactggcataaactggtgcagctgttggtgttgctggtatgcagctacgttcgccagagcaagtgggttgggatgcaagcagctgctg

SEQ ID NO: 5121 - DNA, 546 bp, Zea mays
  unsure (1)..(546): unsure at all n locations; Clone ID: LIB3061-079-Q1-N6-B5
gtataaaatatagtattataaaaatacataaaatatcgataggttcacgaaacgtatgtgtcacatgttttgatcggcatgcctaacaggtgcacattctgtatggctatagggtccaacctaacaaagtacgctttttggagactataccatcctcatcatgaatcggttatcacactgtaaggatgatttaaagcttgttactcccaatcttaggaaaagtaattatcgaacacccttggagaccaatatcacattagaatctggaaatgtaacttcttatttctggttggccacatacatcatccaaaaaactttattattgaattacaactaataatcaatctaaaagagggcaccaccaatgatgtgttgttggtaggaggctgctgggtttgtcaaagcaagttggacaaagggcaacaattgttgtagttgtaagagggttgcggggttagccgcaaactgcttgtagaaaggcagcaactgttngctgtgtcaagaaggaagcacgacttgctgcagctagctcgctaaatggcagta

SEQ ID NO: 5122 - DNA, 522 bp, Zea mays
  Clone ID: LIB3061-079-Q1-N6-B8
agaatctgggaatgtaacttcttatttctggttggccacatacatcatccaaaaactttattattgaattacaactaataagcaatctaaaagaggcaccaccaatgatgtgttgttggtaggaggccgctgggtctgtcaaagcaagttggacaaagggcaacaattgttgtagttgtaagagggttgcggggttagccgcaaactgctggtagaaaggcagcaactgttgctgtgtcaagaaggaagcacggtttgctgcagctagctggctaaatggtagtagtatttgctgctgcaaataagcagcggggttcagtgcggccaattggttaaatggaagaagttgttgttgctgagagtaggcagtagctagctggctaaatggtaatagttgttgctgcaaataagcagcagggttcagtgtagacagttggttgaatggaagaaattgttgttgctgagagtagggagaaaggtttgccagagctacttggttgatcagaggtagcacgagttgct

SEQ ID NO: 5123 - DNA, 476 bp, Zea mays
  Clone ID: LIB3061-079-Q1-N6-B9
aaggcaaattctgttcaacatccatttccctttgttgtttccccctaagagatttttttgacccaacgtaacccttccacattctccttttgtttcgcccttacccttgttttacatgtgttttacaacagcacggggcaacaacaaaattttttgaccgcttttggagcccagttacaataaggggtgtgccaacagattaattttgtcgacatcaaacacaccggggcgaaggcaacacctaccaacaggccaacgaccctttttcgcacgttcaaccccaatgagccccttaaaaccccgccaaaacttgggatcaaagccccccacccttttaccattcagtagtcaaacccattattttccatctttgcaaggattgcacttattggggcgcttggcgcttcaagcccttttaaaacggcagcggcaagggctccaccccagctatttttggcaccatacacccaatttgc

SEQ ID NO: 5124 - DNA, 513 bp, Zea mays
  unsure (1)..(513): unsure at all n locations; Clone ID: LIB3061-079-Q1-N6-C1
ggggggggttatttttttttcttggtttttgggtgaattggttttttggggggggttggggttttttttttttgggggggggggttttggggtgggggggggggggtttttttttngggggggggggggggngggggggttgggggggggttgggggggggnngttttttttttgggggggggggtgggggggggggttttggggggtggggggttgggggggaaagggggtggggggagagggngaaaaaaaaggggggggaggtaaaggggaaaaggggggggggtttgggggggggtttnnnaataggggggggggggggngggggggggtggtggggggggggaanggggggggggggggggtttttgggtgggggtnagggggggggggggggggggttggntttgggggggggggggggggggttttgggtgggtggggggggggggggaggagggggggggggggtttnggggggggggtggggaggggggaaaaaaaggggaaaa

SEQ ID NO: 5125 - DNA, 520 bp, Zea mays
  Clone ID: LIB3061-079-Q1-N6-C10
ggacgagcaatgtcatcaaaatagttcaaacggtccatgctttcgtttcacaatgcatttttcaaaccgagaacacacaaaaaaaaacattcccacaaacacttggctttgcgacacacctcaaacaatgtgttcagccagggccaggatcttgaggtgcttcttcttcctcagctcgtgggggacggggccaaagacccgggtgccgatcagctcgccctttttgttcacgaggaccaccgcgttgtcgtcgaactggacctcgctgccatcgctgcgtcctttcttcatggcggcacggacgaccacgccgtaaactacgtttcctttcttgaccttgccacgaggctgggcctcctttacggatccgatgatcatgtccccgagccttgctcctttcttccccctcagggactggatgcacatcacccgcttggccccggagttatcgaccaccttcaggttagtcctcatctggatgaatgttctgatttgctgactgatagcatcgcaatgagcc

SEQ ID NO: 5126 - DNA, 349 bp, Zea mays
  unsure (1)..(349): unsure at all n locations; Clone ID: LIB3061-079-Q1-N6-C5
aaaaaaaaaaaaatttttttttttttttttggggccccccccatttttttttaaaaaaaattttttttttttaaatttttttttattaaaaaattttaaaaaaaagaggcaacataatattttttttttttttttaaaaaaaaataatttttttttttttaaaaaaaaaaatttttttttaatataaaaaaattttttttttttttttataaaaaaaaaaaacaaaaataattttnttccccccatttttttatataaaaaaaaaaatntttttttttttaataaatgatttataaaagatatgtgggcggtaataaaataaaaaaaataatttttttttcttttatat

SEQ ID NO: 5127 - DNA, 526 bp, Zea mays
  Clone ID: LIB3061-079-Q1-N6-C6
cagacaaaaactttattattgaactataactcataagaaatctaaaagaggcaccaccaatgatgggttgttggtagaacgctgctgggtttgtcaaagcaagttggttgaatggcagcaattgttgcagttgtaagagggtgccagcgttaggcgcagcgtgctggtagaacggcaacaactgtggttgtatcaagaaggtagcagggctcacaccagctagctggctgaatggtagtagttgttgctgctgtaaataagcaggagagttcaatgctgccagttggttgaatggaagaaattgctgggggtaggcagcaggtagctggctgaatggtagttgttgttgttgcaaataagaagcagagttcaatgcagctagttggttgaatggaagaaactgctgttgctgagagtaggcagcaaggtttgctagcacaagttgttgtagttgttgtgccctgatgttttgtgccaataaatgcaccaaaagtaactgatgtaatagggggtgatgatttgttgc

SEQ ID NO: 5128 - DNA, 484 bp, Zea mays
  Clone ID: LIB3061-079-Q1-N6-C7
atcgggataaatctcaatcaatatattggttatttctaggaaacacacgtcggtttgggggccccattatcgagtacatctcatatgtaatctaaaaaatggcccctccaacgatgggttgctgcctcgacaagacagggttcatcaaagagaactggttgtttggcagcaattgttgctgctgtaggaaggcggcgaccaatgggttagccactaccaatggattaagtaactgttgtcgctgttgtaggtacccaacaaagttcgacagagtcagttggttgaatggaaacagctgttgcaagtaggcaacagggtttgccacagctagttgagtcaaagctggtacaatctgttgcaacaattgttgttgcaggtatgtaggtgcattgcccacagcgagcgggctaaatgaaaacagttgttgttgttgtacctaggcggcagggttcaccatggctagttgactgagcgttggcagaaa

SEQ ID NO: 5129 - DNA, 558 bp, Zea mays
  Clone ID: LIB3061-079-Q1-N6-C8
atactaaatcaagagagagatgaaaacctcatactacaacataatacaatggatgtaggtatcactcatcgctatgctcctcaacaaaaatcagctggtagctgccgcagttagcttgtacttaaggtatgctctgataaagggatctagctctccatccattacgccagtgatgtccgacgtctcacaccctgtcctgacatccttgacgagcttgtaggggtggaagacgtagttgcgtatctgctgcccccactctgccttcacaatgtctccacggatctgcttgatttctgatgcacgctgctccagggcgatcaccagcagcttcgctttgagccggctgagggcctttattttgttggccagctggctcctctcctctgagcagcgaactgcaattccagttggaatatgaaccatgcgaacagccgtttccaccttgttcacgttctggcctcctttacctccagctcttgtgaagcttatctccaggtcctcttcaggtatgtccacagccatggattcctctggtagaagaggcataacctcaacacc

SEQ ID NO: 5130 - DNA, 393 bp, Zea mays
  Clone ID: LIB3061-079-Q1-N6-C9
agaacaggtgaacgagcaggcattttttttcgaagcaaaagggcagccaattcccaccatacttggaaccaggccagggctgcccaaaaacgctcaaacaagggaaaaaaaacgcgaagggaccaaagttcttggaaaccaagtccacattactccaatacacgactaacaatgcgaattgcggggaaacagatcgaaatgcaggcgatggttttccggcctgggcttcttcttcttcttctttccccgtactaattgaaggacaggggaacctggcttgccaggctacgggaccttagggcgtaaaacatcttgatgtagcggcgggtctcgcgcctcttcaagttggtcacgtactttcagaacccgtacacgccggtcagggtcatcaac

SEQ ID NO: 5131 - DNA, 540 bp, Zea mays
  Clone ID: LIB3061-079-Q1-N6-D11
ggggaaaacaaatatgatttaactttttcagttacccattacattacaaatatatgcaaccaaacggcactttgtttcttcgttcgagcgggcgacgacggtttttttttatgtttggtgagatgaggtgtcagcatagatgtccaccaaggtatcaaaccacgatgagaagcgaacagaagcagagccaggagtgaagacaggcgatgtttcagccaacggcacacttcggattattagctcccttcttccattcctttacaaataactcaacgatgctctatgtggcaaacaaagggattaaggttctacaaggtctgtatcctctggatctgcgactcagcttgcgcgtcgctagctgaactatcagcagtgtgctcgatgacgaagctctcgatcttatgaagtgactcaattgcaatatcagtaggtgtcagcttagagacatcatcatgaccttgtttacatgcaatctcttccagagaaacccttacatctgcatttgcataagcattacccctttgctgggcaagcatgctg

SEQ ID NO: 5132 - DNA, 519 bp, Zea mays
  Clone ID: LIB3061-079-Q1-N6-D3
atcaaaatgcaaagagctttatttgacaaccatgtatgtacatacagacacgacgacgatcgaacatataagaccatgataggtcatatgacatatataagacctttatctagcatatctgtagtacccgtcctgctgctgaaaccagactaaagttggcgcaggtagacaccgatcgcagcgacgagcctggtcgtcgcgcgtccatagaatcccacgatgctgctgccgatgggcgcggtgatgcagaaacgtgtgccgctctcgatgccccatggcccccaagctctggcggtgctggtgacaatcctgaacgaggtaagggtagtcgcaccttcgaatgcgccgtacgttccagaaacttccttgacgtattcagcgtcgccaagatcgagcttccggacgttgccgccaagtccaccccatcgcccagcggtgcgcgtctgaccacctgtgtcggtactgtaggtgaactcgatggagtccacggcaacgccggcgcggacggtcaggctctgc

SEQ ID NO: 5133 - DNA, 241 bp, Zea mays
  unsure (1)..(241): unsure at all n locations; Clone ID: LIB3061-079-Q1-N6-D5
agaggggggggggcgccttttgggggggaaaccccgcgtttttgggggtttagggggggggggggagacaaaattttttttttggggggaaccccccttttgggttttggggggggggggggggttttttgggggggggggggggggggggcccacccccccaccttggggggggggggggtntggggctgtctctaaaaaaaaacccccccccccctttggtggggggggtggggggggg

SEQ ID NO: 5134 - DNA, 384 bp, Zea mays
  unsure (1)..(384): unsure at all n locations; Clone ID: LIB3061-079-Q1-N6-E1
gaaagtacttttttatttntgggaagccacaaacatnatccaaaaaacttnattattgaagtataactnataagnaatntaaaagagggtactcttcaatgatgggttgnnggnagaacgctgttgggtttgtcaaagcaagttggttgaatggcagcaattgttgcagttgtaagagggtgccagcgttaggcgcagcgtgcaggtagaacggcaacaactgttgttgtgtcaagaaggcaacagggctcacatcagctagctggctgaatggtggtagctgttgctgttgtnaataagcagnngagttcaatgctgccagttggttgaatggaagaaattgctggggggtgggagcagcttgctgcctgaatgggagttggt

SEQ ID NO: 5135 - DNA, 354 bp, Zea mays
  unsure (1)..(354): unsure at all n locations; Clone ID: LIB3061-079-Q1-N6-E2
attacgacgaccacaactggccatactgnccccaagacgacgcaacacacccagccttttggcctttgcaaatcctcttgtccggccaaggtttctggcttccaatactacagaaagtcttcgggctataagtaaactgaaacggggaacacagcgacagagagagagagagaaactagggaaaacgctaacagctagccagctgctctccagcagcgacgagatggagccgcaacgctctagggcgccatgcctgcccagttccacagcctgccttggttggtcaccagttcccttgtacagcgattcggtcgagctcttggggacgtcgaccgtcgctcgcgggtagctatg

SEQ ID NO: 5136 - DNA, 517 bp, Zea mays
  unsure (1)..(517): unsure at all n locations; Clone ID: LIB3061-079-Q1-N6-E4
attgaagcaaacaagacataagtagaagacggtaagagtgcatgcatgaaacattaattctactcatgatcgaccacgacacacaacaattgagcacgcatgcaagctgtttttttattcagaagatcccgaggagcggggacgacgacgacgtcctgctgctcctgcatgcatgtagtcctctacgcacgacggcggtcgccgcagctcggcgcgggctcctcctcctcctcggcggccgggccggcgacgaggtgctcgtagacgacgccggagaggccggcgccgaccatgggccccacccagtacacccattggtgtctccagcgacgggagcccacgacggcgggcccgaacgcgcgcgccggattcatcacggcgccctccagcgcgccgcaggccagcacgttagcccccgccaggagccccacggcgagcggcgccgncagcgctccggcgccggcgcggaccctccgggctttgtccatcaccgtcgcaaaataggcgtacatgagcc

SEQ ID NO: 5137 - DNA, 406 bp, Zea mays
  unsure (1)..(406): unsure at all n locations; Clone ID: LIB3061-079-Q1-N6-E5
aaaaatctggaatgtaactttttatttctggttggccacatacatcatccaaaaactttattattgaattacaactaataagcaatctaaaagaggctcttctttttttttttgnnggnaggaggccgctcggtctgtcaaagcaagttggacaaagggcaacaattgttgtagttgtaagagggttgcggggttagccgcaaactgctggtagaaaggcagcaactgttgctgtgtcaagaaggaagcacggtttgctgcagctagctggctaaatggtagtagtatttgctgctgcaaataagcagcggggttcagtgcggccaattggttaaatggaagaagttgttgttgctgagagtaggcagtngctagctggctgaaaggtaatagttgttgctgcaaa

SEQ ID NO: 5138 - DNA, 380 bp, Zea mays
  unsure (1)..(380): unsure at all n locations; Clone ID: LIB3061-079-Q1-N6-E6
tttntaggaaacacccctcggtatgagggcaccattgtcgagcccaccccatagnaanctttatctggttttttttaacgaggggngctgcaaggcaggggttccgcaaagagaactggttgtatggcagcaattgttgttgctgctgcaggaaggtagccaccaatgggttagccactgccaatggattaagtaactgttgtcgctgttgtaggtacgcagcagagtttgacacagccaggtggttgaatggaagcaactgttgtaagtaggcagcagggtttgccacagctagctgagtcagagctggtacaatttggtgcagcaactggtgttggnggtccgtaggggcattgcccaccgcgagcgggctagatgaa

SEQ ID NO: 5139 - DNA, 565 bp, Zea mays
  Clone ID: LIB3061-079-Q1-N6-E9
acttagatctggaaatgtaacttcttatttctggttggccacataccatcatccaaaaaactttattattgaattacaactaataatcaatctaaaagaggcaccaccaatgatgtgttgttggtaggaggctgctgggtttgtcaaagcaagttggacaaagggcaacaattgttgtagttgtaagagggttgcggggttagccgcaaactgcttgtagaaaggcagcaactgttgctgtgtcaagaaggaagcacgacttgctgcagctagctcgctaaatggcagtagtatttgctgctgcaaataagcagcggggttcagtgcggccaattggttaaatggaagaagttgttgttgctgagagtaggcagtagctagctggctaaatggtaatagttgttgctgcaaataagcagcagggttcagtgtagacagttggttgaatggaagaaattgttgttgctgagagtagggagaaaggtttgccagagctacttggttgatcacaggtagcacgagttgctgcaagctgtgtgccctgatggtttgtaccaatgactgc

SEQ ID NO: 5140 - DNA, 412 bp, Zea mays
  unsure (1)..(412): unsure at all n locations; Clone ID: LIB3061-079-Q1-N6-F11
gggggggggacaaaaacacaatttatgaaattggncggggaggaagggtacagaagaatggggttccttagacccccagggcaagggacaaaagccaacttaacggcaccggacaggtgggggaatctatagaatggcccggcctacaacagacaaaaatcagctttttatgccccagaataggggggacaatcgccagacgaggggtaaagaacatgtaagaacagatatcttagccatcagggctatttggaccatgcgactggctcgatttccgattggggactccgggacaggtccagcctttttgcaagggtaggtttgcggtccatgactggtggatcttcgtcgagaagcttggaaaggggcttcatttctcttggtcccaggtcagggaagaaatgatcgagca

SEQ ID NO: 5141 - DNA, 522 bp, Zea mays
  unsure (1)..(522): unsure at all n locations; Clone ID: LIB3061-079-Q1-N6-G1
gggggaaagggnnnnnttattttgggggggggnnnaaaatnaggtaaaaaangttattatgggaaaataatttttttttggggggggnnnngggnaggattntttngggggaggggggggggggttttgggggggggnnaggttttnnttttggggggtgtgttgggggttgggggttttngggggtttgggggggttgggggggaattgggntngggtgagaattggggggnttttttggggggggggggtaaagggggaagggtgggggggtttgtgggggggggggttgaggtttattggggtggggggggtgggggggttggggggggggggtgggggggggggggtgggttggggggggggtntttgggggggggggggggggggggggggttggggggtggggggggggggggggggtggggggtggggtgggggggnggggggggtgggttgtggggtgggggggggtgggggggggggtggggggggggtggggtggggggggggggggggggg

SEQ ID NO: 5142 - DNA, 356 bp, Zea mays
  unsure (1)..(356): unsure at all n locations; Clone ID: LIB3061-079-Q1-N6-G8
tgggaagccacaaacatcagataaaaaatttattattgaactataactnataagaaatntaaagttgggaccacctatgaaggggtggtggtagaacactgggggggggggcaaagcaaggtggttgaatggcagcaattgttgcagttgtaagagggtgccagcgttaggcgcaacgtgctggtggaacgggaacaactggggttgggtcaagaagggagcagggctcacaccagctagctggctgaatggtagtagttggtgctgctggaaataagcaggagaggtcaaagctgctaggggggtgaatggaagaaattgctgggggtgggcagcaggtngctggctggatggga

SEQ ID NO: 5143 - DNA, 412 bp, Zea mays
  unsure (1)..(412): unsure at all n locations; Clone ID: LIB3061-079-Q1-N6-H11
ggggggggggggggggggggggggcgggggggggtggggggggggggggnnnnngggnncgggggggggggggtgggggggggggggggggggggggggggggggggggtgggggtgnggggggggngggggngggggggggggggggggggcgggggggggggngggggggncggggggggggtggggggggggggggggggggggggggggggggggggtgggggggggggnggggggggggggtgggggggggggggttgcggggcggggggggggggtggggggggtggtggtgggggggggggggcggtggtgggngggggggngtgggggggggggggggtggtggggggggggntgggggggggggnggggggggggggggggggtggggggggggggngggggg

SEQ ID NO: 5144 - DNA, 327 bp, Zea mays
  unsure (1)..(327): unsure at all n locations; Clone ID: LIB3061-079-Q1-N6-H7
gggaagggaaaaatnagntaaaaaacttattattgaantataanttataagaaatntaaaagaggggannatctttgatgggttgttggnagaaaaatgntgggtttgttaaaggaagggggttgaatgggagnaattgttggagttgtaagagggtgnnagtgttaggggnaangtggtggtagaaagggaanaantgtggttgtgtnaagaaggtagnagggntnaaaaaagntagntggntgaatggtagtagttgttggtggtgtaaataagnnggagagttnaatggtgntagttggttggatggaagaaattgntgggggt

SEQ ID NO: 5145 - DNA, 405 bp, Zea mays
  unsure (1)..(405): unsure at all n locations; Clone ID: LIB3061-080-Q1-N6-A1
gggggaggggggggggggggggggggggggggggggggggggggggggggggtgggggggggtggggggggggggggggggggggggggggggggggggggggggggtgggggggggggggggggggggggggggggggggggggggggggggtgggggggggggggggggggggggggggggggggggggggggggggggggtgggtggggggggggggtggggggggggggggggggggggggggggggtggggggggggggggggggggggggggggggggggggggggggggggggggggggggngggggtggggggggggggggggggggggggggggggggggggggtggggggggggggggggggggggggggngggggggggaggaggggggggaaa

SEQ ID NO: 5146 - DNA, 392 bp, Zea mays
  unsure (1)..(392): unsure at all n locations; Clone ID: LIB3061-080-Q1-N6-A2
gtttttngggtnggggggaggggggggtatgggtgggggntgggggggggggtgggggggggggtggggggtgggggnnntggggggtggtgggggtggggggggggtggggggaggggggggggggggggggtggggggngggggggggggggggagggtngggggggggggntgggggggggggntgggtgggggggggggggttggtggggggggggggggggtgggggggggggggggggggggggnngggggggggggggggggggggttgntggggggggggggggggggggggggggggggggggggggggggggggggggggggggggnggggggggggggggngggggggggggggggggggggggggggggggggggggggg

SEQ ID NO: 5147 - DNA, 279 bp, Zea mays
  Clone ID: LIB3061-080-Q1-N6-A3
gggggggggggggggggggggggggggggggggggggggggggggggggggggggggggggggggggggggggggggggggggggggggggggggggggggggggggggaggggggggggggtggggggggggggggggggggggggggggggggggggggggggggggggggggggggggggtggggggggggggggggtgggggggggggggggggggggggggggggggggggggggggggggggggggggggggggggggggggggggggggggg

SEQ ID NO: 5148 - DNA, 437 bp, Zea mays
  unsure (1)..(437): unsure at all n locations; Clone ID: LIB3061-080-Q1-N6-A5
ggggggggggaaaaaaaaaaaatttttttttgggggaaagganntttnttatttttgggggaaggcaaaaaaatgaggaaaaaaaattgattggggaagtataagttatttttatttaaatgaggggannannaaagatgggttggggggggggggggggtgggtttggnaaagnaaggtggttgaatgggagaaattgttggagttgtaagagggggnnagggttaggggnaaggggttggtagaaagggaaaaattgggggtgggttaagaagggggnaggggttaaaaaagttaggtggntgaatgggaggaggtgttggtggtgtnaataagnaggagagtgtaaaggtgtnaggggggggaatggaagaaatgggggggggagggagnagataggtgggtgaaagggaggtggtggtggggaaaataagaag

SEQ ID NO: 5149 - DNA, 399 bp, Zea mays
  unsure (1)..(399): unsure at all n locations; Clone ID: LIB3061-080-Q1-N6-A8
ggggnggggggggngggggggnggggnggggggggggggggggggggggggggggggggngggngggggggggggggggggggnggggggggggggggggggngggnggggggggggggggggggggggggggggggngggggggngngggggggggggggggggggggggggggggnnggggggggggggggggggggngnnggnggggngggggggggggggggggggggggggggggggggggggggggggnngggggggggggggggggggggggngggggggggggngggggggggggggnggggggggggggggngggggggggnnggggggggggggggggggnnngggnggggggggggggggggggggnggggggggggggggggggggg

SEQ ID NO: 5150 - DNA, 532 bp, Zea mays
  unsure (1)..(532): unsure at all n locations; Clone ID: LIB3061-080-Q1-N6-A9
gggggggggggggaaaaaaaaaaaaatttttttgggntnngnntttttttttttttttttttttttttttttttttgtgtgttttggtttttgtaaaagggggaagtttttttttggttttggttaaaaaaannnttttttttttgggggattgggggggggtttaggggggggaannttttntttttaaggggaattaaaaagaaggggggaggggggaaaaaaagggggggggtgggggggaaaggttttgggggggggaaaaattaaaggggggtgttaaagggggggttattttaaagggggggggggggggggggggaaaaaagggggggggggggggggtttttttaaaaaggggggggggggtttgggggttttgggggggggggntaaggggggttttggggggggnaaaaaaagggggggttgtggggggggggggggaattggggggnaaggggggaaaaaaaggggttggggggggggggaaaaaaaggggggggggggggggggggnggggggggggggg

SEQ ID NO: 5151 - DNA, 412 bp, Zea mays
  unsure (1)..(412): unsure at all n locations; Clone ID: LIB3061-080-Q1-N6-B1
gggttttgggggggggtgggggggggggggggggggggggggggggggggggggggggggggnggggggggggggggggggggggggggggggggggggggggggggggggggggggggggggggggggggggggggggggggggggggggggggggggggggggtggggggggggggggggggggggggggggggggggggggggggggggggggggggggggggggggggggggggggggggggggggggggggggtgggggggggggggggggggggggggggggggggggggngggggggggggggggggggggggggggggggggggggggggggggngggggggggggggggggggggggnggggggggggggggggggggggggggggggggggggaggggagaa

SEQ ID NO: 5152 - DNA, 280 bp, Zea mays
  unsure (1)..(280): unsure at all n locations; Clone ID: LIB3061-080-Q1-N6-B12
gggggggggggaaaaaaaaaagaaattttttggcangnngaaccagcgaactttttccccgccctcaaaaaaaattnggaaaaggaacagnaagcagaacgagaggtttttttctcgnttnaanncnnnncnncnncaccaactgggggccgccnggggcaaaaggggggggggtnctnctccacaggtcccagaaaaaaaccaacccccggtnacgctgctcccagtcntccgccttcccctttgcggtgtctgcntgggtcgccctccgggttccttt

SEQ ID NO: 5153 - DNA, 315 bp, Zea mays
  unsure (1)..(315): unsure at all n locations; Clone ID: LIB3061-080-Q1-N6-B4
gggggggggggggggtgtggggttggggggggggcttgggggggggggggggggggggataggtggtgtcgggggggaattggcatcgggtgaaggttcgggacaatatagggggccggaaggataaagggtaaaggcgggggaggcaaagggggggggaaagtaaaatgaaaaggggggggagcaggggacgggtgccgggcggggaacctagggaggcggccaccgtaaggaaaggggcaaggggcggggggggggccggggggtatggggcggcagggggggtggggggataccggggaagnaggggaacag

SEQ ID NO: 5154 - DNA, 355 bp, Zea mays
  unsure (1)..(355): unsure at all n locations; Clone ID: LIB3061-080-Q1-N6-B5
aaaaggggggttttttttttgggggggccccaaaaatttttcaaaaaaaattttttttgggactttttcttaaaagcaatttaaaaggggggccccccaaagggggggggggggggaaaaactgtggggtttgtaaaaaaaaggggggggaaggggaaaaatttttgccatttaaaaggggggccccggttggggttttcgggggggggaaacagaaaaaattgtttttggttaaaaaaggggaggggggcaaaaaaaaatnactgggtaaaagggagaagttgtggctggtgaaaaaaaaccgaaaattcaaaaggcttttgtgggggaaaagaaaaaaatttggggggggggg

SEQ ID NO: 5155 - DNA, 473 bp, Zea mays
  Clone ID: LIB3061-080-Q1-N6-B6
agaatctaaaaatgtctttcttatttctgggaagccacaaacatcagacaaaaaactttttttgaacttactcataagaaactaaaagaggcaccaccaatgatgggttgttggtagaacgctggtgggtttgtcaaaacaagttggttgaatggcagcaattgttgcagttgtaagagggtgccagcgttaggcgcagcgtgctggtagaacggcaacaactgtggttgtatcaagaaggtagcagggctcacaccagctagctggctgaatggtagtagttgttgctgctgtaaataagcaggagagttcaatgctgccagttggttgaatggaagaaattgctgggggtaggcagcaggtagctggctgaatggtagttgttgttgttgcaaataagaagcagagttcaatgcagctagttggttgaatggaagaaactgctgttgctgaaagtaggcagcaaggtttgc

SEQ ID NO: 5156 - DNA, 252 bp, Zea mays
  Clone ID: LIB3061-080-Q1-N6-B7
gggataaatcccaatccatttcttggttttttctaggaaacccctgcccggatgggggcccccttttccagcccctctcatggggcatccaaaaaaggcccccccaaccaaggggtgctgcccccaccaaacagggtttatcaaaaaaaaccgggtgtttcgccaccattttttcctcttctggaaggcccccccccatgggtttgcccccgcctgggggttaaagaacccttggccctgtctgggggcccc

SEQ ID NO: 5157 - DNA, 520 bp, Zea mays
  Clone ID: LIB3061-080-Q1-N6-B8
aaatctcaaccaatatattgattatttctagggaaacacatgccggtatgagggcaccattatcgagtacatctcatatgtaatctaaaagatggcacctccaacgatgggttgctgcctcgacaagacaggattcatcaaagagaaccggttgtatggcagcaattgttgctgctgtaggaaggcagcgaccaatgggttagccactgccaatggattaagtaactgttgtcgctgttgtaggtacgcaacagagttcgacatagttagttggttgaatggaagcagctgttgcaagtaggcaacagggtttgccacagctagctgagttagagctggtacaatctgttgcaacaattcttgttgcaggtatgtaggtgcattggccacagcgagcgggctagatgaaagcagttgttgctgttgtaggtaggcggcagggttcaccatggctagttgactaagcgctggcagaaactgttgcagttgttgttgttgctggtttgcaactacgtttgct

SEQ ID NO: 5158 - DNA, 509 bp, Zea mays
  Clone ID: LIB3061-080-Q1-N6-B9
aacgtcacaactcatcgctgtttcttatagacaggcccatacacagcagggtttgtaccacaggccacaatgacacattcttcttcgttacattacgtctccccagaagagaagagcatacaccagaagttccagtatatataatcgaccaccgaccatcagcatcagcataagtacgacaacgcgcacatcccctgtttattcaattatattggtgtaaacatcacacgctccatgttgcgttgcatccttggccaccggtgcctgctttcttcctcgtcgatcttacatgctcggcttcaggttcagcctagaagccagcttctggccaagagcggcgtcgcactgggaccagtaggagatccaaatggtacggtgttcatgggtcacgcgagggtctgtcagtgcgtcaacccatcgctggatgaaccggtcttgccttgcagggtcgaaggaacgatatctctcgccagcctgcttgaagttgttctccttctgaatgatgcact

SEQ ID NO: 5159 - DNA, 475 bp, Zea mays
  Clone ID: LIB3061-080-Q1-N6-C1
cagataaaaaactttattattgaactataactcataagaaatctaaaaggagggccccaccaatgatgggttgttggtagaacactgctgggtttgtcaaagcaaggggggtgaatggcagcaattgttgcagttgtaagagggtgccagcgttaggcgcaacgtgctggtagaacggcaacaactggggttgtgtcaagaaggtagcagggctcacaccagctagctggctgaatggtagtagttgttgctgctgtaaataagcaggagagttcaatgctgctagttggttgaatggaaaaaattgctggggggtaggcagcaggtagctggctgaatggtagttgttgttgttgcaaataagaagccgagttcaatgaacctagttggttgaatggaaaaaaccgctgttgctgggagtggccacaaggttttgctagcccaagttgttggattttgtgggcccctgattttt

SEQ ID NO: 5160 - DNA, 234 bp, Zea mays
  Clone ID: LIB3061-080-Q1-N6-C11
ccaaagggggggggcctttttgggtaaccccccttttttggtttttcggggggggggcccccatttttttttttggaacccccccttggggcttggggggggcggggtttttttgggggggttgggggggcccccccccctttgggggggggttttgggcttttaaaaaattccccccccttttgggggtgtgggggggacccccaacccccaagggggggggggggggccccc

SEQ ID NO: 5161 - DNA, 546 bp, Zea mays
  Clone ID: LIB3061-080-Q1-N6-C3
gattcattaaaaccaaaactttattatgaccatgcatatattattggtcataccacacatgataatgtgtgtcgtcttactgcattattacatatatagatagagagagatggatagaggagatttcccaaatatcatgaatcagtagtagggcggaatggcagcggagacgccacaggggttggtgcggtagctgggcagctggtactggtagagtccacccatggccggcatgttctgcgccatcatcatggccatggggttgagaccctgggctgccagcagctgctgctgctgctgcatcagagctggctcgtacaggctgctgctggcggcagcggcacgctcaagctgcatcatcatctgcagctgctgcgcgacggactgcacgtccatcatcctcatctgctgctggcagcactgttgccggagcggctggaacatggcgctcggctgcccacacccggcgtagtagggcgccgccgccagcgggctgcactgcggctgcctcaggtactccgcgtaggggtacagcccgccggcgcc

SEQ ID NO: 5162 - DNA, 438 bp, Zea mays
  Clone ID: LIB3061-080-Q1-N6-C4
ctgggaaacagatggcctcaaaaattaatttacaaacatgcctgcaactcaactcactttctaagctgaagttcgcaccatttaccattctgacataggggaatcaaataagggaaccagcccacgggaaaaatttgcacctggggcatttggcgatcaatagtaattcctagctcccaggcaaagcacaggcccccaaatagctgacgggacgcactatgtatttccgggggctgtacaagcccagatagggtagcacacaatttacagggcgaaatagcccaaaaacagccctaacaaagcaaattactttattagggactgccatcctgcacactgattccttcatctacagcttttgcgccgcaggacctagccactgactcaaacagtttctcaatctcaggggccctatgggtaaaagaccggctccaaaag

SEQ ID NO: 5163 - DNA, 547 bp, Zea mays
  Clone ID: LIB3061-080-Q1-N6-C6
gtctctctcttaatctcgttaccactggatatacttcaaaacgttatcagcacttttgctcgcaaaaacagggagaagtagacgctccatcgagagaaggaattggagtgtatcagcggttctgccgtccggacgcaagaactggcgagtgcaagaatgtgtgtggcgaatcgcaaggcccgtcaccaatcctgatcgccttcatccctgtgaccttcaacagccacatctgcaaagtcgagtcgccaccatctcaagcgtcaacggcttcatcgagggccccatcttcggtctcatgtaagatcgtccattgcaagtctctctcatatgcatgcatggatgtcgatggcatgcacaaacaaggcaagggctgatgcttgtggccgacgatgcacacgctggggctttccgtgaccgtgccgccgcgatgggccccgccctcgacggagtcgcgttctcgggtctggccgcgactgtgcccacgcaggggccacacggtctgcgctcgcccgccgctatggctacgcccgcgcctggccgaaacgcc

SEQ ID NO: 5164 - DNA, 59 bp, Zea mays
  Clone ID: LIB3061-080-Q1-N6-C8
aacaccttaatgtttgggtcttttttggttaacaccccggtgggggggggacagtttgg

SEQ ID NO: 5165 - DNA, 559 bp, Zea mays
  Clone ID: LIB3061-080-Q1-N6-C9
caagttaatatcattattagtgccggcttttagcatttttttaactccagaagatacagcctcacgacaactgttgaaaagggaaaatcagtacatgatggccacaaacatgcaagagctggaagtagattccgagtagaggtccaacgtccaaggctctcgctatctcgagtccacaacggtgccttctggaagcgcggacaggtgcacaagaggggcatgtgatttcagggaagcattggcaccagtgatcttggtctcctttgttctgttgagcaccttcctcacctcgtttgcaagctctatgatcgaatcatcttcgtggctaatgctggctaatgccttctccattgagaacaggtaatccctattatagccagtagggccattggctgtagcaatttgccttgccatatcctgcaaaggagcagggccaagatagtacttgttgccaattggatctggagtggaaacgaacactaagacgcctgtcacagctggtttcaagggatctccttccttgtagaaatcaatggatatcttctggtcgtactcacac

SEQ ID NO: 5166 - DNA, 388 bp, Zea mays
  Clone ID: LIB3061-080-Q1-N6-D10
agaaagtactttcttatttctgggaagccacaaacatcagacaaaaaactttattattgaactataactcataagaaatctaaaagagggcaccaccaatgatgggttgttggtagaacactgctaggtttgtcaaagcaagttggttgaatggcagcaattgttgcagttgtaagagggtgccagcgttaggcgcagcgtgctggtagaacggcaacaactgtggttgtgtcaagaaggtagcagggctcacaccagctagctggctgaatggtagtagttgttgctgctgtaaataagcaggagagttcaatgctgccagttggttgaatggaagaaattgttgggggtaggcaacaggtagctggctgaatggtagttgttgttg

SEQ ID NO: 5167 - DNA, 365 bp, Zea mays
  Clone ID: LIB3061-080-Q1-N6-D11
aaaaaaaaaaaaaatttttttggggggttggggggagccccaaactttttccaaaaaactttattttggaatttttacccaaaaggaattaaaaaagggggccccccaaaggggggggggggggaaaaacttttggggtttttaaaaaaaaggggggggaaggggaaaaatttttgccttttaaaaggggggccccgtttggggcccccgggggggtaaaaaggaaaaaattttttttggttaaaaaagggaaaaggggtaaaaaaaaataattgggtaaaaggggggggttttttttgtgggaaaaaaagggcaaatttaaattcttcccgtgggttgaaagaaaaaaattggggggggggggg

SEQ ID NO: 5168 - DNA, 458 bp, Zea mays
  Clone ID: LIB3061-080-Q1-N6-D2
ctggaaatgtaacttcttatttctggttggccacatacatcatccaaaaaactttattattgaattacaactaataatcaatctaaaagagggcaccaccaatgatgtgttgttggtaggaggctgctgggtttgtcaaagcaagttggacaaagggcaacaattgttgtagttgtaagagggttgcggggttagccgcaaactgcttgtagaaaggcagcaactgttgctgtgtcaagaaggaagcacgacttgctgcagctagctcgctaaatggcagtagtatttgctgctgcaaataagcagcggggttcagtgcggccaattggttaaatggaagaagttgttgttgctgagagtaggcagtagctagctggctaaatggtaatagttgttgctgcaaataagcagcagggttcagtgtagacagttggttgaatggaaaaaattgttgttgc

SEQ ID NO: 5169 - DNA, 558 bp, Zea mays
  unsure (1)..(558): unsure at all n locations; Clone ID: LIB3061-080-Q1-N6-D4
ggaacaatacttttttcttttcatttcaattgttcattcaggtcattgctcacactgacactgccacccatggtgatgcgtgacacattattactcaatcatcgccgctaaatgactcaactagctagctagccagcggctatactacagcacatagtttcttcagtgggggacaccgccggcagcagcgtaggggcatggagtcggctgctgcaggccgcacatcgccgtcagttgctgcgctatctgcgccgccaacagccccgcgacctggccgctttgcggctgctgctgcaggatggactggaggaccaagccgaagatcgcctggtaccggtgctgcggctccacctgcctgagctgctggcaacactgctgccgcaacgactggcactgaggcgagcagtagggcgtcgccgtcgggctgcactgatgcctcagaaactcgacgcactggcccaggatcggggtgctgccaacgccgcaggttccctgcagctggcacgggcttggatgcggctgttggcaccgncatgggtgtggctggggatgaggcta

SEQ ID NO: 5170 - DNA, 202 bp, Zea mays
  Clone ID: LIB3061-080-Q1-N6-D5
caaaaaacttataaatggaacttgaatggaaaggcaatctaaaagagggcacaagaaaagtcgggtttaggggtgaagacagggagggacgggaaaggaagaggaaagaaggggaaaaagggaggggggaggaaaggggggcaagggggaaggagaggggggggggaggaggggaaaaggggggggagggggaagagggcaa

SEQ ID NO: 5171 - DNA, 470 bp, Zea mays
  Clone ID: LIB3061-080-Q1-N6-D7
ggaacaatacttttttcttttcatttcaattgttcattcaggtcattgctcacactgacactgccacccatggtgatgcgtgacacattattactcaatcatcgccgctaaatgactcaactagctagctagccagcggctatactacagcacatagtttcttcagtgggggacaccgccggcagcagcgtaggggcatggagtcggctgctgcaggccgcacatcgccgtcagttgctgcgctatctgcgccgccaacagccccgcgacctggccgctttgcggctgctgctgcaggatggactggaggaccaagccgaagatcgcctggtaccggtgctgcggctccacctgcctgagctgctggcaacactgctgccgcaacgactggcactgaggcgagcagtagggcgtcgccgtcgggctgcactgatgcctcagaaactcgacgcactggcccaggatcgggg

SEQ ID NO: 5172 - DNA, 422 bp, Zea mays
  unsure (1)..(422): unsure at all n locations; Clone ID: LIB3061-080-Q1-N6-E1
gggggggggaaagaacaancnnattttttggacgccacaaacatcatccaaaaaactccattattgaactataactcataagcaatctaaaagaggcaccaccaatgattggttgttggtagaacactgttgggtttgtcaaagcagggggggggaatggcagcaattgttgcagttgtaagagggtgccagcgttaggcatagcgtgcaggtagaacggcaacaactgttgttgtgtcaagaaggcagcagggctcacatcagctagctggctgaatggtagtagttgttgctgctgtaaataagcagcagagttcaatgctgctagttggttgaatggaagaaattgctgggggtaggcagcaactagctggctgaatggtaattgttgttgcaaataagcagcagagttcaatgcagcc

SEQ ID NO: 5173 - DNA, 574 bp, Zea mays
  Clone ID: LIB3061-080-Q1-N6-E10
atcgagataaatctcaatcaatatattgattatttctaggaaacacacgtcggtatgagggcaccattatcgagtacatctcatatgtaatctaaaagatggcacctccaacgatgggttgctgcctcgacaagacaggattcatcaaagagaactggttgtatggcagcaattgttgctgctgtaggaaggcggcgaccaatgggttagccactaccaatggattaagtaactgttgtcgctgttgtaggtacgcagcagagttcgacagagtcagttggttgaatggaagcagctgttgcaagtaggcaacagggtttgccacagctagttgagtcagagctggtacaatctgttgcaacaattgttgttgcaggtatgtaggtgcattgcccacagcgagcgggctagatgaaagcagttgttgttgttgtacgtaggcggcagggttcaccatggctagttgactgagcgttggcagaaactgttgtagctgttgttgttgctggtttgcaactacgttcgccagagcaagtgggttggatgcaagcagctgctcttgcaagtaggcggc

SEQ ID NO: 5174 - DNA, 424 bp, Zea mays
  Clone ID: LIB3061-080-Q1-N6-E11
ggggaccaatttcacattaaaatctggaaatgtaacttcttatttctgggtggccacatacattatccaaaaaactttattattgaattacaacttattatctatctaaaagagggccccaccaatgatgtgttgttggtaggaagcccctttgtttttcaaagcaagttggacaaagggcaacaattgttgtagttgtaaaagggttgcggggttagccccaaactgctggtaaaaaggcagcaactgttgctttgtcaaaaaggaaacaccgtttgctgcaactagctggctaaatggtagtagtatttgctgctgcaaataaacagcggggttcaatgcggccaattggttaaatggaaaaaattgttgttgcttaaagtaggcaataactagctggctgaatggtaataattgttgctgc

SEQ ID NO: 5175 - DNA, 482 bp, Zea mays
  Clone ID: LIB3061-080-Q1-N6-E2
aaaaatctagaaatgtctttcttatttctgggaagccacaaacatcagacaaaaaactttattattgaactataactcataagaaatctaaaagagggcaccaccaatgatgggttgttggtagaatgctgttgggtttgtcaaagcaagttggttgaatggcagcaattgttgcagttgtaagagggtgccagcgttaggcgcagcgtgctggtagaacggcaacaattgtggttgtgtcaaaaaggtagcagggctcacaccagctagctggctgaatggtagtagttgttgctgctgtaaataagcaggagagttcaaagctgtcagttggttgaatggaaaaaattgctgggggtaggcagcaaatagctggctgaatggtagttgttgttgttgcaaataaaaagcagagttcaatgcagctagttggttgaatggaagaaactgttgttgctgagagtaggcaacaaggtttgcta

SEQ ID NO: 5176 - DNA, 537 bp, Zea mays
  Clone ID: LIB3061-080-Q1-N6-E4
agaaatgtactttcttatttctgggaagccacaaacatcagacaaaaactttattattgaactataactcatagaaactaaagggggcaccaccaatgatgggttgttggtagaatgctgctgggtttgtcaaagcaagttggttgaatggcagcaattgttgcagttgtaagagggtgccagcgttaggcgcagcgtgctggtagaacggcaacaactgtggttgtgtcaagaaggtagcagggctcacaccagctagctggctgaatggtagtagttgttgctgctgtaaataagcaggagagttcaatgctgtcagttggttgaatggaagaaattgctgggggtaggcagcagatagctggctgaatggtagttgttgttgttgcaaataagaagcagagttcaatgcagctagttggttgaatggaagaaactgctgttgctgagagtaggcagcaaggtttgctagcacaagttgttgtagttgttgtgccctgatgttttgtgccaataaatgcaccaaaggtaactgct

SEQ ID NO: 5177 - DNA, 305 bp, Zea mays
  Clone ID: LIB3061-080-Q1-N6-E9
aaaggagcatgagtcaacataacattaaattaaggcagacgttctgcaccttaaacatcattcctcccattcccagcaagagtcagcaagaaaatgcaaatccccccgaagatacagcacaaccattttaccgacaagacatggttagcttggattcgtcagcgtccacacgaagcctgcttcgtcccacaggcgcattcctgatccagcctggcaaccatcctcttcttcagacaagctacacgccacaaaattcatgacggcatgccctaagctgactgaataatgcagcacattgatgctct

SEQ ID NO: 5178 - DNA, 489 bp, Zea mays
  unsure (1)..(489): unsure at all n locations; Clone ID: LIB3061-080-Q1-N6-F1
cccccttttttgggggggggggggggttttttattgnncntctccccccccggttcnccggttgtggttgcggggcccggggggcgggcgggggggggggcgggcgcgggggcggggggggcgggggccggggggggggggggggggggcgcggggggggggggtggggggtgggggggggggggggggggggggggggggggggggggcgggtgggggggtggggggcggtgggggggggcgggggggcgggggggggggggggggggtggggggcgggggcggggggcgggggggtggtgggggggggggggggcggggggggggnggggcggggtgggggggggggggggcggggcgggggggcgggggggggggggggggggggggggggggcgggggggggggggggggggggggggtggggtggggggtggcggagggggggggggcggcgggggggggcggggggggcggggggaggaagag

SEQ ID NO: 5179 - DNA, 423 bp, Zea mays
  Clone ID: LIB3061-080-Q1-N6-F11
gggataaaactcaatcaattttttggttttttctaggaaacacacctcggtttgagggcccccttttcgagtacctctcatatgtaatctaaaagatggcccccccaaccatgggttgctgcctcgacaaggacagggttcatcaaaaagaactggttgtttggcaacaattgttgcttctttaggaaggcggccaccaatgggtttgccccttccaatgggttaaataactgttgtcccttttgtaggtacccaacaaaattccacaaaatcaattggttgaatggaaacaacttttgcaagtaggcaacaaggtttgccacaacttgttgagtcaaagctggtacaatttgttgcaacaattgttgttgcaagtttttaggtgcatttcccacaacgagcgggcttaattaaaacaatttt

SEQ ID NO: 5180 - DNA, 298 bp, Zea mays
  unsure (1)..(298): unsure at all n locations; Clone ID: LIB3061-080-Q1-N6-F12
gggggggggnnnggngggggggggggggnnggggggggggggggggggggnngggggggggggggnnnggggggggggggggggggggggggggggggggggggggnnngggnnggggggggggggggggggngggggggggggggggggggggggnggggggggggggggggggggggggggggggggggggggggggggggggggggggggggggggggggggggggngggggggggggggggggggggggggggngggggggggggggggggngggggggggngggggggggggg

SEQ ID NO: 5181 - DNA, 543 bp, Zea mays
  Clone ID: LIB3061-080-Q1-N6-F4
gaacttaaaatatagatctctaatcttttattactgagaagttgcacatatcagtatgagaactttattattacagtataaagcataaaaaaatctagaagatggcaccaccaatggtgggctgctgcaataaggtggtaggattcgtcaaagcaagttggttaaatggcagcaattgttgttgttgtaagaaggcgacattgtttgccacatcctgtgggtagaatggtagcaactgttgctgttgcaagaaggcgttaatgtttcccacaacctgtgggtaaaatggcagcaattgttgttgttgttgcaagaaagcagcaatgtttgccacaacttgtagatggaatggaagcaactgttgctgcagtaagaaggcagcagggctcctgacaagttggttgaatggtagtagctgttgtgcctgcaagtaagcagcagggttcaccccagctagttgattgaatggaagaaattgttgttgctggaggtaagcagcaaggttcgctgcaactacttgattgattgttggaagcaactgtt

SEQ ID NO: 5182 - DNA, 58 bp, Zea mays
  unsure (1)..(58): unsure at all n locations; Clone ID: LIB3061-080-Q1-N6-F6
gggggggggggtttttttttttttttttttttnnnttttttgtttttgttttttttgg

SEQ ID NO: 5183 - DNA, 114 bp, Zea mays
  unsure (1)..(114): unsure at all n locations; Clone ID: LIB3061-080-Q1-N6-G10
gggttataaataaataataaagttttttgtgtgntgtttgtggttttcncgaatttgttttttcatttttaatataaagataaagggtggggggtgtttttttttttttttttt

SEQ ID NO: 5184 - DNA, 563 bp, Zea mays
  Clone ID: LIB3061-080-Q1-N6-G11
aatctagaaagtactttcttatttctgggaagccacaaacatcagataaaaaactttattattgaactataactcataagaaactaaaaggggcaccaccaatgatgggttgttggtagaacactgctgggtttgtcaaagcaagttggttgaatggcagcaattgttgcagttgtaagagggtgccagcgttaggcgcaacgtgctggtagaacggcaacaactgtggttgtgtcaagaaggtagcagggctcacaccagctagctggctgaatggtagtagttgttgctgctgtaaataagcaggagagttcaatgctgctagttggttgaatggaagaaattgctgggggtaggcagcaggtagctggctgaatggtagttgttgttgttgcaaataagaagcagagttcaatgaacctagttggttgaatggaagaaactgctgttgctgagagtaggcagcaaggtttgctagcacaagttgttgtagttgttgtgccctgatgttttgtgccaataaatgcaccaaaggtaactgttgtaatagggctgatgattgc

SEQ ID NO: 5185 - DNA, 510 bp, Zea mays
  Clone ID: LIB3061-080-Q1-N6-G3
aaaaatgtactttcttatttctgggaagccacaaacatcagacaaaaaactttattattgaactataactcataagaaatctaaaagaggcaccaccaatgatgggttgttggtagaacgctgctgggtttgtcaaagcaagttggttgaatggcagcaattgttgcagttgtaagagggtgccagcgttaggcgcagcgtgctggtagaacggcaacaactgtggttgtatcaagaaggtagcagggctcacaccagctagctggctgaatggtagtagttgttgctgctgtaaataagcaggagagttcaatgctgccagttggttgaatggaagaaattgctgggggtaggcagcaagtagctggctgaatggtagttgttgttgttgcaaattagaagcagagttcaatgcagctagttggttgaatggaagaaactgctgttgctgagaggtggcagcaaggtttgctagcacaagttgttgtagttgttgtgcccctgtttttt

SEQ ID NO: 5186 - DNA, 556 bp, Zea mays
  Clone ID: LIB3061-080-Q1-N6-G4
agaaatgtactttcttatttctgggaagccacaaacatcagataaaaaatttattattgaactataactcataagaaactaaaagaggcaccaccaatgatgggttgttggtagaacactgctgggtttgtcaaagcaagttggttgaatggcagcaattgttgcagttgtaagagggtgccagcgttaggcgcaacgtgctggtagaacggcaacaactgtggttgtgtcaagaaggtagcagggctcacaccagctagctggctgaatggtagtagttgttgctgctgtaaataagcaggagagttcaatgctgctagttggttgaatggaagaaattgctgggggtaggcagcaggtagctggctgaatggtagttgttgttgttgcaaataagaagcagagttcaatgaacctagttggttgaatggaagaaactgctgttgctgagagtaggcagcaaggtttgctagcacaagttgttgtagttgttgtgccctgatgttttgtgccaataaatgcaccaaaggtaactgttgtaatagggctgatgatt

SEQ ID NO: 5187 - DNA, 518 bp, Zea mays
  Clone ID: LIB3061-080-Q1-N6-G7
agaaagtactttcttatttctgggaagccacaaacatcagacaaaaaactttattattgaactataactcataagaaatctaaaagagggcaccaccaatgatgggttgttggtagaacgctgctgggtttgtcaaagcaagttggttgaatggcagcaattgttgcagttgtaagagggtgccagcgttaggcgcaacgtgctggtagaacggcaacaactgtggttgtatcaaaaaggtagcagggctcacaccaactagctggctgaatggtagtagttgttgctgctgtaaataagcaggagagttcaatgctgccagttggttgaatggaagaaattgctgggggtaggcagcaggtagctggctgaatggtagttgttgttgttgcaaataaaaagcaaagttcaatgcaactagttggttgaatggaaaaaactgctgttgctgaaagtaggcagcaaggtttgctaacacaagttgttgtagttgttgtgccctgatgttttgtgcccat

SEQ ID NO: 5188 - DNA, 513 bp, Zea mays
  Clone ID: LIB3061-080-Q1-N6-G9
atcgagataaatctcaatcaatatattgattatttctaggaaacacatgtcggtatgagggcaccattgtcgagtacatctcatatgtaatctaaaagatggcacctccaacgatgggttgctgcaaggcagggttcatcaaagagaactggttgtatggcagcaattgttgttgctgctgcaggaaggtagcgaccaatgggttagccactgccaatggattaagtaactgttgtcgctgttgtaggtacgcagcagagtttgacacagccagttggttgaatggaagcaactgttgtaagtaggcagcagggtttgccacagctagctgagtcagagctggtacaatttgttgcagcaactgttgttgtaggtacgtaggtgcattgcccaccgcgagcgggctagatgaaagtagttgtaggtagaccgcagggttcaccatggctagttgactgagcactggcataaactgttgcaactgttgctgttgcttgtatgcagctaccttcg

SEQ ID NO: 5189 - DNA, 339 bp, Zea mays
  unsure (1)..(339): unsure at all n locations; Clone ID: LIB3061-080-Q1-N6-H4
gggggggggcgggggggggggggggggggggggggnggggggggggggggnggggngggggggggggnggggggggggggggggggggggggggggggggggggggggggggggggggggggggggggggggggggggggngggggggggggggggggggncngggggggggcggnngggggggggcggggggggggtggggggggggggggggggggggggcctggggggggggggggggggggggggggggggggggggggggggncngggnggcgggggggggggnggggggggggcggggggggggggggggggggggggtgggggggggggggg

SEQ ID NO: 5190 - DNA, 508 bp, Zea mays
  unsure (1)..(508): unsure at all n locations; Clone ID: LIB3061-081-Q1-N6-A1
ggggggggggggnaaaaaaaaannttttttttttttttccacccgacaaatttacatttttttaaggggaaactggccattattgggactacaaaaccacatgcagcagttttgcaaaacatactaaatggggaagaaaaaaagggcggggggggggaaaactttcaactgtttatctatcgccaaaaaaaatatagaagggctttcattccttaatgagcccggatttctctgtttcttttagacaactacaaaaacggggtttgctggggggaacccacaggatacactgacaaacgtaaaactggctccagtttatgctactatgccgcaaccggctgaacgagccctgtcccggggggagtgctgtcgcctgttgcagcagcattctgatcataccttgacaagggcttgtttaccggttgcagcagcctgccgtccctccggggtggcccaaacccccagggattgcccacgtctgcagcccccgggggggaaacacaccatt

SEQ ID NO: 5191 - DNA, 538 bp, Zea mays
  unsure (1)..(538): unsure at all n locations; Clone ID: LIB3061-081-Q1-N6-B1
aaaaaacaaaaaatgtgttttggggaagccacaaacatnannccaaaaaaccccattattggaagnntaactcataagcaatgtaaaagagggcaccaccattgttgggttgttggtngaaccctnntnnntttttggggggcggtgggggggaatnncancnannnnnncanttntnataagaaaccaaaaaaaagccccccttgcttgttttttngntgcggctggggggggggggggggggggggggggcggggggggggggggggggggggtgggggggggggggggggggcgtntgggggtggggggggggggggggggggggtgggtgggggcggggggggggggggggggggggggggggggggggggggggggggggggggggggggggtgggggggggggggggggggggggggggggggggggggggggggggggtggggggggggcgggggggggcggggggggggggggggggggggggggggtggggggcgggggggggggggggggggggggggggcgggcgac

SEQ ID NO: 5192 - DNA, 530 bp, Zea mays
  Clone ID: LIB3061-081-Q1-N6-B10
attataaaaaatactatccaataatatattttagttcttgtacgtattgaaaattatacaaacagcgacatatagagtggtcaagtataattaatgcatgccactctgttcacagaaactctgccatagttacagttcaaggcaccaaaactgttacagctatgcaaaaccatttatttttcatcatttctgtgcctcctatttgtattcaaggaggtgtttttgatctgcgaagcagccgtctatggctcatcccggccgcaagtattctgaattcttcttcccaatgctggacagcacctcacatgcgcgacctcgccgaaccttgctgtgatgttcctggtgcgctcaatggtacaccacttttagctcgttgttccaaatacgatgaaggtttgaagaagggaccatacatttcggcccacttgcttagcttcgaatgtatgtaaggcgctccaacagtgtcagcccagaagacaagaccacccctgtttttgggaaagcccattccaagaacagaagcaatatca

SEQ ID NO: 5193 - DNA, 396 bp, Zea mays
  Clone ID: LIB3061-081-Q1-N6-B2
gggggggccacatttttaaaccttgttgattacaaaaaggtttttattacctttcatccacaaggataaaaatacgggtgggaacaaaatttaaaggggcagcttcccccgcccttttggttttttacccaaccattcccaaacttgaaatttccaaaacaacaaaaacttattgaattaacttaattttaacaaaattagggccaataaaacgcttggagtttttaaattttggaaacacccacccccccaaacaatgtttcctccccccggtttttaataatattggctttttcaaagggttttttttttttttttgttttccgataaattttttgaaagggaacctttttccgattaatatttcaggcgcccaatttttttcgggtgttttcc

SEQ ID NO: 5194 - DNA, 557 bp, Zea mays
  Clone ID: LIB3061-081-Q1-N6-B3
agataaatctcaatcaatatattgattatttctaggaaacacatgtcggtatgagggcaccattgtcgagtacatctcatatgtaatctaaaagatggcacctccaacgatgggttgctgcaaggcagggttcatcaaagagaactggttgtatggcagcaattgttgttgctgctgcaggaaggtagcgaccaatgggttagccactgccaatggattaagtaactgttgtcgctgttgtaggtacgcagcagagtttgacacagccagttggttgaatggaagcaactgttgtaagtaggcagcagggtttgccacagctagctgagtcagagctggtacaatttgttgcagcaactgttgttgtaggtacgtaggtgcattgcccaccgcgagcgggctagatgaaagtagttgtaggtagacggcagggttcaccatggctagttgactgagcactggcataaactgttgcagcttttggtgttgctggtatgcagctacgttcgccagagcaagtgggtttggatgcaagcagctgctgttgcaagtaaggt

SEQ ID NO: 5195 - DNA, 543 bp, Zea mays
  Clone ID: LIB3061-081-Q1-N6-B4
aaaaccaaaactttattatgatgcatatattattggtcataccacacatgataatgtgtgtcgtcttactgcattattacatatatagatagagagggatggatagaggagatttcccaaatatcatgaatcagtagtagggcggaatggcagcggagacgccacaggggttggtgcggtagctgggcagctggtactggtactggtagagtccacccatggccggcatgttctgcgccatcatcatggccatggggttgagaccctgggctgccagcagctgctgctgctgctgcatcagagctggctcgtacaggctgctgctggcggcagcggcacgctcaagctgcatcatcatctgcagctgctgcgcgacggactgcacgtccatcatcctcatctgctgctggcagcactgttgccggagcggctggtacatggcgctcgtctgcccacacccggcgtagtagggcgccgccgccagcgggctgcactgcggctgcctcaggtactccgcgtaggggtacagcccgccggcgccca

SEQ ID NO: 5196 - DNA, 465 bp, Zea mays
  Clone ID: LIB3061-081-Q1-N6-B6
aacccacgacaacaaataataccctgcacaagggcttcttttcttgtatgcggatcattgcatcagtaacacattagtcaattcatccatgatagacagacagaacaccaggaagtctaagcattattggacaagcttaagaattagcctcatcaggaaccagatctcccgctgcgagaaattcggagttgtggctcctctagctgccgactggttgctcaagctgcccactttcaggtcgggcttgggcaggggcagggcgatgagctcaaagactgccttggtgattttcggcaccaggtctgacgatgaccccgttcactcccatgaggtgctgcatgtaaaccgcctacggcacgttgctcaaagttccatacgttagcacggaaagggtagcttccttgatccttggcacggaggcggggtgcctgaagatcccgcgggcttttgaaactattccttgca

SEQ ID NO: 5197 - DNA, 512 bp, Zea mays
  Clone ID: LIB3061-081-Q1-N6-B7
atcgagataaatctcaatcaatatattgattatttctaggaaacacatgtcggtatgagggcaccattgtcgagtacatctcatatgtaatctaaaagaggcacctccaacgatgggttgctgcaaggcagggttcatcaaagagaactggttgtatggcagcaattgttgttgctgctgcaggaaggtagcgaccaatgggttagccactgccaatggattaagtaactgttgtcgctgttgtaggtacgcagcagagtttgacacatccagttggttgaatggaagcaactgttgtaagtaggcagcagggtttgccacagctagctgagtcagagctggtacaatttgttgcagcaactgttgttgtaggtacgtaggtgcattgcccaccgcgagcgggctagatgaaagtagttgtaggtagacggcagggttcaccatggctagttgactgagcactggcataaactgttgcagctgttgttgttgctggtatgcaactaccttcg

SEQ ID NO: 5198 - DNA, 454 bp, Zea mays
  Clone ID: LIB3061-081-Q1-N6-C10
gggcgctgacctcgatgcctcctccacgtcccgctgcgagaagccgaagcggtgggtgatgagaggcttgacgtccaccttgccgctgcgcaggaagtcgatgcacagtggccaggtgtccttgtaccggaacacgcccaccacgtccacctcccgcgccgccgccgccgtcaggggcagcgtcatctcgttgtggcccatcccgaccaggcacaccttcccgccgggccgcgtcgcctccagcgccgtcgacatggtcttgctgaacccggcgcagtccaggctgacgtcgatgtccgagcccatggccgcgcggatgcgctccacctcgtccgccaggtcctccgcgcggggcgacacccgcaccgccgcgtccgcgcccagcgacctggccacggccaggcggtgctcgtccacgtccacgaccaccacgcgcggcgcgccgaaggcccgc

SEQ ID NO: 5199 - DNA, 353 bp, Zea mays
  Clone ID: LIB3061-081-Q1-N6-C3
ggaaaaggggaaaagaactttttttttggggggggggcccccccctaaaaaaaaaaatttttttgggggggcccccaaaaaagagcaaaaaaaggggggccccccccattttttttggggggggggggggccgggggtttaaaaaaaaggggggaaaaaagggaaaaattttgttttttaaaaaagggggggggggggtcccccaacaccgggggaaaaaagggaaacccttgtgtgtttaaaaaaaaaaaaaacgggggtctcaaaactcggggaaaaaagggggagttttttgtggggcaaaaaaaaagagggggggtaaaggggcaaaaaaagggggggggggccccccg

SEQ ID NO: 5200 - DNA, 562 bp, Zea mays
  Clone ID: LIB3061-081-Q1-N6-C4
ggaaattaacttcttatttctaggaggccacatacatcagccaaaaaacttcattattgaattacaactaataagcaatctaaaagagggcaccgccaatgatgtgttgttggtagaaggctgctgggtttgtcaaagcaagttggacaaagggcagcaactgttgcagttgtaagagggttgcggggttagccacaaactgctggtagaacggaagcacttgttgttgtgtcaagaaggaagcggggcttgttgtagctagctggccaaatggtagtagtatttgctgctggaaataagcagaggggttcagtgcggccaattggttaaatggaagaaattgttgctgctgagagtaggcagtagctagctggctgaatggtagtagttgttgttgctgcaaataagcagcagggttcagtatagacagttggttgaatggaagaaattgttgttgctgagagtagggggaaaggtttgccagagctacttggctgatcactggtagcacgagttgctgcaactgttctgccctgatggtttgtaccaatggactgcacca

SEQ ID NO: 5201 - DNA, 64 bp, Zea mays
  Clone ID: LIB3061-081-Q1-N6-C5
agcaaaagatcaaatttgggagcactacaatgcaaatatttctgagtacactacatactctcgc

SEQ ID NO: 5202 - DNA, 117 bp, Zea mays
  Clone ID: LIB3061-081-Q1-N6-C6
gggaaatgaagggttggacaaaacttttctgtgcttagcacaaggttcacgaagaattgccgcactggtttttagttattacaaccagagttgtttctactgtatacaagttttccc

SEQ ID NO: 5203 - DNA, 519 bp, Zea mays
  Clone ID: LIB3061-081-Q1-N6-C8
agaaatgtactttcttatttctgggaagccacaaacatcagacaaaaaactttattattgaactataactcataagaaatctaaaagagggcaccaccaatgatgggttgttggtagaatgctgttgggtttgtcaaagcaagttggttgaatggcagcaattgttgcagttgtaagagggtgccagcgttaggcgcagcgtgctggtagaacggcaacaattgtggttgtgtcaagaaggtagcagggctcacaccagctagctggctgaatggtagtagttgttgctgctgtaaataagcaggagagttcaaagctgtcagttggttgaatggaagaaattgctgggggtaggcagcagatagctggctgaatggtagttgttgttgttgcaaataagaagcagagttcaatgcagctagttggttgaatggaagaaactgttgttgctgagagtaggcagcaaggtttgctagcacaagttgttgtagttggtgggccctggtgttttgtgccaat

SEQ ID NO: 5204 - DNA, 525 bp, Zea mays
  Clone ID: LIB3061-081-Q1-N6-C9
aataccaatcagctccgctaccttccctgtttcttagaggtgcaatttgcaaggcaatcagttcaaattataaattaacaaagtaaataaggacggagcaagcatgtaaaccacacaagatagttactaagttaatcgcagattcagttcacggaagaacagaacggtatacattggtcagacgaagaaaccaacaaatctactggagcaacagggaggaagaaggatggcaatctcacggaccagcagaacggcgccgcaagcgcgatcaggtcacgcgatgacaaacaccctgagctcccccctgtccccgcgggtgacgcgcgtgtcgtcgtcgaggtaggtcacctcgaactcgccgctcccggtgttggacggcggccggaggttgtccgggatgcggggcacctccagcggaggaagctgcgacaggttgcccttggtcttcaccgtcgtcttctcgaacgtgatcttgatgcccgaggtcccgatgatctcgaacttgtgcgccagcgtcgccgtggc

SEQ ID NO: 5205 - DNA, 558 bp, Zea mays
  Clone ID: LIB3061-081-Q1-N6-D11
cacaccaaaaaaaccctcagttttaagcatgaacagtttggaagttttacatagctgagaaagggacggaactgtagcttttatgagcgctgctactaatactcttcacagagcatggctctgtcatagtagtattattaatcaccagatgcaccaacagcaggcgatccggctgccaacgagcagaggcaccctcagacaagcacctgagctgcagctagcctagcgatcgggaccctgaaaggggagcaagaaacgtaatccagcccagtcttggcgaagaaagcaaccgatgaaggctctccaccatgttctccacaaatgcccaccttcaagttaggcctagctttgcggcccctctctgtagcaagcttaaccagctcgcccactcctctctggtcgagaacctcgaaggggtcatgctggaggatgccctgagccagataaatggggatgaacttccccacatcatccctgctgtagccaaaggtcatctgcgtgaggtcgttcgttccaaaggagaagaattcagcctgctccgcgatctcgtcagccact

SEQ ID NO: 5206 - DNA, 432 bp, Zea mays
  unsure (1)..(432): unsure at all n locations; Clone ID: LIB3061-081-Q1-N6-D12
atttacctaacaaaagagataaaaggaggaaaattatgtacattattatctggtgcgtttccttttggcctaactagtgtngcgaaactactgagtacaatgtttcttaacactaaaactggtactagttcttgggggggggggggtgcatcaggaggggcgcacctnctaattgtttgaaacacaaaaacatcaaagctggttctgaacatttttcaatcccattggcttcaaatcagtngagcctgattctcgtggtgttgtgctgctggctcagagggcagcgctccaaatctctcccgccttcattgcaagtctggtgtccacacccaaatgcaaggtcctttggttttttcttgccgatggggccccgaattctgtcctctcaagcccttttttggtgcgctggtgtctggtccccggtcgcgtggg

SEQ ID NO: 5207 - DNA, 284 bp, Zea mays
  Clone ID: LIB3061-081-Q1-N6-D2
aaaaacaaagggggggtttttttaaaattttaagggcaaaaaaataaagggggggggcctttttgggtaaacccccgttttggggataaagggggggggggacaaaattttttaatgggaaaccccccaaagggtatgggggggggggggattttttgggggggggggggggcccaacccccccattggggggggggtttgggcctcttaaaaaatcgcccccccccttggggggggggggggggaccccaaaaaccaaaagggggggggggggggcccccccg

SEQ ID NO: 5208 - DNA, 508 bp, Zea mays
  unsure (1)..(508): unsure at all n locations; Clone ID: LIB3061-081-Q1-N6-D3
gtcccaatgatattcattaacatctatttattcgatgcatgagatacagtcgacgtttccaagcacgcacacaaagcgtgcaacctccttacttttatttcatgacggggatggaaccaaacttttattgactactacgacgagcgtactacgcgtgtgctcttgcttcccattcattcccatcggggcatacgtacccgtatactatttagttgtggacctcgacgagctcaggacggtacatgggctctggtatctgatcagggtgcgagcagcaccggcagccgccatggtacccgcggttgcagcagccccaccggcagtgcgggtagccgccgncgccgccgccgccgtgacccgggtagccgccgcccgcgtgccagtcttggacctccaccttcttttcctctttggccgccttggcttgctcgttagcgggagcggcgaggaaagtggcggcaaacaaggacgttagcacgaggagcgccttggaccccatgatgctagc

SEQ ID NO: 5209 - DNA, 500 bp, Zea mays
  unsure (1)..(500): unsure at all n locations; Clone ID: LIB3061-081-Q1-N6-D4
gcagcaccaaaaagcaccattttttccttaggattaacttagaacaaatcctggcaggggtaacagcatccatcgatccacagtccatgctggttgatgcatgggtctgctggagcccaggatgaacacagcactaacaactgacacaaagcgaccttgcaatcaaaaacacagatgggcaacaacaaacgagacgaacgaagataaaccctttggactagggtaaacatcacgggagcgaacaggataacttggccgcgcgggccccaccggtcagttcctccagttcccgtcggagttgccgtagccgccgccacggttgccaccggcgtagccgccaccaccaccaccgtagccaccggcgccaccgtagccgccgccgccaccgccgtagccgccgccgccattacggggcccgccaccgncgtagccgccgccttcacgggcaccaccgtagccggcgccgccgtcttcacgggcgcgggggactgggccttgtt

SEQ ID NO: 5210 - DNA, 360 bp, Zea mays
  Clone ID: LIB3061-081-Q1-N6-D5
aaaaaaaagcaaaggggtttttttggcaaccatgtttgttcatacagacaccacgacggtgggacatttaaaaccctggtggggcatttgacatttttaaaacctttttttaacatatttggaggaccccgcccggtggtgaaaacaaactaaagttggggcagggggacacccattccaaggaccagcctggttgttgcgcgtccataaaataccacaaatttttttcccatgggggcggggattcaaaaacctggggcgctttttatgccccatggcccccaaagtttggggggggtggggaaaattctttaaaaggtgaggggggtcgccccttttaatgggccccacgtttcaaaa

SEQ ID NO: 5211 - DNA, 542 bp, Zea mays
  Clone ID: LIB3061-081-Q1-N6-D9
atggaacacacggtcacatatggaacacacggtcacataaggaacatgcatgcatggtacaaatttaaagtgggtatacgagggaaacagcgtacatgggaaataaataaagaccgcatgaactcaaaaataaaccaaacagccaaaaggcatgggcgggttttcgtcttcttttttttttaacacacacacaaacacaagggccacgtgcgcggagagggtttttattcagtagtagtacacctagcagtagtagacatgcaagtcgtgacgatcatgcgtaggtagctagatatggtcatgacggtccgatccgcgggcgccgacgtacggcgggatagatatggatcgtcttcaggtggccgccgtcgcccgtcgtcgtcgtttagggttcagttcaccctggagcactcggtggaggtgctgatggtgtaggggatgctgacgccgcacttggaggggatgctggcggcgttgccggcgttgaggccgctgacgccggcggcggcgttcttgatgcagttgcaggcggcgcggcggta

SEQ ID NO: 5212 - DNA, 484 bp, Zea mays
  Clone ID: LIB3061-081-Q1-N6-E11
cagataaaaaactttattattgaactataactcataagaaactaaagggggcaccaccaatgatgggttgttggtagaacactgctgggtttgtcaaagcaagttggttgaatggcagcaattgttgcagttgtaagagggtgccagcgttaggcgcaacgtgctggtagaacggcaacaactgtggttgtgtcaagaaggtagcagggctcacaccagctagctggctgaatggtagtagttgttgctgctgtaaataagcaggagagttcaatgctgctagttggttgaatggaagaaattgctgggggtaggcagcaggtagctggctgaatggtagttgttgttgttgcaaataagaagcagagttcaatgaacctagttggttgaatggaagaaactgctgttgctgagagtaggcagcaaggtttgctagcacaagttgttgtagttgttgtgccctgatgttttgtgccaataaatg

SEQ ID NO: 5213 - DNA, 409 bp, Zea mays
  Clone ID: LIB3061-081-Q1-N6-E12
ggggggggggggtttttaaaaagcttgggtcagactcgagcttttatttggtaaaacacatcaaccgtcacactacacactgttctttttgaggacggcaaaggggtctttctggcaacctctttctgcccaccccacccgtttttttgggggggggggataaaaggggggggttcactccctttccttgaccaaaaataagacacccaactggccatcccacatgctgctgcctggggctggtgggaatccttctcccggggtcggccctgggtccctggtttttctgcgtccgtgcgatgctgctctccccgcccggaggggtgcggtttccccccacacgctcgcgggttgggtcccccccgtcccccaaaatggggcgggcctggggccccttcgctttcggggg

SEQ ID NO: 5214 - DNA, 537 bp, Zea mays
  Clone ID: LIB3061-081-Q1-N6-E2
aatgcaaaagtggtaaaacttaattaggacccaactgaagtaaaacaaatgggataaggaactcagcccacccaaaacaaacgctcaaccaagaacaaagtaattcactggacttgaccaactctgattaacaacattattaagtgggggttcctttaattaaaggtgaagtgaccgtgctgctacatccctctattccccaagcagaaattaggtgccttcaccggaagtttgggcaaaatccctaagaacgatccggaagtccaccacccacaacgaaaagttccgggtacttctgccgcatcagctcctcaagttcccatgtagcctcgcgctcagactgattagtccataagaccttgacatacttaattgatctcttcctcaacacacgctccgagaattccaatatacgcaccgaacgacactccagagtcagatcctgctgcaccgcaattggttccatctcaatctgatggtccggatcccgcaagaacttcctcaacatagagacatgaaaaaccgggtgtacccctg

SEQ ID NO: 5215 - DNA, 299 bp, Zea mays
  Clone ID: LIB3061-081-Q1-N6-E3
ggttgggttcttgggggttttctttttttcccaacccgggggggggggggggggtgccggacccagggcggaaggggtcccctgtttccaaatggggggggttttaaaggcgggggaataaagggggaaaaagctaaaagtgagaaaaaaggggtccctgtagagtgaccaaacagaaaaaaaaggggggggaaaaaaggaaaacttggggggcccgaaaggggggggccccccggaataaagggatcagccaaaccgccggaaaaggaggggggaaaattaggggcccggggcgtttt

SEQ ID NO: 5216 - DNA, 496 bp, Zea mays
  Clone ID: LIB3061-081-Q1-N6-E6
ataaaaagcttaagatgttagagcgaagtgcacacttaacattaaccacagcacatgtagaaaagcgagggggaggagcgagggaaaaagattattattacctgtatgtagtgcctctatcctgcatgtatatcccatcgtcctcctgggattgctgttttggaggactgagaatttcttctagggttgctgttgctgatcgagctggcgtcagttctgctttgctggggtcgggtgtcgggtctatagcagtcatgctgtttcctcccccgcttctctgctctcccggggcttgtcgtcgtcgtcattcttgggcgaccggcgcgggcgtccctccttgttctccggcaggagcttgatgacgatgcccatggttatgaggaggagtcccgtcgcgtgctgctccgtcaggggcttggtgaatatcaggtacgacagcagcagcgtcaccgccttcctcgccgtcgtcaccatggctgtggttgctgcaccgaaa

SEQ ID NO: 5217 - DNA, 481 bp, Zea mays
  Clone ID: LIB3061-081-Q1-N6-E7
ggaacaatacttttttcttttcatttcaattgttcattcaggtcattgctcacactgacactgccacccatggggatgcgtgacacattattactcaatcatcgccgctaaatgactcaactagctagctagccagcggctttactacagcacatagtttcttcagtgggggacacccccggcagcagcgtaggggcatggagtcggctgctgcaggccccacatcgccgtcagttgctgcgctatttgcgccgccaacagccccgcgacctggccgctttgcggctgctgctgcaggatggactggaggaccaagccgaaaatcgcctggtaccggtgctgcggctccacctgcctgagctgctggcaacactgctgccgcaacgactggcactgaggcgagcagtagggcgtccccctcgggctgcactgatgcctcaaaaactcgacgcactggccccagatcggggtgctgccaacc

SEQ ID NO: 5218 - DNA, 477 bp, Zea mays
  Clone ID: LIB3061-081-Q1-N6-E8
cacattagaatctggaaatgtaacttcttatttctggttggccacatacatcatccaaaaaactttattattgaattacaactaataagcaatctaaaagagggcaccaccaatgatgtgttgttggtaggaggctgctgggtttgtcaaagcaagttggacaaagggcaacaattgttgtagttgtaagagggttgcggggttagccgcaaactgctggtagaaaggcagcaactgttgctgtgtcaagaaggaagcacggcttgctgcagctagctggctaaatggtagtaatatttgctgctgcaaataagcagcgaggttcagtgcggccaattggttaaatggaagaagttgttgttgatgagagtaggcagtagctagctggctgaatggtaatagttgttgctgcaaataagcagcagggttcagtgtagatagttggttgaatggaagaaattgttgttgctgatagta

SEQ ID NO: 5219 - DNA, 550 bp, Zea mays
  Clone ID: LIB3061-081-Q1-N6-E9
ggaacaatacttttttcttttcatttcaattgttcattcaggtcattgctcacactgacactgccacccatggtgatgcgtgacacattattactcaatcatcgccgctaaatgactcaactagctagctagccagcggctatactacagcacatagtttcttcagtgggggacaccgccggcagcagcgtaggggcatggagtcggctgctgcaggccgcacatcgccgtcagttgctgcgctatctgcgccgccaacagccccgcgacctggccgctttgcggctgctgctgcaggatggactggaggaccaagccgaagatcgcctggtaccggtgctgcggctccacctgcctgagctgctggcaacactgctgccgcaacgactggcactgaggcgagcagtagggcgtcgccgtcgggctgcactgatgcctcagaaactcgacgcactggcccaggatcggggtgctgccaacgccgcaggttccctgcagctggcacgggcttggatgcggctgttggcacgggcatggggtgtggctgggg

SEQ ID NO: 5220 - DNA, 565 bp, Zea mays
  unsure (1)..(565): unsure at all n locations; Clone ID: LIB3061-081-Q1-N6-F1
ggggggggggaaaaaaaaaattttttttaagaagtccgtacatatgctgtgacgcataatacaggaacacggccacttttacaaagaaaaaacggaccttttttcaatcactggaaagtncgagttncaaccgtttgtggggggggggggccctatatctaggaagactgacatcncanctgggaggcatactaacaaatcgaagggggcctttgactggtngggctggcgctggtttcccaaagctgcgcgcctgtccggtggcgggggcaacacccgggttggtcatggctcttgcctgctgcggggtgcggtttgaccagtggttctgccggcgggctcattggtcaaacctgtggcgcgcctcgcggggggccgggcgtgtggggctgcgggccgccggggtgggcctgcgcgctgtggggccgcccggggcgggggggcctggggtggcgggggggccgggggggggggggcgcgggggggggggggggggggggcggggggggggctgggcgcgggcggggcgggggggggtgctgaccgggggcgggtggccggtaac

SEQ ID NO: 5221 - DNA, 509 bp, Zea mays
  Clone ID: LIB3061-081-Q1-N6-F10
caatcaggccattccaagcttgttgattagcaaactacaggcgttacatggaaaataaatgtaccaacgatgtcattcagacagcaatgcaacagacattgcacccaaatgtgcgttataccgtagcattccaaacattcaagtccccctatttatcgaaaccatcactctagcaaatcccacaaacagaagttaaaaggtacccagctatgcctgggtagcattttttatgttgcagcaaaaaaggatacattccccgcttgcgaggtcgattcagcttcctatttcccagctcggcgacagcaaaaccagagatcactcccatgctttaagggcaccacccctcccaattgccttgatgatagtctgcttactgttgcgcgcactgcactctctgggctccgcccggcatctcgtcgtcctcctcgtacgcctcctgggcagcgtgagcttgcttcctgcgcatctcttcctcgatgttgttcacatcatgcatagtcgtctcctcg

SEQ ID NO: 5222 - DNA, 521 bp, Zea mays
  unsure (1)..(521): unsure at all n locations; Clone ID: LIB3061-081-Q1-N6-F11
cagcacgcgtcgtaatcnggnacctctatacggacgcccctgggggggggggggtttttaaaaaaaaaattggttttggtttttttttttatttgtttttttttttcattgggtttttttttttactttcctgttggggaccgcntcggggtgggatctttttttttttngggggggccccaaaaaaaaaagggggggggggggggaaaaacgggggggaaaaaacaccaaagggggggaaaaaaaaagaaaaaacccccttggggaaaaaaacggggggggaaaaaaaattgttaaaggcaaaacacccaaaaaaaggggggggggaaggggataatttgggggggggggggggccaaaaccccaaaaaggggggggggaggcgcccccccaaaaaaacccccccccccctgggggggggggggggaaaccaaaaaaaaaaaaaaggggggggggggccccccccccggggggggggaaaaccccgcggggnatcgcgcgggggggattttttggggggg

SEQ ID NO: 5223 - DNA, 128 bp, Zea mays
  Clone ID: LIB3061-081-Q1-N6-F3
ggaaggcccttttttttggggggccccttttttttcccaaaaattttttttttgtttccccccctttgggcgccctaagggggggcccccccccttttttttttttttttggggggccttcttttttt

SEQ ID NO: 5224 - DNA, 451 bp, Zea mays
  Clone ID: LIB3061-081-Q1-N6-F7
ggggagggggggttatcccccaagataaaaggggccctccgggggaaaggggcagcccagggggctttggggtagatcaaaaaggtaagccctttttttttgaacaaggtcaaaaaaaccgggtaatttttttttttggggggaaaaatacttggccatccccactcctaaacctaaaaaacaagatcccccccaccggtgggcttttttggaattttttttttaaccctttcggggggggccccaccaaagggggttgaaaaaaaaaaagaaaagggtttttaaaaccccccccccaccaagaaagggggggcggtgaaaatttgcccgccaaccccgatgggaccctttttgaaaaaaaaacaaacctggggaaagggcttggccatcccaaccttaaaaacaaaggtttaaaacccccttggggggaaattcttaaggggggggggaa

SEQ ID NO: 5225 - DNA, 527 bp, Zea mays
  Clone ID: LIB3061-081-Q1-N6-F8
gataccaacttactcaaacttattattgttgtcacacgagtgttaattattatcatttacattacattttgtgaaaccaaacggcacccgaggttcgttaggtacatactccttagcaaggtaaccgactcccaacttggggctcctactgttcaccagcgatataggaatccagcatcggtttcagcttggtactgtcacaatcctgttctgcagcacagatgagaggattcccggctatgttgagcgttcttgcagacgtttttggtatcgggccactcaagttattgtacgacaagtctatgtactggagtcttccgagtcggcctaaagaatttgggactgtgccatgtaatttgttactggacagaaccagcgtcctgagctttgctaacttgccgatctctgctgggattggcccaattatgttgttgttctgcagctgaagcttctcaagttttgtcaggttccctatgctcggggagagccggccggaaagttcttgcttggagcttccagtgcagtga

SEQ ID NO: 5226 - DNA, 140 bp, Zea mays
  Clone ID: LIB3061-081-Q1-N6-F9
atgatgtaatctactatttcccttattaatactattttggagcactgtgtggatgatgttccactattatggtaactgctgtgtacgtggaataactgatcctggcacgtacatggttcgcattcggtttgcctttttaa

SEQ ID NO: 5227 - DNA, 509 bp, Zea mays
  Clone ID: LIB3061-081-Q1-N6-G10
atagtaaaaaaaacgggggtattttattttagaggtaattataaaggcgactacatctatatatataaatactcctgacatgtacttattctaggtctttttgatcaacctttacatatttgacacatacagaacgaaggactaacatatacacatatgcatacaagagcttctttattatttgacacacgatagactgtgacgaggaactaattaatatatctatttgaaatcaagcatcatgctgttgaaatcaaagttgacgcaggtagacaccgatagcgtcgacgagcctggttcccgcgcgtccgtagaatcccacgacgctgctgccgatgggcgcggtgatgcagaagcgtgtcccgttctcggtgccccatgggccccaggctctggtgctggtgatgaacctgagcgaggttagggtagtagcaccttcaaatgtgccgtacgttcctgacacctccctgatgtgttcgttgtcgccaagatcgatcgttcgaacattg

SEQ ID NO: 5228 - DNA, 428 bp, Zea mays
  unsure (1)..(428): unsure at all n locations; Clone ID: LIB3061-081-Q1-N6-G2
gcaacaaataggataggctaggaacacagccggaagagggcaccattatcgagtacatctcataggtaatctaaaagagggcacctnccaacgaggggttggctgcctcgacaagacagggtttatcaaagagaacggggggtatggcagcaattgttgctgctgtaggaaggcagcgaccaaagggttagccactgctaggggattaagtaactgttgtcgctgttgtaggtacgcagcagagttcgacatagtcagttggttgaatggaagcagctgttgcaagtaggcagcagggtttgccacaactagctgagtcagagctggtacaatctgttgcaacaattgttgttgcaggtatgtaggtgcattggccacagcgagcgggctagaagaaagcagttgttggtgttgtaggtaggcggcag

SEQ ID NO: 5229 - DNA, 462 bp, Zea mays
  Clone ID: LIB3061-081-Q1-N6-G6
agaatctggaaatgtaacttcttatttctggttggccacatacatcatccaaaaaactttattattgaattacaactaataagcaatctaaaagaggcaccaccaatgatgtgttgttggtaggaggccgctgggtctgtcaaagcaagttggacaaagggcaacaattgttgtagttgtaagagggttgcggggttagccgcaaactgctggtagaaaggcagcaactgttgctgtgtcaagaaggaagcacggtttgctgcagctagctggctaaatggtagtagtatttgctgctgcaaataagcagcggggttcagtgcggccaattggttaaatggaagaagttgttgttgctgagagtaggcagtagctagctggctaaatggtaatagttgttgctgcaaataagcagcagggttcagtgtaaacagttggttgaatggaagaaattgttgttgc

SEQ ID NO: 5230 - DNA, 517 bp, Zea mays
  Clone ID: LIB3061-081-Q1-N6-G7
gggagagcgaaagagagaattttcgctctaataatattagaataaatagtccttcggaatttacagttgttttaacagattaggggaggtataacattccagcgtaagatgacctgcatttgacataatgttcggttacaacttacaccagtctatgaacgaaaagaaggggaaaaacttcggagcaacgaccaatgtaaggcaaaaactacaaacagacaaagattataaacacaaaatagtcgctctctctcttaacagtagtacctctcccacgggcattcgtctatcctggacatgttctctccggccatttttcatcacacacgtggagttcataatgtgatcagccacacacgtgctgctcgcctattgcagttctcagggcacggacaaacgagtataactgattagccaaatccgaaaccttcatttgcttcgtggattgccaatagtaaccgctcctggagctgctctttggatgtgtactcaggcaagtctagttggttaaagcaag

SEQ ID NO: 5231 - DNA, 540 bp, Zea mays
  Clone ID: LIB3061-081-Q1-N6-G8
attacaagtcctgatatactcaaaatgcataacttattacaaaagcaggacggtaggaaccctccaaagcttatacactagcctaactagtcttcctccagaactggaaacgccctccagccacaggaacacttagagtactcctcatcacctttgttgcagagaagagattctagatccttatacctaacctttagttagatagctccatccacttgatgagcaggcactggagtagacttcttcaagtaccacctcatctaggtgttcttcgaagctgtcggtacgcgcgcgagattaaccggggatgacgcagttcaaagggtcgacggtgaagcggtctgcgacaacgttctgcggcagcgagaccctgttctgagcagtagacaccggtagagttaatgatccttcttcggtgagcttcacttgttgatggagagcacataacacgtgttatcttggtgtgtcactgcgcgactaagttgatctcagatttcacaaggaccataattaccaccattttattcatttcaccggctg

SEQ ID NO: 5232 - DNA, 347 bp, Zea mays
  Clone ID: LIB3061-081-Q1-N6-G9
aagaatctagaaagttctttcttatttctggggagccacaaacctcatccaaaaaacttcattattgaagtataactcataatcttttttaaagagggcaccaccaattatgggtggtgggggggacgcttttgggttggtcaaaccaagttggttgaataaaaaaaattggtgcacttgtaagagggtgccagcgttaggcgcagcgtgcaggttgaaccgcaacaactggtggtgtgtcaagaaggcaacagggctcacatcacctagctggctgaatgggggtagctgttgctcttgtaaataagccgcagagttcaatgctgccagttggttgaatggaaaaa

SEQ ID NO: 5233 - DNA, 464 bp, Zea mays
  unsure (1)..(464): unsure at all n locations; Clone ID: LIB3061-081-Q1-N6-H10
aaaaaaaaaaaaaaaaaaaaaagnggnggggggggngggggggggggggggggggggggggggggggggggggggggggggggggggggngggnnnnggggggggggngggnggggggggggggggggggggggggggnngggggggggggggggggggnggggggggggggggggggggggggggngngggggggnggggggggggggggggggggggggggggggggnggggggggggggggggngggggggggggggggggggggggggggggggggnggggggngggggggggggtgggggngggtgggtgggggggggggggggggggggggggggnggggggggggggggggggggggggggggggggggggnnggggggggggnnggtggggggggggggggngggggggggggggggngggggggggggggggggggggggggggngggggggggg

SEQ ID NO: 5234 - DNA, 539 bp, Zea mays
  unsure (1)..(539): unsure at all n locations; Clone ID: LIB3061-091-Q1-N6-A1
gggggggggggganaanaaaanagggagggggggggggggggggggggggggggggggggggggggagagagggggggggggagtagggaggggggggggagggggaggggagggagaggggggaggaagggggagggggagggagggggggggaggggggggggaggggggggggggaaggnggaatgaagggggggggggggggggggggggggagagggagggggggggagggggggggtggggggggagggaaaggagggggaggggggagggagagggggggggggggggggggggggggggggggggggggggggggggggggggggggggggggggggggggggggaggagggagagagggggaaggagggggagggggggggggggggggggggggggggaggggggggggggggagaggagggagggggggggggggggggaggggaggggagaggcgaggggaggggaaagaggggggaggggagggagggggggggggggggggggggggaggggggggggggggggg

SEQ ID NO: 5235 - DNA, 333 bp, Zea mays
  Clone ID: LIB3061-091-Q1-N6-B1
aaaggggttaagtaaaaaaataagttataggatgataatattaatgtgttattgtagattattaggaaaaattaagttttatttttggtgtaggaaaaggagagttttagtagatatttggaaatttagaaacaagagttggctaggagtaaatttgcgatcagtcagttaaaaagtgtggaggttgtttataaattatggcctataatatacacgatcaggggtgaggttatagagttggtggggggataattaaagagatgcttgtataggggatgtaaataaacatattaagtttaggataattaatagtggtttataaagttatggggt

SEQ ID NO: 5236 - DNA, 163 bp, Zea mays
  Clone ID: LIB3061-091-Q1-N6-B10
gggggggggggttttataaaaaatttttaatttttttttttttaatagtttttttgggggagaagagaaattttttttttggggggggggggggggttttatgaaaaaaaattttttttttggagattttatgttaaaaaaaaaaaaaagggggggttggttt

SEQ ID NO: 5237 - DNA, 575 bp, Zea mays
  unsure (1)..(575): unsure at all n locations; Clone ID: LIB3061-091-Q1-N6-B3
cgctgccgcgtcttaacttggtcctctanaggccgccttttttttttttttaactagaaagtctttctttttctgggagcccaaactcagcaaaaaatttattattgaactataacnataagaaactaaaagaggcaccaccaatgatgggttgttggtagaatgctgctgggtttgtcaaagcaagttggttgaatggcagcaattgttgcagttgtaagagggtgccagcgttaggcgcagcgtgctggtagaacggcaacaactgtggttgtgtcaagaaggtagcagggctcacaccagctagctggctgaatggtagtagttgttgctgctgtaaataagcaggagagttcaatgctgtcagttggttgaatggaagaaattgctgggggtaggcagcagatagctggctgaatggtagttgttgttgttgcaaataagaagcagagttaaatgcagctagttggttgaatggaagaaactgctgttgctgagagtaggcagnaaggtttgctagcacaagttgttgtagttggtgtgccctgatgttttgtgccaataaaagcaccaaa

SEQ ID NO: 5238 - DNA, 393 bp, Zea mays
  Clone ID: LIB3061-091-Q1-N6-B7
agaatctagaaatgtctttcttatttctgggaagccacaaacatcagacaaaaactttattattgaactataactcataagaaatctaaaagagggcaccaccaatgatgggttgttggtagaacactgctaggtttgtcaaagcaagttggttgaatggcagcaattgttgcagttgtaagagggtgccagcgttaggcgcagcgtgctggtagaacggcaacaactgtggttgtgtcaagaaggtagcagggctcacaccagctagctggctgaatggtagtagttgttgctgctgtaaataagcaggagagttcaatgctgccagttggttgaatggaagaaattgttgggggtaggcaacaggtagctggctgaatggtcgttgtcgtt

SEQ ID NO: 5239 - DNA, 513 bp, Zea mays
  Clone ID: LIB3061-091-Q1-N6-B8
aaaatagggttttattgtatttttttgttttttgtgtttatatttggaaagaaaaggttctgtttttgttcatccgaacccggggggggaccgggggaacccgggcaccggccccgggggggaaccaggtcccccaccagggagaaatgccaaaccgcgggggaaaaaaggaaaagggggggtcccgggggaaaagggtagcggcacaaaaaagcacaaaaaaaaccagccggggagaaaaaggagaaacccgggggggccaaaagggggggcaaagcaacaaaaaagggaagagccccacgggcccgaaggcaacgggaaaaccaggaacgccaacgggtttaaaaaaacaagaaacacccggggggggggggttcctcctaggggcaccggggagggaaaccttataaccaggaggacgggcaaaaaaagaagggactggacaacggggcccactaaaagcacaacaaaaaggtccaaaaggtgttgccccaacgggccaaaaaacccaac

SEQ ID NO: 5240 - DNA, 527 bp, Zea mays
  unsure (1)..(527): unsure at all n locations; Clone ID: LIB3061-091-Q1-N6-B9
aagatctanaatgtactttcttatttctgggaagccacaaacatcagacaaaaactttattattgaactataactcataagaaatctaaaagaggcaccaccaatgatgggttgttggtagaatgctgttgggtttgtcaaagcaagttggttgaatggcagcaattgttgcagttgtaagagggtgccagcgttaggcgcagcgtgctggtagaacggcaacaattgtggttgtgtcaagaaggtagcagggctcacaccagctagctggctgaatggtagtagttgttgctgctgtaaataagcaggagagttcaaagctgtcagttggttgaatggaagaaattgctgggggtaggcagcagatagctggctgaatggtagttgttgttgttgcaaataagaagcagagttcaatgcatctagttggttgaatggaagaaactgttgttgctgagagtaagcaacaaggtttgcttgcacaaagttgttggagttgttgtgccctgatgttttgtgccaataaa

SEQ ID NO: 5241 - DNA, 517 bp, Zea mays
  unsure (1)..(517): unsure at all n locations; Clone ID: LIB3061-091-Q1-N6-C10
ggtaggtcaaataatgatttattaagtcgtcttctcggttaatttaaaccatgcatggcgcccaccatgccagtagcaatataattcatgtgattgtatgatgcttcacttcccactcatgcatcagtagaaaccttcacaagtgttttttttttgcactcattaataaggtaaggtaatatacgtattgctatatatctctctctcccttcattccccactttaactctttaatttactcatcacagtacatttataatttgtgtggtattattaattcttccacacccggccggccagttgatgacgacaagcgctgatctttcgatcgaccggcattgatcagtagaaaccttggatctttttcggagccaccgccaccgccgngacagccttgtccacgagcttattcttgccaccctctcggccggagtttaagccgaaaggatgttcggataatgtgcccagttcttggctgctgtgctgaaggcttccctgtggctaatgtcggggttgt

SEQ ID NO: 5242 - DNA, 356 bp, Zea mays
  unsure (1)..(356): unsure at all n locations; Clone ID: LIB3061-091-Q1-N6-C12
ggggggggggggggggggnggttgtggggtgggggggggggggggggggggggggtgggnggggggggggggggggggtggggtgggggggggggggggggggggggggggggggggtgggggggggggggggggggggggggggggggggtgggggggggtggggggggggggggggggggggggggggnggggggggggggggtgggggggggttgggggcgggggggtggggggggggggggggggggggtgggggggggggggggggggggggggggggggggggggggggggggggggggggggggggggggggggggggggggggggggggggggggggggggggggggg

SEQ ID NO: 5243 - DNA, 508 bp, Zea mays
  unsure (1)..(508): unsure at all n locations; Clone ID: LIB3061-091-Q1-N6-C2
ccaaactcctttttcccttttattattcctttccatttcaatggttcattcaggtcattgctcacactgccacccatggtgatgggtgacactccgttactcatcgccgctaaacgagtgaactagctatagccctataggtagctagtcagcggctccattacattattactacagtacatagtttcctcagtagtagacaccgccggcagctgcgttgcaagggcagggacctggctgctgcagctgcagaccgcacatcgccgtcagctgctgcgctacctgggccgccatcagcgccgngagctcgccctgcggctgctgctgcaggaaggactgcaggaccacaccgtatgtcgcctggtaccggtgcagcggctccacctgcctgatctggtggcagcactgctgctgcagcgcctggcactgtggcgagccgtagggcgtngccgccgggctgcactggtgcctcaggaactcgacgcactggcccaggaacgggctgccg

SEQ ID NO: 5244 - DNA, 444 bp, Zea mays
  Clone ID: LIB3061-091-Q1-N6-C3
aaaaaaacacttcattatgcccccttaattaaggggatagagttggtgacataaagatcacccctgcttgttttggtggctttatttttgctccagttgagcccacggggggcaacatacacagccccgggcgtttattttttgttcttggtcgaccccccccccctttttcttgtttaacggcctcacgggcaaaaaaccaccttttagttggttcccgcggggcaagtgaaggtgctggtggcgtcatccttggggtagctttaccccttggggcacttccccttgaagtacctggagtagttggtcgggtggcaatcgttggcccccgagcccacccaaaaatactcgtcctttttgaacacggggcaccccttgttgcacaccccgtccttccccaacttggcagggcaacgcgcgtttacgttcacggggcaacgcggg

SEQ ID NO: 5245 - DNA, 423 bp, Zea mays
  unsure (1)..(423): unsure at all n locations; Clone ID: LIB3061-091-Q1-N6-C4
atcgagataaatctcaaccaatatattgattatttcntaggaacacatgccggtatgagggcaccattatcgagtacatctcatatgtaatctaaaagaggcacctccaacgatgggttgctgcctcgacaagacaggattcatcaaagagaaccggttgtatggcagcaattgttgctgctgtaggaaggcagcgaccaatgggttagccactgccaatggattaagtaactgttgtcgctgttgtaggtacgcaacagagttcgacatagttagttggttgaatggaagcagctgttgcaagtaggcaacagggtttgccacagctagctgagttagagctggtacaatctgttgcaacaattcttgttgcaggtatgtaggtgcattggccacagcgagcgggctagatgaaagcagttg

SEQ ID NO: 5246 - DNA, 520 bp, Zea mays
  unsure (1)..(520): unsure at all n locations; Clone ID: LIB3061-091-Q1-N6-C6
atctagaaaagtactttcttatttctgggaagccacaaacatcagacaaaaactttattattgaactataactcataagaaatctaaagngggcaccaccaatgatgggttgttggtagaacgctgctgggtttgtcaaagcaagttggttgaatggcagcaattgttgcagttgtaagagggtgccagcgttaggcgcagcgtgctggtagaacggcaacaactgtggttgtatcaagaaggtagcagggctcacaccagctagctggctgaatggtagtagttgttgctgctgtaaataagcaggagagttcaatgctgccagttggttgaatggaagaaattgctgggggtaggcagcaggtagctggctgaatggtagttgttgttgttgcaaataagaagcagagttcaatgcagctagttggttgaatggaagaaactgctgttgctgagagtaggcagcaaggtttgctagcacaagttgttgtagttgttgtgccctgatgttttgtgccaa

SEQ ID NO: 5247 - DNA, 397 bp, Zea mays
  Clone ID: LIB3061-091-Q1-N6-D11
gggaaagggctttctttgggcccctggggcggccccgggatattctgccccgttcccctaggggggcccccttttccttttggggggggtttttgaacttggggttattttgggcattggtttttcccttgggaaattgtttttcccttaaaatttcacccaaaattctgaacccctggggttaatttttaagcccggggggcccaatgagggggctaacctccctttattgttttgagctcactgacccgttttcccaggggaaaccttttttgcccccttcctttatgaatgggcccacccccctgggggggccggtttggtttttggtcccccggggggtttttttttcacccattggaccggcaacacttgattttccttaaaccccttgccc

SEQ ID NO: 5248 - DNA, 446 bp, Zea mays
  Clone ID: LIB3061-091-Q1-N6-D2
attattgagaagttgtcattttagtttggggaatttattttttcagtttaaaggtttaaaaaatttggaagtttgggtttaatcgggggggggggggagggtttctggaggggtaccagtttttcgttttgtgggtcgttttagaggttggggttattatgggtataggtgtttcctgggtgaaattgttatttgtttagaattggaaataatttaagagcctgaagcttatagggtaaagtctggggtgtctaatgggggaggtaagttaaattaattgcggtggggttagtggccggttttcagtggggaaaaatggggggccaggtggattaatgaattgggaaacgtgcggggagggggggtttgcgttttggggggtgggggggtttttgttttaaacggtgagaaggggaaaaattgattggcttttaacgtttgggctt

SEQ ID NO: 5249 - DNA, 356 bp, Zea mays
  Clone ID: LIB3061-091-Q1-N6-D3
aaaaaagggggaaaggaaccttttttttgggggggggccccttccttttccaaaaaatttttttttggattccccctaaaaagccctttaaaagggggccccccccattttttttttttggggggggggcccttggtttttaaaaaaaggggggaaaaaggggacaaattttttttttttaaaaggggggggggggtttaccccaaacccgggggaaaaaggggaaaactttttttttttaaaaaaaaaaaccccggttgttacaacttgcgggcaaaaagggggaaaattttggggtgaaaaaaaaaaaggggggttaaaggggccccattggtaaaaaaaaaaaaatttttttt

SEQ ID NO: 5250 - DNA, 436 bp, Zea mays
  Clone ID: LIB3061-091-Q1-N6-D7
atcgggataaatctcaaccaattttttggttttttttagggaaacacatgccgggttggggggccccttttcgggtacctttcatttggaatctaaaaaagggccccccaacgatggggtggtgccttgacaaggacagggtttattaaagagaaccggttgtttgggaacaattgttgcttcttttggaagggagccaccaatgggtttgcccctgccaatggattaagtaactgttgtcccttttgtagggacccaacaaagttcgacataattagttggttgaatggaaacaacttttgcaagtaggcaacagggtttgccacaacttgctgagttagagctggtacaatttgttgcaacaatttttgttgcaggtttgtaggggcattggccacagcgggggggcttgattaaaacaatttttgctttttta

SEQ ID NO: 5251 - DNA, 82 bp, Zea mays
  Clone ID: LIB3061-091-Q1-N6-D8
agaaagtactttcttatttctgggacgccacaaacatcatccaaaaacttcattattgaactataactcataagcaatctaa

SEQ ID NO: 5252 - DNA, 464 bp, Zea mays
  unsure (1)..(464): unsure at all n locations; Clone ID: LIB3061-091-Q1-N6-E1
ggggggggnnngaaagaagggggggagggggggggggggggggggggggaaggagggggggggggggggggggggggaggnggggaaaaaaaaaggggggggggggggggaaaaaaggagaggggggaaagagaaggggggggggaggggggggggggggggggggggggggggggggggggggggggagggggggggggggggggggggagaggggggggggggagagggagggggggaggggggggggggggggggggggggggggggggggggggggggggggggggggggggggggggggggggggggggggggggggggggggggggggggggagggggagaggaagagggggggggggggaggaagggaaggggaggaggggaaagggggaggggaaaaggggggagagggagggggggggggggggggggggggggggggggggggggggggggggg

SEQ ID NO: 5253 - DNA, 431 bp, Zea mays
  Clone ID: LIB3061-091-Q1-N6-E10
ggccgggcgggggcagaatcgagcgtccgcttggtgccgcggggcgcttgcagcgcggggacaggacgagggtctccttgccggacggcctccagacgccggtgccggccgccctggccgcgccgccgcccttgcgccagcactgcgtcgccgggcggtggaagaagaagcgctccccgtcggcgtcggctccggatccccctggtgcggcggcggggaggaggtcccacgggtggaggcgcgcgaggtcggcgtcggggatgacgccggcggggagcgggcaggccagcgccttgcggcggaggtagtgcagcagcagctcctcgtcggtggggcggaagcggaagccgatgggcaggcccgccacgggcgcgcccggccgccggccctccatcgccggccgacgggatcgaagcaggattgggtttcgt

SEQ ID NO: 5254 - DNA, 233 bp, Zea mays
  Clone ID: LIB3061-091-Q1-N6-E11
gggggggaaaaatttttttttttttttttaaaggggttttagggggggggggaaaaaaaaaaccggcccccagggggggggggggcaaatttttttttaaaaaaaaagggggggttacccttaaagcatttaaaaggggggcccccccatggtggggttggggggaaaaccctttgggtttttaaaaaaaagggggggggagggggcaaattttttttcttttaaaagggggg

SEQ ID NO: 5255 - DNA, 520 bp, Zea mays
  Clone ID: LIB3061-091-Q1-N6-E2
aaaaatctagaatgtactttcttatttctgggaagccacaaactcagacaaaaactttattattgaactataactcataagaaatctaaaagagggcaccaccaatgatgggttgttggtagaacgctgctgggtttgtcaaagcaagttggttgaatggcagcaattgttgcagttgtaagagggtgccagcgttaggcgcagcgtgctggtagaacggcaacaactgtggttgtatcaagaaggtagcagggctcacaccagctagctggctgaatggtagtagttgttgctgctgtaaataagcaggagagttcaatgctgccagttggttgaatggaagaaattgctgggggtaggcagcaggtagctggctgaatggtagttgttgttgttgcaaataagaagcagagttcaatgcagctagttggttgaatggaagaaactgctgttgctgagagtaggcagcaaggtttgctagcacaagttgttgtagttgttgtgccctgatgttttgtgc

SEQ ID NO: 5256 - DNA, 456 bp, Zea mays
  Clone ID: LIB3061-091-Q1-N6-E7
aagaaacaaaaaaggcccttcttatttcgggggccccccaaacctcacccaaaaaacctcattatgggaccataacccaaaagccatccaaaagggggccccccccaagaggggggggggggagaacaccgggggggttggcaaaacaaggggggtgaagggcaccaattggtgcagttgtaagagggggcccgcgttaggcatagcgggccgggagaacggcaacaaccggtggtgggtcaaaaaggcagcagggcccacaacaactagccggctgaaagggagaagttggtgctgctgtaaaaaagccgcaaagttcaatgccgctaggtgggtgaaaggaaaaaaatgctggggggaggcagcaaccagccggctgaaagggaattgggggtgcaaaaaagccgcagagttcaatgcaccccgttgggtgaatggaaaaaaccgatgttgctg

SEQ ID NO: 5257 - DNA, 500 bp, Zea mays
  Clone ID: LIB3061-091-Q1-N6-E8
agaaaagtactttcttatttctgggaagccacaaacatcagacaaaaactttattattgaactataactcataagaaatctaaaagagggccccaccaatgatgggttgttggtagaacactgctaggtttgtcaaagcaagttggttgaatggcaacaattgttgcagttgtaaaagggtgccagcgttaggcgcaacgtgctggtaaaacggcaacaactgtggttgtgtcaaaaaggtagcagggctcacaccaactagctggctgaatggtagtagttgttgctgctgtaaataagcaggaaagttcaatgctgccagttggttgaatggaaaaaattttgggggtaggcaacaggtagctggctgaatggtagttgttgttgttgcaaataagaaacagagttcaatgcaactagttggttgaatggaaaaaactgctgttgctgaaagtaggcaacaaggtttgctagcacaagttgtttgtattgttgtgccc

SEQ ID NO: 5258 - DNA, 416 bp, Zea mays
  Clone ID: LIB3061-091-Q1-N6-E9
ggttcagagaaacgttttatcggctggaacagggtcctctgtcatcacagttaaacaagggttaagtagcaacaaaaagatttggactcggggtaacaaaactctctttcgcaaggggccaagtatgcaaatttggcgcgaacttatttacctccctgaggagcttcgtaactgccaacattggaacctgctcgcccaaatccataagctggaggctgcgcaaccaacccatagggcgaggacccctgcccaacggtgaaaggaaactgcccctgtgctaaactgtaggaagatggtagctgtgtgtgcccatacccaaatggggcctgcgtttgtccatatgatggttgcgcctgagctgaaccataaggacccactgctgctgctgctgctgccccataagatgtgtttgaccc

SEQ ID NO: 5259 - DNA, 278 bp, Zea mays
  unsure (1)..(278): unsure at all n locations; Clone ID: LIB3061-091-Q1-N6-F1
aaaagaaaaccaaagggggcaccacccaaggaggggggnnggaagaaagcngcaggganagacaaagcaaggnnggagaaaggcagcaaaagaagcaggggggagagggggccagcgaaaggcgcagcgggcaggaagaacggaaacaacggagggagggacaagaagggagcagggaacacaccagcaagccggcagaaaggcagaagaagaaggcgcagaaaaaaagcaggagagggcaaagcagaaagaggggagaaaggaagaaaagggagggg

SEQ ID NO: 5260 - DNA, 252 bp, Zea mays
  unsure (1)..(252): unsure at all n locations; Clone ID: LIB3061-091-Q1-N6-F3
tcgctgccgcgtctttagcttggtccttgngggccgcctttttttttttttttatctagaatgtctttctttttctgggagcccaaactcagcaaaaactttattattgaactacaacccacattggtggggnnntntttngnttttttatgagtttngttnatnatnaatttggggggggggggggattgttgggttgtagataattaaatatgtaagttgttggttgtatgggggtagattggattatgt

SEQ ID NO: 5261 - DNA, 496 bp, Zea mays
  Clone ID: LIB3061-091-Q1-N6-F4
aaaactcaagttttgaatttaaaaaaaaacctgatcaacataacattacagtgtttgcatgacttgagttgcttgaggcagggtttaaccaggcgttccaacaagtccacaattgcaagtggttgcttaaaaggcagcttatttaaaagtcgtcattcttcttcttagccatgtgcttagccagttttttcttctgttgaagccttttttggggctttttggggcttttcttttccttatgagaattaggggggaattttattgccttgaccgccttattgtgcattttgaggcaaaacgcaatcctggagttgaatgcaatttgtggcttatttgtagagtagacattaccggtttcctttgataccatccagccatttgcatgatctatggtggcgttaattgcgccatcttttatggccttggctacaatgctttttgcatcagcaacagggttctttagagtccagttttagctttttagcaatgtcagcaa

SEQ ID NO: 5262 - DNA, 518 bp, Zea mays
  Clone ID: LIB3061-091-Q1-N6-F8
gcgcattaaaaagggcattattgaactcgcaggccagggagttcacaacatgaaagaaacagtcctgtaattgcacaacacatcccagcgcgagatggtctgatctataacaacaaaccaagctctttatcgggtccaccaccaatcacaaatgccaggctacaatggaagagagtaaccgcggaggtacttggagtcgaccttcgattcacggaccagtgccactcgtccagttctggcgacctcgcagatgccatatggctctaataacctttgtagtgcaaccatcttgtcaagatctccagtaagctgaagggttactgtatggtcagaaacgtcaataggttttgctcggaagatttcagcaatatctagaatttccctccgagcagcagtgtttacagaaaccttaataagcatcagctccctttcagcaaaaggtgagtgggtaatgtcatgaacttcatgcacatcaataagcttgtaaagctgctgaactaacttcccaatggattcaa

SEQ ID NO: 5263 - DNA, 486 bp, Zea mays
  unsure (1)..(486): unsure at all n locations; Clone ID: LIB3061-091-Q1-N6-G10
ctttaacggccgcctttttttttttttttgcaatacagctcaattttttccagattatgaatatgtcacattttctgtagtggcggggttcccccaccagaccagacatgcatgcaaatgacccccagctcattttcttccgtcagcagctggtgtcgagcatggcctctggaagcgggaccggccggggtgaccactgctgatgagcccgcccctggcttgtgggcccaggcttacgaggatcactggcgattatccagtttgtcagcggcacgactgcgcggcgggccccatccgtagtccacctcccgaaccgagcgcgtccagtcgcaccagcagctgcggtagtcggactgatctgaggggtcgagccgccgcgcccagctcccgccgcccacgcgcgaatccggggcatccggcgcttccctccttgatcatccttaccacctncgcgaccgaggcgcccgccaccttccccgcgggcgc

SEQ ID NO: 5264 - DNA, 580 bp, Zea mays
  unsure (1)..(580): unsure at all n locations; Clone ID: LIB3061-091-Q1-N6-G11
ttggntctttttaaacggccgcctgccgtcggggcccttctgctcttccagcctgccgatgaacgccaccagcgggatgttccggtccaccgggagcccgacctccgcctgcagcgcctccttgttcagcgccttggcctccaggccgtcgacacgtcgtacttcactgcgatgtactggtccctgctggggtcccactcgctgacgtccatgccgttgacgatgccggtgatgccggtgaggcgcatgatgttgtcgagctcgcagcccctggcgatgccggagatgagctcctcggcgtagtaggggctgacggtgaggaccctgtcggcctcgaggatcccggccttcatccagttgatcttccggccttccacgggcttctcgtagccgtcgatgaaatcgaaggacgacttgaatctctccgggaggttcagctccgggtagtcggagaaggcgaaccggccctggtaggagatgttgtggatgcagaaagcggtctttgcgtccctgtagatgccgtgggactggtagttgctcttgaggtagcacgagagagggccggtgtgccagtcgttgc

SEQ ID NO: 5265 - DNA, 444 bp, Zea mays
  unsure (1)..(444): unsure at all n locations; Clone ID: LIB3061-091-Q1-N6-G12
aaaaaaaaaaaaaaacccccgggnnacgggccagaggggggaaagcccnncgcggggnggggnggggggncgngcaggggggcagggggggggggcgaggggggggaacagggggagggggtggnggccggggggggggggggggnnnccnggggcggnggggggggggggggggggggggggaaggggggaggggggggggggcggagggggggggggggggggagggaaggggggggggggggggggggggggggggggggggggggggggggggggggggggggcaggangaggagggagaggggggggagaaagagggaagggggggggggggggagggggaggggganggaaaaggggggggggggggggcagnggaagtgggggagagggggaggggggggggggagnggggggnggggggggnggggggggagagag

SEQ ID NO: 5266 - DNA, 486 bp, Zea mays
  Clone ID: LIB3061-091-Q1-N6-G5
ggaacttaaaattagatctctaatcttttattactgggaagttgcacatatcacaatagagaactttattgtttcagaattaagcataaaaaaatctagggatggcaccaccaatggtgggctgctgcaataaggtggtgggattcgacaaagcaagttggttaaatggcagcaattgttgttgttgaaagaaggcgacattgtttgccacatcctgtgggtagaatggtagcaactgttgctgatgcaagaaggcgttaatgtttcccacaacctgtgggtaaaatggcagcaattgttgttgttgttgcaagaaagcagcaatgtttgccacaacttgtatatggaatggaagcaactgttgctgcagtaagaaggcagcatggctcctgacaagttggttgaatggtagtagctgttgtgcctgcaagtaagcagcagggttcaccccagctagttgattgaatggaagaaattgttgttgct

SEQ ID NO: 5267 - DNA, 525 bp, Zea mays
  Clone ID: LIB3061-091-Q1-N6-G7
atactcggccccaggaagctttacctgtacccaagtgcttgtatgtgctttatgtacaagggcaacacatttacatggagtacaggttagcacatccgttatgttatcttacaacagcacgagcccctctcatatgcatcaaatccgcatctgttggatacccgtatcagcagcaaacagctcacttgggcaatataaagctccctcttccgggaatggcagattggaggttccttccttaccaaaacaaatcgtggaagccctaacatccccagttctacatgatcgatggaatagagtcatttttatctgagaagaatgacaggtttcgaaatgcgtcgaggctatttgccattagacggttccaactattttgactgtcccctataagtatgtcatcggcttcgtatctcacagacggtatgtccaagtccagtggtccgagtgaatcaggccaatatatgtcagctaaagattgatccttcaactcattagtttcatcatttcgaggtggtgatttggcat

SEQ ID NO: 5268 - DNA, 433 bp, Zea mays
  Clone ID: LIB3061-091-Q1-N6-G8
caggtcgggggaccggaaatgggaaaaaaaatttcggggggccaaatgggaaacttttttggggaaggggccaatcccccccccctaaccggaaaaacacccccattttgttaaaaaattggggccccaagagaggcaccctaaacaaaactttttaagtaacaacggggtaacccctccggggccttacaaaaaaattcactttttcccaagttaggggtccccggttccttttcaaaaaccaaagaaaaccaggcttaggggccctttctttttaaaagggttcaaagttttggtttttgattggcaaagggggaaatttcccagttcctgaaccaatcccccccttaaaataagccggggggggaaatgccccaatgcttacccccccaaatgcccggggaggggggatttttgggtaaaattccttttg

SEQ ID NO: 5269 - DNA, 536 bp, Zea mays
  Clone ID: LIB3061-091-Q1-N6-G9
aatactcaaatcctcttttggattgacaagccttgatttgttgttgataacatgccattgagacaacgtagggtcagcaacatatccacgttaaatatcgtcagtgcttatacactcttctatgacttggatgcaagagcccaccgacttccctgtagacattgcctctgcaagctgcgatctagctttttcatggcgacgcagtatgagaacagtattcagcacagcccatctcacctgtgaatcagctttcttttgggtgaaacccaaacccttgagcaatccatcaagcttattgatgtcggctaatcctccttctgcacgtccatacagaagatactctgctgcaactccggctagtgctatacacgagaacttgttaaccatcgtggcagatagcttgcctgtattgatctcttcaaggaactcatagtccacaaaagctgctccagcttgcacattaagcgatccttgattcataagtgtatctaagcttgtgattgtgtatccttttggaagcacttcaagcaagtaag

SEQ ID NO: 5270 - DNA, 434 bp, Zea mays
  unsure (1)..(434): unsure at all n locations; Clone ID: LIB3061-091-Q1-N6-H10
gggggggggggnngggggggggggggggggggggggnggggggggggggggggggggggggggggggggggggggggnggggggggggggggggggggggggggggggggggnngggnngggggggggggggggggggggggggggngggggggggggggggggggggggggggggggggggggggggggggggggggggggggggnggggggggggggggggggggggggggggggggggggggggggggggggggggggggggggggggggggggnggggggggggggggggggggggggggggggggggggggggggggggggggggggggggggggggggggggggggggggggggggggggggggggggggggggggngggnggaggnggggggggggngggggggggggggggggggggggggggggg

SEQ ID NO: 5271 - DNA, 370 bp, Zea mays
  unsure (1)..(370): unsure at all n locations; Clone ID: LIB3061-091-Q1-N6-H2
gggggggggggggggggggggggggggggggggggggggggggggggggggggggggggggggggggggggnngggggggggggggggggggggggggggggggggggggggggggggggggggggggggggngggggggggggggggggggggggggggggggggggggggggggggggggggggggggggggtggggggggggggggggggggggtggggggggggggggggggggggggggggggggggggggggggggggggggggggggggggggggtgnnggggggggnggggggggggggggggggggggggggggggggagggggggggggagaaggaaggggggggaggaggggggggggg

SEQ ID NO: 5272 - DNA, 519 bp, Zea mays
  unsure (1)..(519): unsure at all n locations; Clone ID: LIB3061-091-Q1-N6-H6
gggggggggggggggggggggnngngnnggggtggggggggggggggggggggggggggggnnnnggggngggggggggggggggggggggggtttggtttggnggggggggnnnnnnnnnnnnnnnnngggnnnnttttttttgggggggggggggggggggntntnnnnnnnnnnnnnnnnnnnnnnnnnnnnnnnnnnnnnnnnngtgggggggggnngggnnngnngggggggggggggggggggggggggggggggggggggggggggggggggnngggggngggggggggggggggggggggggggggggggggggggggggggggggggggggggggggnggggggggggggggggggggggggggggggggggggggggggggggggggggnnnngnggggggggggggggggggggggggggggggggggggggggggggggggggnnggggggggggggggggggngggngggnggggggggggggggggggggggngngggggggggg

SEQ ID NO: 5273 - DNA, 348 bp, Zea mays
  unsure (1)..(348): unsure at all n locations; Clone ID: LIB3061-091-Q1-N6-H8
gggtgggggaggggggggtgggggggggggggggggttnggggggggggggggggggggggggggttggggggggggtgggggggggggggggagggggggggggggggggggggaaggggggggggggggggggggggggggggggggggggggagggggggggggggggggggggggggggtgggaggnggggcgggggggggggagggggggggggggcgggtgggagggggggggggggggagggagggggggggggggggggggggggggggggggggggtggggggggagaagggggggggggggtgggggggggggggggggaaggggnnggggggagagg

SEQ ID NO: 5274 - DNA, 341 bp, Zea mays
  unsure (1)..(341): unsure at all n locations; Clone ID: LIB3061-091-Q1-N6-H9
aacaccatgccgggaatggagggggaccatnnantcgaggacatcggcagaggtgaattttaaaagnaggttacctnncaacgatggggttgctgccttttcggggggggggggggtgaaatagaactggttgtntggnagnaattgttgctgttgtaggaaggcagtgaccaatgggttaggcacgggtagggggttaagggactgggggcgctggcgnaggtgcgcagntgggggcgacatggggagatggggggatggaaggggttggtgggagaggggagaagggtgtggcgcggctgggtggggtgaaaactggagcaattggggaagcggggggg

SEQ ID NO: 5275 - DNA, 411 bp, Zea mays
  unsure (1)..(411): unsure at all n locations; Clone ID: LIB3061-092-Q1-N6-A1
gggggggggggggggggngggnggggggggggggggggngggggggggggggggggggggnnggggggggggggggggggnggggggggggggggggggggggggggggggggggggggggggggggggggggggggggggggggggggggggggggggggggggggggggggggggggggggggggggggggnnnggnggngggggngnggggggggggggnggggggggggggnnnggngggggggggggggggggggggggggnngggggggggnnggggggggggggggggggggggggggnnnggggggggggggggggggggggggngngggngggngggggggggggggggggggnggggggnngggggggggggggggggggggggggngnnggggggggggg

SEQ ID NO: 5276 - DNA, 468 bp, Zea mays
  unsure (1)..(468): unsure at all n locations; Clone ID: LIB3061-092-Q1-N6-A12
ggggggggngnactcancnccaaaacnaaaaaggagggagcgnggggggggggggggggggggggggngggggggggggggggggnccggggggggcggggggggcgcgnnngggcgcgggggggggggggggccgggggggggggggggggggggggggngggggggggggggggggggggggggggggggnagggggggggggggcgcnggggggggggggggggggggggngggggggggggggnggggggcgcgggggggggcggggggggggggggggggcgnccgccngtgggngggggcggcagggggagggagggggctnncggnccgggggggcggggggcggtggccggggggnggcgnggggggggggggggggggggggggggggcgggggggggggggngggcgggggggggggggggggggggagggagggggggggggggggcggacgagggg

SEQ ID NO: 5277 - DNA, 430 bp, Zea mays
  unsure (1)..(430): unsure at all n locations; Clone ID: LIB3061-092-Q1-N6-A2
gggggggnggggggggggggggggggggggggggggggggggggggggggggngngngggggggggnnggggggggggggggggggggnngtgnggggggggnggngggggggggggggggggggggggnngnggggggggggggggggggggggggngggggggggggggggggggggggggnggggggggggggnggngngggggnnnggggggggggggggggggggggggggggggggggngggggnnggggggggggggggngggggggggggggggggggggggggggggggggggggggggggggggggnnngggngggggggggggggggggggggnggggggggnggggggggggggggggggggggggggggggggggggggngggggggggggggggggggggcnggggcggggggggg

SEQ ID NO: 5278 - DNA, 443 bp, Zea mays
  unsure (1)..(443): unsure at all n locations; Clone ID: LIB3061-092-Q1-N6-A3
tgggggggggggggggggggggggggggggggggggggngggggggggggggggggggggggggggggggggggggggggggggggggggggggggggggggggggggggggggggggggggggggggggggggggggggggggggggggggggggggggggggggggggggggggggggggggggggggggggggggggggggggggggggggggggggggggggggggggggggggggggggggggggggggggggggggggggggggggggtggggggggtggtggggggggggtggnnnncgtgngggngnngnttgggggtgggggggggtngggggggtggggggggggtgggggggggggtnggggnggggggggggggtgtggggtggtggggggggggggggggggggggtngggggntggggggggggggggg

SEQ ID NO: 5279 - DNA, 568 bp, Zea mays
  unsure (1)..(568): unsure at all n locations; Clone ID: LIB3061-092-Q1-N6-A4
gggggggggggggggggggggggggggggggngnnggggggggggggggnngggggggggggggggngggggggggggggggnnngggggggggggggggggggggggggggggggnggggggggnggggggggnggnggggggngnggggggggggggtggggggggggggggggnnggggggggggggggggggggggggggtngtggggggggggggggggggggggggggggggggtngggggggngggggggggggggnggnggggggggggggggggggggggggggggggggggggggggggggggggggggggggggggggggggggggggggggggtggggnggggngggggngggggggggggggngggggggggggggggggtggggggggggggggggggggggggnngggggggggggggggggngtggggggtgggggggggnttgggggggggggggggggtngggggggggggggtnggngggggggggggggntggggnggggggggggggggggggggggggtgtggntngggggnnggggggggggggg

SEQ ID NO: 5280 - DNA, 433 bp, Zea mays
  unsure (1)..(433): unsure at all n locations; Clone ID: LIB3061-092-Q1-N6-A7
gggggnggggggggggggggggggggggggggngnggggggngggggggggggggggggggggggggggggggggggggnggggggggggggggggggggggggggggggggggnggggggngggggggggggngggggggggggggggggggnggggggggggggggggggggggggggggggggggggnggggggggggggnggggggggggggggggggggggggggggggggggggggggggggggggggggggggggtggggggngggggggggggggggggnggggggggggggggggggggggnnggggngggggggggggggggggnngggggggggggggggggggggggggggggggggggggggggggggggggggggggggggggnnggggggnngggggggggggggggggggggggggg

SEQ ID NO: 5281 - DNA, 577 bp, Zea mays
  unsure (1)..(577): unsure at all n locations; Clone ID: LIB3061-092-Q1-N6-A8
ggggggggggggggggnnnnnnnnnngngggggggggggngggggggngggggnggggggggggggggnggggggggggggggggggggggggggnnnnnnngnnnggnnnnnnnnnnngggggggnnnnnggggggggggggggggnggggggggggnnnnnnnnggngnnnnnnnngggggggggggggggggggggnnggggggggggnggggggggggggggnggggggggggggggggggggggggggggggggggggggggggggggnnggggggggggggggggnggnggggggggggggggggggggggggggggggggggggggggggggggggggggggggggnggggggggggggggggggggggggggggggggggggggggggggggggggggggggggggggggggggggggggggggggggggggggggggggggggggggggggggggggggggggggggggggggggggggggggggggggnggggggggggggggggggggggggggggnggggggggggggggggggggggggggggggggggggggggggggggggg

SEQ ID NO: 5282 - DNA, 563 bp, Zea mays
  Clone ID: LIB3061-092-Q1-N6-B10
gaatctggaaatgtaacttcttatttctggttggccacatacatcatccaaaaactttattattgaattacaactaataatcaatctaaaagaggcaccaccaatgatgtgttgttggtaggaggctgctgggtttgtcaaagcaagttggacaaagggcaacaattgttgtagttgtaagagggttgcggggttagccgcaaactgcttgtagaaaggcagcaactgttgctgtgtcaagaaggaagcacgacttgctgcagcatagctcgctaaatggcagtagtatttgctgctgcaaataagcagcggggttcagtgcggccaattggttaaatggaagaagttgttgttgctgagagtaggcagtagctagctggctaaatggtaatagttgttgctgcaaataagcagcagggttcagtgtagacagttggttgaatggaagaaattgttgttgctgagagtagggagaaaggtttgccagagctacttggttgatcacaggtagcacgagttgctgcagctgttgtgccctgatggtttgtaccaatgactgcacc

SEQ ID NO: 5283 - DNA, 348 bp, Zea mays
  unsure (1)..(348): unsure at all n locations; Clone ID: LIB3061-092-Q1-N6-B11
gccaaatgttccagtntcatttttgcctcggccggtccagtgtctagcagccacaaaggggggcagcagcatttttttcttttttttttttnaaccacaacattgcangatcatcgggctgccggggtttttttgccgcggaattgatcccagccgcncttccggttgttacggcagacaggagtgtccatgcagctttgggcatatttcaccaggtcccttgggggaggccggcggggcgcccaaccgggttcattagcttttgccgccacggttggggctatgcgcgccgaggtccttctctcgttggcgaaggcgcggaagattgctcccttgtggaagttctcc

SEQ ID NO: 5284 - DNA, 77 bp, Zea mays
  Clone ID: LIB3061-092-Q1-N6-B12
ggggggaaaaatattggggggggggggcaatatttatatggggggggggaagaaaacacgggggggggggggggggg

SEQ ID NO: 5285 - DNA, 299 bp, Zea mays
  Clone ID: LIB3061-092-Q1-N6-B2
cagccaaaaaattcattttgggattacaactaataagcaatttaaagggggccccgccaatgatgtgttgttggaagaaggctggggggttggacaaagcaggtgtggaaaagggcatcatctgttgcagttgaaagagggttgcggggttagccaaaaactggtgggtaaaaggaagcacttgatggtgggaaaaaaagggaggggggttgggtgtagttaggtggccaaatggaataagtttttggtgtggaaaataggaaaggggtataatggggacaattggttaaagggagaaa

SEQ ID NO: 5286 - DNA, 521 bp, Zea mays
  Clone ID: LIB3061-092-Q1-N6-B7
cacataagaatctagaaatgtactttcttatttctgggaagccacaaatatcagcaaaaaaactttattattgaactataactcataagcaatctaaaagagggcaccaccaatgatgggttgttggtagaacactgctgggtttgtcaaagcaagttggtcgaatggcagcaattgttgcagttgtaagagggtgccaacgttaggcgcagtgtgcaggtagaacggcaacaaatgttgctgtgtcaagaaggcagcagggctcacagcagctagctggctgaatggtagtagttgttgttgttgtacataagcatgagagttcaatgctgccagttggttgaatggaagaaattgccgggggtaggcagcagctagctggctgaatggtagtagttgttgttgctgcaaataagcagcagagttcaatgcagctagttggttgaatggcagaaactgttgttgctgaaagtaggcagcaaggtttgctagcacgagttgttgtagttgttgggccctga

SEQ ID NO: 5287 - DNA, 262 bp, Zea mays
  Clone ID: LIB3061-092-Q1-N6-B8
gttgggggggtgtttttttttttttttttggggggggggggggcctttttttggggggggggccccccccctccccaaaaagctttttggggggggcccccctttgggggccctcggggggggggcccccccttgggcggtttgtggggggggggcccgtgtttttccaaacggggggggcgcggggggccccctgggggggtttttagggggggggggggggtcccccccccccggggggggagggggcccccgggggggg

SEQ ID NO: 5288 - DNA, 155 bp, Zea mays
  Clone ID: LIB3061-092-Q1-N6-C3
cttagaaaaatttatttgtcaaatatatttaagggttagggtagtgtagtttccaatattcatcaccaaggatgggtttagcgaaccgcatttttcgaatgggacaaagggggatccataagggcgggagatattacgtagcacaggttttcaac

SEQ ID NO: 5289 - DNA, 314 bp, Zea mays
  Clone ID: LIB3061-092-Q1-N6-C8
caattggtcattcagggcattggtcacactgacactgccacccatgggggtgcgtgacacatttttactcaatcatcgccgctaaatgactcaactagcttgctagccagcgggttttctacagcacatagtttttttagtgggggacacccccggcagcagcgtaggggcatggagttggctgctgcaggccccacattgccgtcagttgctgcgctttttgggccgccaacagccccgcgacctggccgcttttcggttgttgcttcaggatggactggaggaccaaaccgaaaatcgcctggtaccggtgc

SEQ ID NO: 5290 - DNA, 561 bp, Zea mays
  Clone ID: LIB3061-092-Q1-N6-C9
agaaagtactttcttatttctgggaagccacaaacatcatccaaaaacttcattattgaagtataactcataagcaatctaaaagaggcaccaccaatgatgggttgttggtagaacgctgttgggtttgtcaaagcaagttggttgaatggcagcaattgttgcagttgtaagagggtgccagcgttaggcgcagcgtgcaggtagaacggcaacaactgttgttgtgtcaagaaggcaacagggctcacatcagctagctggctgaatggtggtagctgttgctgttgtaaataagcagcagagttcaatgctgccagttggttgaatggaagaaattgctgggggtaggcagcagctagctgactgaatggtagttgttgttgcaaataagcagcagagttcaatgcagccagttggttgaatggaagaaactgctgttgctgagagtaggcagcaaggtttcctagcacaagttgttgtagtttgttgtgccctttgatgttttgtgccaacaaatgccaccaaaggtaactgctgtaatagggctgacgggttgtt

SEQ ID NO: 5291 - DNA, 490 bp, Zea mays
  unsure (1)..(490): unsure at all n locations; Clone ID: LIB3061-092-Q1-N6-D1
ggggggggggggggggggnggggggggggggggttttgtngtgggtttttnnnnnnnnnnnnggggggnttttttgggggggggggggggggggnnnngggggggggnnnnnnnnnnnnnnggnnaaaaaaaaaaagaaggggggnngnnngngaagggggggggggggggggggggggggggggggggggggggggggggggggggagggggggggggggggggggggggggggggggggggggggggggggggggggggggggggggggggggggggggggggggggggggggggggggggggaggggggggggggggggggggggggggggggggggaggggaggggggggggggggggggggggggggggggggggggggaggggggagagggagagggggaggagagggggagggaggggaggggggggagggggagggaaggggggggagggggggaggggggggggggggggggagggggggg

SEQ ID NO: 5292 - DNA, 123 bp, Zea mays
  Clone ID: LIB3061-092-Q1-N6-D10
agaaatgtactttcttatttctgggaagccacaaacatcatccaaaaaacttcattattgaagtataactcataagcaatctaaaagaggcaccaccaatgatgggttgttggtagaacgctg

SEQ ID NO: 5293 - DNA, 323 bp, Zea mays
  Clone ID: LIB3061-092-Q1-N6-D3
aaaaacatccccccttgggggaactttttttttaaatgggccaattctttgtcctttgggggccattgggccgcgccccccccgggtttttttttttagggggggttattagcctagcagttttttttttttaaatgcttcccggcagcacgtgggggggattttttttggggtttgggttttggctgactgaatgactgggggggtgggctttttgactgttggggtcgacgggtggtgttatattttttttgattctttttgggccgtgaaaaaaggcgggggggggcgtttcggtgccctggaagggggggtttttgggg

SEQ ID NO: 5294 - DNA, 466 bp, Zea mays
  unsure (1)..(466): unsure at all n locations; Clone ID: LIB3061-092-Q1-N6-D5
attgcgagcccacgtcagagctacgtcattctgggtttgcacgcgcacagtacacatgctgcgccttgcacgtcgcgccgactcactcttttttttttaaccctggtagctagtactggtcgccgccggagaagatgctgcactcctggggctccgacagccggcacatcatcggcaaccccgcggcgtactcccgggccttcgtaagcctcacgcggccgatccttggcccggtggtgccgggacgacacggtggatacatctgcgtttggtatccctctcctgcccggctgcaggggtagtagtagcccccctgtcctcctcctcctccctgcggcggcggctgctgctgccgcccccatggccaccagcctttctccagaggcggcatggcctcctcgtagcccctgaccatgctccggatggcggcncagcggcactcgcggctcacgtcctggagctgctg

SEQ ID NO: 5295 - DNA, 502 bp, Zea mays
  Clone ID: LIB3061-092-Q1-N6-D6
acgttaatccatgcattgatcgataatgcaaacccaacgacatggaattcgtccattacacactgtagtctgtagggaggagagaggttgttccaacggatgtccagagtgcaatagctacgtcaacagcaagaggtgtttgcttcgaagagtggaagcaaacaagagtacaaccacatcatcagtatatcataagtggcttcctcaaattcttcctataaaagccaagcaggaaataaatagtgtcaaataaccaatgattatggctatcgtgcgtctgcttatgaaccgcagcatgcagatcgctgggcagctggtgcctcggaaccctggtctggcttgttaattttgattgccttgtcctctggctttgaatcagtctctgcaagcctctgcttgatgtcacgtgcgatggagaagaacacttgctccacgttcaggtttgtcttggcactcgtttcaaaaaacttgatcccatactcatcagcaagtgcttgtcctt

SEQ ID NO: 5296 - DNA, 517 bp, Zea mays
  Clone ID: LIB3061-092-Q1-N6-D7
atcgagataaatctcaatcaatatattgattatttctaggaaacacatgccgctatgagggcaccattatcgagtacatctcatatgtaatctaaaagaggcacctccaacgatgggttgctgccacaacaaggcagggttcatcaaagagaactggttgtatggcagcaattgttgctgctgtaggaaggcagcgaccaatgggttagccaccgctagtggattaagtaactgttgtcgctgttgtaggtacgcagcagagttcgacacagtcagttggttgaatggaagcagctgttgcaagtaggcagcagggtttgccacagctagctgagtcagagctggtacaatctgttgcagcaactgttgttgcaggtatgtaggtgcattaaccacagcgagagggctagatgaaatcagttgttgctgttgtaggtaggcggcagggttcaccatggctagttgactgagcgctggtagaaactgttgcaattgttgttgttggttggtatgcaac

SEQ ID NO: 5297 - DNA, 499 bp, Zea mays
  Clone ID: LIB3061-092-Q1-N6-D9
aattgtgagttatttggatttcatgtcaagggagatcgagacaaccagccttattcagcgacgcctgcaaataaaatgttcccagcgatcacgaaacccgcagtgcctaatacatgtccatgtgtatggccccatttggacccagcagctcataatcctgcggcggcggtgtagatccggaggcggaggtcggcggcatggatcccatcgccgtctggatgagctccatggcccccgcgcaatgcgtggctgctgctactcggttcatctctgtggcgctcagagttccaccgacgaccatggatgcaggctcttgatgagcttgcagtcgcaagaaaccgttgccgaccgaagcatcgtcgtctgcggctgtggcggagaagtagccgacgatgctgtctcggataggcggcggcggcactggagcgtcggagctgggggtcggcgccgagatgggcatggacgacggcactgatgagctcatctctatcacccgctt

SEQ ID NO: 5298 - DNA, 549 bp, Zea mays
  unsure (1)..(549): unsure at all n locations; Clone ID: LIB3061-092-Q1-N6-E2
gggggggggttgtgtttgggggtggtggggggggggggggggtgttttttttttttttttttttaanaaaaanaaaaaagatttttttttttgttttganagggggaaanannggggggnnnnnnnnnnnnaannannaaaaaaaaattttttttttttttgggtgggggggggggggggggaggggggggggggggggggggggggggggggggggagtggggggggggggtgttgggggggggggtgggggggggggggggggtggggggggggggggggggggggggggggggggggggggggggtggggggggggggggggggtggggtgtggggtggggggggtggggggggtggggggggggggtgggtgggggggggtggggggggggggggggggtgggggggggtgggtgggggggtgggggtggggggggggggggggggggtggggggggtgggtggtgggggtgggtgtgttggggggtgtgcggggggggggggggtgggggaggtggggggggtgggtggggggggtgggggggt

SEQ ID NO: 5299 - DNA, 190 bp, Zea mays
  Clone ID: LIB3061-092-Q1-N6-E4
aaaaaaaaaaaaaaagggttttttttttgggggggggccccacaaaaagaaaaaaaaatttttttttggggtattacattaaaaaaaaataaaaagaagggcccccacaaagggggggggggggaaaaaaaattgggtgtttaaaaaaaaaaagtgggaaggagggataaatttttaatttgaaaaaggg

SEQ ID NO: 5300 - DNA, 192 bp, Zea mays
  Clone ID: LIB3061-092-Q1-N6-E5
aaaaagggccttttttttttggggggggcccaaaaattttccaaaaaaattttttttggaggtttaccttaaaaccaattaaaaagaggggcccccccaaaggggggtttgggggaaaaccccttggggttttaaaaaaaaagtggtttaatggggaaaaatttttgcattttaaaagggggcccccttttg

SEQ ID NO: 5301 - DNA, 571 bp, Zea mays
  unsure (1)..(571): unsure at all n locations; Clone ID: LIB3061-092-Q1-N6-E7
actccaaattttatccattataaatacacagctaaactacagtaccgaagcgctatgaagccatgcagctacctcctaccaaccagaacacagaaagcacgccgtaccggcggcgggaatcgggatgccactgtccaggcgactaggagacgcagcggagcgagtgcagggacgccgaggtgtccatggacgcggcgtcatacatgcagcgggtctccgtcgcctcgatgccgtagtccatcagcgggcggcgctccagctcgtcgtcgtgctcgcgcacgcattcggggacctccagctgctccttgtctatgtgggcccaaacgtactcaagccggctcatgtatcgcagcttctcatacaaccctgagctgaagaggaagcgcccgaaggtggcgaagaagatcctggactggagggccgggtgcacgaagtagacggcgcgcagcctttccttggccgcggccggcagcgtctcgtacgcgccgcggatcgcaccgacgccggggnaagttgtggccgcgatccacccgggagtgcatgtacacgaacacgaactcgcggtcccccg

SEQ ID NO: 5302 - DNA, 484 bp, Zea mays
  Clone ID: LIB3061-092-Q1-N6-E8
aagaatctagaaatgtactttcttatttctgggaagccacaaacatcagacaaaaaactttattattgaactataactcataagaaatctaaaagagggcaccaccaatgatgggttgttggtagaacgctgctgggtttgtcaaagcaagttggttgaatggcagcaattgttgcagttgtaagagggtgccagcgttaggcgcagcgtgctggtagaacggcaacaactgtggttgtatcaagaaggtagcagggctcacaccagctagctggctgaatggtagtagttgttgctgctgtaaataagcaggagagttcaatgctgccagttggttgaatggaagaaattgctgggggtaggcagcaggtagctggctgaatggtagttgttgttgttgcaaataagaagcagagttcaatgcagctagttggttgaatggaagaaactgctgttgctgagagtaggcagcaaggtttgctag

SEQ ID NO: 5303 - DNA, 117 bp, Zea mays
  Clone ID: LIB3061-092-Q1-N6-E9
ggggggggttgggggtcccgggctggggggggggggggggggtgggggcccgggttcccttgggggggggggggggcaggggggaagggaaaatggggggggcggggttctgggggg

SEQ ID NO: 5304 - DNA, 695 bp, Zea mays
  unsure (1)..(695): unsure at all n locations; Clone ID: LIB3061-092-Q1-N6-F1
ggggggggggggggggggggggggggggggggnggggggnnggggggggnggggggggggnggggggggggggggnggggggggnnnnnnnnnngggggnngnnnnnnngggggggcggggggggggggnnnngggggggggggnggnnnnnngnggnnggggngnnngggggggggggggggggggngggggggggggggggngggggggggggggggggggggggggggggggngggggggggggngggggggngggggggggggggggggggggggggggggggggggggggggggggggggggggggggggggggggggggggggggggggggggggggggggggggggggggggggggggggggggggggggnngggggggggggggggggggggggggggggggggggggggggggggggggggggggggggggagggggggggggggggggggggggggggggggggggggggggggggggggcgcnggggggggggngggnggggggggggggggggggggggggnggggnnggggagggggggggggaggggggggggggggaggggagagggggggagggagacagggggggggagaggggggaggggggggggggggaggggagggggggggggggggggggggaggggnggagggggggggggggggggggggagaggggggg

SEQ ID NO: 5305 - DNA, 579 bp, Zea mays
  Clone ID: LIB3061-092-Q1-N6-F10
atcgagataaatctcaatcaatatattgattatttctaggaaacacatgccgctatgagggcaccattatcgagtacatctcatatgtaatctaaaagaggcacctccaacgatgggttgctgccacaacaaggcagggttcatcaaagagaactggttgtatggcagcaattgttgctgctgtaggaaggcagcgaccaatgggttagccaccgctagtggattaagtaactgttgtcgctgttgtaggtacgcagcagagttcgacacagtcagttggttgaatggaagcagctgttgcaagtaggcagcagggtttgccacagctagctgagtcagagctggtacaatctgttgcagcaactgttgttgcaggtatgtaggtgcattaaccacagcgagagggctagatgaaatcagttgttgctgttgtaggtaggcggcagggttcaccatggctagttgactgagcgctggtagaaactgttgcaattgttgttgttgttggtatgcaactatgtttgccagagcaagtgggttggatgcaagcaactgctgttgcaagtaggcgacagggtt

SEQ ID NO: 5306 - DNA, 359 bp, Zea mays
  Clone ID: LIB3061-092-Q1-N6-F11
ggggggccttttaattccaattgggtttttttttcaaattttttgggccaaacctcataaggggggggccttttttggttaacccccttttttgggtttaacgggtggggggacccaattttttatttggaaacccccctaatgtctttgggggtggaggggtttttttggggggttgggggggccaagccccccatttgtggggggttttgggcttttttcaaaattgccccccccctttggggggcttggtgggaaccccaaaacccaaagggggggggggggggccccccccggtttttgggttgaacccttttttaaattgcttggggaattttttgggggtaaatttgcccaaa

SEQ ID NO: 5307 - DNA, 239 bp, Zea mays
  unsure (1)..(239): unsure at all n locations; Clone ID: LIB3061-092-Q1-N6-F12
ggggggggggggggaagaaaaacaaacaccggggggggggggggggggggggggggggggggnngggggtgtgggtgtgggggggggggtggggggggggggggggggaggggggggggggaagggggagggggggggggagggaggggggggagggggggggggaggggggggggggggggggtgggggagggaaagaaggggaggggggggggaggggagatggggggggggggggg

SEQ ID NO: 5308 - DNA, 583 bp, Zea mays
  Clone ID: LIB3061-092-Q1-N6-F3
acaaaagagcaatgcactaagaatataaccatttactaaaccagacatcaactctgtttcatctgaaacatcacagcagataacaaaatagtctcagactctaagcgcggcagggcactacatcacaaatattgttcaaaaacaggtgcatttgacaactaaaacaaaataaaatattgaagtcgctgctattacagtagacgaattgatgattaaaccggcagatgaaacagtatcaccaacagccaaaaattttagagcttgtcctcaaactcagaaagaggggtcatctgttccttgagacccttcctcttgcggatatccagcaccagctgagcagcctgggagccggcctccaaaggatctgagcccatcatgtcccaatggtcaaagacacactgggggaacgcctgaccagaggttgcggccctcagttggctggagaaaccaaaggactcgatgacagggaggaaagccttgatgttgtagagcggggtacccggcctctgcatctcctcaaagaaatgacctctcttctggttcagaacaccgtagataccaccaagggctttttctggggcct

SEQ ID NO: 5309 - DNA, 577 bp, Zea mays
  unsure (1)..(577): unsure at all n locations; Clone ID: LIB3061-092-Q1-N6-F7
atcgaacacccttggagaccaatatcacattagnaatctgggaaatgtaaccttcttatttctggtgtggccacatacattcatccaaaaaactttatttattgaattacaactaataatcaatctaaaagagggcaccaccaatgatgtgttgttggtaggaggctgctgggtttgtcaaagcaagttggacaaagggcaacaattgttgtagttgtaagagggttgcggggttagccgcaaactgcttgtagaaaggcagcaactgttgctgtgtcaagaaggaagcacgacttgctgcagctagctcgctaaatggcagtagtatttgctgctgcaaataagcagcggggttcagtgcggccaattggttaaatggaagaagttgttgttgctgagagtaggcagtagctagctggctaaatggtaatagttgttgctgcaaataagcagcagggttcagtgtagacagttggttgaatggaagaaattgttgttgctgagagtagggagaaaggtttgccaaagctacttggttgatcacaagtagcaacgagttgctgcagctgttgtgccc

SEQ ID NO: 5310 - DNA, 574 bp, Zea mays
  Clone ID: LIB3061-092-Q1-N6-G10
gattcattaaaaccaaaactttattatgaccatgcatatattattggtcataccacacatgataatgtgtgtcgtcttactgcattattacatatatagatagagagagatggatagaggagatttcccaaatatcatgaatcagtagtagggcggaatggcagcggagacgccacaggggttggtgcggtagctgggcagctggtactggtagagtccacccatggccggcatgttctgcgccatcatcatggccatggggttgagaccctgggctgccagcagctgctgctgctgctgcatcagagctggctcgtacaggctgctgctggcggcagcggcacgctcaagctgcatcatcatctgcagctgctgcgcgacggactgcacgtccatcatcctcatctgctgctggcagcactgttgccggagcggctggaacatggcgctcggctgcccacacccggcgtagtagggcgccgccgccagcgggctgcactgcggctgcctcaagtactccgcgtaggggtacagcccgccggcgcccatcatcgtcgtcaggccggcgccagcg

SEQ ID NO: 5311 - DNA, 180 bp, Zea mays
  unsure (1)..(180): unsure at all n locations; Clone ID: LIB3061-092-Q1-N6-G2
cacacaacaattacaatctataaacaacatggatatggatgcagatgaacaggacctatgcatacaatacatacatgtttacgaacgccaaaggattagagatgacttggaagttagggagcggtaattaattggttggggggggggaatgnggtagttaagttattagtaattgggtta

SEQ ID NO: 5312 - DNA, 339 bp, Zea mays
  Clone ID: LIB3061-092-Q1-N6-G4
cacccaaaaaattctttttgggactttacctatagagcaatttaaaggggggcccccccaagggggggggggggggagaacacggtggggtttgtaaaaaagggggggttgaaggggaaaaattgtgggatttgaaagggggggccagggttggggtttggggggggggagaacggcaacatctgtggttgggtaaaaaagggggagggggtaaaaaaaattagctggctaaagggaagaagttgttggtgttgtaataaagcgacagaattaaaggctgttagtgggtggaagggaaaaaatgggtgggggggggggaaaacttggggggtgaagggg

SEQ ID NO: 5313 - DNA, 527 bp, Zea mays
  Clone ID: LIB3061-092-Q1-N6-G7
caaaaatgacagaaaatgcaaacaattgtaaccctacgtcctgtgtctacatgtcgcttatgcgagaacagaggtcagaaaaggcagctggtaaaggagcattgaaccgcaacgatgtcaactattgaacagcgcaaacgatacagcagtaggtttaattattcccgagactgaccactaaccatggctggttttgcattgaacattattaccccgcacgtacttcagaagtaaggtctgtagcgcatagggcggcggaatctaggagccctcccataaccgtatggggggaagtacggtgctccatatgatctataagggtagccatggtagggattatacccgcgtggtggacgctgcttcatcccagggacattagtcctcttcggcgcaaccttaatctgtcgaccatgcaattccgattcattcaagttcagagcttcctggacagcttcttgttccagaaattcaacataagcaaaaccttttggctgcccaaacttgtcagtcaagcggacgcgtgggtc

SEQ ID NO: 5314 - DNA, 522 bp, Zea mays
  Clone ID: LIB3061-092-Q1-N6-G8
ctgggaagccacaaacatcagataaaaaactttattattgaactataactcataagaaatctaaagggggcaccaccaatgatgggttgttggtagaacactgctgggtttgtcaaagcaagttggttgaatggcagcaattgttgcagttgtaagagggtgccagcgttaggcgcaacgtgctggtagaacggcaacaactgtggttgtgtcaaaaaggtagcagggctcacaccagctagctggctgaatggtagtagttgttgctgctgtaaataagcaggagagttcaatgctgctagttggttgaatggaagaaattgctgggggtaggcagcaggtagctggctgaatggtagttgttgttgttgcaaataagaagcagagttcaatgaacctagttggttgaatggaagaaactgctgttgctgaaagtaggcagcaaggtttgctagcacaagttgttgtagttgttgtgccctgatgttttgtgccaataaatgcaccaaaggtaactgttgt

SEQ ID NO: 5315 - DNA, 449 bp, Zea mays
  unsure (1)..(449): unsure at all n locations; Clone ID: LIB3061-092-Q1-N6-H1
gggggggggggggggggggggggggggggggggggggggggggggggggggggggggggggggggggggggggggggggggggggggggggggggggggggggggggggggggggggggggggggggggggggggggggggggggggggggggggggggggggggggggggggggggggggggggggggggggggggggggggggggggggggggggggggggggggggggggggggggggggggggtggggggngggggggggggggggggggggggggggggggggtggggggggnngggggggggggggggggggggggggggggggggggggggggggggggggggggggggggggggggggggggggggggggggnggggggggggggggggggggggggnggggggtgggggggggggggggtgggggggggggggggggggg

SEQ ID NO: 5316 - DNA, 717 bp, Zea mays
  unsure (1)..(717): unsure at all n locations; Clone ID: LIB3061-092-Q1-N6-H2
gggggggggggnngggggnnnngggggggggggggggnggggggggggggggggggggggggggggggggggggggggggggggggggggggnngggnnnnnnnggnnnnnnnnnngnnnngnngnnnnnnngggggggggggggggggggggnnnnnnnnnggggggggngggggggggggggngggggggggggggggnnggggggggggngggggnngggngggggggggggggggggggggggggggggggggggggggggggggggggggggggggggggggggggggggggggggggnggggggggggngggggggggggggggggggnngngnggggggggggggggggnggggggggggggggnnggggggggggggnggggggggggnggggggggggggggggggggggggggggggnggggggggggggggnggnggggggggggngggggggggnggggggggggggggggggggggggggggggggggggnggggggggggggggggggggggnnggggggggggggggggggggggggnggnnggggngggggggggggggggggggggggggggggggggagggggggggggngggggggggggggggggagagggggggagggggggggggggggagggggggggggggggggaggggggggggggggngggagggggagggagggggggagggagggggg

SEQ ID NO: 5317 - DNA, 322 bp, Zea mays
  unsure (1)..(322): unsure at all n locations; Clone ID: LIB3061-092-Q1-N6-H4
gggggggtgggggtgggtgggggggggtggggggggggggggggggggggggggaggggggggggggggggtggggggggggggggggggagaggggggggggggggggggggggggggggaggggggggggggggggcgggggaggggggggggagaggggggggggggggggnggggggggggggaggggggggggggggggggtaggaaggggggggagaggaggggggtggggggggaggggggggggagagggagggggggggaggggggggggggggggggggagaggaggggaggaggaaaggaggagggggggg

SEQ ID NO: 5318 - DNA, 394 bp, Zea mays
  unsure (1)..(394): unsure at all n locations; Clone ID: LIB3061-092-Q1-N6-H5
gggggntcgggggggggggggggggggggggggggntgtggggggggggggggtgggggggggggggggtgtgggggnggttggggggggtgggggggggggggtgggtgggggggggggggggggggggtgggggggggggggggggggggggggggggtntgtggcggggggggggggggggggggggagggggggggggggggggggggggggggggtggggagggtggtgggggcgggggggggttggggcggggggggtgtggaggggggggagggggtggggngggggggggggaggtgcggtggggaaggggggagggaggggggggggggggggggggggcggggggggggggagagaggggcgtcggggggggagggagagaaaa

SEQ ID NO: 5319 - DNA, 442 bp, Zea mays
  unsure (1)..(442): unsure at all n locations; Clone ID: LIB3061-092-Q1-N6-H6
ggggggncgggggggggggggggggggggggggtggggggggggggggtgggggggggggggggtgggtgggngggggggggggggggggggcggggggttggggggggggggggggtggggggggggggggggggggggggggggggggggttgtggngtgggntnggggggtgggggggggggggggggggggtggggggggggggggggggggggggggggtgggggggggggggggggggggcggggggtggcgggggggggggggggggggggggggtgggggggtggggggggggggctgggggggggttgggggggggngggggggnttggttcggctgcggcgcttttcngggggggggagggggtcgggggggggggggggggtggngcgaggggttcggggggtgggtgggcggggggggggggggggcagg

SEQ ID NO: 5320 - DNA, 486 bp, Zea mays
  Clone ID: LIB3061-092-Q1-N6-H7
atcaacttctgttgaataagaaaattcagagttcgacatgaaaaagtcgccgagtccaggaaagggtgaagaaacataaataagtgaatcttgaccacccctaaatgtaatcaccatcacaaaggctaggacttggccctaacgcaacctgcaacacagcacacgtttaacaaggaatcgttgctatctatgaagcaatggtacaacagaccggagcaccaaggaaactatgggaagccccagggaaactgttgacgaatcctgtcatttacagagtcgcaaacaagcgttcttcccttccgcccgctctcagatgctcgctttccttgccactacttccttttcccgccgccaccgagggacagaagcttcaggctgcggtggagtggcttgtcgcgggcgcctatcgcgactgccgcccgtgagagggagtagcccttgcctcgcctggcgatgggttgaccctttgggtgcttgatgggcgac

SEQ ID NO: 5321 - DNA, 490 bp, Zea mays
  unsure (1)..(490): unsure at all n locations; Clone ID: LIB3061-108-Q1-K6-A11
cgacccacgccgtccgttagcaacatagnaaagcacaatagtgtaccaacaatggcagccaaaatattttgcctccttatgctccttggtctttctgcaagtgctgctacggcgaccattttcccgcaatgctcgcaagctcctatagcttcccttcttcccccgtacctctcaccagcggtgtcttcggtatgtgaaaacccaattcttcaaccctacaggatccaacaggcaatcgcagctggcatcttacctttatcacccttgttcctccaacaatcatcagccctattacaacagttacctttggtgcatttattggcacaaaacatcagggcacaacaactacaacaacttgtgctagcaaaccttgctgcctactctcagcaacagcagtttcttccattcaaccaactaggttcattgaactctgcttcttatttgcaacaaacacaactaccattcagccagctacctgctgcctaccccc

SEQ ID NO: 5322 - DNA, 622 bp, Zea mays
  unsure (1)..(622): unsure at all n locations; Clone ID: LIB3061-108-Q1-K6-A12
gtcgacccagcgtccgtttgnaaaccaacaagcaacatagnaaagtggatacagtagcaaaaatagagcaacaatggcggccaagatattttccatccttatgctccttgctctttctgcatgtgttgctaacgcgaccatttttcctcaatactcacaagctcctatagctgcccttcttcccccataccttccatcaatgaccgctttagtatgtgaaaacccagcccttcaaccctacaggatccagcaagcaatcgcaacaagcaacttacctttatcacacctgttctttcaacaatcgccagccctatctttggtgcagtcattggtacaaaccatcagggcagaacagttgcagcaactcgtgctaccagtgatcagccaagtagctctggcaaacctttccccctactctcagcaacaacaatttcttccattcaaccaactgtctatactgaaccctgctgcttatttgcagcaacaacaactactaccattcagccagctagctactgcctactctcagcagcaacaatttcttccatttaaccaattggccgcactgaacccctctgcttatttccagcagcaaatactactaccatttggccagctagct

SEQ ID NO: 5323 - DNA, 240 bp, Zea mays
  Clone ID: LIB3061-108-Q1-K6-A2
atcactgattttcaaaacccgctgaaccctgtcacctacttgcaacagcagctgcttgcatccaacccacttgctctggcgaacgtagctgcataccagcaacaacaacagctgcaacagtttatgccagtgctcagtcaactatcttttgtgaaccctgccgtctacctacatctactttcatctagcccgctcgcggtgggcaatgcacctacgtacctacaactacagttgctgcaa

SEQ ID NO: 5324 - DNA, 592 bp, Zea mays
  unsure (1)..(592): unsure at all n locations; Clone ID: LIB3061-108-Q1-K6-A3
ccggtcgacccagcgtccggtttggtagaatcanatcttctgaatctgagtcttcctatgaagaggaccctgatagaacacctgtctctacccaatatggaagagaactgtggtcccaaaccaaatttgcccggaccgcttcatctaagtcggagattattatttcagacagaactcctgaggattttgccacatggcagcgcattatacgtgtagatgctattcgagcaaatacagaatgggttctgtttgcccgtaaccaggctgaagtctctaaagagaaagcgctgcagtctgcaatatctgtcgggttgaaagattttgaccatttagagccttacatgatctatcatgctgcacgattagttgcactgcttgaggcatatgcactttatgatccagagatcgggtactgtcaaggaatgagtganctcttgncaccaataattgcagtcatggaggaagatcatgaagcgttctggtgctttgtgggtttcatgaggaaagccagacacaacttcaggcttgacgaggttgggataaaaggacagctgaaaaccgtctcgcagatcatcaagcgcaaggattcaca

SEQ ID NO: 5325 - DNA, 559 bp, Zea mays
  unsure (1)..(559): unsure at all n locations; Clone ID: LIB3061-108-Q1-K6-A4
agcaacatacatagagccatacactagcaacatcttagcaccaatggcagccaagatttttgccatccttgccctccttgctctttcagcaagcgttgctaccgcgactattattccacaatgctcacaacaatacctttttttttttacagccgcgagatttgaatacccaactgggcaatcctacaggcnacaagtggccatcgcagcaagcatcttacggtcgttagcattgaccgtccaacaaccatatgccctattgcaacaaccatccttaatgaatctatatgtccaaagaatcgcagcacaccaactacnacaacagctgcttccaactatcaatcaagtagttgcagcgaaccttgctgcttacctttagcaacaacacnttcttccatttaatcaactaactggggtgaaccctgctgcttactngcaggcacaacagctactaccattcaaccaacttgttaggagccctgctgccttcttactgcagcaacagcttgctttcattccatcgacaagttgggggcaaacattgctgttttcttgcaac

SEQ ID NO: 5326 - DNA, 589 bp, Zea mays
  Clone ID: LIB3061-108-Q1-K6-A6
ccggttcgacccagcgtttggcggccgtcgtgttcgaccggcgcagctttcgtcgcgtggtccggaacgagccagggtccctgagggtgctccggcccttcgacgaggtgtccaagctcctccgcggcatccgggactaccgcgtggcgggcctggaggcgaaccctttctcgttcgtggtgcccagccacaccgacgcgcactgcatctgctacctggcggaaggcgagggagtggtgacgaccatcgagaacggcgagaggcggtcatacaccatcaagcaaggccacgtcttcttggcgccggccggggcggtcacctacctggccaacaccgacggccggaagaaactggtcatcgccaagatcctccataccatctccgtgcctggcgagttccagttcttcttcggccccttctttaggaacccggaatcgttcctgtcgagcttcagcaagagcatccagagagctgcatacaagacctcgagcgaccgtctggagaggctgttcgggaggcatgggcaggaacaggggatcatcgtgcgcgccacggaggagcagacccgcgagctgcggcgccacgcctc

SEQ ID NO: 5327 - DNA, 520 bp, Zea mays
  unsure (1)..(520): unsure at all n locations; Clone ID: LIB3061-108-Q1-K6-B4
gcctcgccaaaaccccgcccacccatgcccgtgccaacagccgcatccaagcccgtgccagctgcagggaacctgcggcgttggcagcaccccgatcctgggccagtgcgtcgagtttctgaggcatcagtgcttttttttttttacgccctactgctcgcctcagtggcagtgggtgcggcagcagtgttgccagcagctcaggcaggtggagccgcagcaccggtaccaggcgatcttcggcttggtcctccagtccattctgcagcagcagccgcaaagnggccaggtcgcggggctgttggcggcgcagatagcgcagcaactgacggcgatgtgcggcctgcagcagccgactccatgcccctacgctgctgccggcggtgtnccccactgaagaaactatgtgctgtagtatagccgttggctagctagctagttgagncatttagcggcgatgattgagtaataatgngtcacgcatcaccatgggtggcagtgtcagtgtgagcattgacct

SEQ ID NO: 5328 - DNA, 417 bp, Zea mays
  unsure (1)..(417): unsure at all n locations; Clone ID: LIB3061-108-Q1-K6-B5
agcaaacgtagttgcaaaccagcaacaacaacaactgcaacagtttctgtttttttttagtcaactagccatggtgaaccgggggggctacctacaacagcaacaactgctttcatctagcccgctcgctgtggccaatgcacctacatacctgcaacaagaattgttgcaacagattgtaccagctctaactcagctagctgtggcaaaccctgttgcctacttgcnacagctgcttccattcaaccaactaactatgtcgaactctgttgcgtacctacaacagcgacaacagttacttaatcnattggtattttttaacccattggncgctggcttcctacagcagcaacaattgctgncatacaaccggntctctttgatgaatcctgnnttgtcgaggcagcaacccatcgt

SEQ ID NO: 5329 - DNA, 561 bp, Zea mays
  unsure (1)..(561): unsure at all n locations; Clone ID: LIB3061-108-Q1-K6-B7
gcggcggcgcggactgacccgcggntccggccgatgcggaggaaggaagccaagtggcgctggactcgaggttcagcagcatgatgacggacccgaggttcgcctcgtcggcggcgcctgttttttttttcgggaggcgccgcaagaagcgcgagaaccccatgctgcattactatctcaaccaagaggacttggaggatgatgggaaggggaaggaaaaggggaagaaaccagtgcttgttgaagaagaggaggaagatgaagaggaactagaggaacaggaggaagaagagagctctagcagcgatgacgacgaagatgaagatttggatgacgacgaggaggagtgctctgttggcagtgacattgctcattacttaatgggaaggcatgatgatacacctatgattgacaaggaaactcacaggcttgctgntgttaatatggactgggatcatattaaggcagttgacctgtatatggtgatgacttcttgcctcccaagggtgggcgagttttgtcggtctcaatctatccctcagaatttggactgaagtgcat

SEQ ID NO: 5330 - DNA, 489 bp, Zea mays
  Clone ID: LIB3061-108-Q1-K6-C10
accagcgttttgttgcattgaactctgctacttatttgcaacaacaacaactaccattcagccagctatctgctgcctacccccagcaatttcttccattcaaccaactgacagctttgaactctcctgcttatttacagcagcaacaactactaccatttattcagctagctggtgtgagccctgctaccttcttgacacaaccacaattgttgccgttctaccagcacgctgcgcctaacgctggcaccctcttacaactgcaacaattgctgccattcaaccaacttgctttgacaaacccaacagcattctaccaacaacccatcattggtggtgccctcttttagatttcttatgagttatagttcaataataaagttttttgtctgatgtttgtggcttcccagaaataagaaagtacatttctaaaaaaaaaaaaagaaaggaaagaaaatggaataaactatgaaaaaataactatgggaa

SEQ ID NO: 5331 - DNA, 583 bp, Zea mays
  unsure (1)..(583): unsure at all n locations; Clone ID: LIB3061-108-Q1-K6-C11
acaatagtgtaccaacaatggcagccaaaaattttgcttccttatgctccttggtctttctgcaagtgttgctaccgcnaccattttcccacaatgctcacaagctcctatagcttcccttcttcccccatacctttcaccagcggtgtcttcaatgtgtgaaaccccaattgttcaaccctacaggatccaacaggcaatcgcaacaggcatcttaccattatcacccttgttcctccaacaaccgtcagccctattacagcagttacctttggtccatttggtggcacaaaacatcagggcacaacaactacaacaacttgtgctagcaaaccttgctgcatactctcagcaacatcagtttcttccattcaaccaactggctgcattgaactctgctgcttatttgcaacaacaattaccattcagccagctagttgctgcctacccccagcaatttcttccattcaaccaactagcagcattgaactctgctgcttatttacagcagcaacaactactaccattcagccagctagctgatgtgagccctgctgccttcttgacacaacaacagttgttg

SEQ ID NO: 5332 - DNA, 586 bp, Zea mays
  Clone ID: LIB3061-108-Q1-K6-C12
ccggtcgacccagcgttcttactagcacatacaagcacatactgtaccaacaatggcagccaaaatttttgcttccttatgctccttggtctttctgcaagtgttgctaccgcaaccattttcccacaatgctcacaagctcctatagcttcccttctttccccatacctctcaccagcggtgtcttcaatgtgtgaaaccccaattgttcaaccctacatgatccaacaggcaatcgcaacaggcatcttaccattatcacccttgttcctccaacaaccgtcagccctattacagcagttacctttggtccatttggtggcacaaaacatcagggcacaacaactacaacaacttgtgctagcaaaccttgctgcatactctcagcaacatcagtttcttccattcaaccaactggctgcattgaactctgctgcttatttgcaacaacaattaccattcagccagctagttgctgcctacccccagcaatttcttccattcaaccaactagcagcattgaactctgctgcttatttacagcagcaacaactactaccattcagccagctagctgatgtgagcc

SEQ ID NO: 5333 - DNA, 241 bp, Zea mays
  unsure (1)..(241): unsure at all n locations; Clone ID: LIB3061-108-Q1-K6-C2
cacatagtgtaccancaatggcagccaaaatttttgcttccttatgctccttggtctttctgcttgtgctgcttctcgaaccnntttcccacactgctcacaagctcctattgctttctttttttccccttacctctcaccattctgtgttttttcgnntgtgtnnaaccctnttcttcaaccctacaggatctctcaggtctttgttgcnggcatcttacctntatctcccttgttcctt

SEQ ID NO: 5334 - DNA, 579 bp, Zea mays
  unsure (1)..(579): unsure at all n locations; Clone ID: LIB3061-108-Q1-K6-C4
gcaacatacatagtgcaagtacacttagcaacatnncttagcaccaatggcagccaagattttntgccatccttgnccctccttgcntctttcagcaagcgttgctaccgcgactattattccacaatgctcacaacaatacctctctccggtgacagccgcgagatttgaatacccaactatacaatcctacaggctacaagaggccatcgcagcaagcatcttacggtcgttagcattgaccgtccaacaaccatatgccctattgcaacaaccatccttaatgaatctatatctccaaagaatcgcagcacaacaactacaacaacagttgcttccaacaatcaatcaagtagttgcagcgaaccttgctgcttacctccagcaacaacaatttcttccattcaatcaactagctggggtgaaccctgctgcttacttgcaggcacaacagctactaccattcaaccaacttgtcaggagccctgctgccttcttactgcagcaacagntgcttccattccatctacaagttgnggcaaacattgctgctttcttgcaacaacaacaacaattgct

SEQ ID NO: 5335 - DNA, 610 bp, Zea mays
  Clone ID: LIB3061-108-Q1-K6-D11
aactgtttttctgccgggcaggtaaagtatcatagcttggctcccatgtactataggggtgcagctgctgccattgttgtctatgacatcacaaatccggcctccttcacccgtgccaagaaatgggttcaagaacttcaagctcaaggaaatcagaattccatagtggctcttgctggaaacaagggtggtgtgctagatgcgaggcaggtgccagcagaggaagcaaaggcgtatgctcaggagaatgggctcttcttcatggagacatctgctaaaactgcaatcaatgtgaatgacatattttatgagattgcaaagaaattgcttcaagggcaacaagctccaagcccacaggctggaatggttctgaatcagagaccaaatgagaggacggtcagcagttcttcatgctgctcttgagctgtgtttcaacctcgtagtgccgttatcaaatgtatcagaggaggtttatggaaaatatgccatgtcgcctgtgtggctgcctttcaggctgacgtgctcccattctgctcctcatttcctttcacatgttcgtcatgtaaatgccaatactaaagtgtcactgcatgggcagaagtgttaccaa

SEQ ID NO: 5336 - DNA, 588 bp, Zea mays
  unsure (1)..(588): unsure at all n locations; Clone ID: LIB3061-108-Q1-K6-D2
cagtagcaacaacaaagcaccatggcgaccaagaaattttccctccttatgctccttgctctttctgcatgtgttgctaacgcgacaattttccctcaatgctcacaagctcctatagcttcccttcttcccccataccttccatcaatgatagcttcagtatgtgaaaacccagctcttcagccctataggctccaacaagcaatcgcagcaagcaacatacctttatcacccttgttgtttcaacaatcgccagccctatctttggtgcagtcattggtacaaaccatcagggcacagcagctgcagcaactcgtgctacctgtgatcaaccaagtagctctggcaaacctttctccctactctcagcaacaacaatttcttccattcaaccaactgtctacactgaaccctgctgcttatttgcagcaacaactattaccattcagccagctagctactgcctactctcagcaacaacaacttcttccatttaaccaattggccgcactgaaccccgctgcttatntgcagcagcaaatactactaccatttagccagctagctgcagcaaaccgtgcttccttc

SEQ ID NO: 5337 - DNA, 585 bp, Zea mays
  unsure (1)..(585): unsure at all n locations; Clone ID: LIB3061-108-Q1-K6-D3
caccaagcgaacgcactaccaacgacctaacaacaatggctaccaaggaattagccctccttgcgcttcttgccctttttgtgagcgcaacaaatgcgttcattattccacaatgctcacttgctcctagtgccattattctttttttttcccaccagttacttcaatgggcttgggacacctagctgtgcaagccaacatgcaacaacaagcgcttgcggcgagcgtctnacaacaaccaattgnccaattgcaacaacaatccttgccacatctaacaatacaagccatnacaacgcaacagcaacaacagntcctaccagcactgagccacctagccatggtgaaccctgccgcctacttgcaagagcagctgtttgcatccaacccacttgctctggcgaacgtagttgcaaaccnncaacaacaacagctacaacagtttntgccaacgctcagtcaactagccatggtgaaccctgccgcctacgtacaacaacaacaactgctttcatttagcccgntcgctgtgggcaatgcacctacatacctgcaacacaattgttgcaacagattgtaccagct

SEQ ID NO: 5338 - DNA, 574 bp, Zea mays
  Clone ID: LIB3061-108-Q1-K6-D6
ctctcgcgccggaaccccccggcctccccttccccgaattcagcgccctcgacgcgacagcttccgctcgggacttgtctggggactggcctggactggacttgactcgacctttcccttggctgttaccctcgcaaccgcccccgctcgcgacctcgtcctcctcggccgggtctccggttggaggctcgtcctcttccggtgccgtcggggacggcggagggctgaggaatgaggagtcttcggagtcgtcttcgaggagcgcgagcggcacggatggcagcggcaaggggaagggggaggaggacgaagcgaagcggcgcgcgcggcaggtacgcaaccgcgagagcgcgcacctgtcgcggcagaggaagaagcagtacgtggaggagttagagggtaaggtgaaggccatgcaggccaccatcgccgacctctccgccaggatctcctgcgtcaccgccgagaacgccgctctcaaacagcagctgggtggcgctgctggggccgcgccgccgccgatgccgatgtaccccacgatgtattctttgccgatgccgtggatgcacccatc

SEQ ID NO: 5339 - DNA, 593 bp, Zea mays
  Clone ID: LIB3061-108-Q1-K6-D8
gcttttctttcttcccccatacctctcaccagcggtgtcttcaagtatgtgaaaacccaattcttcaaccctacaggatccaacaggcaatcgcagcaggcatcttacctttatcacccttgttcctccaacaaccgtcttttttttttcagcagttacctttggtgcatttgttggcacaaaacatcaaggcacaacaactacaacaacttgtgctaggaaaccttgctgcctactctcagcaacagcagtttcttccattcaaccaactggctgcattgaactctgctgcttatttgcaacaacaactaccattcagtcagctagctgctgcctacccccagcaatttcttccattcaaccaactggcagcattgaactctgctgcttatttacaacagcaacagctaccaccattcagccagctagctgatgtgagccctgttgccttcttgacacaacaacagttgttgccgttctacctgcacgctgcgcctaacgctggcaccctcttacaactgcaacaattgctgccattcaaccaacttgctttgacaaacccaacagcgttctaccaacaacccatcattggt

SEQ ID NO: 5340 - DNA, 617 bp, Zea mays
  Clone ID: LIB3061-108-Q1-K6-E10
cccccggtcgacccagcgttttgtgggttggtaaaagagttgtagataatttcataagctttccagattgttaaagagtgcattcatatgatttgtgaaactccagttatgtttgttttactgtggctgtttctgtttacctgacaaaatgagtgggtctgttcactggtgggtttcatctagtaaatggccgaattggctcttccaactatggatacttttgtagagggataaaagttcttacttccagcagaatttcataatttttggttcagtagtttgggagatatcgaattttaaagttaaccatactgctgtctaaaacagattcagtcagttatcttgtcagatgttttagaacttgtagatggcagaatttaattatctattgaatactgaagttgtagagtattttgtgtagatactcctagagtatttgtttgatatcaccgctgttttaattttaaagatacaaaattaacaaacagcgttgctgctgtatggcatgtggttcagggtgggagtctttccactgggtcttggtttcaagtgtaggagtgttttgttgattgatggcaaatgtttgtgaaatatttgtactaagttttatgcccact

SEQ ID NO: 5341 - DNA, 602 bp, Zea mays
  Clone ID: LIB3061-108-Q1-K6-E11
cctcgccagtcgcctcgtctctccctgccgcgtcgcctcgcctctccctgccgcgtcgcctccagttccgacgccagcgcgcctcccgcctccgccgcgcctgacgaacgcagtgtaggactgtgcaggtagagaggaggagggttcggcgagatggggatgcgagataagaagcggaaccagaagcgagtgctcgcgcgccgtaccgcggtaccgcgcccaggcgagggcaaggacttcctgccgctggaaggaggccccggtaagaagctccggaaggtgcagcagcctgaagagcccgaaaacacagccacagtcgtctacattgggcatatcccccatggtttctacgaggacgagatgaaagggttctttaagcagtttggggatattaagaggcttaggatcgctcgtaaccgcaagacaggaaagtccaagcactatggattcattgagtttgagaaccctgctgtggcaaaggtcgtagcagatgagatgaataactatctcttgtttgagcgcaccttgcaagttgcacttgttgagccggagaaagttcatcctaaattatggaaaggggtgcgaaggggatttatacctgt

SEQ ID NO: 5342 - DNA, 528 bp, Zea mays
  unsure (1)..(528): unsure at all n locations; Clone ID: LIB3061-108-Q1-K6-E2
cactagtcaacatctataccaccaatggcgagccaagattttttccctccttgccctcctcgctctttcagcaagcgctgctaccactactattattccacaatgctcacaacatttccttttctccggtgacagccgctggttttctacacccaactatacaatcctacatgctacatgaggccatcgtagcaagcatcttacggtcattagcattaaccctccaacagccatatgccctattgcaacaaccatccttagtgcatctgaatctccaaagaatancgacacaacaactacaacaacagttgctaccaacaatcaatcaagtagttgcagttatccttgctgctnatctccagcaacaacatatttnttccattcaatcaactagctggggacaaccctgctgtctacttgcaggcacaacatctactancatttaaccaacttgtcgggagccctgctgacttcttacngcaacttcagctcttgccattcnatctgcaatctgtggaaaacattgct

SEQ ID NO: 5343 - DNA, 533 bp, Zea mays
  unsure (1)..(533): unsure at all n locations; Clone ID: LIB3061-108-Q1-K6-E3
ccgcacagtagtgtaccaacaatggcagccaaaatattgtgcctccttatgctccttggtctttctgcaagngctgttacggcgaccattttcccgcaatgctcgcaagctcctatagctntctttttttctgcgtacctatcaccagccgtgtcttgggtgtgtgaaaacccaattcttcagccctacaggatccaacaggcaatnacagctggcatctgacctttatcacctttgttnctccatcaatcatgagccctattacatcagttacctttggtgcatttattggcncaaaacattagggcacaacaactacaacaacttgtgctagcaaaccttgctgnctactttcagcaacagnagtttnttctctncaaccaactagctgcnntgaactctgcttcttatttgcagcaacaacaactaccattaagccagntacctgctgcctacccccagnaatttcttccattataccaactgnnagcatgnaactcttctgcttatntacagcatcaacaactactacc

SEQ ID NO: 5344 - DNA, 566 bp, Zea mays
  unsure (1)..(566): unsure at all n locations; Clone ID: LIB3061-108-Q1-K6-E7
tagcaacgacctaacaccaatggctaccaaggaattagccctccttgcgcttcttgcccttttagtgagcgcaacaaatgcgttcattattccacagtgctcacttgctcctagtgccattttttttcatttcctcccaccagttacttcaatgggcttggaacatccagccgtgcaagcctacaggctacaactagcgcttgcggcgagcgccttacaacaaccaattgcccaattgcaacaacaatccttggcacatctaaccctacaaaccattgcaacgcaacaacaacaacaacaacagtttctgccatcactgagccacctagccgtggtgaaccctgtcacctacttgcaacagcagctgcttgcatccaacccacttgctctggcgaacgtagctgcataccagcaacaacaacagctgcaacagtttatgccagtgctcagtcaactagccatggtgaaccctgccgtctacctacaactactttcatctagcccgctcgcggngggcaatgcacctacgtacctacaacaacagttgctgcaacaaattgtaccag

SEQ ID NO: 5345 - DNA, 228 bp, Zea mays
  Clone ID: LIB3061-108-Q1-K6-E8
aaccacattgttgccgttctaccagcacgctgcgcctaacgctggcaccctcttacaactgcaacaattgctgccattcaaccaacttgctttgacaaacccagcagcgttctaccaacaacccatcattggtggtgccctcttttagatttcttatgagttatagttcaataataaagttttttgtctgatgtttgtggcttcccagaaataagaaagtacatttct

SEQ ID NO: 5346 - DNA, 598 bp, Zea mays
  unsure (1)..(598): unsure at all n locations; Clone ID: LIB3061-108-Q1-K6-F1
ggtcgacccagcgttctgaactagcacatagtaaagcacatactgtaccaacaatggacagccaaaaattttgcctccttatgctccttggtctttctgcaagtgctgctacggcgaccattttcccgcaatgctcgcaagctcctatagcttcccttcttcccccgtacctcacaccagcggtgtcttcggtatgtgaaaacccaattcttcaaccctacaggatccaacaggcaatcggagctggcatcttacctttatcacccttggtcctccaacagtcatcagccctattacaacagttacctttggtgcatttattggcacaaaacatgacggcacaacaactacaacaacttgtgctagcaaaccttgctgcctactctcagctttttcaggtcttccattcaaccaactacgttcattgaactctgcttcttatttgcaacaacaacaactaccattcagccagctacctgctgnctacccccagcaatttcttccattcaaccaactagcagcattgaactctcctgcatatttacagcagcancaactactaccattcagccagctagctggtgtgaggccctgctac

SEQ ID NO: 5347 - DNA, 593 bp, Zea mays
  unsure (1)..(593): unsure at all n locations; Clone ID: LIB3061-108-Q1-K6-F12
gtcgacccagcgtccggttgcgagggcggnggcgccgctggccggggcgggggcgggtgcgggagcgggggcgctggccgggctcgcagcgtgcgcgacgctggcgtgcaacgtcgcaggcgccgtgctcttcctcctcagccaagacgacgagcggctgcggcgcgggtgtgcggcgaggttgggcgctggcggcgtcgcgtcgcagccggtggaggagtgcggggatgaagaggcgctcgcgccggacgccgtcctcaacctcgagctcggcgacccgacgatgtaccgggcgttctggcgggaggttggggactgcggcgccaccgtgatccgcgggtgccaggggatgagctacttctccgacgacgacgccgtgctctgctggttcctcgagccggagctggagcgcgaggtgcgccgactccaccgcatcgttggaaacgccgtcgtcgacggctaccacctcgtggtcggcaccggcgccacccagctctaccaggccgccatgtacgcgctcagttcgccggcgcgccgggaccagcccgtacccgtcgtctcgccggcgccgtactactcttcctatccgccgc

SEQ ID NO: 5348 - DNA, 592 bp, Zea mays
  unsure (1)..(592): unsure at all n locations; Clone ID: LIB3061-108-Q1-K6-F3
tggtatttgttcttgggcaaaactcagcggaagcatgctgtgagatctaagctagtagagcttggatatgaaatcggtgacaaggaatttgaggacttctttaaacgctacaaagaggttgcagagaagaaaaagcgcgtaactgatgaagacttagaagcgttattgtcggatgagatattccagcctaaggttatttggtcccttgctgatgtacaggcaacatgtggtacacttgctttatctacggcaacagngaaattgatagcaccagatggagaggagaaaatagcatgttcagtcggaacaggtccagtcgatgcagcttacaaggctgttgacaaaataatccagattccaaccgttctccgagaatacagcatgacatcagtcacagaaggcattgacgcaatcgcgacaacccgggttgttgtcactggagatgtgagcaacaacgccaaacatgccctgactggccagtctttcaaccgctccttcagcgggagcggggcattcatggacattgtggngtccagtgtcagagcttacctgagcgccctgaacaagatctgcagtttcgctggcgccgtga

SEQ ID NO: 5349 - DNA, 593 bp, Zea mays
  Clone ID: LIB3061-108-Q1-K6-F5
cgtccgcatcaatcatcattcatcttagtagtataggcaccaaatcaaatctgcaacatcaattatctaactccaaaaaccatgaagctggtgcttgtggttcttgctttcattgctttagtatcaagtgtttcttgtacacagacaggcggctgcagctgtggtcaacaacaaagccatgagcagcaacatcatccacaacaacatcatccacaaaaacaacaacatcaaccaccaccacaacatcaccagcagcagcaacaccaacaacaacaagttcacatgcaaccacaaaaacatcagcaacaacaagatgttcatgttcaacaacaacaacaacaaccgcagcaccaccaccaacaacaacaacaacagcaccaacaacaacatcaatgtgaaggccaacaacaacatctccaacattcacaaggccatgtgcaacaacacgaacagagccatgagcaacaccaaggacagagccatgagcaacaacatcaacaacaattccagggtcatgacaagcagcaacaaccacaacagcctcagcaatatcagcagggccaggaaaaatcacaacagcaacaatgtcattg

SEQ ID NO: 5350 - DNA, 596 bp, Zea mays
  Clone ID: LIB3061-108-Q1-K6-F8
catcatcatctcgtctacctcaacccaccctctggtcttgttcccgccgcccggttgctgcttggcgccgccggctctggagctcggagccgccgccgccgccgccttggcagccgccctggacgacgccgtcgacctcaccagattcttcacctggggaggaggctccgtcgacttcctcttcagcctcgcctcgcgctcggctggcaggctcctcttcctcccaccgttgttagtgttctcttgctcgccgccgccgatggacgcgttcctcgcctcgcctttcctcttcctctcgttgcaagccgcttcaggggcctcaggagtgttctccacgtgagccagctgcttgttcagggagtttgagatcctcaggacgtggttctccttctcgctcatcaccttcgcgtttacaggagtcgcgacgacgacgcgggactccaccactgccgtcatgtttgtgtcctgctctttcgccttgctttcaagttctcttagctgacatgcggagacgccaagctccgggttattcaagatctcttaaataaacgcactactcaattgtagcagctgtgacaaagaagctaccttaatct

SEQ ID NO: 5351 - DNA, 559 bp, Zea mays
  unsure (1)..(559): unsure at all n locations; Clone ID: LIB3061-108-Q1-K6-F9
gcatgaagagggcatcgntctcgtcgtgtgcctggctctgtcagctgccagcgcctctgcaatgcagatgccctgcccctgcgcggggctgcagggcttgtacggtgtctttttttctgcctgacgacgatgatgggcgccggcgggctgtacccctacgcggagtacctgaggcagccgcagtgcagcccgctggcggcggcgccctactacgccgggtgtgggcagccgagcgccatgttccagccgctccggcaacagtgctgccagcagcagatgaggatgatggacgtgcagtccgtcgcgcagcagctgcagatgatgatgcagcttgagcgtgccgctgccgccagcagcagcctgtacgagccagctctgatgcagcagcagcagcagctgctggcagcccagggtctcaaccccatggccatgatgatggcgcagaacatgccggccatgggtggactctaccagtaccagctgcccagctaccgcaccaacccctgtggcgtctccgctgccattccgccctactactgattcatgatatttgggaaaa

SEQ ID NO: 5352 - DNA, 550 bp, Zea mays
  Clone ID: LIB3061-108-Q1-K6-G10
ggcgcacttacagattctgcatcccatcccacgtacctgcgtccaactgttgccaccggcgcccggcggtgaccgaccgaccgccagcccctattatttcctttcgctttctctagcataccttgccaccaccagctgcttttttttttgctaaagcagggagggtgccgtgcgagggcccgggcctgaagatcgggttccacgtggaggagtactcgaaccccgtctacttcgcggtgctggtggagtacgaggacggcgacggcgacgtggtgcaggtggacctgatggagttcaagacggcgcgcggtccgccgacggggcggtggacgccgatgcgcgagtcctggggctccgtctggcgcatggacaccaaccaccgcatgcaggcgcccttctccatccgcatccgcaacgagtccggcaagacgctcgtcgccaacaacgtcatccctgccaactggcgccccaacaccttctaccgctccttcgtccagtacagctaaccgatcgggatccgtgccctgcccgcaattggagctggctggct

SEQ ID NO: 5353 - DNA, 573 bp, Zea mays
  unsure (1)..(573): unsure at all n locations; Clone ID: LIB3061-108-Q1-K6-G11
gttggcagctttcgnacctgggccagtgcgtcgcgtttctgaggcatcagtgcagcccgacggcgacgccctactgctcgcctcagtgccagtcgttgcggcagcagtgttgccagcagctcaggcaggtggagccgcagcaccggtaccaggcgatcttttgtttggtcctccagtccatcctgcagcagccgactccatgcccctacgctgctgccggcggtgtcccccactgaagaaactatgtgctgtagtatagccgctggctagctagctagttgagtcatttagcggcgatgattgagtaataatgtgtcacgcatcaccatgggtggcagtgtcagtgtgagcaatgacctgaatgaacaattgaaatgaaaagaaaaaagtattgttccaaattaannnnnaaannnnaaaaanaaaaaaaaanaaaaaaaaaaaaaaaaaaaaaaaaaaaaaaaaaaatttnaaatttttnnnnnnaaaannaaaaaannaaaaaaaaaaaaaaaaaaaaaaatttttttaaatnaaaaaaanaaaaaaaaaaaaaaaaaaaagggggggccc

SEQ ID NO: 5354 - DNA, 567 bp, Zea mays
  Clone ID: LIB3061-108-Q1-K6-G12
acatatgtaccaacaatggcagccaaaaattttgcttccttatgctccttggtctttctgcaagtgttgctaccgcaaccattttcccacaatgctcacaagctcctatagcttcccttcttcccccatacctctcaccagcggtgtcttcaatgtgtgaaaccccaattgttcaaccctacaggatccaacaggcaatcgcaacaggcatcttaccattatcacccttgttcctccaacaaccgtcagccctattacagcagttacctttggtccatttggtggcacaaaacatcagggcacaacaactacaacaacttgtgctagcaaaccttgctgcatactctcagcaacatcagtttctttcattcaaccaactggctgcattgaactctgctgcttatttgcaacaacaattaccattcagccagctagttgctgcctacccccagcaatttcttccattcaaccaactagcagcattgaactctgctgcttatttacagcagcaacaactactaccattcagccagctagctgatgtgagccctgctgccttcttgacac

SEQ ID NO: 5355 - DNA, 584 bp, Zea mays
  unsure (1)..(584): unsure at all n locations; Clone ID: LIB3061-108-Q1-K6-G2
ggtcgacccagcgtccgtttgtaccaactgcaaatacatagtgaagtcactagcaacatcttagcaccatgggagccaagattttttccctccttgccctccttgctctttcagcaagcgctgctacctctactattattccacaatgctcacaacaatacctctctccggtgacagccgcgggatttcaacacccaactatacaatcctacatgctacatgaggccatcgtagcaagcatcttacggtcattagcattaaccctccaacagccatatgccctattgcaacaaccatncttagtgcatctgtatctccaaagaatcgcgacacaacaactacaacaacagttgctaccaacaatcaatcaagtagttgcagcgaaccttgctgcttatctccagcaacaacaatttcttccattcaatcaactagctggggtgaaccctgctgtctacttgcaggcacaacaactactaccatttaaccaacttgtcgggagccctgatgccttcttactgcaacaacagcttctgccattncatctgcaagctgtggaaacattgcttctttctggcgacaac

SEQ ID NO: 5356 - DNA, 317 bp, Zea mays
  Clone ID: LIB3061-108-Q1-K6-G4
ggtgcccttcttttaaaattccttatgagttatagttcaataataaagttttttgtctgatgtttgtggcttcccagaataagaagtacatttctagattaaaaaaaaaaaaaaaaaaaaaaaaaaaaaaaaaaaaaaaaaaaaaatttatataaaaaaaaaaaaaaaaaaaaaaaaaagggaggaggaaaaaaaaaaaaaaaaataaaaaaaatttttttatagaaaaaaaaaaaataaaatttaaatattaaaattattaacttggtgtttcattggttacaacctgaaaaatttttaaaaaaaaaaaagagggg

SEQ ID NO: 5357 - DNA, 428 bp, Zea mays
  unsure (1)..(428): unsure at all n locations; Clone ID: LIB3061-108-Q1-K6-G5
aaaaacttccgggtttgaccagcgttcttgccagcgtccgtttcttaagcacatggtggtctttgaagcatgacaatggctgctcttaggtttgggattgccaccatcttctgggacaaagagggagtggaggatgattgatctgtcggcagtctgatggggatgaattatacgatttttttaacgctgacacaaagggttaatgaaacagactcgaatccagtgattattggcgctncgcacggaccatatgattcatctttcgttggacatgtagctacaagaatggtgtcagtgggcggttgctgccgcaactaaaagtccattcagngtggatgtcagttgggctacgntatctnagaataaaaagtttgaggaacaacgagcatgttgccaagtngtttcttnagtattagtttctgcgtcta

SEQ ID NO: 5358 - DNA, 546 bp, Zea mays
  unsure (1)..(546): unsure at all n locations; Clone ID: LIB3061-108-Q1-K6-G6
attctttattgagtccctatccgtaaacatggtaatgacactcataagtgcaatatagtaatcgcagtatggttgtatgaaacttagaggttgtacaagttgtactgacaataagctgggaatactgtaatctttcagctacttttatgacagtaggccacttgtccaagagcactgaagtgatgaaacttgtcaacagcctcatgaaagccccggaggttgcagccacaatgcaggaattcagcaaagagatgacaaaggctggtgtgatggaagaaatggtcaacgatgctttagattcaactctggacagcgaggacatggaggaggaaattgaagaggaggttgacaaggtcctcactgcaatcgctggggagaccgcctctgagctcccggatgctgtcaggaatgaaaaggagaagatgaagcanccttcaacaagtgtacctgcggagagaactgctatagcagaggctgttgatgacggtgagctagaccagataagggaaaggcttgccagagtgaggtcatagaagatagctgaac

SEQ ID NO: 5359 - DNA, 600 bp, Zea mays
  unsure (1)..(600): unsure at all n locations; Clone ID: LIB3061-108-Q1-K6-G7
tacatgnactttggnatnctgaaatcctcccagaagctgtactagatcatagtgtgcaggcatgcatttttacgggctattgggaggatgttggaacaatcaaatcattctttgatgcaaacttggccctcactgagcagccttccaagtttgatttttatgatccaaaaacacctttcttcactgcaccccgatgcttgcctccgacgcaattggacaagtgcaagatgaaagatgcatttatctcagatggttgcttactgagagaatgcaacatcgagcattctgtgattggagtctgctcacgtgtcagctctggatgtgaactcaaggactccgtgatgatgggagcggacacctatgaaactgaagaagaagcttcaaagctactgttagctgggaaggtcccagttggaataggaaggaacacaaagataaggaactgtatcattgacatgaatgctaggattgggaagaacgtggtgatcacaaacagtaagggcatccaagaggctgatcacccggaagaagggtactacataaggtctggaatcgtggtgatcttgaagaatgcaaccatcaacgatgggtctgtcatat

SEQ ID NO: 5360 - DNA, 600 bp, Zea mays
  unsure (1)..(600): unsure at all n locations; Clone ID: LIB3061-108-Q1-K6-G8
tgcggcgagcgtctntaaaacaaccaattgcccaattacaacaacaatccttggcacatctaaccatacaaaccatcgcaacgcagcagcaacaagcactgagccacctagccgtggtgaaccctatcgcctacttgcaacaacagctgtttgcatccaacccacttgctttggcaaacgtagctgcataccaacaacaacaacagttgcaacagtttctaccagcgctcagtcaactagccatggtgaaccctatcgcctacctacaacagcaacaacttctttcatctagcccgctcgctatgggcaatgcacctacatacctgcaacaacagttgttgcaacaacagttgctgcaacaaattgtaccagctcttactcagctagctgtggcaaaccctgctgcctacttgcaacaactacttccattcaaccaactgactgtgtcgaactctgctgcgtacctacaacagcgacaacagttacttaatccactagcggtggctaacccattggtcgctgccttcctacagcagcaacccatcgttggtggtgccatcttttagattacatatgagatgtactcgataatggtgccct

SEQ ID NO: 5361 - DNA, 598 bp, Zea mays
  Clone ID: LIB3061-108-Q1-K6-H10
ccggtcgacccagcgtccgtaagcccaagtactgtcaacatacttcgatattcgtaaaggtctagatggttcacttgataagacaattcaggctctttgtgaagaagctgatgctgctgtgcggagtggctctcaacttcttgttctttctgatcgttctgaagcacctgaacctactcgtcctgccataccaatacttctagctgttggcgccatccaccagcatttgattcagaatggtctccgtatgtctgcttctattgttgctgatactgctcagtgttttagcacacatcattttgcctgtctgatcggatatggtgccagtgctgtgtgtccttatctggcactagaaacatgccggcaatggaggctgagcaacaaaactcttaatttgatgcggaatgggaagatgcccacagtgaccatcgagcaggcacaaaggaactttatcaaggcagtaaaatcaggtctgctcaaaattctttcaaaaatgggtatctcactgctctcaagctattgtggagctcagatctttgaaatttatggtcttggtcaagaagttgttgatcttgccttctgtggaagtgtatcgaaa

SEQ ID NO: 5362 - DNA, 563 bp, Zea mays
  Clone ID: LIB3061-108-Q1-K6-H11
actacctcaccacgacttaacaacaatggctaccaagatattagccctccttgcgcttcttgccctttttgtgagcgcaacaaatgcgttcattattccacaatgctcacttgctcctagtgccattataccacattttctccgaccagttacttcaatgggcttcgaacacctagctgtgcaagcctacaagctacaacaagcgcttgcggcgagcgtcttacaacaaccaattaaccaattgcaacaacaatccttggcacatctaaccatacaaaccatcgcaacacaacagcaacaacagttcctaccagcactgagccaactagatgtggtgaaccctgtcgcctacttgcaacagcaggtgcttgcatccaacccacttgctctggcaaacgtagctgcataccaacaacaacaacaattgcaacagtttctgccagcgctcagtcaactagccatggtgaaccctgccgcctacctacaacagcaacaactgctttcatctagccctctcgttgtgggtaatgcacctacatacctgcaacaacaattgctgcaac

SEQ ID NO: 5363 - DNA, 393 bp, Zea mays
  Clone ID: LIB3061-108-Q1-K6-H12
gtgctggcgcttgttgggggcgccgtgtgcttttctggctgtgggtgtgggtgccagacgcgttcgttttttctccctgctccgttgtttctggcgcctttgttcttttttttttcggaccagctgcctcagtggtggggggggggcgttctgtcgccggcgttctagctcgtgccagcgcttgcggtgctggggtgtcggcagcctctgcagcccgtgcctgggcctgcgtgtcgcgttcttgccgtcccagtgtagccccgcggcgacgccctccggttctacccgctctcagccgcttcggtgtggtgatccctgccgattacttgcgtcgggcctgttttgcgtgtccccgcgtcgttctgggtggtgctgctgtctttcctgcaccac

SEQ ID NO: 5364 - DNA, 610 bp, Zea mays
  unsure (1)..(610): unsure at all n locations; Clone ID: LIB3061-108-Q1-K6-H2
cgggttgacccagcgttttttgccattattccacagttcctcccaccattacttcaagggcttcgaacacctagctgtgcaagccaacatgcaacaacaagcgcttgcggcgagcgtcttacaacaaccaattgcccaattgcaacaacaatccttgccacatctaacaatacaagccatcacaacgcaacagcaacaacagttcctaccagcactgagccacctagccatggtgaaccctgccgcctacttgcaagagcagctgcttgcatccaacccacttgctctggcgaacgtagttgcaaaccagcaacaacaacagctacaacagtttctgccaacgctcagtcaactagccatggtgaaccctgccgcctacgtacaacaacaacaactgctttcatctagcccgctcgctgtgggcaatgcacctacatacctgcancaacaattgttgcaacagattgtaccagctctgactcaactagctgtggcaaaccctgttgcctacttgcaacagctgcttccattcaaccaactgactctgtcnaactctgctgcgtacctacaacagcgacaacagttacttaatccattggtagtggctaac

SEQ ID NO: 5365 - DNA, 87 bp, Zea mays
  unsure (1)..(87): unsure at all n locations; Clone ID: LIB3061-108-Q1-K6-H3
ccgggtaaaaanaaaaanatttttaaaaaaaaaaaaaaaaaaaagaaacaagnaaaaaaagaaaaaaaaaaaaaaaaaagggaaaga

SEQ ID NO: 5366 - DNA, 613 bp, Zea mays
  Clone ID: LIB3061-108-Q1-K6-H4
gtcgacccagcgtccttactagcaacatagtaaagcacaacagtgtaccaacaatggcagccaaaatttttgcctccttatgctccttggtatttctgcaagtgctgctacggcgaccattttcccgcaatgctcacaagctcctatagcttcccttcttcccccgtacctctcaccagcggtgtcttcggtatgtgaaaacccaattcttcaaccctacaggatccaacaggcaatcgcagctggcatcttacctttatcacccttgttcctccaacaatcatcagccctattacagcagttacctttggtgcatttattggcacaaaacatcagggcacaacaactacaacaacttgtgctagcaaaccttgctgcctactctcagcaacagcagtttcttccattcaaccaactagctgcattgttctctgcttcttatttgcaacaacaacaactaccattcagccagctacctgttgcctacccccaacaatttcttccattcaaccaactggcagcattgaactctcctgcttatttacagcagcaacaactactaccattcagccagctagctggtgtgagccctgctaccttcttgacacaacca

SEQ ID NO: 5367 - DNA, 554 bp, Zea mays
  unsure (1)..(554): unsure at all n locations; Clone ID: LIB3061-108-Q1-K6-H5
gacaaaatattcagctgccttatgctccttggtcattctgcaggtgttgctaccgcaaccattttcccacaatgctcacaagctcctatagctccccttctttcatttttcttctcaccagcggtgtcttcaatgtgtgaggaaccgaattgttcaaccctacaggatccaacaggcaatcgcaacaggcatcttaccattatcacccttgttcctccaacaaccgtcagccctattacagcagttacctttggtccatttggtggcacaaaacatcagggcacaacaactacaacaacttgtgctagcaaaccttgctgcatactctcagcaacatcagtttcttccattcaaccaactggctgcattgaatatagttgcttatgngcaacaacaattaccattcagccagctagttgctgcctacccccagcaatttcttccattcaaccaactagcagcattgaactctgctgattatttacagcagcaacnactactancattcagccagctagctgatgtgagccctgctgccttcttgacacaacaac

SEQ ID NO: 5368 - DNA, 522 bp, Zea mays
  unsure (1)..(522): unsure at all n locations; Clone ID: LIB3061-108-Q1-K6-H6
tcattatttccacaagatggctcacttgcgtcctcagtggcgcacttattccacagtttttcttctccaccagtntnnacttcaatgggggcttgcgagacatgcccagccgtgcccaagcctacagactctacaacnntagcgcttgcgnnngcgagcgcnncttacaacaaccaatnntgcccaattgcaacaaccaatccttggcacantctaaccctacaaaccattgcaacgcaacaacaacaacaacaacagtttctgccatcactgagccacctagccgtggtgaaccctgtcacctacttgcaacagcagctgcttgcatccaacccacttgctctggcgaacgtagctgcataccagcaacaacaacagctgcaacagtttatgccagtgctcagtcaactagccatggtgaaccctgccgtctacctacaactactttcatctagcccgctcgcggtgggcaatgcacctacgtacctacaacaacagttgctgcaacaaattgtaccagct

SEQ ID NO: 5369 - DNA, 594 bp, Zea mays
  Clone ID: LIB3061-108-Q1-K6-H7
agcaacataaaagcacactagtgtaccaacaatggcagccaaaaattttgcctccttatgctccttggtctttctgcaagtgctgctacggcgaccattttcccacaatgctcacaagctcctatagcttcccttcttcccccgtacctctcaccagcggtgtcttcggtatgtgaaaacccaattcttcaaccctataggatccaacaggcaatcgcagctggcatcttacctttatcacccttgttcctccaacaatcatcagccctattacagcagttacctttggtgcatttattggcacaaaacatcagggcacaacaactacaacaacttgtgctagcaaaccttgctgcctactctcagcaacaacagtttcttccattcaaccaactagctgcattgaactctgcttcttatttgcaacaacaacaactaccattcagccagctatctgctgcctacccccagcaatttcttccattcaaccaactgacagctttgaactctcctgcttatttacagcagcaacaactactaccattcagccagctagctggtgtgagccctgctaccttcttgacacaaccacaa

SEQ ID NO: 5370 - DNA, 537 bp, Zea mays
  unsure (1)..(537): unsure at all n locations; Clone ID: LIB3061-108-Q1-K6-H8
tcctgnaggcatcagtgacagccccgacccggcgacgccctacttgcnnncgcctcagtgccanngtcgttgcnnggcagcagtgttgccnnagcagctcaggggcaggtggnagnnccgcagcnnaccggtacccaggnncgatctnntcggcttttggtcctttccagtccattcctgtcnnagcagcagnnccgcaaaagcnnngccaggtcnngcggggcttgttngnngcggcgcagaatttagcgcagcaactttgacggcgatgtnnngcggcctgcnnnagcagccgacttccattgccccttacgctttgctgcnncggcggnnngtcccccactttgaagaaactatngtgnnctgtagtattagccgcttggcttagcttagctanngttgagtcattttnnagcggcgatgattgnnnagtaataatgnntgtcacgcattcaaccatnngggtggcanngtgtcagtnngtgagcannatgacctnngaatgaacaatntnngaaatgaannaagaaaaaangt

SEQ ID NO: 5371 - DNA, 614 bp, Zea mays
  Clone ID: LIB3061-108-Q1-K6-H9
gtcgacccagcgtccgcgagcccaggcggcctcggttctcgccggagcggcggcctcgcccccgctgacgtggcggagatgggctcctcttctcgccgcgtcacatccacgggcgaacccgcctcccgcactgcgcctgcgggcgcccgctcctcctctccgggcctcctccgttccccgcgattcctgcgccggagccgccgtccggaggacgacgtgtgcggcggcggaggcagtaggtggaggtgtggaggcggagtccacggagcgggaggcgcccgatcgggatgctctgaagcgggtggcgctgctcgcgcttggctgcggcgctgcagccgccgcgctcggctgcggcgcggcgcgggcagcggcggaggactccatcaaggcgtcaggattcgggctgcgggtggcggagtcgctgcggaggctcggatggcccgacgacaccgtcgtgttcgcgctcgcgacgctgccggtgatcgagctgcggggggcgatccccgttgggtattggctgcggctccatccagtccgcctcaccatcctatccgttcttgggaacatggtgcctgtaccattcatcatcctctacctgaagaaactcgcaacgt

SEQ ID NO: 5372 - DNA, 534 bp, Zea mays
  Clone ID: LIB3061-108-Q1-N6-A12
gcctgcgtgaaccgggctgctattacacggtcgaccttagcgttcgattgataccaacaagtcaacatattatgtggtatacagtttcaaaaatagagcaacaatggcggtcaatatattttttcatccttatgctccttgctctttctgcatgtgttgctaacgcgaccatttttcctcaatactcacaagctcctatagctgcccttcttcccccataccttacatgcaatgaccgctttagtatgtgtaaaacccagcccttcaaccctacaggatccagcaagcaatcgcaacaagcaacttacctttatcacacctgttctttcaacaatcgccagccctatctttggtgcagtcattggtacaaaccatcaaggcagaacagttgcagcaactcgtgctaccagtgatcagccaagtagctctggcaaacctttccccctgactctcagcaacaacaatttcttacattcaaccaactgtctatactgaaccctgctgcttatttgcagcaacaacaactactaccat

SEQ ID NO: 5373 - DNA, 438 bp, Zea mays
  unsure (1)..(438): unsure at all n locations; Clone ID: LIB3061-108-Q1-N6-A4
cgcaggctttaacgcctttgcccgttgcccgactaatgggtgacctccggcgatccggcgcgtgggttggccatgagttagtctgtnccgctggtgttgttggctggccctgatgggttcgtgtgggtctgattggcgttgttgtggggcttcggggccattgggtttctgctggggagtccgtggtgcttgctgaactgttgggccgtctcccgccggttggtgggcggttgccccgttttttgggtctcgggggggcgggtgaatgccttgggcttcggggggcgggtccgtttgggggtcttggctgctcggggttttggcttgtggctgttcgtgttttttccgcgttgttgctttggtgttccttttttttcctgcctttttagccttgggtttttttttcttttttttgggggttgtttttgttgtggggtt

SEQ ID NO: 5374 - DNA, 590 bp, Zea mays
  Clone ID: LIB3061-108-Q1-N6-A6
gcctgcgtgtactgggctggtattacacggtcgaccttagcgttcggtggtcgttcgtgttctaccggtgcagatttcgtcgtgtggttcgtgacgagcagggttcgtgtaggtgctccgcggccttggatgaggtgtgtcaggtttctacgaggcatctggtagtacctggttgccggtctggagctaaccccactcgttcggggtgtccatacacactcgacacgcactgaatcatgctacatgcgtggaaggcgagggagtggggacgacaacctattacggctagtaggctggcatacaccatgcgagcaagggcctcatatttctgtggggccaccactggtcatgagacgctatcctggcacaacactcgacggcgcccaagaaactgggcatccttaagattcttcatactatttctgcgcctggtgagttccaggtctttttctgtcccggcgggaggaaccgggaatttttcctgtctagctttagcatgagcatccatagagctggatacaagatctccagcgagcgagtaaagaagctgttctggaggcatgagcaggacaaggggatcatcttgcgcg

SEQ ID NO: 5375 - DNA, 335 bp, Zea mays
  Clone ID: LIB3061-108-Q1-N6-A9
tgccggttgcccgaataatgggtgaccaccggagatacggagcgtgagtggaccatgagttaatcagtaccgatggtgctgttggctgacaatgatgagttcgtgtgggcacaattggcgtagttatggggcttcggagccattgtggttatgcagcaggatccatggcgatagatgaattattgggaagtctcccgccggttggtgaacaactaaaccgttttttgggtctcgcggggacgaaagaataacttgcgcctcgggttgcagatctgtaagaggatcttgcttacacgaagtctaagcttgtggctgtacgtggttcctgagcgaaa

SEQ ID NO: 5376 - DNA, 364 bp, Zea mays
  Clone ID: LIB3061-108-Q1-N6-B10
caagctccttgttcttgatgtatgtgttgttaccgatcccatagagggaccctgctaacatggttctatggctgaactcttttcggctacctaaaaccagcgggtgtgtatgaatgtgtataaaccccattgttaaagcgtacagatctcagacatcaatcgcaacaagaatggttaccattatcacccttgttactacgacaaccggctgacatattacagctggttccttgggtccatttggtggtgcagaacataagggcacaacaactacaacaacttgtgctagcaaaccttgatggatactcgttaggaacataactttcttgcattaaaccaactggctgtattgaaatctgctggt

SEQ ID NO: 5377 - DNA, 354 bp, Zea mays
  Clone ID: LIB3061-108-Q1-N6-B11
cgcaagtcttaatgcctttgccggttggctgaataatgggtgagcagcggagatagggagcgtggagtggacaatgagttaatctgtagtgatggtcttgttgactgacaataatgagttcgtatgggcataattggcgtagttatggggcttcgaagccattagggttatgcagcaggatccatggagatagatgaattatttggaagtctcgcgtcggttggtgaacaactaaacagttatttcagtctcacggagacgaaagaataacttgcgcttcgtgttgcagatctgtaagaggatcttgattacacgaagtctaagattatgactatacgtggtttctgaatgaaa

SEQ ID NO: 5378 - DNA, 483 bp, Zea mays
  unsure (1)..(483): unsure at all n locations; Clone ID: LIB3061-108-Q1-N6-B2
cgcgtgcgtgtgctgggctggtcttgcggggtcgacctttgcgtttggtgttttttggccattggtggtgtcttttttgtttgtgtttaatcgtcgttccgtgggggttgcttgttgctgtcgctcttgtggctgtgggtgcgattgttacttactcgtctccgatcggtggctgcggttgctagctagcgccggggtttcctttaccgcctcgggtgtttttggggggtcacggtcagctgccgcctccggggcttggtgtcaggtgcgtgccagctgcacgtcgcccggtccgttgtgtgcgctatcgtgtccatgtcgccggcgccgggtcatgtgccgtttgccgctgctgctgccctattgactggnggaggcctccgcctattgcctggtcccggtgctgcgggtgcccctggcctgattgatggccgtgctggttgcggggcgcctggggctttggcgggcccttggtcgtgggcc

SEQ ID NO: 5379 - DNA, 572 bp, Zea mays
  Clone ID: LIB3061-108-Q1-N6-B6
cacgcctgcgatgaaccgggctcgctattacacggtcgacccactcgttcgattgagaccaacaagcaacattataagtggtatccagtttcaacaatagagcaacaatggcgaccaagatctttccctccttatgctccttgctctttctgcatgtgttgctaacgcgacaattttccctcaatgctcacaagctcctatagcttcccttcttcccccataccttccatcaatgatagcttcagtatgtgaaaacccagctcttcaaccctataggctccaacaagcaatcgcagcaagcaacatacctttatcacccttgtttcaacaatcgccagccctatctttggtgcagtcattggtacaaaccatcaaggcacagcagctgcagcaactcgtgctacctgtgatcaaccaagtagctctggcaaacctttctccctactatcagcaacaacaatttcttccattcaaccaactatctacactgaaccctgctgcttatttgcagcaacaactattaccattcagccagctaggtactggctactttcatcaacaacaacttcttt

SEQ ID NO: 5380 - DNA, 553 bp, Zea mays
  Clone ID: LIB3061-108-Q1-N6-B7
cgcctgcgtgtaccgggctgctattacacggccgacctacgcgttcggtgcgaatggagactagcggctcgtggcagatcggcctgtacccgagggttctgtctctgtgggggccggtaagctaaggtgctgatgctctggggggtcagcaatctgaataccgtcgcgatgagcgcgttcctggtgggatccgtggacaagcgcgagaagagccaaccgatgctctagagcccgttgctgtattgctctctcaatccgagagacttggaggctgatagtaaggtacacggttaattgtatgacaccctggcttgacttgctaaatgcatgtgaagatcatctacttgagcatcattggactatgagatcaatactttcttacactcaggttaatcatatttgcctgacgaccttaactattgttttgttgaaagcaccattgttaaatactggatgctagggactgatgatgcacctctgtattgacagtgtaaactcacaatcttgtgaactgcctatatggacggataaactgttaatgaaacacattctg

SEQ ID NO: 5381 - DNA, 360 bp, Zea mays
  Clone ID: LIB3061-108-Q1-N6-B8
cgcaagcattaacgcctttgccggttggctgaataatgggtgaccaccggagatacggagcgtgagttgaccatgattcaatctgtaccgatggtgctgttggctgacaatgatgagttcgtgtgcgcacaactggcgtaattatggcccttcgaagccattgttgttatgcagcaggatccatggacgatagatgaactatttggaactctccccccgcttggtgaacaactaaaccgttatttcagtctgacggagacgaaagaataacttgcgcctcgtgttgcagatctgtaagaggatcttgattacacgaagtctaagcttatcgctatacgtggtttctcaacgaaattactg

SEQ ID NO: 5382 - DNA, 429 bp, Zea mays
  Clone ID: LIB3061-108-Q1-N6-C10
gttcggttgcattgaactctgcttcttatttgcaacaacaacaactaccattcagccagctatctgctgcctaccccacaatttcttccattcaaccaactgacagctttgaactctcctgcttatttacagcagcaacaactactaccattcagccagctagctggtgtgagccctgctaccttcttgacacaaccacaattgttgccgttctaccagcacgctgcgcctaacgctggcaccctcttacaactgcaacaattgctgccattcaaccaacttgctttgacaaacccaacagcattctaccaacaacccatcattggtggtgccctcttttagatttcttatgagttatagttcaataataaagttttttgtctgatgtttgtggctttccagaataagaagtacatttctaaaaacaaa

SEQ ID NO: 5383 - DNA, 421 bp, Zea mays
  Clone ID: LIB3061-108-Q1-N6-C11
ggccgccaaaactttagctaaattatgcttcttggaccttttgctagtgttgcttctgaaaccgggctcccacaatgctgcactggctcggtatgaaacactgcttggtttccgccatacctatgcaccatcgaatgtgttcaatgtgtggaaacccgcaatgagggcaacccactacatggatcctaacaggccatgtgcgaaaaggcatcatcaccatgtatgacccttgaatgctgcaacaatcacatgacctatttcagtaaatacctttagttcattttgttgcacataacatcaagacacaacaactactacaacttgtgctagcaaaccttgctgcatactctcagcaacatcatggttttacattcaaccaactggctgaattgaactctggtgcttttttgccactaccatt

SEQ ID NO: 5384 - DNA, 391 bp, Zea mays
  Clone ID: LIB3061-108-Q1-N6-C12
aatacagaaccaacattggcagaacaataattttgcttccttatgctcctgggactatctggaagggttggtacgcgaacattgtcccacattgctaacaacgtcttagcttgccttatttcgccaacctgtaacaagcggccgtctttaatgtttgaaaccccaattgaatcaacacctacaggatccaacatgaaatcgcaacaggcatcataccattatcacccttgattgtccaacaaccgtgatccctattacaacaattacctttgaatgcatttggtggcacaaaacataagaacacaacaactacaacaacttgtgctatcaaaccttgctgcatactctcagcaacatcagtttctttcaatcaaacaacttggttgaatgg

SEQ ID NO: 5385 - DNA, 501 bp, Zea mays
  Clone ID: LIB3061-108-Q1-N6-C2
gcgtgcgtgtactgggctgctattacacggtcgacctatgctttcgtttgagaccaagtagctacttattagtggaatgccgtaccatcattggcaaacatattttttgctgtcttatgcttattggtttttatgcagtgctgctactgacggttgttggacaatgcttacaagcttctatagaattacgttgtttcaatgtgcctattagcagcggtggtttgagggtgcgaaaactcagttcttcaaccctacaggaatccaacaagctgttgcagcgtgcatattgacctttatcaccacttgttcttgctacaatccgtggtgcctattacaggctgtacctttgatgcatttggtggaacacaacatgaaggctcaacagctacaaaagcttgtgctaggaaacctttatgtctactattagcaacagcagtttcttatattcaaccaactggcatgcattgaactctgctgattatttgcaacaacaactaccat

SEQ ID NO: 5386 - DNA, 613 bp, Zea mays
  unsure (1)..(613): unsure at all n locations; Clone ID: LIB3061-108-Q1-N6-C3
ccgcgtgcttgtgccggtctggtattacggggtcgccctttgcgttcggtttgtgtctgttgtcgtgcgcttcggtctgtgttgtgttgtgctccttggtgtcggtttgttggtcgtggtcgtggctctttggtttttgtggggttgtgggctagccgggcgccgtggtagctgctgcttgtgttctggggatgccttcgttggtggttgggttcggtccctttcctcccgcgggggagttgctttggtgctcttggtgctcgacaggttggcggtgtgtgctctttccccccctgttttcggtggggtttatttctttcnntttgggggttttttggggttgtttcttttccgggcgtgtttgtctgggttttgtttttattaagaaggggggggggtttcggggtttttggtttgggtttcctgggtggcgccgccttttttttttttttggggggttttnggttttttttttgttgggggttttttttttttttggtggtgggggattttttgtttttttttccttttttttttttttcggggttctcttttttttttttcttttgggtttttttttttagggtgttttcccttttctcttttctctttt

SEQ ID NO: 5387 - DNA, 525 bp, Zea mays
  Clone ID: LIB3061-108-Q1-N6-C4
gcgtgcgtgtaccgggctgctattacacggtcgacctagtcgttcgtttactagcaactatacatattgatgtacactagctacatcttggcgccaatggcatacaagattgtaggactttcttgtcctagttgctcttttagcaagcgttgctaccgggacttcattggaagtgctcacaacaatgggcgtgtcgtgctggtgacagaacgaagagtattttgaatgcgcaactatacaagcctacgggctacgaggagctctcgtggcaagcattgtgacgtggaatgagcattagaccgtgcaacaaccatgaaggcctattggaacaaccatacttaatgaatatatgtctgcaaagaatggcagcgcagcaacgtacaacaacaggtgcttccaacattgaatcaagtatgtgcagagaaccttgttgcttacctacagcaacaacaatttcttccattcaatcaactagctggggtgaaccctgctgcttacttgcaggcacaacagctactatcattg

SEQ ID NO: 5388 - DNA, 440 bp, Zea mays
  Clone ID: LIB3061-108-Q1-N6-C6
catcaccgcttcaaacgagggtacaagaatgcactagacgaggctattcacttgaactctattggtgaggagtcacattctggccatgggaaacaagtggacatggagcgctgaaagacaaccactggctcgatcatggagcataccttatggccaaactttacgaataaacttgctgatgctagtaacactgtgatcaagtattggcagtcaaagttttgactgattcacttaatggcctagaacaactcatgtcgacactgaaataagttaagatgacaaactctgcaccatattaaaggagggtccttccgctactatggagaatgcgtattgagacatacaggagaatgcaatcaagagccacccaaatatccatccagcctctgctaaccatcataccctctggtggttaacatatgctgtatggatattgctga

SEQ ID NO: 5389 - DNA, 371 bp, Zea mays
  Clone ID: LIB3061-108-Q1-N6-C7
ttggtttttgtgctagtgctgatacggagaccattgtggggcctgcctcacgaaggcggctgtaggtagaatactgctccggttgctataaccagcggggtgtttggtatgtgaaaacgcaattgttaaacggtgcaagatccaacaggcaatcgctggtggaatggtaccttcatcagccttgttactacagcatctgatccctaaactagctgtacctatgggtgcatttattggcgcagaacattagggcacaacaactacaacaacttgtgcttgcaaaccttgatgtctactctgagcaacagcagtttcttgcattcaaccaactagctgcgttgaactctgctacttatttgcaacaacaacaa

SEQ ID NO: 5390 - DNA, 199 bp, Zea mays
  Clone ID: LIB3061-108-Q1-N6-D10
ccttcgcaaaatgtgcgctttctaaatgggaaatgtgacgcgccatgtaccttaatataaagcgcaacgcgcgtggagagtacgctcacctataccgctacactttgcattttcttatcaccagttacattggctatatttcattgctttttacccactttccctggattagctcgagaaagtgtaaaacgctggcttg

SEQ ID NO: 5391 - DNA, 225 bp, Zea mays
  Clone ID: LIB3061-108-Q1-N6-D5
gcaacatctactagggttcaaccagctaggtggtgtgagccctgctctcttggggatgcaacacacaggtggtgtcgatgtaccagcacgctgcgcctaacactgggaccctcttacaagtgcaacaatcggtgccattcaaccaacttgctgtgtcaaacccaggagcgttgtgccaacaccccatcattggtggagccctcttttagatgttttatgagatat

SEQ ID NO: 5392 - DNA, 411 bp, Zea mays
  Clone ID: LIB3061-108-Q1-N6-D6
ggtcgaccttagcgttcgttgtcctactagcaccggcacccttcttcgacctcccctgctctgaatgtcaggcgcccattgtctgaaacaaggttcaagctcgaggacttaaggctgggggttttggtcctgaacggggactcacacctatgcctatcatgcctgaggactgtctatcctagcaaccgcctcagatcgcgaccttgatctcctaagagcagctttcctgatgatggctatgtgctagttctctgtgccgtcaggcacggcagaggcctccagaatgaagacacgtttgagtctgccaaaactatcgcgagcctcacggatggcaggatgttggacatgggagaggatgaccaagcgaatacgaacgcgctgtgtgttcgcacccgcgagagcgagcacctg

SEQ ID NO: 5393 - DNA, 348 bp, Zea mays
  Clone ID: LIB3061-108-Q1-N6-D7
gccggttgcctgaaaaatgggtgaccaccggagatacggagcgtgagtggaccatgattcaatcagtaccgatgatcctgttgactgacaataatgagttcgtgtgcgcacaactggcctaattatggcccttcgaagccattgtttttatgcagcaggatccatggacgatagatgaactatttggaactctccccccggttggtgaacaactaaaccgtgatttcagtctcacggagacgaaagaataacttgcgcctcgtcttgcagatctgtaagaggatcttgactacacgaagatctaagcttatcactatacgtggtttctcaacgaaattactgtgaaaa

SEQ ID NO: 5394 - DNA, 356 bp, Zea mays
  Clone ID: LIB3061-108-Q1-N6-D9
gcccgttagccgaaaaatgggtgaccaccggagatacggagcgtgagttgaccatgattcaatcagtaccgatggtcctgttgactgacaataatgagttcgtgtgggcacaattggcctaattatggccccacgaagccattaggtttatgcagcaggatccatggacgatagatgaattattgggaagtctcccgccggttggtgaacaactaaacagtttatttcagtcagacggagacgaaagaataacttgcgcctcgtgttgcagatctgtaagaggatcttgattacacgaagtctaagaattatgactatacgtggtttctcaacgaaattactgtgaaaacactatt

SEQ ID NO: 5395 - DNA, 472 bp, Zea mays
  Clone ID: LIB3061-108-Q1-N6-E11
cgcctgcgggtaccgggccgctattacacggccgacctagtcgttcgctcctcggcagtaaacacgtcattgcctgccgatgacttaatgggtctcactgccgtgtgggctatcgatacgacatccagcgcgcctaccgcctacgacatgcctgactaacgcatcgtaagactgtgcatgtagagaggaggagggccaccggagatggtgctaaggatacaacaaccggtaccagaaaaagtgatcaaacgctgtaccctgataccactcccactctagggctaggacttgctggctctgtatagaagccggacactgaaactccataacgtgctgccttgctgattagcgcgaaaacacacatacagttttcacacattgcggcatccacctcatgggtgctacgatgcagagataaaagggttgtgtaagtagcgtggagatgttaataggctaacgagcgttaataacc

SEQ ID NO: 5396 - DNA, 384 bp, Zea mays
  Clone ID: LIB3061-108-Q1-N6-E2
cgcctgcgtgtaccgggcccgctattacacggccgcccttttttccctgttcctttgacagcggtgtcttctgtctgtggaagccccaatccttcgaccctacagttccaattggcctttgccgctggcgtcttcccttgggggccctcgctctgccgggttgttgggcccttgctcaggggtttcctttggcgcgttggttggctcgcagcatttggggccgtcgtctgcgggtgcttgtgctaggcgcaccttggctggctagctcggagcaccactggggttcgtttcattcaagcaactaggtgcattgcactctgcttgttgtttggtactacttcttgttcctttcattcagctgtgtggtgcctgcccccagcaatt

SEQ ID NO: 5397 - DNA, 439 bp, Zea mays
  Clone ID: LIB3061-108-Q1-N6-E6
gtttcacatataaacacaactgtgtccaacattggcagccaaatctttagactaattatgcttcttggaccttttgctagtgctgaattctgagaccatgctccccgcaatgactggcaagctgctataactctccttgtttcgccgaacctcgtaccatcagtggcttcagtttgtgaaaacccaatagtgtaaccctacatgatccaacatgctatcacaactggcatatcacctttatcatcattaatgctccaacactcataacacctatcacattaaatacctttggtgcatttattggcacaaaacatgaaggcacaacaactacaacaacttgaactaacaaaacttgctgcctactgtcagcaacagcaggttctttcattcaaccaactagctgcattgaacactgcttcttatttgcaacaaccaccac

SEQ ID NO: 5398 - DNA, 577 bp, Zea mays
  Clone ID: LIB3061-108-Q1-N6-E7
cgcgtgctgaaccgggcaggcaatacacggccgacccacgcgttcgcaaaacacaccaagcgaagcgcactagcaacgacctaacaccaatggctaccaaaatttagccctccttgcgcttcttgcccttaaagacgagcgcaacaaagcgttcattattccacagcgctcacttgctcctagagccattagtaccacagaatcctgccaccagttactggcaatgggctatgaaatacagccgtgcaagcctacaagctacaactagcgcttgcggagagcgccttacaacaaccaattgcccaattgcaacaacaatacttggcacatctaaccctacaaaccattgcaacgcaacaacaacaacaacaacagttgctgccatcactgagccacctagccgtggtgaaccctgtcacctacttgcaacagcagctgcttgcatccaacccacttgctctggcgaacgtagctgcataccagcaacaacaacagctgcaacagattatgccagtgctcagtcaactagccatggtgaaccctgccgtctacctacaactactttcatttagcccgg

SEQ ID NO: 5399 - DNA, 473 bp, Zea mays
  Clone ID: LIB3061-108-Q1-N6-F1
gcgtgcgtgtactgggctggtattacagggtcgaccttagcgttcgttcttgcaaatagatagcctattgcgggccagcaatggcaggcaaaaattaagccttcttatgctccttggtctttctgcatgtgctggtggcggcgaccattgttgggtaggctggcaagctcctatgggtttgcttaatcaagcgggcctaatagcagcgatggttgcggtatgtgaaagcgcatgctttaagcgtacagggctggtcaagacggtaacaactggcattgtacctataagacaccttggtctctacaaacagatatctggccttaatgacaacaagtagctgctgctgcattatattgggaaaaaacatgagggcacaacagcttcgatagttgagatagcaaagcttggtggctactctcaggaagaatagtttctttcattgaaccaactaagttcattgaactctggttatt

SEQ ID NO: 5400 - DNA, 437 bp, Zea mays
  Clone ID: LIB3061-108-Q1-N6-F10
ccggttctctggctctctccaaatttgcccctgcggactgaggaactgctgccgaggcttgatattcttgccgaacaaggtgaaggcaatacgaccgaggagggatctactaacaacaaaactccgtccagaacatttcctgtcaaggaagccatcctagcagtgcctactatcagagtgctcgagacattcactaaaacccaggagctacattctctagaggagttcggcacaccaccttcaagccctgacaaaagcaagagcccagcacacagccttcttcaagcttctggattcagtggatcaaggcgccttattaccacccgattaacttggctacggccccaggaccaagcaatctcgtggaggacatgcaccaccatgacccgaatgccataccttcaaattacgtgtggaccacaccccttgataataaa

SEQ ID NO: 5401 - DNA, 367 bp, Zea mays
  Clone ID: LIB3061-108-Q1-N6-F11
cttcttatgctgctcggtctctcagcaagagctgatacggggaccattcaccgcaggctcgcaagctaatatagctggccttgttaaaccgtgcctgtcaccaggggtgtcttggggctgtgaaaacacaattcttgaaccctacacaatccaacaggcaaacacagatagcatcttacctttataaaacttgttacctccaacaaccatcaaccttattacatggaataccttgtgggcatttataagaaacaaaacattacaacgcaacaactacaacaactggaactaaaaaaccttgctgcctactctgagcaacagcagattgttccattcaaccaactaactgaaaagaactctgcttttt

SEQ ID NO: 5402 - DNA, 440 bp, Zea mays
  Clone ID: LIB3061-108-Q1-N6-F12
gtcgacctacgcgttcggttgcgagggcagaggcgccgctggcctgtgcatgggctggtgcggtagctggggcgctggtgctgctagacacatgcgcgacgatggcatgaaacgcaaaacgaaccaagctcttctactaaaccaaacaacagcagttgcagacaaaagacagaaagctggtggctggatgttttgtggcaatccaggtgagtgcgattgaacattactccgccagatcatacatgaaggcgatctacgagaatgtacaatacaccgggcgtgttcaggatgagggaggctaatgcaccgcgcactgtgatccgaactggtcacgggatgtacctactatttgagaccacgcagcaatttggtgcattcttgagacccctctttatcacaaggtgcgccgctaacacggataagttgaaacggcgttgctt

SEQ ID NO: 5403 - DNA, 507 bp, Zea mays
  Clone ID: LIB3061-108-Q1-N6-F2
aaaaccagaaagcggccgctgcagaaccgggacgaataagggccgaccagcgtcgtccgaaggtgctcccctactgcgatcgttaatacacacccaattagtgacgagaggctctacccagcgctgagtcattgctctccaacgagcgcgagggccgaggactatgaaaacccagcgcaagcgcgaacgccatgagtgggggatgactcgggaacatacagcctggccggaataaataatcgactcgtgatacacacgttgataaagcatgggaaaagggaacggagagatactctcagtatcctcaagctaaaccaccgaacacctggcaccaatcagtgcaaatcctcacaggtcatgggtcttaataacagcctacacaatgactgatgatatcatctcttacataaacagatttaaccattaattaaacatgcgatacaacgcaacaaatacaaacgtggacaaaactatgttgaataaaacggcaggcacatccagcatata

SEQ ID NO: 5404 - DNA, 422 bp, Zea mays
  Clone ID: LIB3061-108-Q1-N6-F3
gtcgaccttagcgttcgtgaatttggtattgttcttgggtaaatcaggggcaggcttgctgtgaggatctaagcttgtaaagcttggatgtgaaatgggtgtacaggtatttgaggacttctttaaacgctgcaaagaggttgcagtggaagaaaaagcgcgtggctgatgaatacttaaaagcataattgtcggatgagatgtttcagactaaggttatttggtcccttgctagattacaggcaacatgtggtgcatttgctttatttacgggaacattcaaattgatagaatctgatggagaggagaaatttgaatgaacaggcagaacatgttcagttgatgcagcttacaaggctgatgacaaaatattctagatttcaaccgttctgcgaaaatgcagcatgttatcagggacacta

SEQ ID NO: 5405 - DNA, 439 bp, Zea mays
  Clone ID: LIB3061-108-Q1-N6-F6
cgacccacgcgttcgcaactgtctacactgtaaccctgctgcttatttgcagcaacaactattaccattcagccagctagctactgcctacccccagcatttcttccattcaaccaactagcagcattgaactctcctgcttatttacagcagcagcaactactaccattcagccagctagctggtgtgagccctgctaccttcttgacacaaccacagttgttgccgttctaccagcacgttgcgcctaacgctggcaccctcttacaactgcaacaattgctgccattcaaccaacttgctttgacaaacccagcagtgttctaccaacaacccatcattggtggtgccctcttttagatttcttatgagttatagttcaataataaagttttttatctgatgtttgtggcttcccagaaataagaaagtacatttc

SEQ ID NO: 5406 - DNA, 346 bp, Zea mays
  Clone ID: LIB3061-108-Q1-N6-F8
gcctgcgtgtaccgggctgctattacacggtcgacctcagcgttcgtacctaatcatgtagctgtacgcgtaacccacctatcggtcttgatgctgccgaccggagtgctgcttgtgcgccgaccaggctgcttgcagactggagagccgccgtcatctaagacttgtcagaataacctggaccacgccgtctacctatgcaaattatacacatgtggagagaggctccaaagacttgctatctaaacacttacctagcgctggagtgcaggctcctcttcctactcctgtgaacgcgaagtgttgatcgagaacgacaaccgactcctgagtatcttaaactttc

SEQ ID NO: 5407 - DNA, 341 bp, Zea mays
  Clone ID: LIB3061-108-Q1-N6-F9
tgttattggtcatcccactcgtgcatgtgcctggctctgtcagctgccagcgccttttgtatgtagatgccgtgcccctgcgcggagctgcaaggcttgatcggggctggcgccggcctgcgacaatgatggcccccaggggtctgtgcccctacctggacgtctctgagtagtcgaattcaaccctcgtcgcggtggtgccctcctactcctggtgttggcagccgagacccttggctgcacagcgatctggtgacagtgctgcctaaaacctgatgtcgatcatggtcgtgctggccgtagcgccacacttaaacttgattattcaatttagatggtgc

SEQ ID NO: 5408 - DNA, 104 bp, Zea mays
  Clone ID: LIB3061-108-Q1-N6-G10
gcccgttggccgaataatgggtgacacgggaccggcgcgtgggtggcctgattatcgtccgctggtgctctgctgacacaatggttcgggggccaatgcctatt

SEQ ID NO: 5409 - DNA, 559 bp, Zea mays
  Clone ID: LIB3061-108-Q1-N6-G11
gcctgcgggtaccgggccggctattacagggcggcgctggcagcaccccgtacctgggccagtgcgtcgtgtttctgaggcatcagtgcagcccgtcggcgacgccctactgctcgcctcagtgccagtcgttgcggcagcagtgttgccagcagctcaggcaggtggagccgcagcaccggtaccaggcgatcttcggcttggacctccagtccatcctgcagcagccgactccatgcccctacgctgctgccggcggtgtcccccactgaagaaactatgtgctgtaatatagccgctggctagctagctagttgagtcatttagcggcgatgattgagtaataatgtgtcacgcatcaccatgggtggcagtgtcagcgtgagcaatgacctgaatgaacaattgaaatgaaaagaaaaaagtattgttccaaattaaaaaaaaaaaactgtgaccgggggggggggccccccccgggggggggggggaaaaaattttttcccaacctttgtatataagagaaaaaaagggggggtccccccgggcttcccttttt

SEQ ID NO: 5410 - DNA, 642 bp, Zea mays
  Clone ID: LIB3061-108-Q1-N6-G12
ctgcgtgaaccgggcagctattacacggtcgacccagtcgttcgtagaagcacaatagtgtaccaacaatggcagccaaaatattttgcttccttatgctccttggtctttctgcaagtgttgctaccgcaaccattttcccacaatgctcacaagctcctatagcttcccttcttcccccatacctctcaccagcggtgtcttcaatgtgtgaaaccccaattgttcaaccctacaggatccaacaggcaatcgcaacaggcatcttaccattatcacccttgttcctccaacaaccgtcagccctattacagcagttacctttggtccatttggtggcacaaaacatcagggcacaacaactacaacaacttgtgctagcaaaccttgctgcatactctcagcaacatcagtttcttccattcaaccaactggctgcattgaactctgctgcttatttgcaacaacaattaccattcagccagctagttgctgcctacccccagcaatttcttccattcaaccaactaacagcattgaactctgctggttatttacagcaagaacaactactaccattcagccagctagctgatgtgagccctgctgccttcttgacacaacaacagttgttgccgttct

SEQ ID NO: 5411 - DNA, 349 bp, Zea mays
  Clone ID: LIB3061-108-Q1-N6-G2
ccattagtgtgcaagacgaaatgtgacagcacattgatcgttaacgcctgcaacgagtcatatgccctaacacaacaaccatacttagggcatatgtgtttccaaagaatgaaaacacaacaactacaacaacattggctaccaacaatcaatcacttatgtgcagcgaacattgctgattatttccagcaacaacaattaattgcattcaatcaactagctggggtgaaccctgctgtctacttgcaggcacaacaactactaccataaaaccaacttgtcgggagcactgatgcctttttactgcaacaacagattgtgccatggcatctgcaagctgtggaaaaca

SEQ ID NO: 5412 - DNA, 440 bp, Zea mays
  unsure (1)..(440): unsure at all n locations; Clone ID: LIB3061-108-Q1-N6-G4
gcctgcgggtaccggtccgctattacagggccccacctacccatcttggtggtgccctcttttagatttcttagtagtttatttgttcattataatgttttttgtcttgtgttttgttggcttcccagaataagaaagacatttctagttttttttttttttttttttttttttttttttttttttttttttttttttttttttttttttttttttttttttttttttttttttttttttttttttttttttnnaaaaaggggggttttttttttttgggggggcccccctcctcccaaaaaaaatttttttttttttgattccttaaaaaaaaaaaaaaaaaaaaaacccccccccccttggggggccccctttttttttctccccccgccccccccccggcccttttttttatttttctgggtaattaaagggggggg

SEQ ID NO: 5413 - DNA, 278 bp, Zea mays
  Clone ID: LIB3061-108-Q1-N6-G5
cccacgcgtccgtttcttttgagcatggtggtctttgaagcatgacaatggctgctcttaggtttgggattgccaccatcttctgggacaaagagggagtggaggatgattgatctgtcggcagtctgatggggatgaattatacgaggtcttcaacgctgacacaaagggttaatgaaacaaactcgaatccagtgattataggcgctccgcacggaccatatgattcatctctcgttggacatgtagctacaagaatggtgtcagtgggcggttgc

SEQ ID NO: 5414 - DNA, 618 bp, Zea mays
  Clone ID: LIB3061-108-Q1-N6-G8
cgcgtgcgtgtaccgggctgctattacacggccgacctcagcgttcgtttgcggtgagcgtttttatacaaccatttgcccatttcttcatcgatccttggcacatctaaccatgcaaaccatcgcagcgcagcagccccatgcactgggccacctagccgtggtgaaccctatcgcctacttgcaacaacagctgcttgcatgcaacccacttgctttgggaaacgtagctgggtaccaacaacaacaacagttgcaacagatttgctaccagcgctcagtcaactagccatggtgaaccctatcgcctacctacaacagcaacaacttctttcatctagcccgctcgctatgggcaatgcacctacatacctgcaacaacagttgttgcaacaacagttggtgcaacaaattgtaccagctgtttactcagctagctgtcgccaaaccgtgctgcctacttgcaacaactactttcattcaaccaactgactgtgtcgaactctgctgcgtacctacaacagcgacaacagttacttaatccactagcggggggtaacccattggtcgctgccttactacagcagcaacccatcgttgggtggtgccatcttttag

SEQ ID NO: 5415 - DNA, 590 bp, Zea mays
  Clone ID: LIB3061-108-Q1-N6-H10
gcctgcgtgtaccgggcccctattacacggtcgacctcagcgttcgtaatcccaagtactgtcaacatacttatattttcgcaaaggtctagatggttcacttgttcaagaaattcatgctctctgtgaagaccttttgctgctatccggagcgaatctataactcatggttccctatgatcactatcaagcaccaaaaacctattcgttcctgccataccaattcttatagatgtctgcgccatacaccaacattagattcatattgataccggcacttctgctcctattagtgctgatactggtcattgattttatacacatgattatacctgtctcttcggatatagtgccagagatctaccaccttatctggcactaataaacatcaccttcaatgacaagctgagcaacaaaactcttaattagatccgtaatgagaagtatgcccacactgaccatagagcacgcacataagaactttatcaaggcagtaaaatcaggtctgctcataatattttcaaaaatgggtatctcactgctctcaagctattgtggaactcaaatctttaaaaatatcgtcttgttca

SEQ ID NO: 5416 - DNA, 532 bp, Zea mays
  Clone ID: LIB3061-108-Q1-N6-H11
cgcgtgcgtgtaccgggctgctattacacggcacgccctgcattttttttcacaccaagcgaagctacctacatcgtcttaactacttggatacacatgacttagtgcagtgcttgcgcttctgtgccctttttgtgagcgcaacaaatgcgggcattattacacattggttacttgctcctaatggcatggttcctcagatactactgcctgtttcttcaatggggttggtgcacctagatgggcaagcctacaggcttcagcacgcgcttggggttagcgtattgcagcaactaatgaaccaactgcaacaacaatcgcttgacacatctaaccatacggaccatcgtagcacaacagcaacaacaggttctaccacaactgatccaactagatggggtgaaccctgtcgactacttgcaacagcaggtgcttgcatgcaacccacttgctctgggaaacgtagctgcataccaacaacaacaacaattgcaacagtttctgccagcgctcattcaacttggcatggtga

SEQ ID NO: 5417 - DNA, 456 bp, Zea mays
  unsure (1)..(456): unsure at all n locations; Clone ID: LIB3061-108-Q1-N6-H2
cgcgtgcgtgtgctgggctggtattacacggtcgaccttagcgttcggtgcctttcttgcacagtttctatcactagtttgtttattgggcggagacacccttggggttgagggcaccatgctncgagcacgtgcttgatgtgagcgtattgcaggaacctattgcgctggggtgctgccttgcttggccgggtttatctacaagcactggttgcgtggcagcaattgctgttgctgtcagaagggggccacctatgggtggggcactctgccggcttctttcaatagcgttgcttgtgtggtacccattgctttggcgagcgtaggtgggttgcatggacagcgctgttgcaagaggttctggggtcggtcactcatcttggcgtggggaacggtgccgtctgcgtgcaccaacaacaactgcttttatttaggccgtttgctgtgggcaatggg

SEQ ID NO: 5418 - DNA, 494 bp, Zea mays
  Clone ID: LIB3061-108-Q1-N6-H4
cacgcctgcgtgtaccgggctcctattacacggtcgacctcagctttctttctagcaacaaactaagcacagtcttgttccatacatggcaagccaaaattcagcctacttacgctattagggatctatgactgagctgataccgaaaccatgtctcccgcaatgctgagcagctcgtataaacactgttctgcccgcgaacctatgcaccagcgaatggtatcagttgttgaaaacccaaatatggaaccatacatgatcccacaggccttctcaaacggcatcatacctttatgaccctagaatgtagcaacaattctcaccacctatacagctgaatacctttggtgcattgattggcacataacatcaagacacaacagctaccacaacttgtgctagcaaaacttgctggctactctcaacaacaacatgtttttacattcaaccaactagctgcatataactatgcttgttaattgcaactaccacca

SEQ ID NO: 5419 - DNA, 550 bp, Zea mays
  Clone ID: LIB3061-108-Q1-N6-H7
gacctagcgttcgtcactagcacatataagcacatagtgtaccaacatggcagccaaaatttttgcctccttatgctccttggtctttctgcaagtgctgctacggcgaccattttcccacaatgctcacaagctcctatagcttcccttcttcccccgtacctctcaccagcggtgtcttcggtatgtgaaaacccaattcttcaaccctataggatccaacaggcaatcgcagctggcatcttacctttatcacccttgttcctccaacaatcatcagccctattacagcagttacctttggtgcatttattggcacaaaacatcagggcacaacaactacaacaacttgtgctagcaaaccttgctgcctactctcagcaacaacagtttcttccattcaaccaactagctgcattgaactctgcttcttatttgcaacaacaacaactaccattcagccagctatctgctgcctacccccagcaatttcttccattcaaccaactgacagctttgaactctcctgcttatttacaggaggaacaac

SEQ ID NO: 5420 - DNA, 428 bp, Zea mays
  Clone ID: LIB3061-108-Q1-N6-H8
gtgttcctgtggcatcagtgcagcccgacggcgacgccctactgctcgcctcagtgccagtcgttgcggcagcagtgttgccagcagctcaggcaggtggagccgcagcaccggtaccaggcgatcttcggcttggtcctccagtccatcctgcagcagcagccgcaaagcggccaggtcgcggggctgttggcggcgcagatagcgcagcaactgacggcgatgtgcggcctgcagcagccgactccatgcccctacgctgctgccggcggtgtcccccactgaagaaactatgtgctgtagtatagccgctggctagctagctagttgagtcatttagcggcgatgattgagtaataatgtgtcacgcatcaccatgggtggcagtgtcagtgtgagcaatgacctgaatgaacaattgaaatgaa

SEQ ID NO: 5421 - DNA, 565 bp, Zea mays
  unsure (1)..(565): unsure at all n locations; Clone ID: LIB3061-109-Q1-K6-A3
ccggtcgacccagcgttcggaccaactagcaacatagnaaagcacaatagtgtaccaacaatggcagccaaaaattttgcttccttatgctccttggtctttctgcaagtgttgctaccganaccattttcccacaatgctcacaagctcctatagcttcccttcttcccccatacctctcaccagcggtgtcttcaatgtgtgaaaccccaattgttcaaccctacaggatccaacaggcaatcgcaacaggcatcttaccatnatcacccttgttcctccaacaaccgtcagccctattacagcagntacctttggtccattnggtggcacaaaacatcagggcacaacaactacaacaacttgtgctagcaaaccttgctgnatactctcagcaacatcagtttcttccattcaaccaactggctgcattgaactctgctgcttatttgcaacaacaattaccattcaaccatttagttgctgcctacccccagcatnttcttccnttcaaccaactagcagcnntggaactctgctggttatttacagcagcaacaactac

SEQ ID NO: 5422 - DNA, 580 bp, Zea mays
  unsure (1)..(580): unsure at all n locations; Clone ID: LIB3061-109-Q1-K6-A4
ctcccctgttcggttttaggagacctgcgccgctcctccggccacgcgagcacgtccgactggtcgcccacaggttccatcagtaccaggtggtgggtcgcgcgctgccgaccccgaccgatgagcaccccaagagtaccgcatgaagctctgggccactaacgaggttcgcgccaagtcgaagttctggtacttcactgagaaagctgaaaaaggtgcaagaagagcaatggccagatgctcgccatcaacgagatcttcgagcgcaaccctaccaccatcaagaactacaggatctggctgcggtaccagagcaggacggggtaccacaacatgtacaaggagtaccgggacacgaccctgaacggtgccgtggagcagatgtacaacgagatggactcgcgccaccgagtgaggtccccctgcatccagatcatcaagactgcgacggtccacttcaagctgtgcaagatggacaacacgaagcatttccacaactcggcgatcaagttcccgctcgngtaccgcaaggtgaggccgcccaccggnaactcaggaccaccttcaaggcgtccaggcc

SEQ ID NO: 5423 - DNA, 580 bp, Zea mays
  Clone ID: LIB3061-109-Q1-K6-A5
catcactgagccacctagccgtggtgaaccctgtcacctacttgcaacagcagctgcttgcatccaacccacttgctctggcgaacgtagctgcataccagcaacaacaacagctgcaacagtttatgccagtgctcagtcaactagccatggtgaaccctgccgtctacctacaactactttcatctagcccgctcgcggtgggcaatgcacctacgtacctacaacaacagttgctgcaacaaattgtaccagctctgactcagctagctgtggcaaaccctgctgcctacttacaacagttgcttccattcaaccaactggctgtgtcaaactctgctgcgtacctacaacagcgacaacagttacttaatccattggcagtggctaacccattggtcgctaccttcctgcagcagcaacaacaattgctgccatacaaccagttctctttgatgaaccctgccttgcagcaacccatcgttggaggtgccatcttttagattacatatgagatgtactcgacaatggtgccctcataccgacatgtgtttcctagaaataatcaatatattgattg

SEQ ID NO: 5424 - DNA, 551 bp, Zea mays
  unsure (1)..(551): unsure at all n locations; Clone ID: LIB3061-109-Q1-K6-A6
tcgacccagcgtnncgaaaaaaatttattccttggcccatagaaatgagnatttgtgaaagttcagcgtctcaacataaaccaagcttaaactactggtttagagctcgaggggaactctcagacgaccaggctctacacagatgtgttgtagcatatgcttcggatctactttttctggggtgagccttaaccctcatcgggagaagggtttgaagacatactgcctcagtcttgaccattccatctggttccacaaacctgtgaaggctgacgaatggatgctgtatgtgatcgagagcccatctgcgcacggtggtcgcggtttcgtcaccggacgcatgttcaacaggcaaggagagcttatcatgtcgctgacccaagaggcattgattcgaagggagaagccgcgaggtccaaatccgagtccgaagctttgaggcacctgacagcctctgcagtcgactgtagaggatcccaaccgagctttgagaggcgcaccatcctttcttctaatttgggttagatatttatgaaattcacaaacaaaaa

SEQ ID NO: 5425 - DNA, 602 bp, Zea mays
  unsure (1)..(602): unsure at all n locations; Clone ID: LIB3061-109-Q1-K6-A7
gnccaactagcaacatagnaaagcacaatagtgtaccaacaatggcagccaaaaattttgcctccttatgctccttggtctttctgcaagtgctgctacggcgaccattttcccgcaatgctcgcaagctcctatagcttcccttcttcccccgtacctctcaccagcggtgtcttcggtatgtgaaaacccaattcttcaaccctacaggatccaacaggcaatcacagctggcatcttacctttatcacccttgttcctccaacaatcatcagccctattacatcagttacctttggtgcatttattggcacaaaacatcagggcacaacaactacaacaacttgtgctagcaaaccttgctgcctactctcagcaacagcagtttcttccattcaaccaactagctgcattgaactctgcttcttatttgcaacaacaacaactaccattcagccagctacctgctgcctacccccagcaatttcttccattcaaccaactggcagcattgaactctcctgcttatttacagcagcaacaactactaccattcagccagctagctggtgtgagccctgctaccttcttgatacaaccac

SEQ ID NO: 5426 - DNA, 534 bp, Zea mays
  Clone ID: LIB3061-109-Q1-K6-B8
atttgttcttcataatttcatagcaaatgaacaaactctgggttcggatgcaacatctggggcctgcccgagaaaggaaagcgtgggaaggaaagaaatgaactgcgtgatctggtaggcaaaaaccttcatgttctaagccagattgagggtgttgaccttgatatgtacaaagaaactgttcttccaaggatattagagcaggtggttaattgtaaggatgaccttgcacagttctacctgatggactgcataatccaagtctttccagatgaataccatttacaaacattggaaacattattgaatgcaattccccagcttcagccaagtgttgatatcaaaacagtactctctcaacttatggacagattgtctaactatgctgcctcaagtcctgaagtgttaccagagttcttgcaagttgaagcttttgctaagttcactaatgctattggaaaggtgatagaagcccaacctgacatgccagctgttgtagccgtaactctatatgtatctgcttctgacttttac

SEQ ID NO: 5427 - DNA, 573 bp, Zea mays
  Clone ID: LIB3061-109-Q1-K6-B9
gcggtgcccagcgagccaggcacggaggaggcgcgtgctctgctccactccacctccccccccccccccccctgcgccactgacgccgctcgttcgcgcagttttggtcttctggccagcagggcagggggggaacccgcgggagcgaggcgcgcgagcgagcgagcggagggaggaggaggatgatgcacgccaagtcggagtcggacgtgacgagcctggcggcgtcgtcgccgccgcggtcgccgaagcggggcgttgccgcggccggcaccggcggcggcggcggcggctactacgtgcagagcccgtcgcgggagtcgcacgacggcggcggcggcgggtacaagtcgtcgtcgatgcaggccacgccggtgtacaacaacagccccagcgagtcgccgtcgcacccctcctacggccgccactcccgctcctcctccgtcagccgcttctccggcggcctccgcgggggcggcggcggcgggcgcaaggtgctcaacgacaagggctggcccgagtgcagcgtcatcgaggaggaagggccctacgagggccttggcgccggggaca

SEQ ID NO: 5428 - DNA, 583 bp, Zea mays
  Clone ID: LIB3061-109-Q1-K6-C1
gcaaaatacatagtgaatacactagcaacatcttagcaccaatgggagccaagattttttccctccttgccctccttgctctttcagcaagcgctgctacctctactattattccacaatgctcacaacaatacctctctccggtgacagccgcgggatttcaacacccaactatacaatcctacatgctacatgaggccatcgtagcaagcatcttacggtcattagcattaaccctccaacagccatatgccctattgcaacaaccatccttagtgcatctgtatctccaaagaatcgcgacacaacaactacaacaacagttgctaccaacaatcaatcaagtagttgcagcgaaccttgctgcttatctccagcaacaacaatttcttccattcaatcaactagctggggtgaaccctgctgtctacttgcaggcacaacaactactaccatttaaccaacttgtcgggagccctgatgccttcttactgcaacaacagcttctgccattccatctgcaagctgtggaaaacattgcttctttcttgcgacaacaacaattgttgccattttacccaca

SEQ ID NO: 5429 - DNA, 597 bp, Zea mays
  unsure (1)..(597): unsure at all n locations; Clone ID: LIB3061-109-Q1-K6-C6
ggaacaacagcacatanaagtggaatccagtagcaacaatagagcaacaatggcgaccaagatattttccctccttatgctccttgctctttctacatgtgttgctaacgcgacaattttccctcaatgctcacaagctcctatagcttcccttcttcccccataccttccatcaattatagcttcaatatgtgaaaacccagctcttcaaccatataggcttcaacaagcaatcgcagcaagcaacatacctttatcgcccttgttgtttcaacaatcgccagccctatctttggtgcagtcattggtacaaaccatcagggcacaacagctgcagcaactcgtgctacctctgatcaaccaagtagctctggcaaacctttctccctactctcagcaacaacaatttcttccattcaaccaactgtctacactgaaccctgctgcttatttgcagcaacaactattaccatttagccagctagctactgcctactctcagcaacaacaacttcttccatttaaccaattggccgcactgaaccccgctgcttatttgcagcagcaaatactactaccatttagccagctagctgc

SEQ ID NO: 5430 - DNA, 579 bp, Zea mays
  unsure (1)..(579): unsure at all n locations; Clone ID: LIB3061-109-Q1-K6-D1
cgcacctcagaagcggctggagcccaccaccaagcagctggagcaggagcagcacggggcgcatgcaggtggtgacgccgccaggaagcgcagcaggcccaagcgcgcgggtgccaggacgaagacgacgacggccgccgtcgccccggccaccaccgcgccggcgtcgcctgaacggtcggcggcctcgtcgtcggtgaccgagtcgacggagcaggagcagggaaacacggggacgagctcgcccgggttccccaaggaggagagcttcacctcgtcctcggaggccgccgaggagttccagttcgacgacacgttctggtcggagacgctgtccatgccgctggacagcttcgacgacgtccccacggagccctgcagctccggcgcgttcggcgacgtggccgnctcctcctcctcctcgtccgttggcgccgacgccgacttggactactggctcggagtgttcatgaagtccggcgacgctcaccaacaactgccgcnagtttagagcgcgcacgcgcgcccgagaattttcagttccctggctaattgattcatcggtctttctctttccct

SEQ ID NO: 5431 - DNA, 585 bp, Zea mays
  unsure (1)..(585): unsure at all n locations; Clone ID: LIB3061-109-Q1-K6-D12
attccctgcgattcctctcccctcgcctcctcgtctccccctaggggatcgtcggagaggaatcgcaaangggccgtctcatccgagttaaggaagccatggagcacaaggaggctgggtgccaggcccccgagggacccatcctctgcatcaataactgtggcttcttcggcagcgcggcgaccatgaacatgtgctccaagtgccacaaggagatgataacgaagcaggatcaggccaagctggctgcctcctctatcgacagcatcgtgaacggcagcgacgccgtcatggagccggttgttgctggcagcaacacggtagtagctgttgcccaagttgagttgcaaacaatgaacgtgcagcagcccgctgatgttgccggacccagcgagggggtggcggcgatctccaaagggggaaggtagggccgaaccggtgcagcgcctgcaggaagagggttggacttacgggattcaactgccggtgtgggaacttgtactgcgcactccaccgctactccgacaagcacgactgcaagttcgactaccggactgctgccagggacgccattgccaaggctaa

SEQ ID NO: 5432 - DNA, 485 bp, Zea mays
  unsure (1)..(485): unsure at all n locations; Clone ID: LIB3061-109-Q1-K6-D5
aactagcaacatagcaaagcacaatagtgntaccaacaatggacagccataaatatgttgtggcctccttatgnnctccttggtgcttgtcgttgcaagtgnnctgctacccggcgaccccattnnttcgcctgcaatggcnntcgcaagnnctcctnatnagnncttncctctttctttctctctccgtnaccctnnctcacncnnagcgggtgtgcgggggggtgagtgggannnaaacccaattncnnttcaacccttacaggnnatccaatcagnngcaatcaccagtctggcactcnnttaccttttatnncaccccttgtnntcctccaacaaatcactcagtcccgttattacactcatgttaccctcttngggtgcatgttacttggggcacaaaacnnatcagggcacacaccaactaccaacaacctttgtgcttagcagatacctctgctgctctactcttttcagcaacagca

SEQ ID NO: 5433 - DNA, 492 bp, Zea mays
  Clone ID: LIB3061-109-Q1-K6-D6
tgcacataaaagcacatagtggaccaacatggcagacaaaatattttgcctggttatgctccttggtatttctgcaagtgctgctacggcgaccattttcccgcaatgctcacaagctcctatagcttgccttctttccccttacctctcaccagcggtgtcttgggggtttgaaagggcgattcttcaaccctacaggatccaacaggcaatcgcaggtggcatcttacctttatcacccttgttcctccaacaatcatcagccctattacaggagatacctttggtgcatttattggcacaaaacatcagggcacaacatctaccacaactcgtgctagcaaaccttgctgcctactctcagcaacaggagtgtcttccattcaaccaattagctgcattgaactctgcttcttatttgcaacaacaacaactactattcagccagcttcctgttgcctaccccgaacaatctttttcatctaaccaact

SEQ ID NO: 5434 - DNA, 586 bp, Zea mays
  unsure (1)..(586): unsure at all n locations; Clone ID: LIB3061-109-Q1-K6-E12
gagggaaaagaanaggtggaggcatcgccggagtccggcgccgcggcgaccggaggtgcctctagtacggcggcggtgcggaaggggaagtcatgcaagggctgcctctactactcgtcagtgctcaagtcccgcggttacaacccaatctgcgttgggatcccccgctccatcccccaagttcctaactacgtggtggatgaacctaaggaggaggcgacggcgcaggggcatgacctcaggcggttcaggtacgggtgcgcgggttactccatgttcgtggacaacagggacggccagggtggtgagagcgagggcaagacgttgttgccatattgcaggggcctcgagttattggtggacagcagattggtcgagagaaagccatcggcaactgaacaagctccagcacatgttgcaaaggatgcagcagctaccatccgctctcaccaacaaggacaacagagacctcagaacttgtcgaggcaggaattcttggacaggtttaagaggagcgctggactggtcgcttcaggtgttgcgaagaatctaaacaaaacagccaattatatcaaagaaaatattc

SEQ ID NO: 5435 - DNA, 606 bp, Zea mays
  unsure (1)..(606): unsure at all n locations; Clone ID: LIB3061-109-Q1-K6-E2
ccggtccaacctcccggtcgacccagcgtccgccccagccactctccctactccctccctctctctctatctccctctctctagctccccatgcagcagcagccccccctcccttggagctagcgaccgagccctcccatgctcctccctcaccttggcagctcttccatggcgtcaccccctcctctacggtagcaaggtgtaggaccgagagatgctgatcgtgcaagtgatgaggtgccaaccacaagatgcagttggtggatgacctgaagaatggtggaattaaccagtggatgctcgccaagcgagtatcccccagcaaacactatctaagtgttaaattaaaggtacctccttgattggttgctggtgtgacttgaccttcatccttgccaccgggacagatggtcgagagggttactgcttccgcaggagaggaccaggagtagcgtggccaggcttcgccattattactcggttttctccccgaagatcctgaagaaagaaacaccttcagcagtgccgaagctatcacctataaagcttcggcataatgacatgnttcaagacaaaggagtgaaccgacttaaagatgaaatgacc

SEQ ID NO: 5436 - DNA, 615 bp, Zea mays
  unsure (1)..(615): unsure at all n locations; Clone ID: LIB3061-109-Q1-K6-E3
gtaccggtaccgacccttcccgggntttgcactcatgcatcacaaaaatccttctatcagtaccatcaatcatcattcatcttagtagtataggcaccaaatcaaatctgcaacatcaattatctaactccaaaaccatgaagctggtgcttgtggttcttgctttcattgctttagtatcaagtgtttnttgtacacagacaggcggctgcagctgtggtcaacaacaaagccatgagcagcaacatcatccacaacaacatcatccacaaaaacaacaacatcaaccaccaccacaacatcaccagcagcagcaacaccaacaacaacaagttcacatgcaaccacaaaaacatcagcaacaacaagaagttcatgttcaacaacaacaacaacaaccgtagcaccnccaccaacaacaacaacnacagcaccaacaacancatcaatgtgaaggccaacaacaacatcaccaacaatcacaaggccatgtgccacaacacgaacagagccatgagcaatttcaaggacagagccatgagcaacancatcaacancaattccagggtcatgacnagcagcaacaaccacaacagcctaagcaatatcagcagg

SEQ ID NO: 5437 - DNA, 594 bp, Zea mays
  unsure (1)..(594): unsure at all n locations; Clone ID: LIB3061-109-Q1-K6-E8
anaagacacatagtgtaccaacatggcagctaaaatttttgcctccttatgctccttggtctttctgcaagtgctgctacggcgaccattttcccacaatgctcacaagctcctatagcttcccttcttcccccgtacctctcaccaacggtgtcttcggtatgtgaaaacccaattcttcaaccctacaggatccaacaggcaatcgcagctggcatcttacctttatcacccttgttcctccaacaatcatcagccctattacagcagttacctttggtgcatttattggcacaaaacatcagggcacaacaactacaacaacttgtgctagcaaaccttgctgcctactctcagcaacagcagtttcttccattcaaccaactagctgcattgaactctgcttcttatttgcaacaacaacaactaccattcagccagctatctgctgcctacccccagcaatttcttccattcaaccaactgacagcattgaactctcctgcttatttacagcagcaacaactactaccattcagccagctagctggtgtgagccctgctaccttcttgacacaaccacagttgttgccg

SEQ ID NO: 5438 - DNA, 590 bp, Zea mays
  unsure (1)..(590): unsure at all n locations; Clone ID: LIB3061-109-Q1-K6-F6
ccaacctagcaacatagnaaagcacaatagtgtaccaacaatggcagccaaaaattttgcctccttatgctccttggtatttctgcaagtgctgctacggcgaccattttcccgcaatgctcacaagctcctatagcttcccttcttcccccgtacctctcaccagcggtgtcttcggtatgtgaaaacccaattcttcaaccctacaggatccaacaggcaatcgcagctggcatcttacctttatcacccttgttcctccaacaatcatcagccctattacagcagttacctttggtgcatttattggcacaaaacatcagggcacaacaactacaacaacttgtgctagcaaaccttgctgcctactctcagcaacagcagtttcttccattcaaccaactagctgcattgaactctgcttcttatttgcaacaacaacaactaccattcagccagctacctgttgcctacccccaacaatttcttccattcaaccaactggcagcattgaactctcctgcttatttacagcagcaacaactactaccattcagccagctagctggtgtgagccctgctaccttctt

SEQ ID NO: 5439 - DNA, 607 bp, Zea mays
  Clone ID: LIB3061-109-Q1-K6-F8
accaaatcaaatctgcaacatcaattatctaactccaaaaaccatgagctggtgcttgtggttcttgctttcattgctttagtatcaagtgtttcttgtacacagacaggcggctgcagctgtggtcaacaacaaagccatgagcagcaacatcatccacaacaacatcatccacaaaaacaacaacatcaaccaccaccacaacatcaccagcagcagcaacaccaacaacaacaagttcacatgcaaccacaaaaacatcagcaacaacaagaagttcatgttcaacaacaacaacaacaaccgcagcaccaacaacaacaacaacaacaacagcaccaacaacaacatcaatgtgaaggccaacaacaacatcaccaacaatcacaaggccatgtgcaacaacacgaacagagccatgagcaacaccaaggacagagccatgagcaacaacatcaacaacaattccagggtcatgacaagcagcaacaaccacaacagcctcagcaatatcagcagggccaggaaaaatcacaacagcaacaatgtcattgccaggagcagcaacagactacaaggtgcagctataactactatagcagtagct

SEQ ID NO: 5440 - DNA, 597 bp, Zea mays
  unsure (1)..(597): unsure at all n locations; Clone ID: LIB3061-109-Q1-K6-G2
ggtcgacccagcgtccgcgctctctaccgtccgagaccccagcaccagcgcggcggcgggnggcgggcggcgatccatggcttgtcggtaagaaacaagaggatctccagggaaagagggtggcaagaaaaaaccgtcgaccctttctctaagaaggattggtatgacatcaaggcaccgtcggtgttcagtgtgcgcaacatcgggaagactctcgtatccaggacacagggtaccaggattgcttctgagggtctgaagcacagagtctttgaggtttgcctagctgatcttcagggcgacgaggatcaagcttacaggaaaatcaggctccgtgctgaagatgtgcagggcaggaatgtgctcacaaacttttggggcatgaattttaccactgataaactcagatccctagtgaagaagtggcagacattaatcgaagcccatgttgatgtcaagacaaccgacaactacatgttgcgtntgttctgcatcggctttaccaagaggcgcccaaaccaagtcnagagaacctgctatgctcaggcatcccagatccgtcagatccgccgtaagaaggntgagattatgatcaac

SEQ ID NO: 5441 - DNA, 595 bp, Zea mays
  unsure (1)..(595): unsure at all n locations; Clone ID: LIB3061-109-Q1-K6-G7
tccggaccccggtcgacccagcgtccgcaacatanaaagtggatacagtagcaaaaatanagcaacaatggcggccaagatattttccatccttatgctccttgctctttctgcatgtgttgctaacgcgaccatttttcctcaatactcacaagctcctatagctgcccttcttcccccataccttccatcaatgaccgctttagtatgtgaaaacccagcccttcaaccctacaggatccagcaagcaatcgcaacaagcaacttacctttatcacacctgttctttcaacaatcgccagccctatctttggtgcagtcattggtacaaaccatcagggcagaacagttgcagcaactcgtgctaccagtgatcagccaagtagctctggcaaacctttccccctactctcagcaacaacaatttcttccattcaaccaactgtctatactgaaccctgctgcttatttgcagcaacaacaactactaccattcagccagctagctactgcctactctcagcagcaacaatttcttccatttaaccaattggccgcactgaacccctctgcttatttccagcagcaaatacta

SEQ ID NO: 5442 - DNA, 392 bp, Zea mays
  unsure (1)..(392): unsure at all n locations; Clone ID: LIB3061-109-Q1-K6-H11
ccgggctggnaacgtacggcgcattcgaagtgcgactacccttacctcgttcaggattgtcaccagcaccgccagagcttgggggccatggggcatcgagagcggcacacgtttctgcatcaccgcgcccatcggcagcagcatcgtgggattctatggacgcgcgacgaccaggctcgtcgctgcgatcggtgtctacctgcgccaactttagtctggtttcagcagcaggacgggtactacagatatgctagataaaggtcttatatatgtcatatgacctatcatggtcttatatgttcgatcgtcgtcgtgtctgtatgtacatacatggttgtcaaataaagctctttgcattttgataaagattgacaccacccaaaaacananna

SEQ ID NO: 5443 - DNA, 558 bp, Zea mays
  Clone ID: LIB3061-109-Q1-K6-H4
ttgtgtttttttgcagggtcacctgcacacctacaggttctgtgacaacgtgtggaccttcatcttgacagacgcaagcttcaagaatgaggaggccacggagcaggtgggcaaggtgaagattgtggcatgtgattccaaattgctcggacaataggcctgtgtaccctcgaggtcaaggaaggaagcttttaagtgcggcgaggcggggtctgtctgcgcgtcagctgtacacgcctaggctaccgcgaggcggggtctgtctgcgtcagctgtacacgcctaggctaccgcccgaacggcatttcatttgccttcttcgtactgtatgtgtatcttcttttttccccttgtatacaatctgctgcagctataccggccaagagtatggcatggtatggcggcaggcagccgcaaacttgtttttacctacttggtgtagcgcctgtgtaacagttttcgatcgctcttgcttgttgtgttgtcgatgctaataccgcagtgtaattgacgaaatgactaaaatgaagagtagtgtagtagatgtccaactatagc

SEQ ID NO: 5444 - DNA, 149 bp, Zea mays
  Clone ID: LIB3061-109-Q1-K6-H8
accggtcacaaaaccccggtcgacccagcgtccgcacaacccacattggtggtgccctcttttagatttcttatgagttatagttcaataataaagttttttatctgatgtttgtggcttcccagaaaaagaaagtcatttctagattc

SEQ ID NO: 5445 - DNA, 113 bp, Zea mays
  Clone ID: LIB3061-109-Q1-N6-A1
cacgcctgcgtgtaccgggccgctaattacacggtcgacctagtctagcataacaagtcgaactataacgtgataataaaatctacaaaaagtggcagccaccaaaggatggg

SEQ ID NO: 5446 - DNA, 407 bp, Zea mays
  Clone ID: LIB3061-109-Q1-N6-A10
gtcaattctagggatcgctgtttactgcgtgaaaactggataaaactctaatttcacacaacttaatagccttgaacatcaagcgtctatcctgaggtggcttaatagtgaacaaactcacattaattgcccttcccaaaatgtccgctttctaaatgggaaatgggacgcgccatgtagattaataaaaagcgcaacgcgcgtggagagtacgctcacgtataccgctacactgggcatcttcttatcaccagctagattggctatatttgattgctttttacccactgtccctggatgagccccacaaagtctaacacgctggcttgctttaggaggccaaaatactgctttacggtggctaaaccccaaaataacaagaactgtgatgggtcacgtagtgtgcc

SEQ ID NO: 5447 - DNA, 365 bp, Zea mays
  Clone ID: LIB3061-109-Q1-N6-A11
tccttatactccttgttgtactttcacgtgtagctaccgtaaccataggcacacactgctaacaagctcctatagcaacactttcttgctcgataatctaagcagcgggaatggtcaatgatgtgaaaccccaattgtacgaaccctacaggtatccatcaggcagcaggtacaaccataacaaccattattaccctaggaactccaacaacctcaaatcatattacaggatgaacctttggaccatttggtggtgcaaataatcagggcacaacaactccaacaacttgtgctatcaaaccatggtgcatactctcaacaacattagcttgctgcattgaaccaactggctgcaataaaactct

SEQ ID NO: 5448 - DNA, 431 bp, Zea mays
  Clone ID: LIB3061-109-Q1-N6-A3
cacgcctgcgtgtaccgggctcgctaatacacggtcgacctcagcgttcggtccaactagaaaaataacaagccaattttgggccaaccacggacatcaacaaaaaagctatcttatgcactcttgctcattatgcaagtgaagcaggggccacctatgatggcattgctgacaaacacctatagggtttcgtaatacaagcatacctgaatagcagcgaattgttgcaatgtgtgaaaaggcgcctatggttaacgcctacacgtgcccaacagaacagtaacaacaggcgttgtaccaatataacactagggcttacaacaaccagctggcttattacaacaagtacctgctgttcataataaggcacaaaacataagggtgacaacaacgtacgacaacaagaaatagctgaaggttggtgaatacta

SEQ ID NO: 5449 - DNA, 311 bp, Zea mays
  Clone ID: LIB3061-109-Q1-N6-A5
gacaactggataccctgccgcctacctacaactactctgatgtaagccgctcccaatgggcaatgcacctacaaaccttcaacaacctgtggtgcctcatattggtccacctctgacttagacacatgcagcaaaccctgctgactactcacaacaagaggctgccattcaaccaacctcatgtgtcaaactctgctgcgtacctacaacagcgacaacagttacttaatgcactgacagtggctaacccactggagcctaccttactacagcagcaacaacaatagctgccatacaaccatggctatttg

SEQ ID NO: 5450 - DNA, 323 bp, Zea mays
  Clone ID: LIB3061-109-Q1-N6-A6
cacgcctgcgtgtaccgggcccctaattacacggtcgacctagtcgttctttaaaaaaaaaaaacttggcccatagcttgagattttgtatactgttcagctgttttatcataaaccaagcttaatctactggtttatagctcgagggaacttgatcgaccacctctaacatatgttggtacctatgcttcggctctactttctgtggggtgagccttaaccctcatctggagaagggaccgaagacatactgccttagacttgaccattccatctggatccacatacctggcaatgctgtccaatggatgctgcatgcgatc

SEQ ID NO: 5451 - DNA, 522 bp, Zea mays
  unsure (1)..(522): unsure at all n locations; Clone ID: LIB3061-109-Q1-N6-B11
cacgcctgcatgtaccgggccgctaatacacggtcgccctcacgcgtttcggtttttcttccatttcaactcaactatgctgcatttgaactctgcttcttatttgcaacaacaacaactaccattcagccagctacctgctgcctacccccagcaatttcttccattcaaccaactggcagcattgaactctcctgcttatttacagcagcaacaactactaccattcagccagctagctggtgtgagccctgctaccttcttgatacaaccacagttgttgccgttctaccagcacgctgcgcctaacgctggcaccctcttacaactgcaacaattgctgccattcaaccaacttgctttgacaaacccagcagcgttctaccaacaacccatcattggtggtgccctcttttagatttcttatgagttatagttcaataataaagatttttgtctgatgtttgtggcttcccagaaataagaaagtacatttctttctnnaaaaaaanannnnnanaa

SEQ ID NO: 5452 - DNA, 378 bp, Zea mays
  Clone ID: LIB3061-109-Q1-N6-B2
cacattatctaccgtaaccgaggagaccaaactggcaagagaaacacaagcgtcacgttcaacatgctttacatggacaacgaattcaagctgctgggccactgcctgcattcattaaactgaacggatagaatacatggactggcacagcatgctgaatagcctcaaattaaatcaacccagaagacttacgcacctttctgttttctcagaactgtttcctcgcgtcccccacgataaactgtgctgcgagcaacttttgacacttctgaccgcactgtttgtcaaatcagaacactgctaacgcttgacgagttaactaagatagataggggaactgcgctagacaaaaaaaaaacaccagggccgaccctctaa

SEQ ID NO: 5453 - DNA, 488 bp, Zea mays
  Clone ID: LIB3061-109-Q1-N6-B6
tccacgttcacgtcgcttgaggaggtgagcagtcggatctggctaggtgctgcaagcgagaccgtgccatgttccacctccgcgcacttttctcgtgagcgccctctaccatcccgcctcctcctggtaacgcgctgctcaggttactagatctggtgagtcaccgttcagagttgggttcctgttcctggggcgcttcttcttacgttcgcaggcggagcgtccgtggaggaggcagcggggtattgatggaagtggtacccttgatggacagacactggttccccttggctggacagatttcaaactgaatatgaggttgtctctatcagcagcaagggaagaaaacttgacggttaatcctggaagatggcgagtgctctatcttggagacttggaagatggcgaatcttggaagaacaatcaaaagaatggaaacaccttgccacagtaatagcgccagaacagtcgtcgatggcttcaagctc

SEQ ID NO: 5454 - DNA, 654 bp, Zea mays
  Clone ID: LIB3061-109-Q1-N6-C1
cacgcctgcgtgtaccgggcccctaattacacggtcgacctcagcgttcgttcaaaatacatagttgaattcactttcttcatattagcaccattggtgagccgagagttgtcccttcttgccctagcacgctcttttaacaagcgctagatacctaatactattataaccacactgcctcaccaacaatggcctgatctgccggtagaacgagcgcgacggatatcttcaacagcccaactatctcaaatgctacatgctacatgaggccatagaaggaagcattttacggccattagcgttgaccctacgacagccatatgccctattgcaacaaccattcttagtgcatccgactctccaaagaatcgggacacaacagctgcgacaacagtagctaccaacaatcaatcaagttggtgcagcgaaccttgctgcttatctccagcaacaacaatttcttgcattcaatcaactagctgggagtgaaccctgctgtctacttgcaggcacaacaactactaccatttaaccaacttgtcgggagccctgatgccttcttactgcaacaacagcttctggcattccatctgcaagctgtggaaaacattgcttctttcttgcgacaacaacaattgttgccattttacccac

SEQ ID NO: 5455 - DNA, 641 bp, Zea mays
  unsure (1)..(641): unsure at all n locations; Clone ID: LIB3061-109-Q1-N6-C12
cacgcctgcagaaccgggccgctaatacacggtcgacctcagcgttcggatcaaaaaacagaacttgcttatgagaggtcgttatcgagaaaaccagacaaaagacatcgtgctcgttgactgcctggttatatatattgacagagactgttgaatgcagatgccctgccactgctcatgactgaagggcttggacggatctgacgccagactccacgacgatgatgggcgccagctggctatacccctcacgcgactgacctgaagcacccatagtgcagatggtttgcggcatcaccatactactgccgggtgagaccatgacgatcgcaatataccatgctgttcgtgaacaatacttgcatcagacaatcaggatgatggacgagcagtacgctcaacatgaattataaattataattcatgttgaacggaccgctcgcgcaagaagctgatttggcgatccaactattattcaccagaaggatagccattggcactccactgtctcaaccccatggacatggatgatcgcccacaacatgctggacttgggttgactctagcatnaccagtacgagttgagcaggtaccggaccatacatctgtggcaggtccgctccaattccgtactagtactg

SEQ ID NO: 5456 - DNA, 506 bp, Zea mays
  Clone ID: LIB3061-109-Q1-N6-C2
cgcctgcgtgaaccgggctcctattacacggccgaccctagcgttcgttttacacaccatgggaacgcctaaccacgactagaccattggttggaaacaatgagcccttcttggccccattgccctttcatgagagcgcaaatgaaaacattgtcccacaaagctgagttgctgctagggccgtgttatcaaagatattgcacgaatggcttcaatgggctttgctcattcaggcaaggcaagcatacatggtacaactagtgcttgcggagagagcctcagaacaacctgttgcccaatcgcaacaacaattctcgcaacatgtaaccttacaaaccattgcaagcggaacaacaagcaactagcatcatgtcactgccatctctgatccagctagcccaggtgaaccctgcaacctacttggaacagccgttggttgcttgcaacccactagctctgtcgaacaaagctgcataccagcaacaacaacaggtgcaacagtttat

SEQ ID NO: 5457 - DNA, 335 bp, Zea mays
  Clone ID: LIB3061-109-Q1-N6-C3
gcccgttacccgaataatgggtgaccaccggagatccggagcgtgagttgaccatgatttaatcattaccgctggtgctgttggctgaccataatgagctcgtgtgcgcacaactgccgcaattatgggccttcgaagccattggttttatgcggcaggatccatggacgatagatgaactattgggcactctcccctcggttggtgaacaactaaaccgttttttcagtctcgcggggacgcaagaataacttgcgcttcttgtggcacatctctgagaggatcttgattacacaacgtctaaaattgtggctgtacgtggtttctcaatgaaa

SEQ ID NO: 5458 - DNA, 602 bp, Zea mays
  Clone ID: LIB3061-109-Q1-N6-C6
aacatataaaagtgggaatacagtaactacaattgagcggcagtggccaccaatcaatcaaacctctcttatgctccttgctcctctctacatgcagttgcataacgcgacaccaccacctaaatgctcacagctgctgatagcttgcctttttccaacatacctggacataagaggatacacttgaatatgtgtaaaaccaaggctcttcaaccatataggcttcagacagcaatcggacaagcaacatacctttatcgaccttgttgcttcaacaatcgccagccctatctttggtgcagacattgggacaaaccatcagggcacaacagctgcagcaactcgtgctacctctgatcaaccaagtagctctggcaaacctttctccctactctcagcaacaacaatttcttccattcaaccaactgtctacacgtgaaccctgctgcttatttgcagcaacaactattaccatttagccagctagctactgactactctcagcaacaacaacttcttccatttaaccaattggccgcactgaaccccgctgcttatttgcagcagcaaatactactaccatttagccagctagctgcagc

SEQ ID NO: 5459 - DNA, 638 bp, Zea mays
  Clone ID: LIB3061-109-Q1-N6-C8
cacgcctgcgtgtaccgggccgctatagcacggtcgacctacgcgttcgtacatagaaagcacattatgatccaacggaggccgccaaatattatgacaacttatgcttcgagctcttactgaaaggactgctacagcaacgcatccacccaggatgggtcgaaggtacaacactgttggttttgccaaagcacgtttgaccaatggcggctattgtatgagaaaacacaaggctccaaccctacgggaaccaacctggaataacagctgcaattgttacctgttatcacacattggtatcctggcaacaatacataagtacctattacaacaggtacctttggtgcatgtattgaacacaacatcagggcacaacaactacaacaactagtgctagaaaaccttgctgcctactctcagcaacagcaggaactgccattgaaccaactaggaacattgaactctgcttattatactgcaacaacaacaactaccataacagcagctacctgctgactacccccagcaatttcttacattcaaccaactagcaggatgcgaactctcctgctgatctacagcagcaacaactactaccatgtcatcagctagctgatgtgagccctgctaccttcttg

SEQ ID NO: 5460 - DNA, 677 bp, Zea mays
  Clone ID: LIB3061-109-Q1-N6-C9
cacgcctgcatgtaccgggcccgctaatacagcggtcgacctcacgcgttcggtcgaagcacatttatcaacaactctaacaacaatggctaccaagatattatccctccttgcgcttcttgcgctttttgcgagcgcaacaaatgcgttcattattccacaatgctcacttgctccaagttccattattacacagttcctcccaccagttacttcaatgggcttggaacacccagctgtgcaagcctataggctacaacaagcaattgcggcgagcgtcttacaacaaccaatttcccagttgcaacaacaatccttggcacatctaacaatacaaaccatcgcaacgcaacagcaacaacaattcctaccagcactgagccacctagccatggtgaaccctgccgcctacttgcaacagcagttgcttgcatcaaacccacttgctctggcaaacgtagttgcaaaccagccacaacaacagctgcaacagtttctgccagcgctcagtcaactagccatggtgaaccctgccgcctacctacaacagcaacaactgctttcatctagcccgctcgctgtggccaatgcacctacatacctgcaacaacaattgttgcaacagattgtaccagctctgactcagctagttgtggcaaaccctgctgcctacttgc

SEQ ID NO: 5461 - DNA, 638 bp, Zea mays
  Clone ID: LIB3061-109-Q1-N6-D11
gcacgcctgcatgtaccgggctcctcttacacggtcgacctagtcgttcgattgataccaactagcacatattaaacacaataatgttccaacagtggctatcccaaatatttagcctacttatgctccctgccctttctggcagtgctgctacaacacaccatttttccgcaatgctcgcaagctcctatagcttaccttcttcccccgtacctgtcaccaacggtgtgttccatctgtcaaaaccaacttcttcaaccgtacatgatccaacaaggaatcacagctgacatcttaccttttcacactgtgttcctccaacagttattagacatattacaacaattaccttctgtgcatttattgacacaaaacattaggtcacaacaactacaacaacttgtgctagcaaaccttgctgcctactctcaacaacaacagtttcttacattcaaccaactaggttcattgaactctgcttcttatgtgcaacaacaacaactaccattcagccagctacctgctgcctacccccaccaatgtcttccattcaaccaactagcaacattgaactctcctgcttatttacagcagcaacaactactaccattcatacagctagcatgcgtgagccctgc

SEQ ID NO: 5462 - DNA, 556 bp, Zea mays
  unsure (1)..(556): unsure at all n locations; Clone ID: LIB3061-109-Q1-N6-D12
aattccctgcgattcctctcccctcgcctcctcgtctccccctaggggatcgtcggagaggaatcgcaaagagggccgtctcatccgagttaagggaagccatggtagcacaaggaggctgggtgccaggcccccgagggacccatcctctgcatcaataactgtggcttcttcggcagcgcggcgaccatgaacatgtgctccaagtgccacaaggagatgataacgaagcaggatcaggccaagctggctgcctcctctatcgacagcatcgtgaacggcagcgacgccgtcatggagccggttgttgctggcagcaacacggtagtagctgttgcccaagttgagttgcaaacaatgaacgtgcagcagcccgctgatgttgccggacccagcgagggggtggcggcgatctccaaagggggaaggtagggccgaaccggtgcagcgcctgcaggaagagggttggacttacgggattcaactgccggtgtgggaacttgtactgcgcactccaccgntactacgacaagcacgactgcaagttcgactaccg

SEQ ID NO: 5463 - DNA, 660 bp, Zea mays
  Clone ID: LIB3061-109-Q1-N6-D2
cacgcctgcgtgtaccgggcccctattacacggtcgacctacgcgttcgattgagaccaactggcctcatttattgccgatacggcaccaacaatggccagacaacttatttagctgacttatgctcattggcctttttgaaaagggcgctaccaaagctcggttgccacaatgctaacagtctcctatgagctagcctgcttgccgcatgcctctcatcagtcgcagtcttcaaagggtgacaacccaagggatcaaccctacaggaaacaacaagcactggtgacaggcatataacgattatcaccctagatcctctaacaacctgaatggctattacagcagctgcctttaatacacatggtggcacaaagactattaggcgcaacaacgtgcaaaaactggtgctggcaagacacttgctgcatactctgaatggcatcagtttcttcacattaaaccaactggctacattgaactctggtgtttattggcaacaccaattaccattcaagcatgtagctggtgtctacccacacaatttgttccattcaaccaactagcagcattggactctgctggtcatttacagaatgatcaactactaccattcagccgggtaggtgacatgagccctgctgccttattgacacaacaaca

SEQ ID NO: 5464 - DNA, 575 bp, Zea mays
  Clone ID: LIB3061-109-Q1-N6-D4
ggaactcccgggctcgaggagatcgggacgatgatgggagggcgcgctctgctgctgctcctggtctcggcgctgctcgttcagatccgcgcctctgacccgctgctgtacgagccgtttgatgaggacttcgagggtagatggatcgtctccaagaagatgaataccaaggtgtatgcgaagcatgccaagagtgatgggcatgaggactatggcctccttgttagtgacaaggcaaggaaatacgccataatcaaggagcttgatgagccagttaccttaaatgatgggacagtggccctgcagtttgaagtgagacttcaaaatggccttgaatgtggaggtgcctacattaagtacatccgctcctcagatgctggatgggatgccaaggagtttgataatgagactccatacactattatgtttggtccagataaatgtgggtcaaccaacaaggttcatttcatccttaagcacaagaatcctaagactggaaagtatgttgagcatcacctcaaattcccaccttctgtcccatacgacaagctctctcatgtctacacagctatctt

SEQ ID NO: 5465 - DNA, 647 bp, Zea mays
  Clone ID: LIB3061-109-Q1-N6-D5
tcacgcctgcagtgtagccgggcccgctataccagcggtcgacctcacgcgttcgtattgtatactcaactatgtcaactattattataagcacatatagcagtaacacaacacatgtgcagctcagaaatattttcgcctccttaatgctccttgggctttctgcaagtgctgctacggcgaccatatttcccgcaatgctcgcaagctcctatagcttaccttcttcccccgtacctctcaccagcggtgtcttcggtatgtgaaaacccaattcttcaaccctacaggatccaacaggcaatcacaggtggcatcttacctttatcacccttgttcctacaacaatcatcagccctattacatcagatacctttggtgcatttattggcacaaaacatcagggcacaacaactacaacaacttgtgctagcaaaccttgctgcctactctcagcaacagcagtttcttccattcaaccaactagctgcattgaactctgcttcttatttgcaacaacaacaactaccattcagccagctacctgctgcctacccccagcaatttcttccattcaaccaactggcagcattgaactctgctgcttatttacagcagcaacaactactaccattcacacagctagc

SEQ ID NO: 5466 - DNA, 532 bp, Zea mays
  Clone ID: LIB3061-109-Q1-N6-D7
tgggtgaccaccggacatacggagcgtgagttgaccatgattcaatcagtaccgatggtcctgttgactgaccataatgagctcgtgagcgcacaactgccccaatcatggccccacgaactcattagggttatgcagcaggatcacatgagatagctgaactgtggggaactctcccgtcggttcgtgaacaactaaaccgtgatgtcagtcacacgcagacgcaagaataactggcgcttcgggtggcacatctgtgagaggatcatgactacacgacgtctaaacttgtgactgtacgtggtttctacaacgaaatgactgtgaaaacacagttgcacacaacataaaacccctaggaatacattgtaaagtctgcagttgctaatgagtgaaatagtcaattcaatgggccttgctaactgtcgcgcatccagaatggaaaacggcgcctgctgctgcattaattaattacgcatctctccgggataggacacctgatatatgtgcactctctatacattctgctctg

SEQ ID NO: 5467 - DNA, 567 bp, Zea mays
  Clone ID: LIB3061-109-Q1-N6-D9
cacgcctgcatgtaccgggcccgctattacagggtcgacctcagcgttcgtacatctgttatgtttgggtggctctacgcatatcttctaaaatgctagtagaggatcaacggcaccaggcaacgtcaaggttgacaaagctatctgggaccacttgtgtaattgccaactgtagactgcattattatagctatatgttgctccagaataaatgcgcatcatagtgcggcggtcatggcattgggatctgatcacacctttgcaggttgaagacttaccgtctcctccagggaaagttactgacctttcttgcgacaagcaccactgacagcccccgaaatgccccatgacggggacactaaggtgaaaccttccagttttctctacgaaaatctaccagtgccggattgatttagtcagcaccattggacacacaggttagcctcatcccctgaacccatcaaagaatcatggtgccaacgactcgatggttctacttcaagaggctgatattctccacgactgttgttagcatccctggaaaaaacatctacattagcagtgaat

SEQ ID NO: 5468 - DNA, 458 bp, Zea mays
  unsure (1)..(458): unsure at all n locations; Clone ID: LIB3061-109-Q1-N6-E10
tatgaccatctgcacacgagtcggttggtaattggacatgctagtgagaacgccacaatgtgtagcaagcgcctcacagggattcacagacatagcaatgcacaacaggacatgcttaccattatgacccttgaagatagcaacaaccgttaacattatttcagtagttaccttgggtccattgggggggacaaaacataacggcacaacaactacaacatcttgtgctagcaaaccttgctgcatactctcaggcaacatcatattcttccatttaaccaactgggtgcattgaactctgctgcttatttgcaacaacaattaccattcagacaacttgttgctgcctacactcagcaatatgtttcattcaaccaactagcagcnattgaactctgctgcttatttacagcagcaacaactactaccattcatgcagctatctgatgtgagccctg

SEQ ID NO: 5469 - DNA, 463 bp, Zea mays
  Clone ID: LIB3061-109-Q1-N6-E2
cacgcctgcgtgataccgggctcctattacacggccgacccactctttcgtcctatgcctatatccctaattcttacatcaatttttataacattctattctaacacatttatcccttcagcttggcataagcagtactacagagcggcgcgcaagacgattactaaccttagcttgaacagctctagcaagacggttcatctattctttagcgcagggcacaacctgagcgaaataacctttatgcccttgacaagaggtgacaaccacaacatactatcatgggatgatcggacatattgatgttaaaaaccagtgactgcttgccattgaaacatgccataatgcacactatttaataggtgatatgatagggacctgcttgatgggttgctgtcgtgacgagcccttgatacaaaaccgcgtaacaataggggaaaccgggccactgttctcctgggac

SEQ ID NO: 5470 - DNA, 236 bp, Zea mays
  unsure (1)..(236): unsure at all n locations; Clone ID: LIB3061-109-Q1-N6-E5
ccccccccccccccccaaaaaaaaaccccgggccccccccaaaaaaaaaaaaaaggcccccccccccccccccttttttttttttttttttaaaaaaaaaaaaaaaaaaaaacccccccaaaatttttttgccccgggggacccccccaaaaccccccaaaaaaaaaaaaaaaaaaacccccccccccttaaataaacaaccaaaaacccccccccccncccccaaaancccccac

SEQ ID NO: 5471 - DNA, 555 bp, Zea mays
  Clone ID: LIB3061-109-Q1-N6-E6
actcagcaacaacctagcaacattggctaccaagatatgtcatgcctgcttgcgactctacttgcgctttctgcgagacgcgacaaatgcgaacatgatcccacaacgctgacttgctgctcatgtccatgtactaggcatcagattactgacacaccggtacgtttggtgagccttcgaacacgcatgtaggacaggccctataccactgcaacaagcgatggcagtgagacgaagtacaacaaccaattgcccaatggccacaacaatccttggcacatctaacagtacaaaccatagcaacgcaacagcagcaacagctcctaccagcactgagccacctagccatggtgaaccctgtcgcctacttgcaacagcagctgcttgcatccaacccacttgctctagcaaacgtagttgcaaaccagcaacaacaacaactgcaacagtttctgccagcgcttaggcaactagccatggtgaaccctgccgcctacctacaacagcaacaactgctttcatctagcccgctcgctgtggccaatgcacctacat

SEQ ID NO: 5472 - DNA, 606 bp, Zea mays
  Clone ID: LIB3061-109-Q1-N6-E7
cacgcctgcatgtaccgggctgctattacagggtcgaccttagcgttcggtaacatataaagcacatagtgtaccaacaatggcagccaaaatattttgctaacttatgctccttggtctttctgcaagtgttgctaccgcaaccattttcccacaatgctcacaagctcctatagcttcccttcttcccccatacctctcaccagcggtgtcttcaatgtgtgtaaaccccaattgatcaaccctacaggatccaacaggcaatcgcaacaggcatattaccattatcacccttgttcctccaacaaccgacagccctattacagcagttacctttggtccatttggtggcacaaaacatcagggcacaacaactacaacaacttgtgctagcaaaccttgctgcatactctcagcaacatcagtttcttccattcaaccaactggctgcattgaactctgctgcttatttgcaacaacaattaccattcagccagctagttgctgcctacccccagcaatttcttccattcaaccaactagcagcattgaactctgctgcttatttacagcagcaacaactactaccattcaaccagctagctg

SEQ ID NO: 5473 - DNA, 620 bp, Zea mays
  Clone ID: LIB3061-109-Q1-N6-E8
gcctgcgtgaaccgggccggctattacacggtcgacctactcgttcgataaagcacaatagtgctccaccaatggctaggtaagaacatttagtctacctagctccttgttcttgatgtatgagctgttacagagaccattgaggccacacagctcacatgctcctatggcttaccttttttccccgtgcctatcacacaacggtgtattgggtatgtgagaaacccaattcttcaaccctacaggatccaacaggcaatcgcagctggcatgttacctttgatcacccttgttcctacaacaatcatcagccctattacagcaggtacctttggtgcatttattggcacaaaacatcagggcacaacaactacaacaacttgtgctagcaaaccttgctgcctactctcagcaacagcagtttcttccattcaaccaactagctgcattgaactctgcttcttatttgcaacaacaacaactaccattcagccagctatctgctgcctacccccagcaatttcttccattcaaccaactgacagcattgaactctcctgcttatttacagcagcaacaactactaccattcagccagctagctgggtgtgagccctgct

SEQ ID NO: 5474 - DNA, 524 bp, Zea mays
  Clone ID: LIB3061-109-Q1-N6-E9
attactgatagtacagctacagcgacgctctcaccacatgatggcgtctgaagctacaatacttttggttttgccaaagcacgtttgaccaatggcgtctattgtatgagaaaacacaaggcttcaaccctacaggaaccaacatgcaataacagctgcaattgtacctgtatcaccattgtatcctgcaacaatacataagtacctattacaacaggtacctttggtgcatgtattggaacaaaacatcagggcacagcaactacaacaacttgtgctagcaaaccttgctgcctactctcagcaacagcagtttcttccattcaaccaactaggttcattgaactctgcttcttatttgcaacaacaacaactaccattcatgcagctacctgctgcctacccccagcaatttcttccattcaaccaactagcagcattgaactctcctgcttatttacagcagcaacaactactaccattcagtcagctagctggtgtgagccctgctaccttcttgacac

SEQ ID NO: 5475 - DNA, 589 bp, Zea mays
  Clone ID: LIB3061-109-Q1-N6-F12
cacgcctgcgtgtaccgggctgctattacacggtcgacctacgcgttcggtgataatggttgcggtagcaaaacttgctgaatgaccaatggtgaaaccctaacagatccaaaagcattcattgtaggcatcttacctatatcacccttgaaactgcaccaccgaaagacgtattacaggaagtacctttggggcatttgcaaacacagaacattaaagggcaacaactacaacaacttgagctaggaaaccttgctggctactctgagcaacagcaactgcttccattgaaccaactggatgaattgaactgtgctacttattttcaacaacaactaccattcagtcagctagctggtgactaaccccaacaatttattgcattcaaccaactgacaggaataaactctggtgttatgtacaacatcaacagctaccaccattcagccagctagctgatgtgagccctgtaatcttcttgacacaacaacaggagtaaacgttctacctgcacagtgcgcctaacgctggcaccctcatacaactgcaacaattgctgccattaaaccaacttgctttgacaaaccca

SEQ ID NO: 5476 - DNA, 629 bp, Zea mays
  Clone ID: LIB3061-109-Q1-N6-F5
cacgcctgcgtgaaccgggctgctaatacacggtcgacctacgctttcgtcactaacaaataaaagcgcactttgttctcaacaggggaaggctcaaaaattatacactacatatgcttcttgaactatatcgtaatagcagatacaaagaagataccaccacaggtcgtgacaggctgctaaatgttgcttggtttgccaaaacctgtcaccaacaaggtattaattgtgggaaaacccaaatgttgaaccctacaggatccaacaggtaatagaacgtggactactacctttatgaccctaggtactacaacattacatccagccttattacatgaatgacctttggtgcattgattggcacaaaacatcaaggcacaacatctacaacaacttgagctaacaaaccttgctggctactctcaacaacagcagctgattgcattcaaccaactaggtgcattgaactctgattcttatttgctacaacaacaactaccattaaaccagctatctgctggctacccccagcgattgcttgcatacaaccaactgacagcattgaactctgctgcttattcacagcagcacaactactaccattcaaacagctatctggagtgagccct

SEQ ID NO: 5477 - DNA, 605 bp, Zea mays
  Clone ID: LIB3061-109-Q1-N6-F6
cacgcctgcgtgtaccgggcacctattacacggtcgacctacgctttcgtcaactagcaactataaaaagccctatattgttccagcaatggcacacacatatatacagactccttatgctcgatactattacttgtaagagacatgttacagagaccacaccccgcatgctcacaggctgatctctgttacgttcttcaaacgaacctgtcaccatggcagtatttggtgtatgaaaaccaagttgtcaaaccctacagcatccaacatgcaaaacgagatcacctgttaccttgataacactggatcctgcatacacacatcatacctattacaatagttacctttggtgcatctattgatcacaaaacatcatggcacaccaactacaacaacttgtgctaacaaaccttgctgcctactctcagcaacagcagattgttccattcaaccaactaactgcatagaactctgcttcttatttgcaacaacaacaactaccaatcagccagctacctgatgcctacccacgacagctacctccattcaaccaactggcagcacccaactctcctgcttcattacagcagcaacaactactacca

SEQ ID NO: 5478 - DNA, 601 bp, Zea mays
  Clone ID: LIB3061-109-Q1-N6-F7
cgcctgcggtaccgggctgctattacagggtcgacctcagcgttcgtattgggcttttaacacccatctgtgcatgcctgtaggctacaacaagcaattgcggggagcgttttacaacaaccaatccgccagtgtgggcacacattccttggcacatctaacaatacaaaccatcgcagcgcaccagcaacaacggttgctaccagcactgagccacctatccatggtgaaccctgccgcctacttgcaacagcagttgcttgcataaagacccacttgctgtggcaaaccttgttgcaaaccaaacacaacaacagctgctacagtttgtgccagcgctcagtcaactagccatggtgaaccctggcgcctacctacaacagcaacaactgcttttatctagcccgctcgctgtggccaatgcacctacatacctgcaacaacaattgttgcaacatattggaccatctctgactcagctaggtgtggcaaaccctgctgcctacttgcaacagctgcttccattcaaccaactgactatgtcgaactctgctgcgtacctacaacagcgacaacagttacttaatccactaaccacggc

SEQ ID NO: 5479 - DNA, 604 bp, Zea mays
  Clone ID: LIB3061-109-Q1-N6-F8
atcttgacaacattcaatttatttaactttcaaaaaccatgaagctggtgcttgtggttcttgctttcattgttttaatatcaagtgtttcttgtacacagacaggcggctgcagctgtggtcaacaacaaagccatgagcagcaacatcatccacaacaacatcatccacaaaaacaacaacatcaaccaccaccacaacatcaccagcagcagcaacaccaacaacaacaagttcacatgcaaccacaaaaacatcagcaacaacaagaagttcatgttcaacaacaacaacaacaaccgcagcaccaacaacaacaacatcaacaacagcaccaacaacaacatcaatgtgaaggccaacaacaacatcaccaacaatcacaacgccatgtgcaacaacacgaacagagccatgagcaacaccaaggacagagccatgagcaacaacatcaacaacaatttcagggtcatgacaagcagcaacaaccacaacagcctcagcaatatcagcaggggcaggaaaaacacaacagcaacaatgtcattgtcaggagcagcaacaggactacaagtgcagctataactactatagcagtagctca

SEQ ID NO: 5480 - DNA, 574 bp, Zea mays
  Clone ID: LIB3061-109-Q1-N6-F9
cctgcgtgtaccgggctggctattacagggtcgacctcagcgttcggcatgggatccgatggacaagtacgagcccgttcgcgagatcggggcgggcaacttcggggtggccaagctgtatgaggaacaaggacacgagggagctggtggccatgaattcatagctcgaggaaacagatcgacgagaacgtgttccgggagatcgttaaccaccggtccctccgccaccccaacattatccggttcaaggaggtggtgctgactcccacgcaccttgcgatcgtgatggagtacgctgcgggcggggagctggtccagcgcatgtgccacgccgggcggtttcacgaggacgaggcgcgctacttattacagcagctggtttgcggcgtcagcttctgtcacgccatgaacatctgccaccgtgacctcaagctggagaacacgctggtggacggtagtccggctccgtgcctaaagatctgagactccaggtactgcaagtgctctgtgctgcactcacgaccgaagtcaacggtgggcacaccagcgtacatagcgcccgaggtgctgtcgc

SEQ ID NO: 5481 - DNA, 559 bp, Zea mays
  Clone ID: LIB3061-109-Q1-N6-G12
cacgcctgcatgtaccgggctgctattacacggtcgacctacgcgttcggtcataatacaaaatgacccttgttatttcaggaaccgcccaacctttatcaaaaaaaccctattgttgcatctgtgactcataaacaatctgaaacaggcaccaccacagcatgggctggcggaccaacactgatactcttagcaaaataagttggttgaatggaaccaactgtgctgaattgtaaactatggtgccttatttaagcatcaattaccattcaaacagctaaactgtggctaccccaagaaagcagttgcattcaaacaactaacatgattgaactgtgctggttattgacagcagcaacaactactaccattcaatgcatctagcttgatgtgaagccctagaaatcttcttgacacaacaacaactagtggcgttctacctgaacgctatgcctaacgctggcaccatctaacaactgcaacaattgctgacattaaaacaacttgctctgacagactgaacagaggtctaccaacaacccatgattgatggggccct

SEQ ID NO: 5482 - DNA, 397 bp, Zea mays
  Clone ID: LIB3061-109-Q1-N6-G2
cgctctctaccgcacgagaccccaagcaccaacgcggaggcggaggcggcggcagaccatggctgtagggaagacaagagacctccacgggaaagagggtggcaagcaaaaagacggcaaccctttctctaaaatagattggtatcacatcaaggcaccgaacgagttcagtgtgcgcaacatctgcaagactctattatccatgacacaggctaccaggattgctcctgcgggcctgaagcacacgtctttaacgttcgtctagctgatcttaacggccacgaggatcaagcttacatgaaactcaggcttcgagccgaagagaagcgggcaggactgtgctgacaacacttttagggcatgaaccttaccactgatgaacgaacatccctacaga

SEQ ID NO: 5483 - DNA, 384 bp, Zea mays
  Clone ID: LIB3061-109-Q1-N6-G3
gcctgcagtgataccgggccggctaattacaggggcgcccctttttggcacaagaaccagttggtggcttttttacaacaggttgggggttaacccggaacccttttatcacttccacaattggtggcccttggccaacttggtttgtggggacccgagggcttcttacaaaaaacattatttggggggccccctttttaaatggttaataaggggcaaccaaaaaaaaaagtttttgggagaaggccgggggcctcccaaaaaaaggaggtacaatggccaaaaattttgatttttttaaaggggggggggggtaaccccaaaccggtggtaaaaaagaaacaaaatattattttaaaagggggggggcccccggggaatcaa

SEQ ID NO: 5484 - DNA, 252 bp, Zea mays
  Clone ID: LIB3061-109-Q1-N6-G7
ttgaaagtagggaaaacgcattagtcacacactgctggatcaacggaggcacttgatgatgcaacaaaaatgaatcacacctggtttttcatcactggccaaacgtatctatgattcgctgattgaaacaaaccatggggtcagaacagccaattgaactaatgctacaaatgatcagtcaagtaactctggcaaacctttccccctactttgagcaacaacaatttgttgcatttaaccaactgggtttac

SEQ ID NO: 5485 - DNA, 598 bp, Zea mays
  Clone ID: LIB3061-109-Q1-N6-G8
gcctgcagtaccgggcccctaattacccggtcgcccagcgttcggcggcgtgcgtatagggtcgtcgacagaacagcatgaagaggtcatcgttctcgtcgtgtgcctggctctgtcagctgccagcgcctctgcatgcagtatgccctgcccctgcgcggggctgcagggcttgtacggcgctggcgccggcctgacgacgatgatgggcgccggcgggctgtacccctacgcggagtacctgaggcagccgcagtgcagcccgctggcggcggcgccctactacgccgggtgtgggcagacgagcgccatgtaccagccgctccggcaacagtgctgccagcagcagatgaggatgatggacgtgcagtccgtcgcgcagcagctgcagatgatgatgcagcttgagcgtgccgctgccgccagcagcagcctgtacgagccagctctgatgcagcagcagcagcagctgctggcagcccagggtctcaaccccatggccatgatgatggcgcaaaacatgccggccatgggtggactctaccagtaccagtaccagctgcccagctaccgcaccaacccctgtggcgtctccgct

SEQ ID NO: 5486 - DNA, 485 bp, Zea mays
  Clone ID: LIB3061-109-Q1-N6-H1
ggcaggtcggcgaggagggcaggaagaccgaagaccgagccgtgcgggggctcgggacgggaacgggacaggaccccaaatctcagaccttcctgcccgcccgcccgtgcccgtcgacgcgtcgttcttgccggccgcgcctcacctccgccctctcctcctccaggggatcggatacgccacaggctgcgcgatggtgctgtgggtcttcggctacggctccctcatctggaaccccggcttcgacttcgacgacaaaatcctcggcttcatcaagggctacaagcgcacctttaatctcgcttgcattgaccacagaggcacaccggagcatccggcgaggacctgcacgcttgaaaccgacgacgaggccatatgctggggaattgcatattgtgtcaagggtggtccagaaaaagagctaaaagcaatgcagtacttggagagaagagagtgtgagttccaccagaagatatccattgatt

SEQ ID NO: 5487 - DNA, 475 bp, Zea mays
  Clone ID: LIB3061-109-Q1-N6-H10
cacgcctgcgtgtaccgggctgctattacacggtcgacctcagcgttcgtaactagcacataaagagctcatttatgtaccaacactgcgcaacaaaatatcaagatatcttatgctgctcggtctctcagaaagagttgataccagggcactacctacgacagtggctgacagagctgaacatctgcttggcctttgttcaaaccatacctggttacaatgggagtaattgaatgcagtgaaacacaagttgccaaaccctacatgatccaacaggcagaacgaacaacatgctgaccattataacacgtggtactgctacaaccatctagcctattacatgagataccttggggccattgggaggaacaaaacatgatgacacatacatctacaacaacatgggctaaaaaaccttggtggtactctcaaaacatctgaatgttacatgtcaaccaactagatgcattgaact

SEQ ID NO: 5488 - DNA, 440 bp, Zea mays
  Clone ID: LIB3061-109-Q1-N6-H11
cgcctgcggtgtaccgggccgctaattacacggccggccacgtacggcgcattcgtaggtgcgactacccttacctcgttcaggattggaccagcaccccagactagggggccatggggcatcgagcgcggtcacgttcctgcatcaccgcgcccatcggcagcatgcatcgagcggattctatggacgcgcgactaccagactcgtctctgcgatcggtgtctacctgcgccaactttagtctggcttcatacagcaggacgggtactacacatatgctaaataaagggcctatatatgtcatatgacactatcatggacttatatgttcgatcgtggccccgtctgtctgaacatacatggctgtcaaataaagctctgtgcctctagattaagattgacacctcccaatcccgaaccaggtaaaggtagtcgcacct

SEQ ID NO: 5489 - DNA, 554 bp, Zea mays
  Clone ID: LIB3061-109-Q1-N6-H2
gggatgagctttatctcaaccttgttcttgagtttgttccagagacagtaaacaggattgcaaggcagtacaatcgaatgaatcagcggatgcccctcatttatgtcaaactgtacacgtatcagatatgccgagcgcttgcttatatacataactgcattggcatctgccaccgtgatatcaaaccgcagaatgttcttgttaacccacatacacaccaactcaaaatttgcgatttcggaagtgctaaagtattggtcagaggagagccaaacatctcctacatatgctcaaggtattatcgagcaccagagctcatatttggtgcaacggaatatactactgctattgatttgtggtcaacaggctgtgtcatggcagagctgcttctaggacaggctctgtttcctggagaaagtggagtcgaccaactagttgagatcatcaaggttttgggtactccaacaagggaagagatcaagtgcatgaacccaaactatacggagttcaagttcccacaaattaaagctcatccgtggcacaaggtttttcaa

SEQ ID NO: 5490 - DNA, 612 bp, Zea mays
  Clone ID: LIB3061-109-Q1-N6-H5
cacgcctgcgtgtaccgggcccctattacacggtcgacctagtcgttcggtgtaaacccatatagtaacagcccttcatgtatccatcgggacactccaaacatgctccaaaccactataaccctggactctaacatcatccgcaatccctattacggcaccacccatgatgggcatgttgggggcaccactacatgagggcgcaacaactacaacaactagtgctagcaaaccttgctgcatactcagagcgccatcagttggtttcattcaaccgactaactgcatcgaactctgctggttatttaacgacaacaatttccattcagccagctagttgcttgctacccccagcaatttcttccattcaaccaactagcacaatgcaactctgctgctgatttacagaaacagctactactacgcattcaaccagctagctgatgtgagccctgctggcttcttgacacaacaacacaatgttgcccagtctacctgcacgctatacctaacgctggctccctcttacaactgcgacagttgctgccattcaaccaacttgctgtgacaaacccaacagtgctctaccaacaacccatgttactggtgccc

SEQ ID NO: 5491 - DNA, 637 bp, Zea mays
  Clone ID: LIB3061-109-Q1-N6-H6
cacgcctgcgtgtaccgggcccctattacacggccgacctcagcgttcgttaccaacagcacatataagtggttttcacacctcaacgagcacagtggctaccaatatatggtcgctccttatgctccttgatatatctgcatgtgttgctaacgcgacaattctccctaaatgctgacacgctcctatagctttccttgttaccgaataccttcgcatcagtgataagcttgcaggtatcgagagaaacacacaactcgttcagaccctgataaggatggcaacaagcaatcgccgcaagctgcatacctaaatgcacccttggtggttcaacaatacgacagacctatctttggtgcagtcattggtacaaaccatcagggcacaggatgtgcaaaaactcgtgctacctgtgatcaaccaagtagctctagcaaacctttctccctactctcagaaacaacaatttcttccattcaaccaactgtctacactgaaccctgctgcttatttggagcaacaactattaccattcaaacagctaaatactgcctactctcaacaacaacaacatgtttcatttaaccaattggccgcaccgaaccccgctggttatttgcagcagcaaatactacta

SEQ ID NO: 5492 - DNA, 205 bp, Zea mays
  Clone ID: LIB3061-109-Q1-N6-H8
cacgcctgcggtgtaccgggccgctattacacggccgacccacgcgttcgcaacaaccctcagaggcggtgccctactttagatttcttgtgaggcctcgttcattaataaagaaacttatctgatgaactgtggcttcctcagaaataataaaagtacgtctcctccattcaatgggttgatgcagaacgcgtgggcgcgccgc

SEQ ID NO: 5493 - DNA, 595 bp, Zea mays
  Clone ID: LIB3061-109-Q1-N6-H9
cacgcctgcagaaccgggcaccctatacacggccggccttaccaatattttttcaaaacttgagcacgtagctctttatgcctgggtggccacctccacaatccaaaatcatgcttacagactcacaactaataagtaatctaaaaaagcgcaccaccaatgatggcttgagggtaggaaaacccacgtcttgacacctctaggctcacacaagccaacacaggaagcaacatacctaggtcacccttgttagcccaacactggtcagccaaatgcatgaaccagtcacttggtacaaaacataaggccacatgatgtacataaactcctactacctgtgatcaaccaatgatctaaataaacacctttctccctactctcaccaacaacaaaatcttacattcaaccaactgtctacactgaaccctgctgcttatttgcagcaacaactattaccattcagacagctagctactgcctactctaagcaacaacaactggttacatttaaccaagctgccagactgaaccccgctgcttattagctacagcaaatactactaccattcaaccagctagctgcagcaaaccctgc

SEQ ID NO: 5494 - DNA, 525 bp, Zea mays
  unsure (1)..(525): unsure at all n locations; Clone ID: LIB3061-110-Q1-K6-A11
tagacaacatagnaagcacaatagtgtaccaacaatggcagccaaaaattttgcttccttatgctccttggtctttctgcaagtgttgctaccgctaccattttcccacaatgctcacaagctcctatagcttcccttcttcccccatacctctcaccagcggtgtcttcaatgtgtgaaaccccaattgttcaaccctacaggatccaacaggcaatctcaacaggcatcttaccataatcacccttgttcctacaacaaccgccagccctattacagcagttacctttggtccatttggtggcacaaaacatcagggcacaacaactacaacaacttgtgctagcaaaccttgctgcatactctcagcaacatcagtttcttccattcaaccaactgactgcattgaactctgctgcttatttgcaacaacaattaccattcatccagctagttgctgcctacccccagcaatttcttccattcaaccaactaccagtattgtaactctgctgcttatttaca

SEQ ID NO: 5495 - DNA, 342 bp, Zea mays
  unsure (1)..(342): unsure at all n locations; Clone ID: LIB3061-110-Q1-K6-A12
atttaaaccaattggccgcactgnaaccccgctgcttatttgcagcagcaaatactactgccatttagcgagctagctgcagcaagtcgtgcttccttcttgacacagcaacagttgctgcctttctacaagcagtttgcggctaaccccgcaaccctcttacaactacaacaattgttgccctttgtccaacttgctttgacaaacccagcagcctcctaccaacaacacatcattggtggtgccctcttttagattgattattagttgtaattcaataataaagttttttggatgatgtatgtggccaaccagaaataagaagttacatttccagattct

SEQ ID NO: 5496 - DNA, 576 bp, Zea mays
  unsure (1)..(576): unsure at all n locations; Clone ID: LIB3061-110-Q1-K6-A3
attcagnaaacacacctagcgaacgcactagcaacgacctaacaacaatggcttccaagacattatccctccttgcgcttcttgccctttttgtgagtgcaacaaatgcgttcattattccacaatgctcacttgctccgagtgccattattccacagttcctccctccagttacttcaatgggcttcgaacacccagctgtgcaagcctataggctacaacaagcgcttgcggcgagcgtcttagaacaaccaattgcccaattacaacaacaatccttggcacatctaaccatacaaaccatcgnaacgcagnagcaacaagcactgagccacctagccgtggtgaaccctatcgcctacttgcaacaacagctgcttgcatccaacccacttgctttggcaaacgtagctgcataccaacaacaacaacagttgcaacagtttctaccagcgctcagtcaactagccatggtgaaccctatcgcctacctacaacagcaacaacttctttcatctagcccgctcgctatgggcaatgcacctacatacctgcaacaacagttgntgcaacaac

SEQ ID NO: 5497 - DNA, 585 bp, Zea mays
  unsure (1)..(585): unsure at all n locations; Clone ID: LIB3061-110-Q1-K6-A4
tagcaacatacatagtngaatacactagcaacatcttagcaccaatggcagccaagatttttgccatccttgccctccttgctctttcagcaagcgttgctaccgcgactattattccacaatgctcacaacaatacctctctccggtgacagccgcgagatttgaatacccaactatacaatcctacaggctacaagaggccatcgcagcaagcatcttacggtcgttagcattgaccgtccaacaaccatatgccctattgcaacaaccatccttaatgaatctatatctccaaagaatcgcagcacaacaactacaacaacagttgcttccaacaatcaatcaagtagttgcagcgaaccttgctgcttacctccagcaacaacaatttcttccattcaatcaactagctggggtgaaccctgctgcttacttgcaggcacaacagctactaccattcaaccaacttgtcaggagccctgctgccttcttactgcagcaacagttgcttccattccatctacaagttgtggcaaacattgctgctttcttgcaacaacaacaacaattgctgccattttacc

SEQ ID NO: 5498 - DNA, 441 bp, Zea mays
  unsure (1)..(441): unsure at all n locations; Clone ID: LIB3061-110-Q1-K6-A7
accagtcctcacataatcatcttcattcactcactctcttcgatcactgtgctngaanataccatggccaagtcgaccgcgatgtttgtagccgccctggccctggtggtggtgatggcgacgacgagcacaggcggtggcagggcggcagcggcgtgcgatcccaagccgctggtggtgtgcgatccggcgttcatggacggagcgaaaccagcggcagcatgctgctccaccctgcgtgcgcaggaggcatgcttgtgcgtgtacgccaaagaccccaagtttgcaaaatacatcaacaaccccaacaccgccaaaacctttacctcgtgcggcatagccatccccaaatgctaagcaagcgctctgcgtcgtcgcttcgcttgctcttgctcttgtgtgtaacatatccagcttatgaataaattatgtggatcagtt

SEQ ID NO: 5499 - DNA, 592 bp, Zea mays
  Clone ID: LIB3061-110-Q1-K6-A8
tcttgaacaaatttttcccatcaggttatccatacagtgtgaatgaaggttacttaacttataccaaattccgtgtgctacagcatttctcgagtgctatgctacatgtgctatcaacacagtccttgctgtttgctgcaggtttgcgacctaccccggcgcaagcaactgctattctaaaagatggaatgcagcacgcaggaaagctcatttgtagcagcatgggtgcaagaatggattctgaaccaaagagttggaggatacttgctgatgttctctacgatcttggtactgcattggaagttgtttcgccgctgtgtccacaacttttccttgaagtagcaggcttgggaaattttgcgaagggaatggccgttgttgcagcaagagcaacgaggcttccaatttactcttctttcgccaaagaaggcaatcttagtgatttatttgctaaaggggaagccatatcaacacttttcaatgtcatgggaattggagctggaattggattggcatctactgtttgttcaacaactcaaggcaagttaattgcaggcccgttactttccgcagtgcatatatatggggtcat

SEQ ID NO: 5500 - DNA, 604 bp, Zea mays
  Clone ID: LIB3061-110-Q1-K6-B10
gtaccatcccgctcgaccggccaagtcaggctccagctgcagaagaacgtcgtcgccgccgccgcctccggggacgccgcgccagcgcttcccaagtaccgcggcctgctcggaactgccgccaccatcgctagggaggaaggggccgcagcgctctggaagggcatcgtcccgggcctccaccgacagtgcatctacggggggctccgcattggcctctacgagcctgtcaaatccttctacgtcggcaaagaccacgttggggatgtccctttgtccaagaagatagccgccggcttcacaactggtgccatcgctatcagcatcgccaaccctactgaccttgtcaaggtcaggctccaggccgagggcaagcttgcgcctggtgtgccacgccgctacactggcgcaatggatgcttattccaagattgctagacaggaaggggttgccgctctgtggactggccttggaccaaatgtagcgcggaatgctatcatcaatgctgctgagttggccagttatgatcaagtcaagcagtcaattttgaaactccctgggttcaaagatgatgtggtcacccacctttttgctggtcttggtg

SEQ ID NO: 5501 - DNA, 607 bp, Zea mays
  Clone ID: LIB3061-110-Q1-K6-B11
taccatagtgaagtacactagcaacatcttagcaccaatgggagccaagatttttgccctccttgccctccttgctctttcagcaagcgctgctacctcgacttttattccacaatgctcacaacaatacctctctccggtgacagccgcgggatttcaatacccaactatacaatcctacatggtacaagaggccatccaagcaagcatcttacggtcattagcattaaccctccaacaaccatatgctctattgcaacagccatccttagtgcatctgtatctccaaagaatcgcggcacaacaactacaacaacagttgctaccaacaatcaatcaagtagttgcagcgaaccttgctgcttacctccagcaacaacagtttcttccattcaatcaactagctggggtgaaccctgctatctacttgcaggcacaacagctactaccatttaaccaacttgtcgggagcccttatgccttcttactgcaacaacagcttctgccattccatctgcaagctgtggcaaacattgttgctttcttgagacaacaacatttgttgccattttacccacaagttgtgggaaacattaatgccttcttg

SEQ ID NO: 5502 - DNA, 591 bp, Zea mays
  Clone ID: LIB3061-110-Q1-K6-B12
cttttcctcgcttgccctaattccgcatccccggctgaggcagcagcggcggcgccggcagcggcaccggctcaccagcgataccaggaagaatggggaggtacagtcccgcgtacagccccccgaggagaggacatggcggcaggggaaggagcccacctcccaggagaggatatggcggtggccgtggtgaccatggctctgtcagcctcctggtccgcaacattccattgagatgcaggcctgaggaactacgtgtccctttcgaacggttcggccctgttcgggatgtttacctgccaagagattatcacactggggagccaagaggatttgggttcgtggagttcgttgatgcttatgacgcttctgaggcacagtaccacatgaatcgccagatgtttgctgggcgtgaaataactgttgtacttgctgcggatacacggaaaaggcctgaggacatgcgtagacgaactggaccaagaggttattctggtcatgaagggcgtcgtccgaatcgtcatggtgcaggacggtcccgttctcgttcatactcgcgttcccgctcaccacgccctcgtggtcgtggta

SEQ ID NO: 5503 - DNA, 585 bp, Zea mays
  unsure (1)..(585): unsure at all n locations; Clone ID: LIB3061-110-Q1-K6-B5
cttggccttcgtctccgccttccgacttcctctagaattcgattccctttcccaagaaaccaagaacccagccccccaccatgacgagctcctcctctccttccagaaggcgctgagcaagatcgcttgcaatcggctgcagaaagagctcgccgagtggcagcaaaacccccccgccgggttcaagcacaaggtctccgataacctccaaaggtgggtaattgaggtcaccggagcggcgggcaccctttacgccggcgaggcttaccagttgcaggttgacttccctgagcattatcctatggaggcacctcaggtcatttttctcaatccagcgccaatgcatccacacatttacagcaacgggcacatctgcttagatattctgtatgactcgtggtcaccagcgatgaccgtgagctctgtctgtatcagtatcctgtctatgttgtctagttcgccagcaaagcaacgcccggcggacaatgaccgctatgttaggaactgccgcaacgggaggtcgccaaaggagactagatggtggttccatgacgacacggtgtaatgatctncgtggcattgcct

SEQ ID NO: 5504 - DNA, 583 bp, Zea mays
  unsure (1)..(583): unsure at all n locations; Clone ID: LIB3061-110-Q1-K6-C1
caactagcaacatagnaaagcacaatagtgtaccaacaatggcagctaaaaattttgcctccttatgctccttggtctttctgcaagtgctgctacggcgaccattttcccacaatgctcacaagctcctatagcttcccttcttcccccgtacctctcaccaacggtgtcttcggtatgtgaaaacccaattcttcaaccctacaggatccaacaggcaatcgcagctggcatcttacctttatcacccttgttcctccaacaatcatcagccctattacagcagttacctttggtgcatttattggcacaaaacatcagggcacaacaactacaacaacttgtgctagcaaaccttgctgcctactctcagcaacagcagtttcttccattcaaccaactagctgcattgaactctgcttcttatttgcaacaacaacaactaccattcagccagctatctgctgcctacccccagcaatttcttccattcaaccaactgacagcatttgaactctnctgcttatttacagcagcaacaactactaccattcagccagctagctggggtgagccctgctac

SEQ ID NO: 5505 - DNA, 397 bp, Zea mays
  Clone ID: LIB3061-110-Q1-K6-C8
gtctggctatggctctggttcaggatatggatcaggtgaaggatacggacaaggtggtgctcatggaggaggctatggaagcggtggtggcggtggtggcggcggtggtcaaggtggtggtggctctggctatggatctggatccggctccggttatggaggcggcaacgacaacggacattattaggctctttttaagagctagatacatgttatacaaatatgtcaccagacatgagtctgtcttgttgcatgggatgctagctgtgtccatcgtgtgtgtaacaccgcaaggcttgtgatttgtcctgtaaactgcttgccgctttacattactggcaacaactaagtgataaataaaaatcatctatggaattatagtatgaacacttgagat

SEQ ID NO: 5506 - DNA, 601 bp, Zea mays
  Clone ID: LIB3061-110-Q1-K6-D6
ggggcgcgcaggtggcgtggcacctctgcctgttccggccggaccgggtgcgcgccgccgccgttctaggaataccgtactacgctcgacaagctcaccccatcatggaggtcttcgcggcgtttggcgatggcttttacataaatcagtttcaggagcccggaagagctgaagccgcattcgctcattacgatgttgcaactgtactaaagaagttctactccattgaaatagatgaactcactgctcctcctggagtggagatcatagactttctcgaggcatctccatcaccacttccttggatcagcgaggaagaactgggccagtacgccgaaaagtttcggaagtctgggttcactggacccctcaactactaccgcatgtgggagacgaattggagacttcttgcaccctggaacgaggccaagattacagtgcccgtcaagttcatagctggtgataaggacatcggtgtccagtcctttggggttgagaagtacatcaagagtggggaattcaagtccactgtcccagatcttgaagtcgccgtcattgaaggccaccattttctccagcaagaacaggccgagagggtgaa

SEQ ID NO: 5507 - DNA, 579 bp, Zea mays
  Clone ID: LIB3061-110-Q1-K6-E12
ggccaatcccgagcgtggtgcgaaacctcgagcgctcgcgccggtgaccataacaaagaggaagccgcggtagcactggtagcggcagcagtaagggggagatgtcgtcggcgttcagcggcgatgagaccgcccctttcttcggcttccttggcgcctccgctgcgctcgtcttctcatgcatgggggcggcgtacgggacagccaagagtggcgtcggcgtggcgtccatgggtgtcatgcgcccagagctcgtcatgaagtccatcgtgcccgtggtcatggctggtgtgctcggtatctacggcctcatcatcgccgtcatcatcagcactgggatcaaccccaaggccaagccatactacctctttgacggctatgcccacctgtcgtctggccttgcctgtggtcttgctgggcttgctgcaggcatggccattggcatcgttggtgatgctggtgtcagcagccgaagttgtttgttggcatgatcctcatccttatttttgctgaagcacttgccctctatggtctcatcgtcggcattatcctctcgtctcgtgccggccagtcccgcgc

SEQ ID NO: 5508 - DNA, 596 bp, Zea mays
  unsure (1)..(596): unsure at all n locations; Clone ID: LIB3061-110-Q1-K6-E4
gnatcagcaaacggcagtgcgtagaaaggatcgtcgaacagaacagcatgaagatggtcatcgttctcgtcgtgtgcctggctctgtcagctgccagcgcctctgcaatgcagatgccctgcccctgcgcggggctgcagggcttgtacggcgctggcgccggcctgacgacgatgatgggcgccggcgggctgtacccctacgcggagtacctgaggcagccgcagtgcagcccgctggcggcggcgccctactacgccgggtgtgggcagccgagcgccatgttccagccgctccggcaacagtgctgccagcagcagatgaggatgatggacgtgcagtccgtcgcgcagcagctgcagatgatgatgcagcttgagcgtgccgctgccgccagcagcagcctgtacgagccagctctgatgcagcagcagcagcagctgctggcagcccagggtctcaaccccatggccatgatgatggcgcagaacatgccggccatgggtggactctaccagtaccagctgcccaactaccgnaccaacccctgtggcgtctccgctgccattccgccctactactgattcatgatattt

SEQ ID NO: 5509 - DNA, 414 bp, Zea mays
  unsure (1)..(414): unsure at all n locations; Clone ID: LIB3061-110-Q1-K6-E6
aatggctaccaaanatattatcgccggcgtgtgcggcttcttgcgccctttttgcgagcgccaacnnaaatgcgtcctattattgtccacaaatgtctcacttttgctgcgctagttccgattattcccacagtttctcttcctcaccagttaccttcaatgttccttgctttcgacccagggtgttgcaagctcttataggctacaacatagcgattgcgtgtgtagcgttttacaacatnccaattgtcccaattgctaacaaccaatccttggcacattctaacaatactaaaccatctgcatcgcaatcagctacaacatgttcctaccatctactgagccaccctagccatggtgtaaccctgtgcgtctactttgcaacagcagcttgcttgtcntccaacccacttg

SEQ ID NO: 5510 - DNA, 211 bp, Zea mays
  Clone ID: LIB3061-110-Q1-K6-E7
ttcgccggctccctcctcctcaccgtcgtcgctgcccccatcgcctccctcgccttctccctcccctccatccccaagtccaaggctttgatgatgatacacaggtttttcagcatatctcttcttgcattttctgcgctttggtatacctctacaccagggcagtccggacctaccttccagtcaagtgaaggaggctcacataaacctg

SEQ ID NO: 5511 - DNA, 602 bp, Zea mays
  unsure (1)..(602): unsure at all n locations; Clone ID: LIB3061-110-Q1-K6-F1
cccgggtcgnacccacgctgtccnacagnacacacacactcgnagactccatttcgatctcattttgaaatcaacccatcctcgtttcctccgtctagcagcctctcaccctcatggccaagatcaagatcgggatcaatgggtttggcaggatcggaaggctggtggccagggtggccctgcagagcgacgacgtcgagctcgtcgccgtgaacgaccccttcatcagcaccgattacatgacctacatgttcaagtatgacactgtgcacggacagtggaagcaccatgaggtcaaggtgaaggactccaagacccttctctttggtgagaaggaggttgctgtgtttggctgcaggaaccctgaggagatcccatggggttcggttggcgctgaatatgttgttgagtctactggtgttttcactgaccaggagaaggctgcagctcacttgaagggtggtgccaagaaggttgtcatttctgctcctagcaaggatgcccccatgttcgttgttggtgtcaacgagaaggagtacaagtctgacatcaacattgtctctaatgctagctgcacaaccaactgccttgctccccttgct

SEQ ID NO: 5512 - DNA, 394 bp, Zea mays
  unsure (1)..(394): unsure at all n locations; Clone ID: LIB3061-110-Q1-K6-F9
tcggggcgggctttttcggggggggcaatctgttgtggtacatggacacgagggtagctggtggtcttgttgttcattgagcgaggaaacaggatcgactagaacttgttctcttagatcgttaaccaccttttcgtggttntgctcaggcatcatcctcttcacggaggtggtgctgacttccacgcaccttgcgatcttnatggttttcgcttcttgctgcgagctgttttatctcatctgctacgccgggcggtttctctctgactagtcgcgctacttttttcattcatctggtttgctgcgtcagcttctgtcacgtcttgaacatttgtcaccgggaccttaatctgggtaacacgctgcttgactgttttccggggccgcgcctcaa

SEQ ID NO: 5513 - DNA, 597 bp, Zea mays
  Clone ID: LIB3061-110-Q1-K6-G10
ggccgtctctctcccgtccggcacttcctccgatcgactagcctgcggcggcgccggcgccggcgaccagcggccatgcgggtggcacccagggtgctcttcctcgtccgcgacgccgcgggctacggcgctgccctcgccgacgcgctccgcccgccgcccgggctaactagggagtcctcgcccttcgagctcccccttggaaagtacggcctcgacggagagaaggcgtgcgccgagctcctgagcttttccgattccagtggctctccacaggtgaccatttttgttctgccagactataagccacctcttgcagcgtgtgttgtaaatggggtcttggaactgatttcttctgaagctacctccactgagcgaactctaattgtcccatacatcacaagatcgtcaagctatcatcatggaacggaacatgcaacaaaggcatcgactgtacttcatggtgctgaaataggggcaacaactgactatactcacctgttggttggtgggaccactaaacctcctacatccttgcaaatacgtagtgaaccaatattatgtttgctggaaatggtgcgtgtgttgaaggtgcct

SEQ ID NO: 5514 - DNA, 251 bp, Zea mays
  unsure (1)..(251): unsure at all n locations; Clone ID: LIB3061-110-Q1-K6-G5
gtccgctccgnaancaaattccagtgataaagggatgaactaagagtccatgtttctattgctagaccttttgcctcctaaatagacgatgtactgcgcttgtaacaagaacctcactttcgtgtcaagtaatatcaacaggtttcatanaaaaaaaaaaaanaaaaaannaaaaanaaaaaanaaaaaggaaaaagaaaaaaannaaaaaanaaaaanaaaaaanaaaaaaaggggcgggccgttttaaa

SEQ ID NO: 5515 - DNA, 589 bp, Zea mays
  Clone ID: LIB3061-110-Q1-K6-H12
gggcaacatcgaacatgatgtctattttatgtcaaattccacagtaagccactggtcatcattgtctcacaaattatcagaggttcttgacttctctgggcatgttgctccagcggagaagtatcctggcagtttactagaaggtttctctggtgttcaagttagcacacttgctgtgaatgagggtttggtggtagctggcggttttcaaggagaactaattggcaaagatgtggaaggctgtagtgtaaaattctgtatgaggacaactttgagtgacaatgccataacaaatgccatagatatacacagatcgataagtggaagcctgcacattacagtatctaacaacgattgtggtgttcgtgaatatgatatggagagatatcagctcgtgaaccactaccgatataactggccggttaatcacacatccgtgagcccagataagaaacttttggctgtggttggagatgatcgagatgctcttcttgtggattcacgaaatggaaaggtaacctctaccctagttggccatctggactactcatttgctacggcatggcacccggacagccggacattcgcg

SEQ ID NO: 5516 - DNA, 592 bp, Zea mays
  unsure (1)..(592): unsure at all n locations; Clone ID: LIB3061-110-Q1-K6-H2
ccagnatcagcaagcggcagtgcgtagagaggatcgtcgaacagaacagcatgaagatggtcatcgttctcgtcgtgtgcctggctctgtcagctgccagcgcctctgcaatgcagatgccctgcccctgcgcggggctgcagggcttgtacggcgctggcgccggcctgacgacgatgatgggcgccggcgggctgtacccctacgcggagtacctgaggcagccgcagtgcagcccgctggcggcggcgccctactacgccgggtgtgggcagacgagcgccatgtaccagccgctccggcaacagtgctgccagcagcagatgaggatgatggacgtgcagtccgtcgcgcancagctgcagatgatgatgcagcttgagcgtgccgctgccgccagcagcagcctgtacgagccagctctgatgcagcagcagcagcagctgctggcagcccagggtctcaaccccatggccatgatgatggcgcanaacatgccggccatgggtggactctaccagtaccagtaccagctgnccagctaccgcaccaacccctgtggcgtttccgctgncattccgccctactactg

SEQ ID NO: 5517 - DNA, 605 bp, Zea mays
  Clone ID: LIB3061-110-Q1-K6-H9
catacatagtgaatacactagcaacatcttagcaccaatggcagccaagatttttgccatccttgccctccttgctctttcagcaagcgttgctaccgcgactattattccacaatgctcacaacaatacctctctccggtgacagccgcgagatttgaatacccaactatacaatcctacaggctacaagaggccatcgcagcaagcatcttacggtcgttagcattgaccgtccaacaaccatatgccctattgcaacaaccatccttaatgaatctatatctccaaagaatcgcagcacaacaactacaacaacagttgcttccaacaatcaatcaagtagttgcagcgaaccttgctgcttacctccagcaacaacaatttcttccattcaatcaactagctggggtgaaccctgctgcttacttgcaggcacaacagctactaccattcaaccaacttgtcaggagccctgctgccttcttactgcagcaacagttgcttccattccatctacaagttgtggcaaacattgctgctttcttgcaacaacaacaacaattgctgccattttacccacaggttgtgggaaacattaacgcct

SEQ ID NO: 5518 - DNA, 635 bp, Zea mays
  Clone ID: LIB3061-110-Q1-N6-A1
cacgcctgcgtgtaccgggcccctataccacggccgacctcagcgttcgtgaccaacagtcacatattaagtggaattcatttttttcatgggtggacccatgcctaccacaaaaacttccttcttgagctacaacgctatagctaatgagaaggggaccccacaatgttgcctcagtgctcacaaggtcctatggcttccctaattacgccgtacactggctcaaatatggcttcaatatgagaggaacccaggtgttacaaccatatcggctgtgaacaaggcgaatcacagcgtggcaacataccttaatagcccttgttggttcaacaatcgccagccctatgtttggtgcattcattggtacaaaccatcagggcacaacagctgcaccaactcgtgctacctctgatcaaccaagtatctctggcaaacctttctccctactatcagcaacaacaatttcttccattcaaccaactgggtacactgaaccctgctgcttatttgcagcaacaactattaccatttagccagctagctactgcctactctcagcaacaacaacttcttccatttaaccaattggccgcactgaaccccgctgcttatttgcagcagcaaatactactacc

SEQ ID NO: 5519 - DNA, 539 bp, Zea mays
  Clone ID: LIB3061-110-Q1-N6-A11
cctttgcccgttgcctgaaaaatgggtgaccaccggagatccggagcgtgagtggaccatgattcaatcagtaccgatgatgctgttggctgaccataatgagcccgtgagggcacaactgccccagttatggccccacgaagtcattagggttatgcagcagcattcacatggacgatagatgaactatggggaactctcccgccggttggtgaacaactaaaccgtgatgtcagtcacgcggagacgaaagaataactggcgcttcggctggcagatctgtaagaggatcatgactacacgaagtctaagcttgtggctatacgtggtttctcaacgacaagactgtgaaatcactattgcacacaacataaaacccctaagcatacattctaatttctgcagctggtattgaatcaaataagtcagataaaatcggccttgctaactgttgcgctatccagaatggcaaatggcgcctgcagctgcattaattaattacgcatctctccgggataggacacctgatattgtgcact

SEQ ID NO: 5520 - DNA, 625 bp, Zea mays
  Clone ID: LIB3061-110-Q1-N6-A2
cacgcctgcgtgtaccgggctgctaatacacggtcgacctcagcgttcttatttaaagcacaaaatgtaccagcctggcttatcaaaggtgaagcctacactatgctacaagaactttatgatagagctgttactgataccatatttaaaaaaggctccaacgctgatatggttgccgttataacgctgttcctttcaccaaaggaagttggttgattggcaaaaccagttgttgaagcctaaaggagccaacatgcagtcaaaggtggtattttaactgtatcaactttggttgtatcacaatagataaacgtattacatcagctacctgggtgagaatttataggcgcagatgttgtgaatacaacagctacaacaacgctggctagcagaccaatgtaacaaatttcaggagcaagacagtatgtcattgaatcaactagctgcattgaactctgctatttaaatgcaacaacaacaactatccattgatgcaagtaatagactgctacccctagcagtttgttgcattgaaccatctgacaagattgaactctcctgcttatttacagcagcgacaactactacgcattcagagcgatagctggagtgagccctgctacct

SEQ ID NO: 5521 - DNA, 585 bp, Zea mays
  Clone ID: LIB3061-110-Q1-N6-A3
gcctgcgtgtaccgggctcctattacacggtcgacctatgcgttcttttcaaaaaccacctcaacgtatcgcactttctcagcctaacatcccggttgacggcaccttttcctactcgtgcttatttgtcctttaagagagggcaccacctgcgatggttatttcacactgactcacttggttccattgacatataactcacagtttctccctacttgttcttgaatggggtaggcacacaccaatgggctagcctctggtctacaataaacgctctgggggagctttttaaagcacccaattgaccaattcccacaacaatgcttgaatcatataaccatacaaaccatcgcaacgcagcttgcaacagctctgtgccacctagccggggcgaaccctatcgcctactgtggacaacacaacggttgcatccaacccacttgctcttggacacatagctgcgtaccaacaacaacaacagttgcgaacagtgttctaccagcgactcaggtcaactatccatgagtgaaccctatcgctctacctacaacagcgaacaacgttgtttgatgctaggcccgctcg

SEQ ID NO: 5522 - DNA, 584 bp, Zea mays
  Clone ID: LIB3061-110-Q1-N6-A4
cacgcctgcgtgtaccgggcccctaattacacggtcgacctcagcgttcgtttcacatccatagtgtaagacactaacctcttattaccgccaaaggcggccaataattttgacgtccttgtccttcctgctttttgcataagcgatgctaccgcaactatcctcccacagtggtcacaacaattccggtgggcggagacagccaagcagattggatacccagctatacaagcctacagggtacaaaaggcaatttgattgacgcattctcgggggttaaggttgaccctgcaacatcctatgccctgattgcaacaaccctccttactgaatgtataaactgcaaaaaatggtattacaacaactacaacaacagttggtttcaacaatctatcaagtagtatgaaagaaacttgttgtttacctacagagacaacaagctcctgcctagaatgaactatgggaggagaaccctggctccttacttgcacgcacaacagctactaccattcaaccaacttgtgaggaaccctgctggcttgttactgcaacaacagttgcttgcatcccatctacaaattgtg

SEQ ID NO: 5523 - DNA, 522 bp, Zea mays
  Clone ID: LIB3061-110-Q1-N6-A6
cacgcctgcgtgtaccgggccgctattacacggtcgacctcagcgttcgttgcagtatgcgagtatggggcccatgtagcctgtgctgaatatgtgatgaaagcagagcatgacgcatactgtccgttgcaggactagcattcagtaactcactcgagatctagaaggaccctgtatgtagacgaattaacatcgggagcatgaatatacaacacacgccactactacctgtgagatgggctgctacctatgaggacaggccacaatgagtatatccctggtttgcccactgccctgactatgttatatcatctgatttagttaaggatgttatgaactaccataagaatcaaagaatgaagctcttgaaaaggaaatatctgaactaccgagtgtggggatgacatgacactgagactatacctgatggatacaatgcacactgactaagtaatgtgcagatggatgcttccctgactaccatactgctcattaccaattgccatggctacagctatgcat

SEQ ID NO: 5524 - DNA, 465 bp, Zea mays
  Clone ID: LIB3061-110-Q1-N6-A7
cacgcctgcatgtaccgggcccgctattacacggtcgacccactcgttcgaaccaaaccgcaccataatcatctatatcatactcacgtctatgtgaccaacgagctcaagatcccacgaacaaaccacaccacagagcttgctagacatcctgggcattgctgatgcgcgacggagacaacgagcacacgcggtggcaggtcgggatctattttccaaaccaagccgctggggcggacacacacaagcatgattgacgggcacgcaccgaggagcagaatgctgtccaccctgcgtgcgcaggaagcatactcgtgcctgacccccaaagacgctaaggttgcaaacaccattaacaacctgaacacggctgaactcgtacctggcgtcagcataaccatggccagagctgaaacaaacctctgcgtcgaccctgccacttgctcttgctcacaggggtcacat

SEQ ID NO: 5525 - DNA, 307 bp, Zea mays
  Clone ID: LIB3061-110-Q1-N6-A9
ctgccggggttgccaaataccgttgaccagaatggcacttcatgatgcgaaaaccaaatggtgcaaccctacagcacccaacgcgcgatgaacggaagcatctgaccttgatcacccaaggcacctgcaacaaccatcagctctattacagaatgtacctagcgttgcattgtgtgtgacacaaaacatcaaggcacagcaactacaacaacttgtgctaggaaaccttgctggctactctcagcaacagcagttaattgcattcaaccaactggctgaattgaactcttctagttatttggtacaa

SEQ ID NO: 5526 - DNA, 637 bp, Zea mays
  Clone ID: LIB3061-110-Q1-N6-B10
cgcctgcgtgtaccgggctcgtattacagggtcgacctagtcgttcggttccataacagataagaacggttcaaagtcaggcctagagttgaagaacaacggcccactggactacggctgcggaggacgccaagccagagcttatgcaagtaccgtggcctgttcggaactgccgtcaccatatttagggaggaagggggcgaatggctcttgaagggcattatttctgggccttcagggaagagaatttaccgtgggctccaaattggcctgtagaggcctgaaaattcttctacggcggataagaccaaaatggggatgttcattggtccaagaagatagtggacggcttcacaactggtgccatcgctatcatcatagacaaccctactgaccttgtcaaggtcaggatcctagccgatggcaagattgcacctggggtgacacgccgatgcactggcgcaatggatgcttatggcaagattgctagacaggaaggagatgacaatctgtggactggccttggactcaaatgtagcgcggaatgctatcatcaatgctgatgagttggccagctctgatcaagtcaagcagtcaattttgaaactccctgagttcaaagatgatgtggtcaccc

SEQ ID NO: 5527 - DNA, 560 bp, Zea mays
  Clone ID: LIB3061-110-Q1-N6-B11
gcctgcgtgtaccgggctcctattacacggtcgacctcagcgttcgttcatacaaatgcactacctcattttcacccaagggtgccaaaatatagcactgccccgcccttggtggtgctggcagcaagcacggggaccgatactttaattccagaatgctaacagcaatacctttctgctgtggcaggaagggaaaattgaattgcccaactattcagggtctgcatggtacaaagagccgttcaagcaagaatgcttaaagtgattaccacaaacgctgcaacaaccatatgctatgttgcaacatccatacatagagcatgtgtgtctacaaagaatgtggaacagacaactactacaacagctgctaccaagcataaaggctaccgcggagggaaccatggtggttaccttcaggccaacagtttcttgcattgaatccaccagctggggggaaccctggtataaacttgcgggcacagcagctaccaccatgttaccaacttgctccggagcccttatgccgtcttaccggaacaacagattgtggcattccatat

SEQ ID NO: 5528 - DNA, 368 bp, Zea mays
  Clone ID: LIB3061-110-Q1-N6-B12
cttttcctagctagccctaacacgctccatcactgaagcagcagcagcggtgcctgcacacacaccggatcaccatcaataccagtgaaaaatgaggaggtacagatcccactacagccctaccaggagacaacatgggggtaggggaaggaacccacctcccactaaaggatttggcagcagaccaaccaaccatctttgtcccacatctcacaaacctcacaattacgaaaatatacacacctgctgaactacgatgtacctagagaactgacacaagccctcccaatcaatgggtacacacaccaagcatattatcacacattcatagaccaagatgatagcaggccacgccgaccttgaccgct

SEQ ID NO: 5529 - DNA, 354 bp, Zea mays
  Clone ID: LIB3061-110-Q1-N6-B3
gcctctaccaaagcgtttaacaacatgccagattgctccatagttggtacaacaataccgtgccacatgtaacaatacatgccatggcaacacatcatgcacgtcagcaactagcctcgctacagcctagtagagcatagagataccccaacgtctactaacaagagcagctgcttgcatgcaacccacttgctctcacgaacgtagctgcataccagcaacagcaacagctacaacagtgtctgccaacgctcaatggactagccattgagaaccctgccgactacgtgcaacaacaacaactgctttcatgtaaccccctcgctgtgggcaatgcacctacatacctgcaac

SEQ ID NO: 5530 - DNA, 534 bp, Zea mays
  Clone ID: LIB3061-110-Q1-N6-B6
cacgcctgcgtgaagcctggctcgctaataccagcggtcgacctcagcgtttcgtcaacaagtcaacataacaaagagagaatgcaaaatgcaacatacataataacagtggggaccaatatattatccataattaatgcttcttgctatttatgtatgtaggtgctaaaacgaacaagtcacccctaaatgatcacaagctgctagaggtcccttgttctgccataccttgcatgacagatggctcaatttgtgaaaacccagatgtttacgcctattagcctccaacatagcaattagcaaagaggcaacatacctttatgaccctagaggattcaacaatggtcaaccctattttttgagcagtcattggtacaaatcatgaagacacacaagctgcagaaactcgtgctacctgtgatacaaacaaatagctctggcaaacctttctgcctactctcagcaacaacaatttcttacattctaccaactgtatacactgaagcctgctgcttatttgcagcaacaactaat

SEQ ID NO: 5531 - DNA, 558 bp, Zea mays
  Clone ID: LIB3061-110-Q1-N6-B8
cacgcctgcgtgtaccgggctcctattacacggtcgacctacgcgttcggtgaaaacccaatgctctaacccttcaggtggccaacccgcaaactcatccgcatactaccttattgacccttgactcttcaacaaccgaaaagagtatccagcaatgaccggtggtgcattgaacggcacagaacatgaaagagcaagaactacaacagctagcgctaggaaaccttgctagatactgtcagcaacaggagcatcttgcatgcaaacaactggctgctttgaactctgctgcttgtttgcagcatcaactaccattcattgatgtaggtggtgactacccgcagcaattaattaccttcaacacaactgggctgacagaagtctgcttggtataaacaacagcggcaggtaccaccatatctgactgctagctgatgtgagccctgaagacttcttgacacaacaaccgttgatgtcgttctacctgacagctgcgcctaacgctggcaccctcttacgactgctacaacagctggcattcaaccaacttgctttgac

SEQ ID NO: 5532 - DNA, 631 bp, Zea mays
  unsure (1)..(631): unsure at all n locations; Clone ID: LIB3061-110-Q1-N6-C1
gcctgcgtgtaccgggctcctattacacggtcgaccttagcgttcgtatcttgcatcatataagcacaatagtgtctccatcatggcagctaaaatttttgactccttagctgcttggactttgtggggtgctggtacggataccattgggccacaatgactcacaagctcctatagcttcccttttttccccgtacctgtgaccaacggtgtctggggcatgtgaaaacccaatacgttaaaccctgcaggatccaacaggaagtcgcaggtgtcatacctacctttatgactcttggtcctacaacaatgcatgatgcctattacaggagtaacctttggtgcatgtattgggacagaacataaatggctgaggatctgcaacaacttgtgctatcaaagcttgctgcctactctgaaaatcagaagcttattccattcaaccaactagctgcattgaactatgctttttatttgcaacaacaacaactaccattcagccagatatctgctgcctacccccagccatttgtttcattcaaccaactgacagcattgnaactcttctgcttatttacagcgatcgcaactactaccattcagccagctagctggtgtgagccctgatacc

SEQ ID NO: 5533 - DNA, 647 bp, Zea mays
  Clone ID: LIB3061-110-Q1-N6-C4
cacgcctgcgtgtaccgggcccgctattacacggtcgacctagtcgttcgttgtcgctagggccttatatcagttccgtcaatcatcattcatcttattagttaggcaccaaatcaatctgcaacatcaattatctaactccaaaaaccatgaagctggtgcttgtggttcttgctttcattgctttagtatcaagtgtttcttgtacacagacaggcggctgcagctgtggtcaacaacaaagccatgagcagcaacatcatccacaacaacatcatccacaaaaacaacaacatcaaccaccaccacaacatcaccagcagcagcaacaccaacaacaacaagttcacatgcaaccacaaaaacatcagcaacaacaagaagttcatgttcaacaacaacaacaacaaccgcagcaccaacaacaacaacaacaacaacagcaccaacaacaacatcaatgtgaaggccaacaacaacatcaccaacaatcacaaggccatgtgcaacaacacgaacagagccatgagcaacaccaaggacagagccatgagcaacaacatcaacaacaattccagggtcatgacaagcagcaacaaccacaacagcctcagcaatatcagcagggccaggaaaaatcacaacag

SEQ ID NO: 5534 - DNA, 640 bp, Zea mays
  Clone ID: LIB3061-110-Q1-N6-C5
cacgcctgcagtaccgggccgctattacacggccacccacgcgttcgattgagaccaactagcaacatagaaagcacaatagtgtaccaacaatggcagccaaaatattttgcttccttatgctccttggtctttctgcaagtgttgctaccgcaaccattttcccacaatgctcacaagctcctatagcttcccttcttcccccatacctctcaccagcggtgtcttcaatgtgtgaaaccccaattgttcaaccctacaggatccaacaggcaatcgcaacaggcatcttaccattatcacccttgttcctccaacaaccgtcagccctattacagcagttacctttggtccatttggtggcacaaaacatcagggcacaacaactacaacaacttgtgctagcaaaccttgctgcatactctcagcaacatcagtttcttccattcaaccaactggctgcattgaactctgctgcttatttgcaacaacaattaccattcagccagctagttgctgcctacccccagcaatttcttccattcaaccaactagcagcattgaactctgctgcttatttacagcagcaacaactactacacttcagccagctagctgatgtgagccctgctgccttctt

SEQ ID NO: 5535 - DNA, 551 bp, Zea mays
  Clone ID: LIB3061-110-Q1-N6-C6
acgcctgcatgtaccgggcccctattacacggtcgacctactcgttcgacttcatgcaaggagatgcccgatcaaacagttattatcaaaggctctggatttgtcgtttctctcaactcacgaggaagcgtatatacctatacctgacttgagtgccaccatgaatatatgaaaaaaccatctgtatgtgtgcatgttgccacaacgacctataagatacataactcgatgtgccaaccgcagatatctgatatcgctctgatgttacaataacacgcactctagtcccgatcctgccaatggactccttctatcggctccgttagcaacttctgctgatgggacaaccatccacctgctatatataccccctcagccaccttttgcttgacagcatcaacgttactcaaggcatgaggagctgctggtcctgatatctcaacaaatgcatttccagacctcaacacctacaggggcaacacggtgcacacccaggtattatacgtggagctcgagcccagggtcatgatcctgagccaccatttcagcaa

SEQ ID NO: 5536 - DNA, 572 bp, Zea mays
  Clone ID: LIB3061-110-Q1-N6-C9
cgcaagcattaacgcctttgcccgttgcccgaaaaatgggtgaccaccggagatccggagcgtgagctcaccatgattcaatcagcaccgatgatcctgttggctgaccccaatgagctcgtgtgcgcacaactgccccagtcatgcccccacgaactcattaggtttatgcagcagcatcacatggacgctggcatgaactatggggaactctcccgtcggtgcgtgaacaactaaaccgtgatgtcagtctcacgcagacgcaagaataactggcgcttcggctggcacatctctgagaggatcatgcctacacgacgcctaaacttgtgactgtacgtggtttcacaacgaaatgactgtgaaaacactgtcgctccccaacttaaagcccttggcatacattgtcaagtctgcagctgctgttgagtcaaataagtcacattagatgcggccttgctaactgttgcgcatccagaatggagaccggcgcctgcagctgcattaattaattacgcatctctccgggataggacacctgatatattgcactctcattacattctgctctg

SEQ ID NO: 5537 - DNA, 661 bp, Zea mays
  Clone ID: LIB3061-110-Q1-N6-D10
cacgcctgcatgtaccgggcccgctaatacacggtcgacccactgcgttcggctcgctatgcctacaatgaaatatccacatgtcacataaacataaaaaactgtacaactagtacactgactttgccacacatcttattgtgttttacacatatttgctaacgctttacaaaaccattcttaaaagaactaatgattcaagtgattcacaaaagccttcacaaaaccacttgcaagcttcttgtatcctattgttttaagacagaagctttcattctccagcacatccttacccatggtacttcgttgcgttttgccatcaaagtaacagactgtgcgcattccagtccaaacacctgcatcaaaaataattgttgtttaagtagaaaacctagaactatcattaccaaataatgttattacaaatgccaacaattcttcttggattcccaagaccatgcatatttgacaagtggcataacattaaatagtatagtcaaacaaaatgtgatgtcagaagtatgtcaaatatgtattagtttttatttcctttctgactaatagatatatatctgatgtaaagaaattgtataaaatcaagcaagcggagggcatgtcggctgcttaattctaacttattgcacatcacattaatataaac

SEQ ID NO: 5538 - DNA, 605 bp, Zea mays
  Clone ID: LIB3061-110-Q1-N6-D11
gcctgcgtgtaccgggctcctattacacggtcgacctagtctttcttatttatctaactccaaaaaccatgaactggtgcttgtggttcttgctttcattgctttattatcaatgttttcttgttcacatcaggctgttgctagctgttggttcaacaacaaagccatgagcagcaacatcatccacaacagcatcatccacaaaaacaacaacatcaaccaccaccacaacatcaccagcagcagcaacaccaacaacaacaagttcacatgcaaccacaaaaacatcagcaacaacaagaagttcatgttcaacaacaacaacaacaaccgcagcaccaccaccaacaacaacaacaacagcaccaacaacaacatcaatgtgaaggccaacaacaacatcaccaacaatcacaaggccatgtgcaacaacacgaacagagccatgagcaacaccaaggacagagccatgagcaacaacatcaacaacaattccagggtcatgacaagcagcaacaaccacaacagcctcagcaatatcagcagggccaggaaaaatcacaacagcaacaatgtcattgccaggagcagcaacagactacaag

SEQ ID NO: 5539 - DNA, 619 bp, Zea mays
  Clone ID: LIB3061-110-Q1-N6-D2
cgcctgcgtgtaccgggctcctattacgcggtcgaccttagcgttctttttaacacgccaagcgatgcttcctatcttcactggacaccaatggctgcctgagggttccccctccttgcgcttcttgccctttttgagagcgcagcacctgcgtccattgtttcacatgctcactggctcctagtgtcattataccacagctgcttcgaccagatacttgaatgtgcttgaaacacctaactaatggagcctgcactgttcaacaagcacttgactggagcgtcttacaacagcccactaaccaattgcaaccacaatgcttggtgcatgtaaccatacgaaccatggcagcacaacagcttcgacacagttctactcagcactgagccgaccaaatgtggggaaccctggctgctacttgcatcagcgggcgcttgcatacaacccacttgttatggcaaacgtagctgcttaccaacgacaacaacaattgctacacatgtctggcagcgctgagcgaactagccatgtgtgaaccctgccgcctacctacaacatgcacaactgctttcatctaaccctgtcgttgtgggtaatgcacctacatacctgcagcaac

SEQ ID NO: 5540 - DNA, 587 bp, Zea mays
  Clone ID: LIB3061-110-Q1-N6-D5
cgacgcgcccccgggcatggcgaaccgcagtgttgccatgggcgtggccctcgcgttcgtggccatgaccgcgctctgttgcgcgccgggcgccgcggagttgcccaggctggaccacccggccaggagcgacggatcgctgaagctgctcgtcgtcggggactggggacgcaaggggactcacaaccagtcccgggtcgccgaccagatgggaagggtcggggagaagctcgatatcgactttgttatatccaccggggacaacttctacaaggacggcctcaagggcgtgcgcgaccaggcatttgaagaatcgttcgtggatatctacacagctcaaagcttacagaagccatggtactcagttctaggaaatcatgattacaggggcaatgcgctcgcacagcttagcccagtcttgaggaagatcgacgaccgattcatttgcatgagatcgttcatcgttaacgcagaacttgtggacttcttctttgtcgacaccactccgttccaactggagtattggactcaccctggcaaggatcgttatgactggagaggggtggcgcctcgaggcaagtacatag

SEQ ID NO: 5541 - DNA, 616 bp, Zea mays
  Clone ID: LIB3061-110-Q1-N6-D8
cgcctgctgaaccgggcccgctaatacacggtcgacctacgcgttcggtgatcaaccaagtagctctggcaaacctttctccctactctcagcaacaacaatttcttccattcaaccaactgactacactgaaccctggtgcttatttgcagcaacaactattaccattcaactagccatggtgaaccctatcggctacctacaacagcaacagcttgtttcatctaacccgatcgctatgggcaatgcacctacatacctgcaacaacagttgttgcaacaacagttgctgcaacaaattgtaccagctcttactcagctagctgtggcaaaccctgctgcctacttgcaacaactacttccattcaaccaactgactgtgtcgaactctgctgcgtacctacaacagcgacaacagatacttaatccactagcggaggctaacccattggacgctgccttcctacagcagcaacaattgctgccatacaaccagttctctttgatgaaccctgccttgtcgtggcagcaacccatcgttggtggtgccatcttttagattacatatgagatgtactcgataatggtgccctcatagcggcatgtgtttcctaaa

SEQ ID NO: 5542 - DNA, 615 bp, Zea mays
  unsure (1)..(615): unsure at all n locations; Clone ID: LIB3061-110-Q1-N6-E10
gtcagcctatcaattagctcatcgactccatattggagaactcgacaccatgaagtgctgatcgttgcccttgctctcctggcgctcgctgcgagcgccgcctccagtacaagcggcggctgtggctgccagacaccaccggttcatctaccgcctccgttctatatgccgcctccgttctatctgccgccgcagcagcagccgcagccatggcaataccccactcaaccaccgcagctaagcccgtgccagcagttcggatcctgcggcgtcggcagcgtcggcagcccgttcctgggccagtgcgtcgagttcctgaggcaccagtgcagcccggcggcgacgccctacggctcgccacagtgccaggcgctgcagcagcagtgctgccaccagatcaggcaggtggagccgctgcaccggtaccaggcgacatacggtgtggtcctgcagtccttcctgcagcagcagccgcagggcgagctcgcggcgctgatggcggcccatgtagcgcagcagctgacggcgatgtgcggcctgcagctgcagcagccaggtccctgcccttgcaacgcagctgccggncggtgtctactactngagaaactatgtact

SEQ ID NO: 5543 - DNA, 368 bp, Zea mays
  Clone ID: LIB3061-110-Q1-N6-E3
cacaaaacacagggcacaacaactacaacaactcgtgctagcaaaccttgctgcctactctcagcaacaacagtttctgccattcaaccaactagctgcattgaactctgctgcttatttgcagcaacaacaactactaccattcagccagctagctgctgcctacccccggcaatttcttccattcaaccaactggcagcattgaactctcatgcttatgtacaacaacaacaactactaccattcagccagctagctgctgtgagccctgctgccttcttgacacagcaacatttgttgccgttctacctgcacactgcgcctaacgttggcaccctcttacaactgcaacaattgctgccattcg

SEQ ID NO: 5544 - DNA, 615 bp, Zea mays
  unsure (1)..(615): unsure at all n locations; Clone ID: LIB3061-110-Q1-N6-E5
cacgcctgcgtgtgctgggcagctattacacggtcgaccttatgcgttcgatggtagaaaggtactatatttttcctgggtagccagaacctttaacacaaaagagtttattattgtgacgtataactcataataaatctcataaaagggcccaaccgatgatggggtgtgggtagaacgcttgatgaccctggcaaatccagacagtcataatggctattacagcagcaaccgtaggagcgtgccattgttacgagacatcgtgctgcaacaactgcaacaactggtgctagcaaaccttgctgcctactttaaaccacataagtggctgacaggcaaccaactaggttgatggaactatgcttcttatttgcagcatcaacaactaccatatagacaaatatctgctggctacccgcagcaatttgtttcattgaaccaactgagcagatggaactctactgcttatttacagcagcaacaactactaccattcaaacangtagctggtgtgagccctgctaccgtcttgaacaaacacagttgttgccgttgtaccatgacgctgtgcctaacgctggcaccctcttacaactgcaacaattggtggcattc

SEQ ID NO: 5545 - DNA, 232 bp, Zea mays
  unsure (1)..(232): unsure at all n locations; Clone ID: LIB3061-110-Q1-N6-E8
gcctgcgtgaaccgggcccgctattacacggccgacctacgcgttcgcaacaagcacatagtaagtggaatccagtagcaacaatagagcaacaatggcgaccaagatctttccctccttatgctccttgctctttctgcatgtgttgctaacgcgacaattttccctcaatgctcacaagctcctatagcttcccttcttcccccataccttccatnncaatgatagcttc

SEQ ID NO: 5546 - DNA, 445 bp, Zea mays
  Clone ID: LIB3061-110-Q1-N6-E9
ttgatggccacacacatgcaccagctgaaagttgattcttagtagagcgtccaatgacctaggctctctctatctcgagtgcacaacggtgcctctctaggatgcgcggacaggtgcacaagaggggcatttgatttcagggaagcattggcaccagtgatcttggtctcctttgttctgttgatcactttactcatctagtttgaaagctctatgatctaatcatgttcacggctaatgctggctaatgccttctacattgagaacaggtgatacctattatagccagttaggccattggctgtagcaatttgccttgccatatcctgcaaaggagctgggccaagatagtacttgttgccaattggatctggagtggaaacgaacactaagactcctgtcacagctggtttcaagggatctccttccttgtagaaatgaatgg

SEQ ID NO: 5547 - DNA, 660 bp, Zea mays
  Clone ID: LIB3061-110-Q1-N6-F10
cacgcctgcgtgtaccgggctcctattacacggtcgacctacgcgttcgtataaacacaccatgcgaagcgcactatcaaccaacctatcagcattggctaccaagatataatccgtccttgcgcctcttgcgctttttgatagcgcatcaaatgcgaaacattatgtccactaatgactcacgtgtgctgcctgagctccattatacacacatttatctaaaaacaactgacttgaatggcactaataacacgcctagctgtagcgaaagcgctaataggcctactagacaagacgcacttgtgggcagatgcgatcataactaacatgccagattgctcgcaattagcgaacaacaactaccgtggcacatataacaatacaaaccatggaaacgcatcatgaacgacagctactaccatcacctgcagcctacgctagccatggagatagccctgactcctactagcaacagcagctgcttgcatgcaacccacttgctctaacaaacgtagctgcaaaccagcaacaacaactactgcaacagtttctgccagcgcttaatcaactagccattgagaaccctgacaactagctacaacagcaacaactgctttcatctaacccgctcggtgtggacaatgcacctacatacctgca

SEQ ID NO: 5548 - DNA, 637 bp, Zea mays
  Clone ID: LIB3061-110-Q1-N6-F12
cgcagagcttaacgcctttgcccgttacctgaaaaatgggtgaccaccggagatccggagcgtgagttgaccatgattcaatcagtaccgatggtcctgttggctgaccacaatgagcccgtgaggccacaactaccccagttgtggcgcacacgaacccattagggttatgcagcaggatacatggacgatagatgaactattgggaactctcccgccgcttcgtgaacagctaaaccgtgatgtcagtctcacggagacgaaagaataactggcgcttcggctggcacatctgtgagaggatcatgcctacacgacgtctaagcttgtggctgtacgtggtttctcaacgaaatgactgtgaaatcactgttgcacacaacataaaagcccttagcatacattgtcatttctgcagctggtattgtatcaaataagtcacatccgtatgggccttgctaactgttgcgtatcctgaatggaaaatggcgcctgcagctgcattaattaattacgcatctctccgggataggacacctgatattgtgcactctcattacattcctctctgatgactcatatgtaatccagccccgacatccggcaacagccgttaactcactctgacggggttgta

SEQ ID NO: 5549 - DNA, 504 bp, Zea mays
  Clone ID: LIB3061-110-Q1-N6-F2
cacgcctgcagtaccgggccgctaattacagggtcgacctcagcgttcggtttgatgcatcatggggtgatcctctaggtgggtgctgcattacaccaacaggatctgcactgttgactaacaaagctcgttagcgcagttgctcagagagagctagtgatggccctcagaatgagttgttacctccagtcacatatagaactcagttcgagcttgaacaaaacgtgtcttggcacgacaaatcacatttaacactacagagatgcaaccatatgcatctacatggaaagtgataccaacggctcgctttgaatacaatacaagctggcctgttctgactcgctagcagacagagaatgtcttactactggattaagcctgcaccaaacgagctcttcgcatcttctgattacggatctgatagtgaaaatgttgatgaacttcttggcactgttgcatttcataatgttatcgaaccctctggcgttgctataagtgaacacc

SEQ ID NO: 5550 - DNA, 473 bp, Zea mays
  Clone ID: LIB3061-110-Q1-N6-F3
tgctagggaagggccataatcaaacattacctcacctctagtgcttaatggacctttgaacactcagtaggcacgcatataagctacaacaagcacttgggtgagcgtaattagaacaaccaagtgcgcaattacaacaacacacactctggctcatctaacaattcaacaatttgatgcacaaactgacgatgcatcaacccacctagccggggtgaacgctctttgctacttgcaacaacagttgattaaatacaacccacttgctttgggaaacgtatctggataccaacaactacaacacttaccacaggttgtaacagcgctcactgaactagccatggtgaaccctatacgctacctacaacaagaacaactgatgtcatctagtcccgtcgctatgggcaatgcacctacatacctgctacaacagttgttgcaacaacatgttctgcaacaaattgtaccatctt

SEQ ID NO: 5551 - DNA, 478 bp, Zea mays
  unsure (1)..(478): unsure at all n locations; Clone ID: LIB3061-110-Q1-N6-F4
cacgcctgcgtgtaccgggcccctattacacggtcgacctcagcgttcgattgtanaccaactagcacctatataatgcacagtaaagccccaaccatgagcataacaaaactattattgtctgacctatgcattctatgggcatatctagaaagaggcgtcgctcacggaataccagtgtttgcctggattgaacactggctgctatggcaaaccttgttgccccaaacctatcaccagcggcgtctgcaagatgggacaaacccattggttcaaccctccaggatacaacaagcaactgcagctggcataatacgtttataaccctcagaccatccaacattgcatgaatgcgctattacaacatgcacctgtgatgcatttattggcacaaagcatcatggcacaacaactacaacaacttgtgctagcaaaccttgctgactactctgaataacagcagttgctttcattcaac

SEQ ID NO: 5552 - DNA, 361 bp, Zea mays
  Clone ID: LIB3061-110-Q1-N6-F7
cacgcctgcgtgtaccgggccggctatacagggtcgagctcgctatctgctgtctaccaacgcactttcttatctttaggcaagtgacagactttgaactctactgtttatttacggactctacctctactaacattcaaacaggtggctggcgtgagccgtgctaccttctagacgacgccacatttgttagaacgctgtaccacgagctgcgcctaacgctggcaccctataacaactgcaacaattgctgacattgaaccaactagctttgcacaaacccgacaggattataccgacaaccgattattggcggcgccctgttttagatgtacttatgagtgatagttcaataataaag

SEQ ID NO: 5553 - DNA, 469 bp, Zea mays
  Clone ID: LIB3061-110-Q1-N6-F8
cgcctgcgtgaaccgggcccctattacacggccgacccacgcgttcgtagcacatagaaggacactacgtaccaacggtgggccccaaaatatatagactacctatgctactgggacctttatgcatgagatgattcagagagcgcataccaccaatgatggggcgaggtcctatcgctgccgtgtttgccaaagaccgctgaccaaatgggactaatggatgcaaaagaccaaatggtgcaaccctacaggacacaacacgtgaatgacacggtgacatctgaccttgattaaacaaggtagctagcaactcacaccagctctattacataatggtacctagtgtgtgcgttgcatgtgacatcaaaacatcagggcacagctgccacaacaactagtgctaagaaaaccttgctggctactatcaggaacatgagtgaatggcattcgaccaactagctgcattgaa

SEQ ID NO: 5554 - DNA, 624 bp, Zea mays
  unsure (1)..(624): unsure at all n locations; Clone ID: LIB3061-110-Q1-N6-G11
gcctgcgtgtaccgggctcctattacacggccgacccacgcgttcggcatcatacatagtgaagtacactaagcatcatctttaataccaatggcaagccaacattttagccatcctagcccttcttgctcttttaacaagcgttgctaccgagactattgttccacaatggctcacaacaatacctttatgcggtgacagccgcgagatttgaatacccaactatacaatcctacaggctacaagaggacgtcacattaagcatcttacggtcgggtagcatttgaccgcccaacaaccatatgccctattgcaacaaccattcttaatgaatctatgatctacaaagaatcgcagcacaacaactacaacaacaattgctttcaacaatccaatcaagtagttgcagcgaaccttgctgcttacctccagcaacaacaatttcttccattcaatcaactagctggggtgaaccctgctgcttacttgcaggcacaacaggtactaccattcaaccaacttgtcatgagccctgctgtcttcttactggaacaacagatgcttccattccatctactagttgaggcaaacattgctgctntcttgcaacaacaacaacaattg

SEQ ID NO: 5555 - DNA, 245 bp, Zea mays
  Clone ID: LIB3061-110-Q1-N6-G2
cgcctgcgtgtaccgggctcctattacacggtcgaccttgtctttcttttttctaactatcagcatccatatgtagtactgcactagcgctaacttaaccccaatggaggcacacacatatggccgtcctttccctccttgctgtttgattaagcgttgctagccgctactattggttccacattgctgacaacgatacctagctaccttgacagccccatactatgggatacaccgactatcac

SEQ ID NO: 5556 - DNA, 637 bp, Zea mays
  Clone ID: LIB3061-110-Q1-N6-G7
cgcaagcattaacgcctttgcccgttgcctgaaaaatgggtgaccaccggagatccggagcgtgagttgaccatgattcaatcattaccgatggtcctgttcactgacaacaatgaggcccgaaggccacaattaccccagttgtgcgcacacgaactcattagggttatgcagcaggagtccatggacgatagatgaactgtggggaactctcccgtcggttggtgaacagctaaaccgtgatttcagtctcacggagacgaaagaataactggcgcttcgggtggcagatctgtgagaggatcatgcctacacgacgtctaagcttgtcactgtacgtggtttctcaacgaaatgactgtgaaaacactgttgcacaccaaataaaaccccttggcatacattctcatttctgcagttggtaatgaatcaaataagtcacattaaatgggccttgctaactgttgcgtatccagaatggaaacctgcgcctgcagctgtattaattaattacgcatctctccgggataggacacctgatatattgcactctcattacattctgctctgatgactcattgtaatccagccctcgaatgcggcaagaggcgttaactcactcagacggggttgtact

SEQ ID NO: 5557 - DNA, 591 bp, Zea mays
  Clone ID: LIB3061-110-Q1-N6-G8
cgcctgcgtgtaccgggcccctaattaccacggtcgacctacgcgttcggttttccttttttctccatacctttcataaatgatagctgcagcttgtgataaccgagctgttcagtcctatatgctacacatgcattctcagattgcaacatacctttatcacccttgagggctcaacaatcgacagccctatgtttggagcactcattggttcaaaccataaggggacaaaaggtgaacaatctcgggctacctgagatgcaaccaagtgtttgtcgcaaacctttgtccctactgctagcaccgacgatgtgttacatatgaccaactgtttacactgaaccctgctgtttatttgcaggaacaacttttaccattcaaccagctaggttctggctactctcagggacaacaacttattccattttacgcattgggtcgcactgaaccccgctgcttatttgcagcagcaaatactactaccatttagccagctagctgcagcacaccgtgcttacttcttgacacagcaacagttgctgcctttctaccagcagtttgcggctaaccgcgtgaccctcgtacaactac

SEQ ID NO: 5558 - DNA, 629 bp, Zea mays
  unsure (1)..(629): unsure at all n locations; Clone ID: LIB3061-110-Q1-N6-H11
cacgcctgcgtgtaccgggctcctaattacacggcacgtcctgcatttataaacacaccaagcgaacgcactagcaacgacctaacaacatttttttttgagaataaatctcaatcaatgatattgattgttctttagggaaacacacgtcggagtgagggcaccattatagagctcatttgattttaagccaaaattggcactccaacaagggttgcttccttggcctgacaagcatctttctaagacaaccggtcgtgctggcaacaaattgcttgctgctgagcgaaggacgcaaccaattggtcaaccgctacaacaggatttgccaaatgtaacaattcatgccatcacaccgcaacatcaacaacagttcctaccatcactgaaacacactagccgtggggaagcctgacgtctactcacaagagcagatgcttgcatgcaacccacttgctctagcaaacgtagttgcagaccagcagcaacaacagctacaacagttggtgccaacgaataaacaactagccatggtgaaccctggcgngtacgtacaacaacaacaactggtttcatctagcccactcgctgagggcaatgcacctacatacctgcaacaacaattgttg

SEQ ID NO: 5559 - DNA, 440 bp, Zea mays
  Clone ID: LIB3061-110-Q1-N6-H4
caactccaatggtccatgtggctcaacacgtgcgcactcgcacaccccagggccgatgtgcaggcgaacctgtagtgattgctggaccctgatcctgtgacatagcttgctggccatgaggtatactaccacacatacggcgacgacctactgataccctcagtgccagtcgttggggatggagtgttgctagtgaatgcagcacatggagccagatgctgggcccagtggaccttcaacttgcccctacactgctgctttgagagtagtcctaaaggatgcactgcgagacgatgccggagatccactatagaccagtaactgacgtccatctgcgtgctgtagtagccaaattgatgcccctacgcttgtgcactgaggcgagcagcactgaagaaactatgtgcctgaacttatgccttagatacttagctcactga

SEQ ID NO: 5560 - DNA, 647 bp, Zea mays
  Clone ID: LIB3061-110-Q1-N6-H6
cctgcgggatgctgccgcacagcgcgcaagcattaacgcctttgcccgttgcctgaataatgggtgaccaccggagatacggagcgtgagttgaccatgatttaatcattaccgatggtcctgttcacatgaaaacaatgagcccgaaggccacaattaccccagttgtgcggacacgaactcattagggttatgcagcaggatcacatgacgatagcatgaactattgggaactctcccgccgcttcgtgaacaactaaaccgttatgtcagtctcacggagacgaaagaataactggcgcttcggctggcagatctgtaagaggatcatgattacacgaggtctaagcttgtcactgtacgtggtttcacaacgaaatgactgtgaaatcactgtcgcacacaacataaaaccccttagaatacattctcaattctgcagttggtaatgaatcaaataagtcacatacaatatgggccttgctaactgttgcgtatccagaatggaaaattgcgcctgcagctgcattaattaattacgcatctctccgggataggacacctgatattgtgcactctcattacattcctctctgatgactcattgtaatccagccctcgaatgcggcaagagccattaactcact

SEQ ID NO: 5561 - DNA, 620 bp, Zea mays
  Clone ID: LIB3061-111-Q1-K6-A10
agaatccattagcaacaatagagcaacaatggcgaccaagatttttccctccttatgctccttgctctttctacatgtgttgctaacgcgacaattttccctcaatgctcacaagctcctatagcttcccttcttcccccataccttccatcaattatagcttcagtatgtgaaaacccagctcttcaaccatataggcttcaacaagcaatcgcagcaagcaacatacctttatcgcccttgttgtttcaacaatcaccagccctatctttggtgcagtcattggtacaaaccatcagggcacaacagctgcagcaactcgtgctacctgtgatcaaccaagtagctctggcaaacctttctccctactctcagcaacaacaatttcttccattcaaccaactgtctacactgaaccctgctgcttatttgcagcaacaactattaccatttagccagctagctactgcctactctcagcaacaacaacttcttccatttaaccaattggccgcactgaaccccgctgcttatttgcagcagcaaatactactgccatttagcgagctagctgcagcaagtcgtgcttccttcttgacacagcaacagttgctgccttt

SEQ ID NO: 5562 - DNA, 647 bp, Zea mays
  Clone ID: LIB3061-111-Q1-K6-A8
cccgggccatcgtcatctgccggtttttccatacgcgcaagcgcaacacggcaacagtgccgaccgccgacgaccaaccaaacctgcgaagaggaaagagccgtcgctttcgctacgctcggcagtggaggacacatcttcctcgccgcttctggctttgatccggtcgcatccaacgcacgacctgttgaaccagggcgtgccctcccaggttcctttcttctccgtctccgcgtaggcgtagcgaagaagctaacctagaatcaaagatatcgcacgcaagagggagcaccggagcagcgagccagcgacagcagcagagagaacgccggggccgctcgcctgtctggagagaggaaggaaacaaagagatggacgagatcatgaacaaggtgggcgcttactggctgggacagagggccaacaaggagatctcctcggcaggcgacgacctcgattcgctctcgaccagcgtcggggatggagcgaaatggctggtgaacaagctgaagggcaagatgcagaagccgctggcggacctgctcaaggagcacaacctccccgtgggcctgttcccgcgcgaggcgaccaactacgagttcgtgccagagacgcggcgcctgacggtgtacatcccgtccccctgc

SEQ ID NO: 5563 - DNA, 658 bp, Zea mays
  unsure (1)..(658): unsure at all n locations; Clone ID: LIB3061-111-Q1-K6-B10
cccgggtcgcccaccgtcgcacagcacatanaagtggaatccagtagcaacaacagagcaacaatggcgaccaagaattttccctccttatgctccttgctctttctgcatgtgttgctaacgtgacaattttccctcaatgctcacaagctcctatagcttcccttcttcccccataccttccatcaatgatagcttcagtatgtgaaaacccagctcttcagccctataggctccaacaagcaatcgcagcaagcaacatacctttatcacccttgttgtttcaacaatcgccagccctatctttggtgcagtcattggtacaaaccatcagggcacagcagctgcagcaactcgtgctacctgtgatcaaccaagtagctctggcaaacctttctccctactctcagcaacaacaatttcttccattcaaccaactgtctacactgaaccctgctgcttatttgcagcaacaactattaccattcagccagctagctactgcctactctcagcaacaacaacttcttccatttaaccaattggccgcactgaaccccgctgcttatttgcagcagcaaatactactaccatttagccagctagctgcagcaaaccgtgcttccttcttgacacagcaacagttgctgcctttcta

SEQ ID NO: 5564 - DNA, 489 bp, Zea mays
  unsure (1)..(489): unsure at all n locations; Clone ID: LIB3061-111-Q1-K6-B6
gggcttctcctccccctccggttcggggtcgggttcgtgaggttctccggggttcggtttcgtgggtgggcggatcgaggaggcggcgtcggatgttgagtaccgctgcttcgtcggcggcctcgcctgggccacggtctattcctccctccacaacgccttcagcacctacggggggggggggggagtccaanatcatcctcnatcgggagacgcanaggtcccgcggcttcggcttcgtcaccttctccacggaggaggcgatgcggaacgccatcgagggcatgaacggcaaggagctggacggccgcaacatcaccgtcaacgaggcccagtcccgcggcggccgtggaggcggcggcggcctttttttnggtggccgnggnggcggnggctaccccggngttttgcgccgngatggcggnggnggcttcggcgggggcggcggcggcttccgtggcggnggtggctacggtggtggtggtggcg

SEQ ID NO: 5565 - DNA, 634 bp, Zea mays
  unsure (1)..(634): unsure at all n locations; Clone ID: LIB3061-111-Q1-K6-B9
aacaaccgaatggctaccaanatattagcgcctccttgcgccttcttgccctttttggtgagcgcanctatatgtctgttcattattccacaatggctcacnnttgctcctagtgccattattaccatcatgttcctccgaccagttaccttcaatgggctgtggaacacctgagctgtgncaagcctacnnaggctacaacaagcgcttgcggcgagcgtcttacaacaacccannattaaccaattgcaacaacaantccttggcacantctaaccatacaaaccatcgcaacacaacagcaacaacagttcctaccagcactgagccaactagatgtggtgaaccctgtcgcctacttgcaacagcaggtgcttgcatccaacccacttgctctggcaaacgtagctgcataccaacaacaacaacaattgcaacagtttctgccagcgctcagtcaactagccatggtgaaccctgccgcctacctacaacagcaacaactgctttcatctagccctctcgttgtgggtaatgcacctacatacctgcaacaacaattgctgcaacagattgtaccagctctgactcagctagctgtggcaaaccctgctgcctacttgcaacagctgct

SEQ ID NO: 5566 - DNA, 636 bp, Zea mays
  unsure (1)..(636): unsure at all n locations; Clone ID: LIB3061-111-Q1-K6-C1
tccggcaatttagnaaagcaccaatagtgtaccaacaatgnngcagccaaaatattttgcctccttatnngctccttggtatttctgcaagtgccctgctacggcgacccattttcccgcaatgctcacaagctcctatagcttcccttcttcccccgtacctctcaccagcggtgtcttcggtatgtgaaaacccaattcttcaaccctacaggatccaacaggcaatcgcagctggcatcttacctttatcacccttgttcctccaacaatcatcagccctattacagcagttacctttggtgcatttattggcacaaaacatcagggcacaacaactacaacaacttgtgctagcaaaccttgctgcctactctcagcaacagcagtttcttccattcaaccaactagctgcattgaactctgcttcttatttgcaacaacaacaactaccattcagccagctacctgttgcctacccccaacaatttcttccattcaaccaactggcagcattgaactctcctgcttatttacagcagcaacaactactaccattcagccagctagctggtgtgagccctgctaccttcttgacacaaccacagttgttgccgttctaccagcacgctgcgc

SEQ ID NO: 5567 - DNA, 469 bp, Zea mays
  unsure (1)..(469): unsure at all n locations; Clone ID: LIB3061-111-Q1-K6-C3
gcactacaacaacttagccctgggggggccgggcgtgcctnactctcagcaacagcagtgtggttccattcaaccaactgggtgcgtgtgaactctgctgcttatttgcnncaacaactaccattcagtcagctagctgctgcttttccctcgcatttcttccattcaaccaactgggggggggggggggggctgcttatttacaacagcnccagctaccacctttcagccagctagctgatgtgagccctgttgccttcttgacacaacaacagttgttgccgttctacctgctcgctgtgcctgacgctggngccctnttacgnctgcgncaattgctgtccttctnccaacttggtttggcgtacccttctacgttcttccatcatcccattcttggcggtgccctgttttggattgcttatgtgttgtcggtgcgtnntgncgttttttggttgttgtttgtggt

SEQ ID NO: 5568 - DNA, 321 bp, Zea mays
  unsure (1)..(321): unsure at all n locations; Clone ID: LIB3061-111-Q1-K6-C4
ccacactgagcgcggggcgaccaagaccggggcgtgccggagcgcctcgcgccngccacatgngnggctgacgcgaacaagngccctctatgttttttttctcctatagcttcccttcttccccttgggggggggggggggctcncnttccntgccnaaaacccctctcttggctctcttggcttcaacatgcacttgtgtgngcgacatacctttatcgcccttgttttttctgctctcttcagtcctctctttggtccggtcgttgctgctgtccctcagggcgcatctgctgcatcttctctcgcttcctgtggtcat

SEQ ID NO: 5569 - DNA, 630 bp, Zea mays
  unsure (1)..(630): unsure at all n locations; Clone ID: LIB3061-111-Q1-K6-C6
ccgccactagcacatacaagcggggggggggccaacaatggcagccaaaaatggggcctccttatgctccttgggctgtctgcaagtgctgctacggcgaccattttcccgcaatgctcgcaagctcctatagcttcccttcttcccccgtacctctcaccancggtgtgtggggggggggaaaacccaattcttcaaccctacaggatccaacaggcaatcacagctggcatcttacctttatcacccttgttcctccaacaatcatcagccctattacatcagttacctttggtgcatttattggcacaaaacatcagggcacaacaactacaacaacttgtgctagcaaaccttgctgcctactatttttttcagcagngncttccattcaaccaactagctgcattgaactctgcttcttatttgcaacaacaacaactaccattcagccagctacctgctgcctacccccagcaatttcttccattcaaccaactggcagcattgaactctcctgcttatttacagcagcaacaactactaccattcagccagctagctggtgtgagccctgctaccttcttgatacaaccacagttgttgccgttctaccagcacgctgcgcct

SEQ ID NO: 5570 - DNA, 535 bp, Zea mays
  unsure (1)..(535): unsure at all n locations; Clone ID: LIB3061-111-Q1-K6-C7
ccggcctgncgacgatgatcgggggggggggggtgggcccctacncggnanacctggggcagccgcagngcagcccgctgggggcggcgccctactacgccgggtgtgggcagccgagcgccatgttccagccgcttttttttttttctgccagcagcagatgaagatgatgggggggggggggggggcnncacanctncanatgatgatgcancttgagcgtgccgttgccgccagcagcagcctgtacgagccagctctgatgcagcagcagcagcagctgctggcagcccagggtctcaaccccatggccatgatgatggcgcagaacatgccggccatgggtggactctaccagnaccagttgtccattttccgcaccaacccctgtggcgtttccgctgccattccgccctactactgattcatgatattngggaaatctcctctatccatctctctcttttcttttntgnaatantgcagctgggcgacccacattatcatgtgtggtttgacccttcttttttgcttg

SEQ ID NO: 5571 - DNA, 403 bp, Zea mays
  unsure (1)..(403): unsure at all n locations; Clone ID: LIB3061-111-Q1-K6-C8
cctaaatgcactcctcagtgcacctccgctaggcggcggcgcccctacttaacgccgggtgtgggcagnccgagcgccatgttccagccgctccggcaacagtgctgccagcagcagatgaggatgatggacgtgcagtccgtcgcgcagcagctgcagatgatgatgcagcttgagcgtgccgctgccgccagcagcagcctgtacgagccagctctgatgcagcagcagcagcagctgctggcagcccagggtctcaaccccatggccatgatgatggcgcagaacatgccggccatgggtggactctaccagtaccagctgcccagctaccgcaccaacccctgtggcgtctccgctgccattccgccctactactgattcatgataatttgggaaatct

SEQ ID NO: 5572 - DNA, 113 bp, Zea mays
  unsure (1)..(113): unsure at all n locations; Clone ID: LIB3061-111-Q1-K6-D3
gcgcacgcggctacccagcggggggccgcctgcncagcccaatcctcgggctgctgccgcattgccggccgggggcgnaacngaccgccgccgccgccaaaaccaccttccct

SEQ ID NO: 5573 - DNA, 516 bp, Zea mays
  unsure (1)..(516): unsure at all n locations; Clone ID: LIB3061-111-Q1-K6-D4
ttccctccttatgctccttgctctttctgcatgtgttgctaacgcgacaattttccctcaatgctcacaagctcctatagcttcccttcttcccccataccttccatcaatgatagcttcagtatgtgaaaacccgaggtgggggagcccntatagctccaacaagcaatcgcagcaagcaacatacctttatcacccttgttgtttcaacaatcgccagccctatctttggtgcagtcattggtacaaaccatcagggcacagcagctgcagcaactcgtgctacctgtgatcaaccaagtagctctggcaaacctttctccctacttttttttcaacaattgctgccatttaaccaacttgctttgactaatcctaccaccttattgcagcagcccaccattggtggtgccatcttctagatttttttatgctttatactgtaataataaagttctcatactgatatgtgcaacttctcagtaataaaagattagagatctatattttaagttc

SEQ ID NO: 5574 - DNA, 615 bp, Zea mays
  unsure (1)..(615): unsure at all n locations; Clone ID: LIB3061-111-Q1-K6-D5
ccctacctcccgctgcggacccaggancgnagnngcctcggatccacgcggcgcatnnggcgctggnnagtgggnntggtgctttgggcttacgcgnngcgggcgccggnaggctggtcatttcttgtctgctgcnntgacgctttgccggggctggtacggtggggggggggggnggagggtnctccntggtgccggagcgcgccttcaagcccatgatgtccgtggtgccccttctgcctcttcctgctcatggacatctactggaagtacgagacgcggcccacctgcgacgacgagcacgcctgcaccccctccgagcacctccgccaccacatgtccgtcatgaagtcgcagcgcnacttctttttatgggcgccgcgctcctcctctactccatccttttctccgncacccagctcgtngncaggctcgaccagatgcagctgcgcgtcgacaagctcaagaagcgcgacgactgatggggctcgcgttcgcgcctttcccgtgtccacccgggggtctcgttcttccctcttcctggttttctgtttttttttaatgttggagtgcgggttgtcttaatctcgatcgtgatttgagggatggtgcttt

SEQ ID NO: 5575 - DNA, 616 bp, Zea mays
  unsure (1)..(616): unsure at all n locations; Clone ID: LIB3061-111-Q1-K6-D8
aaatagaaacaaccaatggcggggcaaggaatattttccatcccttatggcgtcctgtgctctttctgcatgttttttgtctaacgcgagccatttttnncctcaatactcacaagtctctctatagtctgcnnccttcttcccccatacccttccatcaggtggggcgggtggtagtatnngtgaaaaccccanncccttcaacccttaccaggatcnccagcaagcaatcgcaacccaagcaacttaacctttatcaacacctgtnntctttcaacnnaatcgccagccctatctttgngtgcanngtcattggtacanaaccatcaggngcagaacagttgcagcaactcgtgctaccagtgatcagccaagtagctctggcaaacctttccccctactctcagcaacaacaatttcttccattcaaccaactgtctatactgaaccctgctgcttatttgcagcaacaacaactactaccattcagccagctagctactgcctactctcagcagcaacaatttcttccatttaaccaattggccgcactgaacccctctgcttatttccagcagcaaatactactaccatttggccagctagctacaacaag

SEQ ID NO: 5576 - DNA, 542 bp, Zea mays
  Clone ID: LIB3061-111-Q1-K6-D9
gcagccaaaaattttgcttgcgtatgctccttggtctttctgcggggttgctaccgcaaccattttcccacaatgctcacaagctcctatagcttcccttcttcctccatacctctcaccagcggtgtcttcatgtgggggggggggaggttcaaccctacaggatccaacaggcaatcgcaacaggcatcttaccattatcacccttgttcctccaacaaccgtcagccctattacagcagttacctttggtccatttggtggcacaaaacatcagggcacaacaactacaacaacttgtgctagcaaaccttgctgcatactctcagcaacatcagtttcttccattcaaccaactggctgcattgaactctgctgcttatttgcaacaacaattaccattcagccagctagttgctgcctacccccagcaatttcttccattcaaccaactagcagcattgaactctgctgcttatttacagcagcaacaactactaccattcagccagctagctgatgtgagccctgctgccttcttg

SEQ ID NO: 5577 - DNA, 644 bp, Zea mays
  unsure (1)..(644): unsure at all n locations; Clone ID: LIB3061-111-Q1-K6-E10
cgcgcannnctctcccctnncttcttgcgcctgtccttggcccccgagggccccacnnccacgcagcgctcacgtagggnngtctaccggcggcgggggacgagnatgnngtgcagcgcctctacctacnncgaaagcgtcacagctacccgcgacaaaatccatatctgttacccggnngtcgtgaagaccccccaggtgggtaagctgggtggggcggaggtgcaccaagnnaagagggcgaagcggnntcccaagtgcccnncgtcaccgggnaagaaagnatccaggggnatnncccccacttgagaacctgccgagtacaagaaggccaggttgntctagggaaccgcaggactgttaaccgtccttatggtggagtactctctggaattgctgttagggagagaattatccgtgctttcttggttgaggagcagaagattgtcaagaaggtcctgatattacagaaaaccaaggacaagacagctgcaaagtagagctccaggaatggaatggaagcctagacactgggagaagtaattctggtgggtggaaaatctgtttgccttgtgtcgagcatttaccctgtgagacatgcctgttgnagtgtttgggtttatagactgggattcctttctcct

SEQ ID NO: 5578 - DNA, 632 bp, Zea mays
  unsure (1)..(632): unsure at all n locations; Clone ID: LIB3061-111-Q1-K6-E12
agcaaaatagnacaacaatggcggccaagnaattttccatccttatgctccttgctctttctgcatgtgttgctaacgcgaccatttttcctcaatactcacaagctcctatagctgcccttcttcccccataccttccatcaatgaccgctttagtatgtgaaaacccagcccttcaaccctacaggatccagcaagcaatcgcaacaagcaacttacctttatcacacctgttctttcaacaatcgccagccctatctttggtgcagtcattggtacaaaccatcagggcagaacagttgcagcaactcgtgctaccagtgatcagccaagtagctctggcaaacctttccccctactctcagcaacaacaatttcttccattcaaccaactgtctatactgaaccctgctgcttatttgcagcaacaacaactactaccattcagccagctagctactgcctactctcagcagcaacaatttcttccatttaaccaattggccgcactgaacccctctgcttatttccagcagcaaatactactaccatttggccagctagctacaacaagccccgcttccttcttgacacaacaacaagtgcttccgttctaccagcagtttgtggct

SEQ ID NO: 5579 - DNA, 564 bp, Zea mays
  Clone ID: LIB3061-111-Q1-K6-E7
ttctcgtcgtgtgcgctggcgtggtgtcagctgccagcgacctctgcaatgcagcatgccctgcccctgcgcggggctgcatggcttgtacggcgctggcgccggcctgacgacgatgatgggggggggggggctgtacccctacgcggagtacctgaggcagccgcagtgcagcccgctggcggcggcgccctactacgccgggtgtgggcagccgagcgccatgttccagccgctccggcaacagtgctgccagcagcagatgaggatgatggacgtgcagtccgtcgcgcagcagctgcagatgatgatgcagcttgagcgtgccgctgccgccagcagcagcctgtacgagccagctctgatgcagcagcagcagcagctgctggcagcccagggtctcaaccccatggccatgatgatggcgcagaacatgccggccatgggtggactctaccagtaccagctgcccagctaccgcaccaacccctgtggcgtctccgctgccattccgccctactactgattcatgatattttgggaaatctcctctatccatctctc

SEQ ID NO: 5580 - DNA, 536 bp, Zea mays
  unsure (1)..(536): unsure at all n locations; Clone ID: LIB3061-111-Q1-K6-E8
acaatggnaagttcaagtggtataataagagacacaccatctggcgatcaggtacttaatgctagtaaagacttgcatggccttcatagtcaaatagatgcttcaactagtctacagtcagaccagaatgcaactgctgtgctgtatggtgggggggacgagacaagcgcaacaataaagaccgagtcttgctactcgagtaatgctgattttgccttctgtgggaacactttcctggaatcatgccagtcgataggtgatgcatctggtggtggatccttcagcagctcagagttgaatgggcaaccactaaacgattcaattttggatatggagtcatcatcatttagcttcttgaaccaaatgccccaaagcttcatgttttcagacctggcagatgatttcaaccaaaatgcagaaataacaccatttctcactcctgagacaaatttctccgattcaacagggggagaccatacaggttgagcgggtcatgcacagcgtaccaaccatttgtacataggcacatgggcagt

SEQ ID NO: 5581 - DNA, 634 bp, Zea mays
  unsure (1)..(634): unsure at all n locations; Clone ID: LIB3061-111-Q1-K6-F1
cgtccgtnagcaacatagnaaagcacaatagtgtaccaacaatggcagccaaaatttttgcctccttatgctccttggtctttctgcaagtgctgctacggcgaccattttcccacaatgctcacaagctcctatagcttcccttcttcccccgtacctctcaccagcggtgtcttcggtatgtgaaaacccaattcttcaaccctataggatccaacaggcaatcgcagctggcatcttacctttatcacccttgttcctccaacaatcatcagccctattacagcagttacctttggtgcatttattggcacaaaacatcagggcacaacaactacaacaacttgtgctagcaaaccttgctgcctactctcagcaacaacagtttcttccattcaaccaactagctgcattgaactctgcttcttatttgcaacaacaacaactaccattcagccagctatctgctgcctacccccagcaatttcttccattcaaccaactgacagctttgaactctcctgcttatttacagcagcaacaactactaccattcagccagctagctggtgtgagccctgctaccttcttgacacaaccacaattgttgccgttctaccagcacgctgcgcct

SEQ ID NO: 5582 - DNA, 641 bp, Zea mays
  unsure (1)..(641): unsure at all n locations; Clone ID: LIB3061-111-Q1-K6-F10
acgtcgaacanaacacatgaagaggtcatcgttctcgtcgtgtgcctggctctgtcagctgccagcgcctctgcaatgcagatgccctgcccctgcgcggggctgcagggcttgtacggcgctggcgccggcctgacgacgatgatgggcgccggcgggctgtacccctacgcggagtacctgaggcagccgcagtgcagcccgctggcggcggcgccctactacgccgggtgtgggcagacgagcgccatgtaccagccgctccggcaacagtgctgccagcagcagatgaggatgatgggcgtgcagtccgtcgcgcagcagctgcagatgatgatgcagcttgagcgtgccgctgccgccagcagcagcctgtacgagccagctctgatgcagcagcagcagcagctgctggcagcccagggtctcaaccccatggccatgatgatggcgcagaacatgccggccatgggtggactctaccagtaccagtaccagctgcccagctaccgcaccaacccctgtggcgtctccgctgccattccgccctactactgattcatgatatttgggaaatctcctctatccatccctctctatctatatatgtaataatgcagtaagacgacacacattatcat

SEQ ID NO: 5583 - DNA, 611 bp, Zea mays
  unsure (1)..(611): unsure at all n locations; Clone ID: LIB3061-111-Q1-K6-F11
attctgcgaactttnctgttttggattggctaaggatggtcctgtcggtgagaagagccatgtgtccacaagagttatgggaacatatggttatgcagctcctgagtatctttcaacaggtcacctaactgcaaagagcgacatctatagctttggggtagtgcttctggagatgctgtcaggccgccgcgccatcgacaagaaccgtccccagggtgagcacaatctcgtggagtgggctcgactttacctcacacataagcgcaagatattccggatcctggatacgaggctggaaggtcaatacaatctgaacggtgcacaaacaattgctgcccttgctctcgaatgcctatcctacgaagctaagatgaggccgactatggacgctgtggttgctatcctagaagagctccagggctctggtgaagccgagaagaagcttcaagaacccaaggccggaaccaaacaggcacctgctgctgtgagtgctagcatgagcagcagccgcaagcctcgccggaaaagtctgggagacacaaaggtcgttggtggtccagatcccaaaccattggcccattctcgttagcaagggaaagcattgcctggtc

SEQ ID NO: 5584 - DNA, 652 bp, Zea mays
  unsure (1)..(652): unsure at all n locations; Clone ID: LIB3061-111-Q1-K6-F2
gcgtccggcnatttcagnaaacacacctcannncgaagcgcactagcaacgnnacctaacaacccaatggctaccaannatattatccctctttgcgncttctntgccctttttgntgagcgcaacaaatgcgttcattattccacaatgctcacttgctcctagtgccattattccacagttcctccctccagttacttcaatgggcttcgaacacccagctgtgcaagcctacaggctacaacaagcgcttgcggcgagcgtcttacaacaaccaattgcccaattacaacaacaatccttggcacatctaaccatacaaaccatcgcaacgcaacagcaacaacaatttctaccagcactgagccaactagctgtggtgaaccctgtcgcctacttgcaacagcagttgcttgcatccaacccacttgctctggcaaacatagttgcataccaacaacaacaacaattgcaacagtttctaccagcgctcagtcaactagccatggtgaaccctgccgcctacctacaacagcaacaactgatttcatctagccctctcgctgtggttaatgcacctacatacctgcaacaacagttgctgcaacagattgtaccagctctgactcagctagctgtggcaaaccctgct

SEQ ID NO: 5585 - DNA, 91 bp, Zea mays
  Clone ID: LIB3061-111-Q1-K6-F4
tccgagcacaagttcgtgctgggaggacagaagaagccggtcgtggggtgcgatggcgcgtctcgaccgcgtgaagaacatgacaggcctg

SEQ ID NO: 5586 - DNA, 603 bp, Zea mays
  Clone ID: LIB3061-111-Q1-K6-F7
acataacattaattaataaaaatgatataatacacaaacattaagtaagaattatagaaagttgaggcaccagtttgtatgcaggattcttcctcctaagagtggaaagctaattagttttaaaccataatccacctcaatatatatgaattaaagtgcatagatgtggcaacaacggtgaagataaacatctatttgtacagcaaacgcaggcttcccaaagcggcatggtcagttcgagctcgccctggggatgccgccgctctgcccatcgcagacgccgtggagcatcgacggcgacgtcgcaggacatgaggtcgcctaccagctggtgacccgaaacacccaggcggcccgccgccacgtcgagataacggccctgacggtgccgacattttggggcagcgggcattgcccggagccgctcgtcatcctaagaaaggcagcacggtggcctgctagtacgtgacgggatctggcagcgcagggaacggggggacagacggcaggagcatgcaccacatcgacgtgaacatggagtgagcgagccaacggataatggcgatgggaatggaggtgccgctggtgggagcagttggcacg

SEQ ID NO: 5587 - DNA, 467 bp, Zea mays
  unsure (1)..(467): unsure at all n locations; Clone ID: LIB3061-111-Q1-K6-F8
ccgccctctctcacaacaatgggggggttgaaccattggccgcactgaaccccggtggttatttccagcagcaaatactactaccatttggtctcttttctacaacaagccccgcttccttcttgacacaacaacaagtgctttcgttctaccagcagtttgtggctaaccgggggggggggggacaactgcaacagttgctgccctttgtccaacttgctttgacaaacccagcagccttctaccaacaacacatcattggcggtgccctcttttagattgcttattagttgtaattcaataatgaagttttttggctgatgtatgtggcctcctagaaaaagaagttatatttccaaancaaaacatttgtgggnaacctttctgcctactctgagcgccatccattggttgccttggaccaggtgtctacactgaaaccctgctgcttattagctgcaacatct

SEQ ID NO: 5588 - DNA, 624 bp, Zea mays
  unsure (1)..(624): unsure at all n locations; Clone ID: LIB3061-111-Q1-K6-F9
ccgcactagcacatanaagcacagggtgtgccaacaatggcagccaaaaattttgcttccttatgctccttggtctttctgcaagtgttgctactttaaccattttcccacaatgctcacaagctcctatagcttccctttttcccccatacctctcaccagcggtgtcttcgggggggggaaaacccaattgttcaaccctacaggatccaacaggcaatcgcaacaggcatcttaccattatcacccttgttcctccaacaaccgtcagccctattacagcagttacctttggtccatttggtggcacaaaacatcagggcacaacaactacaacaacttgtgctagcaaaccttgctgcatactctcagcaacatcagtttcttccattcaaccaactggctgcattgaactctgctgcttatttgcaacaacaattaccattcagccagctagttgctgcctacccccagcaatttcttccattcaaccaactagcagcattgaactctgctgcttatttacagcagcaacaactactaccattcagccagctagctgatgtgaagcctgctgncttcttgncacaacatcagttgttgccgttttacctgcacgctatg

SEQ ID NO: 5589 - DNA, 265 bp, Zea mays
  unsure (1)..(265): unsure at all n locations; Clone ID: LIB3061-111-Q1-K6-G1
tcccggtcgcccagctccgccgcgctccctcctctcgctcgccggagaacaccgccgttgctgctgccgcgtccacgatggggggtttcgtgaagaccctagnccatgcgttttcaacgtttccagtgaaattcagaaggcgggctggcttgacgactcagggccggataaggctgnttaaccnagacatanccagtccaacacacccaattcagatttgttgtgcgatttaccaacaggtacatcactgcncaaatcatttctg

SEQ ID NO: 5590 - DNA, 574 bp, Zea mays
  Clone ID: LIB3061-111-Q1-K6-G10
cgggaagaccaatatgtaccaacaatggcaccaaaaattttgcctccttatgctccttggtctttctgcaagtgctgctacggcgaccattttcccgcaatgctcgcaagctcctatagcttcccttcttcccccgtacctctcaccagcggtgtcttcggtatgtgaaaacccaattcttcaaccctacaggatccaacaggcaatcacagctggcatcttacctttatcacccttgttcctccaacaatcatcagccctattacatcagttacctttggtgcatttattggcacaaaacatcagggcacaacaactacaacaacttgtgctagcaaaccttgctgcctactctcagcaacagcagtttcttccattcaaccaactagctgcattgaactctgcttcttatttgcaacaacaacaactaccattcagccagctacctgctgcctacccccagcaatttcttccattcaaccaactggcagcattgaactctcctgcttatttacagcagcaacaactactaccattcaaccagctagctggtgtgagccctgctaccttcttg

SEQ ID NO: 5591 - DNA, 652 bp, Zea mays
  Clone ID: LIB3061-111-Q1-K6-G3
cccgggctttaaaaaaagattgtcattttaacttctgaaacagaaaaacattagtggactgtgcatataaccttcgtgcggagctagaaaagcagcagcagatgtttctgggctattctccaaaaagagcgcaaagacaggatagaagatgggaacaggtcgatggtgcagagatttaggtctcaactgacccatcagctggatgcattgcataaaactgtatccagttctgtcatgcaacaggaggaccaccttaatgaaatggaacatgatatgcaatcctttgtttcttcaaaagatgaggctgcacaagggctaagagagggtgtgcaaaagctcaaagtcttgcatggttccggtatcactgctctggatgaattagcaggtgaaatcgacatgaactcgcggacaacatttgagagattaaattcacagatacagtcacacacatcagcccttgagaactgtttcggaggaatcgcttcggaagcagataacttgttagatgagcttcagcgcagcctatcgaaacaagaagagaggctagcccatttcgcagtgaagcagagggagggacacctgagagctgtggaagcgtcacgttccatctcaaagacactgctgggttcttccactcgctagatgtccatgc

SEQ ID NO: 5592 - DNA, 562 bp, Zea mays
  Clone ID: LIB3061-111-Q1-K6-G7
agcacaccatgaagagggcatcggtctcgccgtgtgcctgggtctgtcagctgccagcgcctctgcaatgcaggtgccctgcccctgcgcggggctgcattttttgtacggcgctggcgccggcctgacgacgatgatggggggcggcgggctgtacccctacgcggtgtacctgaggcaggcgcagtgcagcccgctggcggcggcgccctactacgccgggtgtgggcagccgagcgccatgttccagccgctccggcaacagtgctgccagcagcagatgaggatgatggacgtgcagtccgtcccgcagcatctgcagatgatgatgcaggttgagcgtgccgctgccgccagcagcagcctgtacgagccagctctgatgcagcagcagcagcagctgctggcagcccagggtctcaaccccatggccatgatgatggcgcagaacatgccggccatgggtggactctaccagtaccagctgcccagctaccgcaccaacccgtgtggcgtttccggtgccgttccgccctactactgattcatgatatttgggaaa

SEQ ID NO: 5593 - DNA, 609 bp, Zea mays
  Clone ID: LIB3061-111-Q1-K6-G8
atggggtaccaacaatggcagccaaaatttttgcttccttatgctccttggtctttctgcaagtgctgctaccgcatcttttttcccacaatgctcacaagctcctatagcttcctttttttccccatacctctcaccagcggtgtcttcagtgtgggggaaacccaattcttcaaccctacaggatccaacaggcaatcgcagcaggcatcttacctttatcacccttgttcctccaacaaccgtcagccctattacagcagttacctttggtgcatttgttggcacaaaacatcaaggcacaacaactacaacaacttgtgctaggaaaccttgctgcctactctcagcaacagcagtttcttccattcaaccaactggctgcattgaactctgctgcttatttgcaacaacaactaccattcagtcagctagctgctgcctacccccagcaatttcttccattcaaccaactggcagcattgaactctgctgcttatttacaacagcaacagctaccaccattcagccagctagctgatgtgagccctgttgccttcttgacacaacaacagttgttgccgttctacctgcacgctgcgcctaacg

SEQ ID NO: 5594 - DNA, 567 bp, Zea mays
  unsure (1)..(567): unsure at all n locations; Clone ID: LIB3061-111-Q1-K6-G9
gtccgtgnaaatttgcaaatcttgggatggtgtttattgagttcatgacgaaagaaaaggaccgtgttttaggattgtggtgtcagctctctttttcaataaccgtaatctcgagacatttgaagttgatattacaaacacaaaaggcttctggaaggtgaacgaggacaggttatagctcaaaaggatgtaattgttgtaggagaatctgcgctgttcactcctgatgatatttcgttcgttcaaaacgctggggtcaaagcggttctcgtcggggaatccctcatcaagcaggaggatccagggaaagcaatctctgggcttttcggcaaagatatctcgcatgctggtgctacctagagacgacgcagaagagcaacataataagccagaaacgctactccgggttgcatcattttgtgtaggtgagaaaatccagcgttgcaatctgaaatccaccctttcgcaaatttttgatcggtcgttctgtctacctgacctgccaacttccccatgctgctattcttttttgcgaccgagccatctctgttattacagattttagtg

SEQ ID NO: 5595 - DNA, 461 bp, Zea mays
  Clone ID: LIB3061-111-Q1-K6-H11
ggattgtgtggggcggtttttggggcttaattaccgtaagctcgcggaagaggtcgttggtcttgcaaacacaaaaggactggcagaacgcgggcgaggacaggccaaagcgcaaaaggggaaaacgccgggaacacaaacagcacaggcactaccagacaaacccccgcccccccaaaacccaagagcaaagaggggataaccgggggcaccccccaaaaacaggccaatccaaagaaaacaaggaacgggccccgcagcgaagcactaaaggaggcgggggcgcccgagagacaaaccggaacaccacaaaatgcgacacccccgccacccccggcggcatcactccccccctggtaaaaaaccaagcgccgcaaggtgaaccccaaaattcaaaaaagggggaaccccccagggagccgactaaacggggcaccgaacccagaccccaaaaaacccca

SEQ ID NO: 5596 - DNA, 595 bp, Zea mays
  unsure (1)..(595): unsure at all n locations; Clone ID: LIB3061-111-Q1-K6-H12
caaatcanaaccttgaactcttaagnaacatagnagcaagaggatcaattttctattagcaagtgtcaggctgaattgaaaggatggatggattaacagctatggacaaatcatatgctttggagcttttcgtatatgcgacaaaccgagagattttcttaacaacaacagagcatgatgttagagaaatttggctcaagcgcaaaattaggttgcttcgtgggagtgatgcatggcctgaacaaatgatatgagcaaaattgcactatgcttccttgcagtacctctttccatctcctgtcgctgcctctaccatatctacctgaaggaacaaatttgagtgcatcttctgttgacagtggctttagttttctattggtgctctagtaagaaaaatagatgtattttattgatggtggcttcacaatctggcacatgactcatgaaaagaagctacaaacattttgttgatagtggctttagtttgtgttgatgcttcagtttgctgatgatgatgcttatactgtcttttactacttcagtttgcttgacaaactattgtgatgacggataaagtgtgatgtgatgctggatg

SEQ ID NO: 5597 - DNA, 666 bp, Zea mays
  unsure (1)..(666): unsure at all n locations; Clone ID: LIB3061-111-Q1-K6-H5
cccattcccggtcgacccatcgtccgcaactagcaacatagnaaagcacaatagtgtaccaacaatggcagctaaaatttttgcctccttatgctccttggtctttctgcaagtgctgctacggcgaccattttcccacaatgctcacaagctcctatagcttcccttcttcccccgtacctctcaccaacggtgtcttcggtatgtgaaaacccaattcttcaaccctacaggatccaacaggcaatcgcagctggcatcttacctttatcacccttgttcctccaacaatcatcagccctattacagcagttacctttggtgcatttattggcacaaaacatcagggcacaacaactacaacaacttgtgctagcaaaccttgctgcctactctcagcaacagcagtttcttccattcaaccaactagctgcattgaactctgcttcttatttgcaacaacaacaactaccattcagccagctatctgctgcctacccccagcaatttcttccattcaaccaactgacagcattgaactctcctgcttatttacagcagcaacaactactaccattcagccagctagctggtgtgagccctgctaccttcttgacacaaccacagttgttgccgttctaccagcacgctgcgcctaacgctggc

SEQ ID NO: 5598 - DNA, 650 bp, Zea mays
  unsure (1)..(650): unsure at all n locations; Clone ID: LIB3061-111-Q1-K6-H7
cgtccggtggnatacagtagcaaaatnagacaacaatggcggccaagnaattttccatccttatgctccttgctctttctgcatgtgttgctaacgcgaccatttttcctcaatactcacaagctcctatagctgcccttcttcccccataccttccatcaatgaccgctttagtatgtgaaaacccagcccttcaaccctacaggatccagcaagcaatcgcaacaagcaacttacctttatcacacctgttctttcaacaatcgccagccctatctttggtgcagtcattggtacaaaccatcagggcagaacagttgcagcaactcgtgctaccagtgatcagccaagtagctctggcaaacctttccccctactctcagcaacaacaatttcttccattcaaccaactgtctatactgaaccctgctgcttatttgcagcaacaacaactactaccattcagccagctagctactgcctactctcagcagcaacaatttcttccatttaaccaattggccgcactgaacccctctgcttatttccagcagcaaatactactaccatttggccagctagctacaacaagccccgcttccttcttgacacaacaacaagtgcttccgttctaccagcagtttgtggct

SEQ ID NO: 5599 - DNA, 463 bp, Zea mays
  Clone ID: LIB3061-111-Q1-N6-A1
ctgctctttcactcaccgtctgtgatgtatccccgaggcccggatgggggacgagttgcctcgtctcgccctatgcttgccactcccgccggcaacgacacgcgcgaggaggatgagatcaccaccgcggaggctcatgtgtgagaaagacgccgcgcggatggacgctgccctcctcatgcggactacgcccaagatggacgagtttcacaccgggggcgatctggactcaactggaagtggaagcggcatctcggggccaagcgcctccaaaagacagctacaaagaaggggatcgtggcggcaacgagtcagcaggtccagcatccatgcttatccttttcctttgtgtttctatttgatctgtaaatttgcccgcgccagcaacagagaagaatgtggcccgtggctgtaatgggtcagcaggtacaccatccacgctcatcatttcctttgcgtttct

SEQ ID NO: 5600 - DNA, 311 bp, Zea mays
  Clone ID: LIB3061-111-Q1-N6-A11
ccttacctgaatgcaccggtaaaaggggtgaaaacccagccataaaccgctacaggatccaacacgctagctgatcatgcaaaaaagatttatcactcgtggtatttacaacagtcaaacaggcctatctttggctcagtcatataaacaaaccattacagcgcaaccaattcgacaactggaacaaacagtgattactcaaagtactctggcacatacctgtctgactactctcagcaacaacaatttcttaacattcaccaactgtctacactgaaccctgctgcttatttacaacaacaacaactact

SEQ ID NO: 5601 - DNA, 541 bp, Zea mays
  Clone ID: LIB3061-111-Q1-N6-A2
cgcctgcgtgtaccgggcccctattacaggcccgactccagcgttcggtaggctcggcgtggatatgcggttatactacttatcacaaatcggtggaagactgatgcgcactactgatgaatagagagatggccgtgtttggcccactggattttttgtcatcatggctgcacaaccaggcctggggagaaatccctctcttttgttcctctgtgggaaaacgctcctaagcacgacacaatagacattttataagcatgccctgaaccatgctcaattcattgctggcattctccttttgataccggcactctgaagcattagggtatgggtacaaacactgagcacatgttccatttaccatatctgctggccagccgctcattgagaaacaaaagccggtcttacagatagcctggtcaacatggatggacatatagctacatttactgaactcaataaatgacgcacaaagtgtgggtatgtgtgggtatcaaggatgctcatggtacactagaccgcctagagaatggcgctggtg

SEQ ID NO: 5602 - DNA, 442 bp, Zea mays
  Clone ID: LIB3061-111-Q1-N6-A3
gcctgcgtgaaccgggctgctattacacggtcgacctcagcgttctttactagcatcatataagtcacattaaagtgccatcaatggttgccgagaagtcccgacctttttgctaaaaggtatttttgaacgtgctgttacaggaacaattaagcgggctgctcacaagctggtatggctgtcctattttccccggacctgtaaacaaaggtggttgaagggtgtgaaaacccaaatttttaaccatatgcgatccaacaggccatcgcagttggcaaattacctcaatcacggttgtttctacaacaatcatggagctcctatcacatagctaccttaaggggcatttattgggacacaacataataagcacaacaactacaacaacttgtgctagcaaaccttacaaactactgtgagtaacaacaagatatttcattta

SEQ ID NO: 5603 - DNA, 564 bp, Zea mays
  Clone ID: LIB3061-111-Q1-N6-A5
gcgattattcgaccaaggaagccgcataacctccgtccatcccatccccgctcgcctctcctctcctcgccccgctctagacgatcgatggccgctacggcggcggaggagatggagaggatggtggaggcggaatgggaggaggggaagcaggggatgaggaagaggaagcggtacgggctgccggagtaccgggcgctgccggcttacctgcgggacaacaagtacatacaccgccactaccgctgcgagtggccgctgccgcaggtgctgctctacgccttctccatccacaacgagaccctcaacgtctggacgcatcttataggattcttcatcggtctcactctccccatatacacaggaacacaagttccaaatgcaacaaatatccggagcttgcagcatttgccaccagcactgagaaaggctcctattcataagattcaagcagcaccttgcgtcatgtcatccgtccttacctcaccttaaagacctacaaaagctgacagatgagctgaagacctcttgcgaatctatggaggaaaaaacatctctgtcccg

SEQ ID NO: 5604 - DNA, 433 bp, Zea mays
  Clone ID: LIB3061-111-Q1-N6-A7
gttgtctgtattataggatcgttaaaacaaaacatcatgaataacgacatcgttctcgtcgggcgccccactctgtaagctgccagcgcctttactgtgcaaatgcccttcccctgcgcggggctgcagggcttgtacatgcgctaactccagcctgacaacaatgatgggcgccggcaggctgtacccctacgcgtgtacctgaggcatgcgcagtgcataccggtggaggccaccccctactacgccgggtgtgggcatgcccatcgccatgtggcatgcgatcctggaacagcactacctgctgctgatgatgattaaggacttgctctcccaggctcatcatctgcagatgatgatgcatctagagcgtgccgatgtcgacatcatgagcctgtaccagccagctcttattcatcatctgctgcagctg

SEQ ID NO: 5605 - DNA, 580 bp, Zea mays
  Clone ID: LIB3061-111-Q1-N6-A8
cacgcctgcgtgtaccgggcccctaatacacggccatccttagctgccggttttttcatacgcgcacgtcgcatcacggtatacaggtgctcgaccgtctgagaccaaccaaaccatgcgacagaggaacgagccgtctcttacgctacgctcgcacctggaggacacatcaagcttgacatttttagattagatccgaaagcaataccaactcacggagctggcgaactcatggcacatccctaacgggtgcctatcttattcctgctactgaaagcatcaacgatataactctatacactagactgaaaatatcacacacactgagcatcactgtaacaccgagccaccaacatcagctaaaacaacgccacggccattcccctgtttgcgacagaggaaggaaacaaagatatggcaactatcatgaacaagggaactatgctggacagaggccaaggagattctggcaagaaaaccttatcttctccccagcacctgcgatggagcgaatggctggtgaacaagctgaacggcaagatgcacaagccgttggaggacctgctgaaggagcacaacc

SEQ ID NO: 5606 - DNA, 550 bp, Zea mays
  unsure (1)..(550): unsure at all n locations; Clone ID: LIB3061-111-Q1-N6-A9
acgcctgcatgtaccgggctcctattacacggtcgacctcagcgttcggagcttataacagttgtgaagggctgagtggggtaagactaccaatggcccaaagctcacttagccttatcatttgaaatcagttgcttgaaggatgacaagattgaactacttactggtgataaacctaaacgttatgctcttagatcatgaccacaaaaatgaaacacacatgatatgaatctgtaggaacaagtaacaatgcactgacncaccttgaaatatctgacatgaactcatgacgtaatacattctcgtgagaccagtgcttatcgcctatgaatcatactagcagtatcattcatatgccttcttagcaaagcgcacacatatatgcactgagataaattattgcacgacaatcgttctatgctgatataagctataaatatgattattacaaacaccctaaattgacgataaaaatgagctctactaatacatacagcagttgttcatgtggctagtgtcaactcctacactgtgcattcttgaataaaaa

SEQ ID NO: 5607 - DNA, 556 bp, Zea mays
  Clone ID: LIB3061-111-Q1-N6-B1
gcctgcgggtgccgggccggctattacagggtcgacctcagcgttcgtgctgccagttcgccacccggcgcgccgggccgacgccaccgggacggggccgctcctgccggtcgccactcgcgcggtggtggcggagttcgtcgccacagccatgttcgtgttcgccgccgaaggctccgtctacggcctctggaagctgtacaaggacacggcaacgccgggcggcctgctcgcggtggccatcgcgcacacgctggcgctggtggccgcggtggcggtagcgagcaacgcgtcgggtgggcacgtcaaccctgcggtcacgttcggcctgctcgtgggccgtcgcatctctttcggccgtgccgcggtatactggctcgcgcagatgctcggcgccgtggtcgcgtcgttgctgctaacgctcgtctccggcggcacgcgtcccgtgggcttcgggctcgtccgcggcgtccacgagcgggacgcgctcctgctagaggccgtcatgacgttcgggctcatgtacgccgtggacgcccaccgggggggatcaccc

SEQ ID NO: 5608 - DNA, 496 bp, Zea mays
  Clone ID: LIB3061-111-Q1-N6-B10
cacgcctgcgtgaactgggctcctattacacggtcgaccttagctttcttttcatgaaacatggaaaagtggcttccatatttctcatcggacccacacatgataccaaaatctttattcctcgcttatgctcttagctgtttttgaatggggggctcccgcgacgatgtgtccttagtgctcacgaccttctatctgtcaaattagttccacaacgtcacataattgatggcttgaaagagggaaaacccatctagcccagaacctagttgctccaacgagcaatctgaggatgcaacatacatgaatcacccttggttgtacatcactcgctaaacctatctttggtgcactgcttgaaacaaaccatgagggcacagcagctcaattcaactaatgctacctgtgatcaaccaagtaactctggcaaacctttctgcctactttgagaaacaacaatttgttacattcaaccaactgtctacactgaaccctg

SEQ ID NO: 5609 - DNA, 327 bp, Zea mays
  Clone ID: LIB3061-111-Q1-N6-B11
taaatgactgatgagacacatgtgccttctctatcacataggagaacctcagatctccaatataacgcacgttgcgaacataataaaactttaatgcaagcccaatctgctttcaatattgatgatactaatgaccaaactgtcgaagcaagcttagttcaggagaaaattctacaatgacatccataaaaatggtgggcgagggattgaccactaaataatacataacatctaaaaacaactcataatgctaaggaagtatccaacgtctctgaaaaacatcttgaactccataagctgatagagcccttagagtcattagtctac

SEQ ID NO: 5610 - DNA, 553 bp, Zea mays
  Clone ID: LIB3061-111-Q1-N6-B2
cgcaagcattaacgcctttgcccgttacccgaataatgggtgaccaccggagatacggcgcgtgagttgaccatgattcaatctgtaccgctggtcctgttggctgaccataatgagctcgtgtgcgcacaactgccccagttatggccccacgaacccattatggttatgcagcaggattacatggacgctagatgaactgttgggaactctcccgccgcttggtgaacagctaaaccgttatttcagtctcgcggagacgaaagaataacttgcgcctcgtgttgcagatctctaagaggatcttgcctacacgacgtctaaacttgtggctgtacgtgttttctcaactgaaattactgtgaaatcactgttgctcaccacattaaagcccttagcatacattctcatttctgcagttgctattgaatgaaataagtcacattaattgggtcttgctaactgttgcgtatcctgaatggagaattgcgcctgcagctgcatttattaattacgcatctctccgggatatgacacctgatatattgcactc

SEQ ID NO: 5611 - DNA, 350 bp, Zea mays
  Clone ID: LIB3061-111-Q1-N6-B4
tatgtctcatagtacacgcactaactttgctaggaatagtggtcactttcgctttatagcatatacccataactgtaacacactcgagcccataactcgtgtagtcaaggcactatagtcatgataagcatacaagacaggggcgtcagtaatcaagataacgctgtaggggacagctttttgttagatatagctagtgcaacactctgtagtgatattggtacttgtgacaagctttcggtaggttcctcttgaggatctacagtgaacactacttgcactggctactgatcaaacagaaacacctggatctgtgtattccacaccacataaggttgcctataccccac

SEQ ID NO: 5612 - DNA, 130 bp, Zea mays
  unsure (1)..(130): unsure at all n locations; Clone ID: LIB3061-111-Q1-N6-B5
tgtggcaaacttgttgctttcttgagacacaactttgttgccattttacccacaagttgtggtgaaacattaatgccttcttgcaacagcaacaattgctaccattctacccacagnatgtggcaaaaca

SEQ ID NO: 5613 - DNA, 615 bp, Zea mays
  Clone ID: LIB3061-111-Q1-N6-B8
cacgcctgcatgtaccgggctcctattacacggtcgacctcagcgttcgtttaaagcacatattgttccaacaaaggcacttaattattttggctactccagctccttggtctttatgcttgtgctgttaccgctaccttattgcaacactgctcacaggctcctactatttcccttcttcccccgaacctttcaccaactgggcaaatcaggatgtgaaaacgcaattctttaaccctacaggaaccagcagccaatcttaggtgcaatgttaccttaataaccctacatcttccaacaatcataaaacgtattacagctcacaccatttagtgcatttattggcacaaaacatcaggtgctcaacaactacaacaacatgtactaccaaaccttgctggctactatcaacaacatcaggttctgccatacaaccaactatctgcattgaactctgcttcttattatcaacaacaacaactaccattcatccagctatctgctgactacccccagcaattgcttgcagtcaaccaactgacatcattcaactctcctgcttatttacagcatgaacatctactaccattcatgcagctagctggtgtgagccct

SEQ ID NO: 5614 - DNA, 551 bp, Zea mays
  Clone ID: LIB3061-111-Q1-N6-B9
acctagcaacgacttaacaacaatggctaccaagatattagccctccttgcgcttcttgccctttttgtgtagcgcaacaaatgcgttcattattccacaatgctcacttgctcctagtgccattataccacagttcctccgaccagttacttcaatgggcttcgaacacctagctgtgcaagcctacaggctacaacaagcgcttgcggcgagcgtcttacaacaaccaattaaccaattgcaacaacaatccttggcacatctaaccatacaaaccatcgcaacacaacagcaacaacagttcctaccagcactgagccaactagatgtggtgaaccctgtcgcctacttgcaacagcaggtgcttgcatccaacccacttgctctggcaaacgtagctgcataccaacaacaacaacaattgcaacagtttctgccagcgctcagtcaactagccatggtgaaccctgccgcctacctacaacagcaacaactgctttcatctagccctctcgttgtgggtaatgcacctacatacctgcaacaacaa

SEQ ID NO: 5615 - DNA, 627 bp, Zea mays
  Clone ID: LIB3061-111-Q1-N6-C1
cacgcctgcgtgtaccgggcccctattacacggtcgacctcagcgttcggtttcataaaagacacaatgagcgttccactttgggggacgaccatactgcctccttatgctccatggttgaactgtaactgctgatacagcgaccatgggcccccacgcgcaaggctgctgtagcaacactgcttggcccgtaccagtaagcagcggggatggcagcatgtgaagaaccagtaatagggccctacaggatccaacaggcagctggaagaaccgtaacacctgtatcagccttagagaatgtcaacaaggcatcacaccctattacatgactgacctgaggagcatttactggctcaaatcagcagggcacatcaacgacgacaactggtgctatcgaacaaagctgtctactctgaccaccagcagctggttgcatggaaccaactagctgcatagaactcagcttcttataaggcacatcaacaactaccatgcaaccaactacctgtggcctaccccgaacaatggcttgcattcaaacaactgggaacatggagctcccctgcgtattgacagcatcaacaactactagcatccagccagctagctggtgtgagccctggtacc

SEQ ID NO: 5616 - DNA, 406 bp, Zea mays
  Clone ID: LIB3061-111-Q1-N6-C10
cacgcctgcgtgtaccgggccgctattacacggtcgccctagctagctgctgcctacccccatcaatttcttccattcaccaactggcagcattgaactctgctgcttatttacaacagcaacagctaccaccattcagccagctagctgatgtgagccctgttgccttcttgacacaacaacagttgttgccgttctacctgcacgctgcgcctaacgctggcaccctcttacaactgcaacaattgctgccattcaaccaacttgctttgacaaacccaacagcgttctaccaacaacccatcattggtggtgccctcttttagattgcttatgagttatacttcaataatgaagttttttggatgatgtttgtggcttcccagaaataagaaagtacatttct

SEQ ID NO: 5617 - DNA, 495 bp, Zea mays
  Clone ID: LIB3061-111-Q1-N6-C11
cacgcctgcgtgtactgggctcctattacacggtcgaccttagcgttcgtgcgctgcttgcgctttatgcgagcgcaacatcagcgaatatttgtcatttgttggctacactatgcgggacagagggccccattttctactacctgttacttgaatgggataagatacgcccctctaaccaagggtatctgcttcaacaagcaatggctgataaagtataactgcatccatggcaccaattgctgctcttcctgagaggcatgtacaatgcatacctctgatacagcattaacaacctgttctacctgctctgagtccccataacatggtgaactcctgccgtctacttaatgacagcagttgcttgcattaaacccacttgctctgcacaacttagttgctaaccactcgcacaaactgttgcaacaattgttgtcagaggtctgtcaactaattatggagaaccctgccgcttaactaaaacagctacaactg

SEQ ID NO: 5618 - DNA, 663 bp, Zea mays
  Clone ID: LIB3061-111-Q1-N6-C12
cacgcctgcagaaccgggcccctaatacacggtcgacccagtcgttcgattttgagcattcattaaacacaccttagcgaacgcactatcaacgacctaacaacaatggctaccaagatattatccctctttgcgcttcttgccctttatgtgagcgcaacaaatgcgttcattattccacaatgctcacttgctcctagtgccattattccacagttcctccctccagttacttcaatgggcttaaaacacccagctgtgcaagcctacaggctacaacaagcgcttgcggcgagcgtattacaacaaccaattgcccaattacaacaacaatccttggcacatctaaccatacaaaccatcgcaacgcaacagcaacaacaatttctaccagcactgagccaactagctgtggtgaaccctgtcgcctacttgcaacagcagttgcttgcatccaacccacttgctctggcaaacatagttgcataccaacaacaacaacaattgcaacagtttctaccagcgctcagtcaactagccatggtgaaccctgccgcctacctacaacagcaacaactgatttcatctagccctctcgctgtggttaatgcacctacatacctgcaacaacagatgctgcaacagattgtaccagctctgact

SEQ ID NO: 5619 - DNA, 570 bp, Zea mays
  Clone ID: LIB3061-111-Q1-N6-C3
cacgcctgcagaaccgggcccctattacacggtcgacctcagcgttcgcaactacaacaactaagagctcatgaaaccttgtctggctaactctcaaccacaacacaaaataccatattaaccaaacggttgcttatgaaccctgctgattatgggccacaacaactaccatcagtgagataactgctgtctacccgccgaaacaagttggcattaaaccaactggcagcattagaactctgcaggttatttacaacaggcaacagcgtaccacgcattaacggcaactacctgatgtgagccctgaaggctaccttgacacaacaacactatgttgcctgaatacctgcacgctgggcctaacgcttaaaccctcttacaactggcacacatgctgccatataaccaacatgctttgacaaacccaacaactttctaccaacaacccatcattggcggcgccctcttttagattgcttatgagtcatagggcaataatgaagaaacttggatgatggataggggttcccagaaataataagaccatttgtaaaaaaaaaaaacacaaaa

SEQ ID NO: 5620 - DNA, 391 bp, Zea mays
  Clone ID: LIB3061-111-Q1-N6-C4
gcaaagcccagccgcttcacacgcatgttaggaatggcacaagctgtcgcatgaggcaacatacctttatggtcgttgctgctagaacaataaacagccctatctttggctcctgcatatgaacaaaccattaagcacaaccactgcagaaactggagctacctctgatcatccaagtagctctggcctacctttctacctactctcagcagcagcagtttcttacatgcaaccaactgtgtacactgaaccctgctgcttataagcagcaacaactattaccatttagccagctagctactgcctactgtcagcaacaacaacttcttacatttaaccaattgggcgcactgaaccccggtgcttattagcagcaccaatactactacca

SEQ ID NO: 5621 - DNA, 473 bp, Zea mays
  Clone ID: LIB3061-111-Q1-N6-C8
cgcctgcatgtaccggtcccgctaattacacggtcgacctactcgttctataagaagcccatgccggagaaccatcgtctgcattttgttctgttttcaccgtcattcgcattgttagtcgtgtattggagttatgtgttacttggtttccaagaactttggttccttgtttttttttctttcttgtttgagcgtttttgggcagcgctggcctggttcctagtatggtgagaattggctgcaccttttgcttcgaataaaaatgcctgctcgttcacctgtgaaaaaaaaaatccaaaaaccaacataaaaatgggaatttgggggaaaaaaaaaaaaaaaacccgggaaaggttttcccgcccgggtttttttttaaaggggggggggttttagagatttaaggtcccgtcccctggggtgcaacaatttttttttttttgggggcccttaaatctagtgaattgcccggg

SEQ ID NO: 5622 - DNA, 630 bp, Zea mays
  Clone ID: LIB3061-111-Q1-N6-C9
acgcctgcgtgtaccgggctcctattacacggtcgaccttttctttctttccttctaacaacaaaaaagctctttttggaccctatcttgtcagccatcttattgagggctcctccgctgcctgggtctttgtgcaaacactgctgcggttagcatatcacgctggtgctcacaaactactattggtagccttattacggcatccctgttaccagcaatgtgctcggtatacgaaaacacaagttttttaccctacaaggtccaacgggtcacagcagctagcttgcttgactggtatcaccctgttgttcttcaacaataatcagacctattacagctgccacctttggtgcatgtatagactcacaacattagggcacaactacttcgacaactggtgctagctaaccttgctgcctactatcagcaacagtcaatgcctctggtgcatttgttggcacaaaacatgatggcacaacaactacaacaacgtttgctagcaaaccttgctgactactctcagccacgacagtttgctgccattcaagcaactagctgcattgaactctgctgcttatttgcagcagcatcactactaccattcatgcagctagctgctgcctacccccg

SEQ ID NO: 5623 - DNA, 611 bp, Zea mays
  Clone ID: LIB3061-111-Q1-N6-D11
cacgcctgcgtgtaccgggctgctattacacggtcgacctcagcgttcgtaccatcttggcgaacgatatcccggggccgctgccttcctatgcgtgtctcgcattggcgcacattccgagggagccaccgcatacccaacgatcctggtggtgcggtcttctccgccacaaaagagagagatcggcgccacccaaaggggctgacccggagaggaagactctgttggtgccgtccgatgagggctagaccatttgtgagggcatcacttacaaggtcagagcactgctcgcgactaccatacacggtgccccacgatctattaaagtgctcgaccgcaaccacttgctcagcctcaggaaggtcaatgcagattaagccggagataccaactttaaacctgatcaaacatgccactgcgttacaaatgtatgaggctatagatagcagaactaatattacatggtgctagcattcaatgatagaggcgagctatgctatcagaccgtgaatcctggaaggctacgagaggacgaaactaggatatactatcatcaactctataaatgcaagacattattgacgtagccgtagagagcaccataaagacct

SEQ ID NO: 5624 - DNA, 559 bp, Zea mays
  Clone ID: LIB3061-111-Q1-N6-D4
cgcctgcgtgtaccgggcccgctattacacggtcgacctatgctttctttttgcgacatcaaaactacaacggctaacattatattactgcctacttgtgcttcttgctctgagagacttgattagttcacgctacagttttacctaattgctaacatggtaccatcgatggcgtgctgctgccataccgtggctggatgatagctaccaagtgggaaaaccggcctctttagccctatatgctagaacgggcaatggcttgccgcaacttccctgtataacacttgttgctccaacagttgccagccctgatgctctgtgggtcgtcggtacaaaccatcaaggcacaggatgtgcagcagctaaagctacctgtgatcaaccgagtagctctggctgaccttgcttcctactgtcaacaacaacaattggtggcatttaaccaacctgcttcgacgatatgctaccaccttattgcgaaaaaccaacactgttggagccatctgctagatgggaaatgctcgatactgcaacacttacgttctgatactgatatgtg

SEQ ID NO: 5625 - DNA, 583 bp, Zea mays
  unsure (1)..(583): unsure at all n locations; Clone ID: LIB3061-111-Q1-N6-D5
cgacgcaaccgatccccaaatccccaatcttcccagttccctcctcccgctcgacccagatcgaggcctcgatccaccggccatggcgctggagtgggtggtgctgggctacgcggcgggcgcggaggcggtcatgctgctgctgctgacgctgccggggctggacggcctgcgccggggcatggtctccgtggtgcggagcgcgctcaagcccatgatgtccgtggtgcccttctgcctcttcctgctcatggacatctactggaagtacgagacgcggcccacctgcgacgacgagcacgcctgcaccccctccgagcacctccgccaccacaagtccgtcatgaagtcgcagcgcaacgcgctcctcatcgccgccgcgctcctcctctactggatcctcttctccgtcacccagctcgtcgtcaggctcgaccagatgcagcagcgcgtcgacaagctcaagaagcgcgacgactgatggggctcgcgttcgcgccttccccgcgtccacccgngtggtctcgttcttccctcttcctcgtatttctgtttttttttaatgttggagtgcggatgtctt

SEQ ID NO: 5626 - DNA, 497 bp, Zea mays
  Clone ID: LIB3061-111-Q1-N6-D7
gaataatgggtgaccaccggagatccggcgcgtgagtgcaccatgattcaatcattaccgatgatagctgttgactgaccataatgagttcgtgtgcgcacaactgccccaatcatgggcccacgaagtcattgtttttatgcagcaggagttccatgacgatagatgaactgtgtggacctctcccgtcgcttcgtgaacaactaaaccgttatgtcagtctcacggggacgaaagaataacttgcgcctcggctggcacatctgtgagaggatcttgcttacacgacgtctaaacttgtgactgtacgtcgtttctcaacgaaattactgtgaaatcactgttgctacccacataaatgcccttggcatacattgtcctgtctgcagctcgtaatgtatgaaataagtcacattaattcggccttgctaactgttgcgtatccagaatggagaactgcgcctgcagctgcattaattaattacgcatctctccgg

SEQ ID NO: 5627 - DNA, 534 bp, Zea mays
  Clone ID: LIB3061-111-Q1-N6-D8
cacgcctgcgtgtaccgggctcctaattacacggtcgacctattctttcttttcagtcacataggaaagtgtaactcattattcataagagggcacctacgtcagccaaaatattttatcatccttatgctccttgctctttctgtatgagaggtaacgccacacattgtttctcaatactgcaaaggctcttatatctgcaattcttgtcgccatacatggccatcaactgactcgcatttgtaatgagaaaacccagtctttcaacccttcatgatccaacaggcactcttgacaggcaactaacattgatcacacctttgctttcaacaattggccaacctatctttggtgcagctattggaacaaaccataagggctaaaacaggtgcatcaactcaagctaccaaagatcagccaattagcatctggcaaacctttccccctactctgagcaacaacaatttctttcattcaaccaactgtgtatactgaaccctgctgcttatttgcagcaacaacaactactaccat

SEQ ID NO: 5628 - DNA, 310 bp, Zea mays
  Clone ID: LIB3061-111-Q1-N6-D9
aatggctatcaatgtgttgaaacctgcaataagggtaaccactacatagatcataacagggcatgtgagaaacggcatcaacacgatgttgaccattaaggctccaacattcacataacctattacattaaatagcattagtccatgttgctgtacataacatcaaggatcaaaagctactacatcttggaatggaaaaaattgctgggatactggtaagcaactacctgccttaacgttcaaccaactggcaaatatccaactctgttcattacttccaacagcaataacgaaaaaacctgctgtttgt

SEQ ID NO: 5629 - DNA, 638 bp, Zea mays
  Clone ID: LIB3061-111-Q1-N6-E1
cgcctgcgtgtaccgggctcctattacacggtcgacctagtcgttcgtttcaattaccaggccgtgtgcttcatcacgaactgtgccataagcatcactcatgtactggagccttgatcgacaacctccgcaacaggagcatggccgtgtacggcacacacaacctcaactagcctaacacaatataatgcagggtgcatggcagaatgcacttcttcagcaatgttgttggcagcagccccaacatactacagggggcatgtgtctactactatagatagccctcaaacttaaaaaattgtgatgaattcctaatgcatcacatcggtcctttggtaatgccttctgtacaatcacttgagctacaaccaagtaggtttcaggtattgcttgagcatgatgtgtgtatctataagcacatcgagccacgatacattacaccaagcgaatctacagcatggttcaatccataatgcaagaggggcttcaccaacggctctgctagttatgtgggtctcaacgagcttctcatagagcggaggcactgttgacagcagcacagttcctaccatgaatgtgcggcttgctccactcatactaccaaaataatccatgcagcatcactgacattagtggtg

SEQ ID NO: 5630 - DNA, 627 bp, Zea mays
  Clone ID: LIB3061-111-Q1-N6-E10
cacgcctgcgtgtaccgggccggctatacggggccgtccgtgccgtcgtgcatctctcccctcttcttgccctttcttccccccagtccccaacccacgcaggctcactaggggtctaccggcggctggggacagagaggggccccgcctcacctcaccgaaaggggacaggtgacgcgcacaaattcaatcaaacccgtggtcgagaagaccccaagagggaagcttgtgtaccaatacaccaagaagagggcgagcggccccaagtgccccggcaccgggaagaagatccatgggatcccgcactcgagacctgccgagtgcaagaggcccaggttgtctaggaaccgcaagactgttaaccgtccttatggtggagtactatatggaattgctgatagggagagaatcatccgtgctttattggctgacgagcagaagactgtcaacaaggccctggatattcagaaaaccgaggacaagacagctgcgaaggagagctccaggagtggcatggaagcctatacactgcgagaagtaatcttgggggctggaaaatctgtttggcttgtgtggagcatatagcctgcgagacatgcctgtagaagcgtgtgaggatagagactg

SEQ ID NO: 5631 - DNA, 496 bp, Zea mays
  Clone ID: LIB3061-111-Q1-N6-E12
ccttgctttccccacatacctatccatcaatagaccgatggtaccatgctgaaaacccagcccttcaaccctacaggatccagcaagcaatcgcaacaagcaactgacctttatcacacctgttctttcaacaatcgccagccctatctttggtgcagtcattggtacaaaccatcagggcagaacagaagcagcaactcgtgctaccagtgatcagccaaatagctctggcaaacctttccccctactatcagcaacaacaatttcttgcattcaaccaactggctatactgaaccctgctgcttatttgcagcaacaacaactactaccattcagccagctagctactgcctactctcagcagcgacaatttcttccatttaaccaattggccgcactgaacccctctgcttatttccagcagcaaatactactaccatttggccagctagctacaacaagctccgcttacttcttgacacaacaacaagtgct

SEQ ID NO: 5632 - DNA, 413 bp, Zea mays
  Clone ID: LIB3061-111-Q1-N6-E2
gcctgcttaccggtccgctttaagggcgcctacctcgtgcttatttcgactaatactactaccatttaccagtagctgcagcaaaccgtgcttccttcttgcacagcaacagttgctgcctttctaccagcagtttgcggttaaccccgcaaccctcttacaactacaacaattgttgccctttgtccaacttgctttgacagacccagcgggctcctaccaacaacacattattggtggtgccctcttttagattgcttattagttgtaattcaataataaagttttttggatgatgtatgtggccaaccagaaataagaagtttcatttccaaagaaaaaatcttattattttaaaaaaaaaacccattttctcccgctaacagaccaaaagggctacttttttccccagg

SEQ ID NO: 5633 - DNA, 489 bp, Zea mays
  Clone ID: LIB3061-111-Q1-N6-F1
cacgcctgcatgtaccgggctcctaattacacggtcgacctagtctttcgtttcaacaatataaaaacaactttgtcatacatgggaagccaaaacattagcctaaatatgcttcttggaccttttgctaatactaattctaaaacagtcaccaccaatgctgacaagctgctataactctccttgtttcgccaaacctagtaccatcaatggcttcaatttgtgaaaacccaattaggtaaccctattagatccaacatgctattacaactggaataattacctgttatcaccacttagatgcgccaacaatcataccagcctatctacagtaaatagccttaggtgcatttattggcacataaacatgagagcacaaaaactacaacaacttgaactaaaaaaacttgttggcgtatgctaaaaacaacaggctgtatcattcaaccaactagctgcaataaaatctgcttcttatttgcctcaaca

SEQ ID NO: 5634 - DNA, 640 bp, Zea mays
  Clone ID: LIB3061-111-Q1-N6-F10
cacgcctgcatgaaccgggccggctaataccgggctcgacccacgctgttcgtatcgtcttaacagtaacagcatgtaagatggtaaaacgaactcgtcgtgtgcctggctctgtcagcgtgccagcgcctctgcaatgcaatgccctgcccctgcgcggagctgcagggtcttgtacggagctggcgccggactgacgaccatgatgggcgccggcgggctgtacccctacgcggagtacctgcagcacacggagtgcagcccgctggcggcggcgccctactacgccgggtgtgggcagacgagcgccatgtaccagccgctccggcaacagtgctggcagcagaaaaccaggatgatcggcgtgcagtccgtctcgcaactaatgcatatgatgatccagcttgagcgtgccgctgccgccagcagaagcctgtacaagccagctatgatgcagcagaaggagtagctgctgataatccagagtctcaaccccatggccatgatgatggcgcagaacatgccggccatgggtggactctaccagtaccagtaccagctgcccagctagccgaccaacctctggggcgtctacgctgtcattgcgggctactactgcatcatgacatatgagaaatct

SEQ ID NO: 5635 - DNA, 586 bp, Zea mays
  Clone ID: LIB3061-111-Q1-N6-F11
cacgcctgcagtgtaccgggcacggctaatacacggccgacccacgcgttcggtttatgctgccaaactccctgataccggatggactaacgacggagcccacagcgagtaagagccgcgagctcacaagcagtcatgaggaacatgaccggacgcagctcctcgttgtttaccaacatgggacctagctgcgagaagcgacaccacataactaccggggtagtcgctcatgactgatgctgccaggccggcgggctcattgctaatgaaccgactcacagtgagcacaacctggtggagtgcgctctactgtacctgacacataatctcaagataaccagaatcctggataccatgcaggaaagcaaacacaatctgaacagtgcacaaacaattactttccttggtctcgaatgcctatagctacgaaactaatatgaggcccactatggacactgtatttgctatcctacaagagctccaggactctgaatatagccgagcagaagcttgaagaacacaagagcccaaccaaacaggaacctgctgaccgtgagtgctagcattagcagaaggcgcaagcctc

SEQ ID NO: 5636 - DNA, 650 bp, Zea mays
  Clone ID: LIB3061-111-Q1-N6-F12
cacgcctgcatgtaccgggcagctaatacacggtcgacccagtcgttcggtcagcctatcaattagctcattcgattccatattggagaactcgacaccatgtaaggtgctgtatcgttgcccttgctctcctggcgctcgctgcgagcgccgtctccagtacaagcggcggctgtggctgccagacaccaccgtttcatgtaccggctccgttctatatgccgcctccgttctatctgccgacgcagcagcagccgcagccatggcaataccccactcaaccaccgcagctaagcccgtgccagcagttcggatcctgcggcgtcggcagcgtttgcaggccgttcctgggccagtgcgtagagttcctgaggcaccagtgcagcccggcggcgacaccctacggctcgtcacagtgccaggcgctgcatcagcagtgctgccaccagatcaggcaggtggagcccctgcaccggtaccaggcgacatacagtgtggtcctgcagtccttcctgcagcagcagtcgtagggcgagctctcggcgctgatggcggcccaggtagcgcagcagctgacggcgatgtgcggactgcagctgcagcagtcaggtacctgcccttgcaacgcagctgccggcggtgtatactac

SEQ ID NO: 5637 - DNA, 299 bp, Zea mays
  Clone ID: LIB3061-111-Q1-N6-F2
tttgagcttcttgccctttgtgcaagcgcaacaaaagcctaaaatatgccacaacgctcactggctgctaccaccattatgccacagttactacatacaactagttgaatgggctgaaaacacccagctgtgcaaacgtacaggctacaagaagcgctcccgatgagcgtttaacaaacaccagttgcccaagtacaacaacaatccttgtctcatctaaccatacaaaccaattgaaacgcgatcatgaacaacaatttctaccagcactaaaccaaacatgtgcagtgaaccctgaa

SEQ ID NO: 5638 - DNA, 350 bp, Zea mays
  Clone ID: LIB3061-111-Q1-N6-F4
atcttttccctggcgcgcttagaccgggtgaaaaaacatgacaggcctgatcgtagttgtacagcaagaacactcgcctgcagtgagctggtaaacctgctgatcgttgccggacaccacggaaaggagtccaaggacagtgcaggaccgggcttgttttaattatattttcagcctactaatcgagtgcaagttgaacgctcatttccagggtatcttgcttcaggtgaaccgaacatctaactgtgagcgtggccgttacatttgtgatacgaagggaccatctttgcaaactgggcactaccagagcagggtgactagcttttatcgattccattaccagcggtact

SEQ ID NO: 5639 - DNA, 652 bp, Zea mays
  Clone ID: LIB3061-111-Q1-N6-F5
cgcctgcatgtaccgggccgctattacacggtcgacccagtcgttcggtggcaccacaagatgaaatggagctttcacggtgtgaaccagttgttataaccgattattgaagtccttaaaggaaatgcaaacatttcaaaatgcgttcttttctaacaagggttggtttggaatgcactgatcttgaggcgatattggtcaaggatcgcgttcttacaaatgagtgtattgataaaataattggttttgctttgagccatcaacttaagaactgtacaaatccagacccccctttgagtaatgtgcagtttgttctatccagcgaaagccttaagcatggtattgacatgttggaaagtatccagtctggctcgaagagcagcactaaaaggaaatcactgaaggatattgctacggaaaatgagtttgaaaagaggcttcttgcagatgttatccctccacatgaaatcggtgttacctttgaggacattggagctttagaaagtgtcaaagatactctgaaggagttagtgatgcttcctttgcaaagacctgaactttttaaccgaggacaacttatgaagccgtgtaaaggaattttactttttggcccacctggtactggaaagacaatgcttgctaaggctgtggc

SEQ ID NO: 5640 - DNA, 504 bp, Zea mays
  Clone ID: LIB3061-111-Q1-N6-F7
attagggaagaattatagaaagttgaggcaccaattggcatgcaggattcttgctcctaagatgaggtaaagctaattaggtataaaccatatttgcacctccatatatataaatctaaagcgcatagatgtggcaacaacgtcggaatataaacatatatttggacagaaaacgcaggactttccaaaaaagcatgatcagtgcgagctaactctggagatgccgacgctctgaccataggagacacactggagcatcgacggcgacgtggaaggacatgaagtaacctaccaactggtgacaccgaaaacccaggcggcccgccgtcacgaagagataacggtcctgactgtgccaacattttgtgacagtgggcattgcccggagccgctcgttattctaagaaagggcatcacggcggcctgctagtacgtgacgggatctggcagcgcagggaacggacggacacacggcaagagcatgcaccacatctacgcgaacat

SEQ ID NO: 5641 - DNA, 544 bp, Zea mays
  Clone ID: LIB3061-111-Q1-N6-F8
cacgcctgcgtgaaccgggcccgctattacacggtcgacctactcgttcgtcctactcttacaacatttattcctttaaccaatggccgactgaacccctctgcttattctcagcagcaaatactactaccatttggccagctagctacaacaagccccgctttcttcttgacacaacaacaagtgcttccgttctaccagcagtttgtggctaaccccgcaaccctcttacaactgcaacagttgctgccctttgtacaacttgctttgacaaacccagcagccttctaccaacaacacatcattggcggtgccctcttttagattgcttattagttgtaattcaataatgaagttttttggctgatgtatgtggcctcctagaaataagaagttatatttcctaaaaaaaaaaaagggggttttttttttttccccccccaaaggaaaaaatttttttttttggggaaaaaaaaaagggggggggggggccccccccgtaaaattaagaaaaaaaattttttaaaaaaaaaagggggggggg

SEQ ID NO: 5642 - DNA, 481 bp, Zea mays
  Clone ID: LIB3061-111-Q1-N6-F9
cacgcctgcgtgtaccgggctcctaattacacggccgacctactctttcttatcttagtaacatgtactgcctatatttgtgccacccctggcactcaaacataaagctttatttatgctctttgacttatatgcaagtgaagataccgcaccacacaatgacgcattgctgacagaacactgtagatttcgttataacaagatacctgtaacggaaggaattgttgaatgtgtgaaaaggcaccagctgatagccttcagggtgccaagcagaacggcacacaatgcatttgaccaaataagcattggggctcacataacctagatgcctataacagaagataccttggtgccattaataagcacaaaacatcaatgctcataaactacagaatggaagaaattgctaccttgctgcatactctaactagcataatggtaattgcatgcaaccaactagctgcatagaactctcatgctt

SEQ ID NO: 5643 - DNA, 375 bp, Zea mays
  Clone ID: LIB3061-111-Q1-N6-G1
tccaaacgtgtagcaatgtgaaagtcaaagagaaggccgtcgtggagcgcacagcactacaagtccaggataaggctggttaacctagacaaaaccaagaccaacacacccaaatacagattacaggtgcgatttaccaacaaggacataactgtgcaaattatatctgataatatacagtgtgatatggctaaagcttatgcctactcttatgagttgccacgatatgcacttgaagatgggctgaccaactatccatctatctactggactggacttttgttatatcgccgcgtgctaaagatccgccttttatattacgagtatgagggcattgttgacgtcactgccgaggactcatctggggagccagct

SEQ ID NO: 5644 - DNA, 365 bp, Zea mays
  Clone ID: LIB3061-111-Q1-N6-G10
ttattgaactgttgctcctgagaacattaaaacgggcgctccaagctgggttgctggcctaactccgccgggcctgtcaaaacaagtgggttgagtgggagcaaaacccagcacttgaaacatggaggcaccaacaggcgcacacagctggcataacacctacaacacccgttgtattacaacagtaataaggctcaaaccatctagctacctgaatggcatttattggtgctgctctcaatgaacagcaacttcaacaacttgcgctagctaaacttgataaatactttgaggtacacaagatgcttccatctaaacaactagctgcgttgaaccctacttcatatttgctacaaccacaacta

(The sequence listing continues in the following parts.)

1. A substantially purified nucleic acid molecule that encodes a maize protein or fragment thereof comprising the nucleic acid sequence of SEQ ID NO: 10197 or the complement thereof.

2. A substantially purified maize protein or fragment thereof, wherein said maize protein is encoded by a nucleic acid molecule that comprises a nucleic acid sequence selected from the group consisting of SEQ ID NO: 1 through SEQ ID NO: 13524.

3. A transformed plant having a nucleic acid molecule which comprises:
(a) an exogenous promoter region which functions in a plant cell to cause the production of a mRNA molecule;
(b) a structural nucleic acid molecule comprising a nucleic acid sequence selected from the group consisting of SEQ ID NO: 1 through SEQ ID NO: 13524 or complements thereof;
(c) a 3′ non-translated sequence that functions in said plant cell to cause termination of transcription and addition of polyadenylated ribonucleotides to a 3′ end of said mRNA molecule.

4. The transformed plant according to claim 3, wherein said structural nucleic acid molecule is a complement of any of the nucleic acid sequences of SEQ ID NO: 1 through SEQ ID NO: 13524.

5. The transformed plant according to claim 4, wherein said plant is maize, soybean, cotton or wheat.

6. The transformed plant according to claim 4, wherein said plant is maize.

7. The transformed plant according to claim 4, wherein said plant is soybean.

8. A substantially purified nucleic acid molecule comprising a nucleic acid sequence wherein said nucleic acid sequence:
(a) hybridizes under high-stringency conditions to the nucleic acid sequence SEQ ID NO: 10197 or the complement thereof, or
(b) shares a 90% or greater identity to the nucleic acid sequence of SEQ ID NO: 10197 or the complement thereof.

9. The substantially purified nucleic acid molecule of claim 8, wherein said nucleic acid molecule encodes a maize protein or fragment thereof.

10. A substantially purified nucleic acid molecule comprising a nucleic acid sequence that shares between 100% and 90% sequence identity with the nucleic acid sequence of SEQ ID NO: 10197 or the complement thereof.

11. The substantially purified nucleic acid molecule of claim 10, wherein said nucleic acid sequence shares between 100% and 95% sequence identity with the nucleic acid sequence of SEQ ID NO: 10197 or the complement thereof.

12. The substantially purified nucleic acid molecule of claim 11, wherein said nucleic acid sequence shares between 100% and 98% sequence identity with the nucleic acid sequence of SEQ ID NO: 10197 or the complement thereof.

13. The substantially purified nucleic acid molecule of claim 12, wherein said nucleic acid sequence shares between 100% and 99% sequence identity with the nucleic acid sequence of SEQ ID NO: 10197 or the complement thereof.

14. The substantially purified nucleic acid molecule of claim 13, wherein said nucleic acid sequence shares 100% sequence identity with the nucleic acid sequence of SEQ ID NO: 10197 or the complement thereof.
